United States Patent Application Publication US 2012/0017292 A1 - sequence listing, part 16

SEQ ID NO: 73678 - protein, 122 aa, Zea mays
  Coding DNA Sequence Number=SeqID_30303
MSSVAREWARPSPLLLVLLSCRSSIPLDRPTQWQGGGRPKSGEDDLGCPVKFCRVRELGKLHKLLAKLTERLARLGSVRSGLATVAEARVAMAGRKELARAKEGRLAGEGFELGIKVNTLGL

SEQ ID NO: 73679 - protein, 229 aa, Zea mays
  Coding DNA Sequence Number=SeqID_30304
  Gene Ontology: Mol. function=carboxyl- or carbamoyltransferase activity; Cellular component=ornithine carbamoyltransferase complex; Biological process=amino acid metabolic process
  Homolog annotation: Hit_ID=Q8SA97; Match level="QueryCoverage=48%, HitCoverage=20%, E-value=1e-24, Identity=57%"; Hit description =Ornithine carbamoyltransferase
MALPVDVAGLRPRLGDVEAPPKPRSSLSSMAKAESELLGRARRRSSTEARVESEPWGRAKRSSSSSGAEPESEPWVGQSGVRRLLGLSPSPSPGSGGAEFAVFRDLAQVRALGRAERSSSSSGAEPESEPWVGRSGVRRLPGLSPSPSPGSGGAEFAVFWDLARVRTLGRAKRSFLWCLWQGLTACQSHSVKWHCSRSGASGAVLLSGRSVERRSDGGHFGSAGGRASG

SEQ ID NO: 73680 - protein, 39 aa, Zea mays
  Coding DNA Sequence Number=SeqID_30305
MRACGQIRAVPRQSLRDRGAQKDEDKADTPVPVASQGGI

SEQ ID NO: 73681 - protein, 96 aa, Zea mays
  Coding DNA Sequence Number=SeqID_30306
MVEGFTPAWAAVPDPTEAGDNASPNGLALDNGSMLCLRLALGLLDCSSWLLGRGGEVPADSASRTDFLLSDCSGDSTADAGGTASETVVEAGTDSA

SEQ ID NO: 73682 - protein, 234 aa, Zea mays
  Coding DNA Sequence Number=SeqID_30307
MGSVYAACPVEGGLPLGKECGDHEDDGFDYDYGNVFCYSFRLERMARLRHTAWKSVIPFLPSRLAEHPLRRLEVESMRSCSPVPPLEAPPAPPLGVPAAGVAVGGDPDDGAQSWGLPGPLGSDLFGAPFGEQSRGADVCSEHYSISEQDSAEAAMQDAARRALSHYCSVLGGVVDGLDLRYYPRHPSGSTGGVVVSPISEDNPRLSSIVNLAVVLNTELDHALDELSRAHAEIA

SEQ ID NO: 73683 - protein, 111 aa, Zea mays
  Coding DNA Sequence Number=SeqID_30308
MTRLTWLGYKQQATYGQTTNFVAGEAAELGDGGGGAPWGRRGGRAPWDGGRVGAEGDAGHGRGRGGSSGHGDEERERNADLSSGAREQAAAEEAYAWGIRQRTAAEKKING

SEQ ID NO: 73684 - protein, 216 aa, Zea mays
  Coding DNA Sequence Number=SeqID_30309
MGRRETEREGGKPEGDRRKGETRGLRVCPAPRSGEAESVVFRGRGRVRALGSGEAEFVVFRGRARVRALGSGEAEFVVFRGRARVRALGSGEAKFVIFRGRARVRALGSGEAELPMAPAVGRGGASYGARGRTWPLSASLCRVAQQSERRGRCCLLVRLATFALNAPAIRSVGVAIWSRLLLGEDWASGEPKLCADGGYQLRLGVLGVPLIMVPDT

SEQ ID NO: 73685 - protein, 384 aa, Zea mays
  Coding DNA Sequence Number=SeqID_30310
MEPFQGVSCPRPLAGPSLLRVLLLLPLLRGDPPRSSVHCVLRDRWRERLVSPYLLETDEESRLWERAPASGFPNVTATRLWRSSTERGSEDIRKPSKSTPGVISQSGSRLLRQREHPPAMNGGNHPRGGEPSFPQLRQGLQKGLEILLSIARGPVASVIGGGGHHSLRKRREPPVVISEIEPPTLPPFVRIREDGRNVLQCPRLPQLEDAATGPHRHADPSFPHRRGKKLRGEEMGPQVPVRVNPQVSFTNRRKDGGLRDGVGTEVVQLHPVDMQNRPHKTACRHSEPPLVKGDEAHDIPPRRGRGGSARRGHPLRLRVTGERAKQTISNKGLQVIRRDGGERPRIARRNNGHPVGHHQAEEVAVEGTGCTVSFLWLFPRVAKT

SEQ ID NO: 73686 - protein, 31 aa, Zea mays
  Coding DNA Sequence Number=SeqID_30311
MAARMKLLGLEIELAGDEKLVEAETCAPLMT

SEQ ID NO: 73687 - protein, 228 aa, Zea mays
  Coding DNA Sequence Number=SeqID_30312
MTSHGSSDEGNAQSHTDGLAREGFPRILWEVLQGAGYTTPPQYAVQLFEKHRVPRCRVRMTLEPLPLQPGWRLLDSESFGYRVEDTIEAIALHGLTTFYGFTPWSYPLTPLATKITLDNREELVVDLSTEMVEKDLQVEQMSNEIQELEELVGTRENTIEVLEDQLINTQQQLAEANQHLDMHHQEIQDMEANEDVDIEGGEEPASSLDTAGSGRPPSPESSVASFAH

SEQ ID NO: 73688 - protein, 101 aa, Zea mays
  Coding DNA Sequence Number=SeqID_30313
MYILVLEQGVAQEVAPDPAPEPAIEDLPAPALEGKPRRLYSSRDLRRGLPFRLWWVQVRSLHDGSRGSLEDMVAGVTWPSILPPGWTVEWDPTSAEEEHEE

SEQ ID NO: 73689 - protein, 186 aa, Zea mays
  Coding DNA Sequence Number=SeqID_30314
MGPLYLYHWAGESDVVDTVVVVLFLPLGVEVYAGSPSDQVNDPAIRLLGEAFLLGCWRWGFDVEDLGDVVVVGGGLVPLDGNGTRGWVGDGFARCVVLLRGVLVTANCVSGGMLVGNGVHLLLVAIVPAGVGLRQPDPRSAGLQSVLGFPLRFYLALVQLLGPGIFFEQLVELLQVFGRVSDAMVV

SEQ ID NO: 73690 - protein, 140 aa, Zea mays
  Coding DNA Sequence Number=SeqID_30315
  Homolog annotation: Hit_ID=A2YTB3; Match level="QueryCoverage=61%, HitCoverage=46%, E-value=5e-38, Identity=89%"; Hit description =Putative uncharacterized protein
MAQSVVFFAADLDLASREGPRRVKVTAEACSFVVQDHPLDANHGHSLRVIGVSDKSIGLFLRYAFTSRYKEVLSKSHSSSMMTVPKFVPRLTKEETRVFESARESMAGFKKWRVGGVRLQKASILGRKRKTKLPDGPPTS

SEQ ID NO: 73691 - protein, 98 aa, Zea mays
  Coding DNA Sequence Number=SeqID_30316
MPQWLNYVNDKDKVRFAGSETTLESSQGVITSAEGFCRSTSYIIRLRQLGRSSYTTVVEPPKLYGRHAHVFIPKTSNDYACVPDNLKEYVSSIPRELG

SEQ ID NO: 73692 - protein, 132 aa, Zea mays
  Coding DNA Sequence Number=SeqID_30317
MVVGPFPASHRPAPAQNKISPYALEVWTTGSSLLPLAHDIPNQYLASVAKLLGKILAAPSAMATVSIAILWLSLRAASSVQEHHDHLQCCGQHDHCRIAPGVADIFNHQCLAQVCLLRNAQIPNCRFANSNL

SEQ ID NO: 73693 - protein, 60 aa, Zea mays
  Coding DNA Sequence Number=SeqID_30318
MASDTSANSDLFHHILNELQAPPLIGVGDGLDLMLPFHWYPKDLKLFTSLHFHSALDAYD

SEQ ID NO: 73694 - protein, 196 aa, Zea mays
  Coding DNA Sequence Number=SeqID_30319
MGAILGKPTMLVGSGQEDRSRGVHAEGGGAMSSSQIVVLTLLMLLEFWSARCSSSCSASSSSRRASSESSVGLIIRITQTGSSKKQIQNGSSIFARSSVHLGHPKQGPGFRTCRSADGKSHSPLLTRMEHAYPNESSEFPLAHLCITMVVNSTAALYSGRLLSSHDFMAYVQTGSGKPMTFYFPITGIVASQKFKS

SEQ ID NO: 73695 - protein, 186 aa, Zea mays
  Coding DNA Sequence Number=SeqID_30320
  Gene Ontology: Mol. function=Rab GTPase activator activity; Cellular component=intracellular; Biological process=regulation of Rab GTPase activity
  Homolog annotation: Hit_ID=A2ZZB6; Match level="QueryCoverage=41%, HitCoverage=8%, E-value=7e-22, Identity=69%"; Hit description =Putative uncharacterized protein
MEQRAKGLRVWRGTNRLASRLYNLKRDTKPLVSLSEDQSNDLTDGDKNQEANCSNVDDMYHGLTVNSEIDSLPDPKDQKRQRIEAIFHEYAYSDNLVVLEDVPTEGYFAHEQETELIGPEVEIPESCFRALNKPNGMTSDFVQNKTNLKAQTSGWDVLYDKFEKLNGDCLLDKPNGMQSSNDLAHT

SEQ ID NO: 73696 - protein, 195 aa, Zea mays
  Coding DNA Sequence Number=SeqID_30321
MEMGSIEAGARTAVGSHRQAGGSVVPEHTCSDNTHVHAYADPTQTNETNIKSKSLPIIFDLLIFYFIGFALFWLEAFLSMWVIQVLEGGAVVRTLRDHSIPSNGDINESKVSYLLLLYFLLVQPENEKPITESGDEISYEGAKAKSPIYLLSGLRRRSTIVMRNLTYSEPKADELAASEMAVAYSSSNWVLLVEG

SEQ ID NO: 73697 - protein, 444 aa, Zea mays
  Coding DNA Sequence Number=SeqID_30322
  Gene Ontology: Mol. function=catalytic activity; Cellular component =membrane
  Homolog annotation: Hit_ID=Q75HI8; Match level="QueryCoverage=39%, HitCoverage=42%, E-value=4e-73, Identity=76%"; Hit description =Putative phosphatase
  Pfam annotation: Domain name=PAP2; Domain location=163-261; Score= -10.7; E_value=0.036; Accession=PF01569.12; Description=PAP2 superfamily
MGGIDTVIVGDAEIAAGEAELAAGDTEIAAGEGERRDCRGEGQRARRTGCGAAERLRMYTWFLLCFPSQSRHFGLTRWQAAALAALAGWVWAASFYDLTRRARALVQPWVTRQVHAETPTILRFQKLEHKMLDNFFSVLSCVVSVPFYTGFLPLLFWSGHGRLAGQMTLLMAFCDYLSNSVKDMVSAPRPCSSPIRRVTATEDERENAMEYGLPSSHALNTVCLTGYLLHYVLTYGEHGSLIVAAGLSLALYSKFASCPAKQSKDVVKALKKRIGHKNPKVQLLALTYLVADPKIKEDGWTAHPHPCKRVAPYREALLLAEKHQNLETNSDMSAAVVADAPPQQEMVAANRMGQPQFFSLLNHLVVDEHKTILEEVPREENGTISAANYAGNGSINDDDATLYQGGDVLPNRSASIFENDLASTGKAMQQLLRVLGFQIGTTRT

SEQ ID NO: 73698 - protein, 231 aa, Zea mays
  Coding DNA Sequence Number=SeqID_30323
  Gene Ontology: Mol. function=protein binding; Cellular component =mitochondrion
  Homolog annotation: Hit_ID=Q5Z5X5; Match level="QueryCoverage=93%, HitCoverage=91%, E-value=6e-87, Identity=84%"; Hit description =Putative uncharacterized protein P0712G01.15
  Pfam annotation: Domain name=DUF1640; Domain location=16-230; Score =340.6; E_value=2.7e-99; Accession=PF07798.2; Description=Protein of unknown function (DUF1640)
  Subcellular localization annotation: CTP_CleavageSite=42; ConfidenceScore=5.02e-01
MAAAVACRRAALLHGHQQWPQRWAAAPCPRSISQLVKTNGRRAFLVDTLALVRKLESQGVPTKQAEAITSAITEVLNDSLESISESFVSKAEMQKASASPLALRGCEMLQESNISKFKSQVQSSQENHFSLLQRETEKLRGDIDKMRSELKYEIDKVTAGQRLDLNLERGRIRDELAKQNEETTELTTKLDKEIHSLKAQLEAAKYDVIKYCIGTIVSISAVGLAVLRIVM

SEQ ID NO: 73699 - protein, 289 aa, Zea mays
  Coding DNA Sequence Number=SeqID_30324
  Gene Ontology: Mol. function=zinc ion binding; Cellular component =intracellular; Biological process=regulation of transcription
  Homolog annotation: Hit_ID=A2YGY0; Match level="QueryCoverage=100%, HitCoverage=100%, E-value=2e-43, Identity=38%"; Hit description =Putative uncharacterized protein
  Pfam annotation: Domain name=zf-B_box; Domain location=1-41; Score =12.5; E_value=0.0062; Accession=PF00643.15; Description=B-box zinc finger
  Pfam annotation: Domain name=zf-B_box; Domain location=55-102; Score =56.5; E_value=9.2e-14; Accession=PF00643.15; Description=B-box zinc finger
  Pfam module annotation: Pfam domain module=zf-B_box::zf-B_box; Domain location=1-41::55-102
MQVLCDVCGGAPAAVLFCTDEAALCSACDRRVHRADKRRRIPLVQPCGDDSAAAAAAPLCDVCKERRGLVFCVEDRAILCPDCDDPIHSANDLTAKHTRFLLVGAKLSAALVDQAPPSPDDDDDDVAEPDAVPAACAAKASSLESGGGSSISDYLTNICPGWRVDDLLLDDSSFSAPSVRARPRIALTDRSLGGSRKQKTGYSDGHDQVPSVDADLFDVVASGRPGKRVGGAALGFDKAPASVVVVPTQGCVTERTWNSDSDVFAVPELPQPPPAKKARPAPAPTFWCF

SEQ ID NO: 73700 - protein, 333 aa, Zea mays
  Coding DNA Sequence Number=SeqID_30325
  Gene Ontology: Mol. function=sequence-specific DNA binding; Cellular component=nucleus; Biological process=regulation of transcription, DNA-dependent
  Homolog annotation: Hit_ID=Q717U4; Match level="QueryCoverage=26%, HitCoverage=25%, E-value=6e-13, Identity=52%"; Hit description =Knotted 7
  Pfam annotation: Domain name=KNOX1; Domain location=237-281; Score =53.0; E_value=1e-12; Accession=PF03790.4; Description=KNOX1 domain
  Subcellular localization annotation: CTP_CleavageSite=18; ConfidenceScore=5.04e-01
MAPMAGKSGEVVDAATAVAATGAVRRKRSAWAWGCAQSERRREENVGTMVEMTEAVAREKMDTADGWRDIRRRERKLFVGERARRVYGDWLIAEDGIRRKASTTRGSAFALAIPCPRTRFRQSRSAHTPFAPDPDPATIIGASSPARPKPGSRGSPVKLPSLPRSPSLLTFLPSPSLLGAHTRPPPPTSYRPTPPLPWCEQASAANPVGCSRTRENARAAVASLPNPSSFSPGVGGEREKATIAAHPLYEPLLEAHVPCLRVATPVDQLPRIDTQIAACPPPLATAAGAATAGGPSGGEELDLFMGVGNWGFGIQGRFGLLGLGDVYLESLWL

SEQ ID NO: 73701 - protein, 68 aa, Zea mays
  Coding DNA Sequence Number=SeqID_30326
MAPPRVGRAAVPNVRGLGGIHIFTVYFIYMFGVMLILAILYHYVNGNMERPPGKTVLPQGYNGTPLAD

SEQ ID NO: 73702 - protein, 275 aa, Zea mays
  Coding DNA Sequence Number=SeqID_30327
  Subcellular localization annotation: CTP_CleavageSite=28; ConfidenceScore=5.47e-01
MGARLRMSYKLARSAKKPMVKKANRRPRSMQPSCGYFPSIFTELVVKEANRRARSMHSPRGCVPPQLRCNQRSNLWHGGPGPHVIHPARRFLGAGKSHRRSRQYRAFSRPSQKAKEINLQNRCSDSRHPAHGPTKTLSTEVTGQSAAGAGMAVSMTIGGPRRHRQAQKAQDPYAHNPDPRSKAARSHWIGLYPERLRSPLSRRSNAASWLIVRDVGQRAERDIRALSRAASTFIAEGTRRLSTLLIGDVPPQHLLRPVHSAGRRRQGHPADGAPV

SEQ ID NO: 73703 - protein, 148 aa, Zea mays
  Coding DNA Sequence Number=SeqID_30328
MAASMRAPFRRGPRPRPPMGGNNEAIKAKELEARRQVVLVVSPAEATTSAVGSLTSGGDHLSTNDSGHLHAGGLPTMAAAPTAHEEVLAPALLRKEEAGHQAMRKAGPQLGSPSTPARMMNILEAEGRGEAAAWLASLHHETGAHPCR

SEQ ID NO: 73704 - protein, 69 aa, Zea mays
  Coding DNA Sequence Number=SeqID_30329
MGDPSRGLGEEVSEVGVVLHQLRRWDYDDEHCSMCSGLSRSPDYNIEELWTQPTSVLFTMTHSLPYRKH

SEQ ID NO: 73705 - protein, 920 aa, Zea mays
  Coding DNA Sequence Number=SeqID_30330
  Homolog annotation: Hit_ID=Q4YPL9; Match level="QueryCoverage=48%, HitCoverage=56%, E-value=3e-09, Identity=21%"; Hit description =Antigen 332, putative
  Subcellular localization annotation: CTP_CleavageSite=49; ConfidenceScore=5.57e-01
MQPRSRIRGRDPPPPPPPGGRYRRRSPPPPSPRHQRRPRDPPPPQRKRRSSELPPPRRYEEDPLLNGFAPAAERRSRGDILLEAGRLAAHYLVAKGLLSEHLLLAREDPNHNPIYRPEPPAPAPAPPPTLAPSSYGRKRDEDDGPRWRRSGSGAEDQGRGSRWDDDREAKRSGWDRRSHSFDGRRKCNDDGGGDADRSGRRTRDYDESKRPPMSRSYSHNDRWASADARVDRRRRSRSRTRSYYSGSRRDPDLLAGTRDLDRTKVPDSGIVPAAGGDGGVHDADADGTRKQLKVPSSMLVSEMNDSAVEAAPIEEDHAQDMSEGEDGEFAEEISEDEDGEFAASDLNDEDGDEMDDTQRQPSHMHVHASESIEEPVHRQSQLSNAEEGMETGIAHVDAYMVEPLAENNVFSETRYEMEAPQNGAETAVVDLYRDAEEQPLTENNDCSEAENEMNKSEFETGVGNLDRDEQEQLLAENNNGSEVRYDMEAPQSEVETGVGSLNRDDQEQLLTVTDGYSELRYETGTPQTEVETVIDDISRDEQELPAWYKIFDLNVIETPLGCEVSEISCGHPADGLCDSVPDSVGLVNQEANNDTSEIQGQDGHAGANQVLEDESDLNSYDLNNEADEDAQDDTLENQVQDENVEDNHLLEDGHDLTRYDVNNEAGEHAHDNHLVKNAEILLNHIMVACISDNCHMNNEKMLLKQNVDEQQMENEQMLIDQVTSVQVLDSHHVHDEQLLVGHAADDHHQMEPNPMAFSLGVHDLDNYYLSSKQILLYNDAGGIHHLKDGQIILDEAADGQARVHNMGHGRTIPGIDLEDDYAQVSAIRNTGECLESAFEGERKIHDTWTCLLYCTEVIPRTNTRIMFYKNICVLKTSKPQVLVTILRLTHKQLLLQLSPDFQNWCTGNDAVKAQVIPISQ

SEQ ID NO: 73706 - protein, 285 aa, Zea mays
  Coding DNA Sequence Number=SeqID_30331
  Gene Ontology: Mol. function=metal ion binding; Cellular component =Golgi apparatus
  Homolog annotation: Hit_ID=A2YGX8; Match level="QueryCoverage=99%, HitCoverage=30%, E-value=1e-143, Identity=81%"; Hit description =Putative uncharacterized protein
  Pfam annotation: Domain name=DUF248; Domain location=1-273; Score =184.8; E_value=2.2e-52; Accession=PF03141.7; Description=Putative methyltransferase
MTSLTKSMCWELASIKKDRLNGVGVAFYRKPTSNECYESRRRQQPPMCADDDDADAAWYVRLNPCVHRVPTAPSERGARWPSEWPRRVRLPPYWLNGSQAGVYGRPAPEDFAVDYDHWRRVVDGSYLNGLGIDWSRVRNVMDMRAAYGGFAAALWEKKIWVMNVVNVDAPDTLPVIFERGLLGIYHDWCESFSTYPRSYDLLHADHLFSKIKDRCAVLPVVVEVDRIVRPGGSIVVRDEAGAVGEVEKLLRSLHWDVRLTFSKNDEGVMYAEKSGWRPELVEEPS

SEQ ID NO: 73707 - protein, 619 aa, Zea mays
  Coding DNA Sequence Number=SeqID_30332
  Gene Ontology: Mol. function=metal ion binding; Cellular component =Golgi apparatus
  Homolog annotation: Hit_ID=A2YGX8; Match level="QueryCoverage=69%, HitCoverage=45%, E-value=1e-148, Identity=61%"; Hit description =Putative uncharacterized protein
  Pfam annotation: Domain name=DUF248; Domain location=370-619; Score =190.7; E_value=3.7e-54; Accession=PF03141.7; Description=Putative methyltransferase
  Pfam annotation: Domain name=Methyltransf_11; Domain location=505 -600; Score=38.3; E_value=2.8e-08; Accession=PF08241.3; Description =Methyltransferase domain
  Pfam module annotation: Pfam domain module=DUF248::Methyltransf_11; Domain location=370-619::505-600
  Subcellular localization annotation: CTP_CleavageSite=76; ConfidenceScore=5.39e-01
MAGAGAGARSSRAGGGKRGAASSSAAAASACVYYATTALLVALCVAGAYFLTSTSSADGGRRNGHRVPPHYTLLFRAVGAEEEPRPDRSAGAALGDPHARPDEERVSDEAAAGVEEEHEAAAVAMEDVKAEDGGGHVAAGDDEAASARGGEVEEEKERETAVLEESSREQREQEQEQEPQLEMPHERPRGAAAAVEEKNLDGGIEEESNAGQRQREAEQSALEEQQAAAGSQLRREAQEDPQADDGADEGTEEERGREQSQGEEEARSSSVSGSSGDADSGEAVSESEHTGTGRADGNASQDDGRSVEVEDSLAAEGRTEEQKAWATQADESHRETDRRDEGGDIDGNGAENAGGEEREWRVCNVKAGADYIPCLDNEKAIKKLRPENFRRYEHRERHCPDEGPTCLVALPSGYRRPIEWPKSRDRVWYSNVPHTKLVEVKGHQNWVKVSGQYLTFPGGGTQFIHGALHYIDFLQQCRDGKEGYSALFGQSVRAISWGKHTRVVLDVGCGVASFGGYLFERDVATMSFAPKDEHEAQVQMALERGIPAISAVMGSKRLPFPSKSFDLVHCARCRVPWHTDGGALLLELNRVLRPGGFFVWSATPVYQKLTEDVEIWKGT

SEQ ID NO: 73708 - protein, 82 aa, Zea mays
  Coding DNA Sequence Number=SeqID_30333
  Subcellular localization annotation: CTP_CleavageSite=69; ConfidenceScore=5.67e-01
MMTVSKKGALPRPPPSLSLDLSLGLGRRSPPRSTSGHSLGLGLGRRSLPCPTPGLGLGRSLRLARPGPRTDYATGDASLPYS

SEQ ID NO: 73709 - protein, 101 aa, Zea mays
  Coding DNA Sequence Number=SeqID_30334
MAKPGHGTPPGPLLREAVTLLTIYPGGRDEGQVTPSTKIKAYNGSSSLISCEKQTIRIEFLSLKVTALVPTITGMGDHVSGRVRGKVCGQVHSGFNNHYAK

SEQ ID NO: 73710 - protein, 264 aa, Zea mays
  Coding DNA Sequence Number=SeqID_30335
MHDLLLALELLGCSGWLFGHEGELPGYSDAHTDFLPAGCSDRTAVAVEETVSGTAAGADANDGAGDLEGDLARIAGSFRHMVMTKVVPELLPGDGFRVYMGGEGISAMGTHMQETTLGARRRPEPDFCQDSHACDLGELLNKGRRTLPRVRRALSAPEHAQRPTPRAPRCAEPRPCLLLAPVPIKPTEASTVLPRVLSTSPEPEITGVCPANGVPAATQSPATVDRPAEPFPATPDPRKRPCMPRLYVIPWSSSCRLIGLDCRG

SEQ ID NO: 73711 - protein, 145 aa, Zea mays
  Coding DNA Sequence Number=SeqID_30336
MSTSILNSAPQDHIQSAHQIFSGDSPVRNPGRIVDATIQISRELEHRRQGQEQEQHDSSPSLSRSGVWEAAFPFTSTRDAPTHHKAPQLLEEYPDKNDNEPGGSSAQMELLEEHEQRMIPDHTLNRRVRHEALNCARLTDIWPED

SEQ ID NO: 73712 - protein, 197 aa, Zea mays
  Coding DNA Sequence Number=SeqID_30337
MAITSGQELGEEVETRKPEGPSAPVHDDVLTEALLEVDAKGCDCAQAAVCIFDEDKEEEEEEVPLIHKNSRHYRETTDDDIPAVCSEVPEGGLSLLDSAGQEVPPPFETVTAEVNRAVRLTSGEGGLAKGGAGGLIGGMCSGLLTAVEFNPRAQGASWGAKESTRARNRRRTHRGARSTYAGGRVKSGDVDPVSPAR

SEQ ID NO: 73713 - protein, 181 aa, Zea mays
  Coding DNA Sequence Number=SeqID_30338
  Gene Ontology: Mol. function=RNA-directed DNA polymerase activity; Biological process=RNA-dependent DNA replication
  Homolog annotation: Hit_ID=Q7XBD9; Match level="QueryCoverage=31%, HitCoverage=3%, E-value=4e-09, Identity=52%"; Hit description =Putative gag-pol
MEVRQVILPTPSPSKKDKKEFITTTTPFYPDVLLIGGRLESSPISDDEPTMPGEDLPSEKLSDGGTDAGIFGDITKLGSGTQLSPYPGMKSRKRKNLDRITQPCVRRALSTPEHAPALDPTCTAPRQAKPVPTPAPIKPTEASTVRLRSLSTSPERKFTGDRPAHGVPAAARDPTTVDRPP

SEQ ID NO: 73714 - protein, 102 aa, Zea mays
  Coding DNA Sequence Number=SeqID_30339
MKAMYAAKPGVIVFKGEMSWLHVRALLGRGGSVPEALVEPSLTCATVDGVAAYGIRCGAGSRGRARVRRRNRPRATLGVGRDGDCARGPNSVSGEAEITTEG

SEQ ID NO: 73715 - protein, 119 aa, Zea mays
  Coding DNA Sequence Number=SeqID_30340
MASSQAMDRLATPIHCDMLDFPDAWRTIVKWLTLARTIPASRCPSGYGGHNDERARANPSAKIFTPLRYPIELGTNHRGGRESGRAAHWQRGSLNLGYLYSTVPSDSLFRTPDIQNCSA

SEQ ID NO: 73716 - protein, 26 aa, Zea mays
  Coding DNA Sequence Number=SeqID_30341
MEGTSAATARRRPGSVGALYAQAVPP

SEQ ID NO: 73717 - protein, 152 aa, Zea mays
  Coding DNA Sequence Number=SeqID_30342
MQYNGSSSLISCEKQTIRIEFFILARQILWGRLWCWIRGYLLSNSLLRHEDRQSSEVRRPWTGFSGEAKSDSLLRELHRGMHGLFRGSGVAGKGSAGRSTVAGDQVAVGTLFAGQTPVISGSERVEHVEVFFCPCSTARQDRKRANLGKNPV

SEQ ID NO: 73718 - protein, 54 aa, Zea mays
  Coding DNA Sequence Number=SeqID_30343
MAMMGPTSEKMYLWQNKTTRNGSGEMARVACTLHGKRIDGGVSMLSVGVNLIWS

SEQ ID NO: 73719 - protein, 34 aa, Zea mays
  Coding DNA Sequence Number=SeqID_30344
MPMTGHRSLNVAFPKGGCIDKMCAGVHILVVVLH

SEQ ID NO: 73720 - protein, 112 aa, Zea mays
  Coding DNA Sequence Number=SeqID_30345
MGRRVELLQSMDREPTELRGRGTGRALGHNNSRGVEAGRRPRRGHGAVLGHGRKTVGEGWRLVSRAPWANWRGCWLLAAGEQEDRGRRPWLASSESSDLQGGNAMGKLGLEP

SEQ ID NO: 73721 - protein, 277 aa, Zea mays
  Coding DNA Sequence Number=SeqID_30346
  Subcellular localization annotation: CTP_CleavageSite=40; ConfidenceScore=5.21e-01
MSGHSIPTHINRPHRFPGNRTGLKTLAYNAPIVPGCRRATAALVRTIASMGELVLGPVRSKICEQVHLVNKVKLNLTTGGFSGILSHLELGVAKVWSDRGKDHVSKTYQRRFSSGEVVDDVGVVTPVTSMCGSVSEMAGFGRSSRVGGGARRRREIRPNHGGIAQSSELGSFTGSQGGCRRKDLVNGSPGSPVYVRWRAAEVRQGRARCSGGEGSRLKLGKASWPLGEAVQGLGLGWGSTEEAGYDGHAWAVVAGGGACLSWRTPATTGSGGVRVHE

SEQ ID NO: 73722 - protein, 152 aa, Zea mays
  Coding DNA Sequence Number=SeqID_30347
MEETLDLVLTTFPTRVFPPSCGRVWLTLESHPLQPGWRSLDSETVGFRADYTTEAAALKALTTFCGYHPLEMMMHPLGLFPAEKRDDPMWCNRTMQSDTMSHLTDLAQTTKITLDSREDFVVDVFEIGGKRPTGGTIKPAHRNSRAAGGNPE

SEQ ID NO: 73723 - protein, 159 aa, Zea mays
  Coding DNA Sequence Number=SeqID_30348
MARLLRRGLVGGEESGLTRAQLINQMGQRASPGIKEGGRLKSGEDDLDSLVKFCRVRELGKLHELLAKLTERLARLGSDRSGLATVAEARVAMAGGRELAGAKEGRLAGEGRARANASGRSGAWHSIKHEATQREVEFKRGLTPNLEIMAMIPLRDLFH

SEQ ID NO: 73724 - protein, 26 aa, Zea mays
  Coding DNA Sequence Number=SeqID_30349
MGGGKLQPDLGKERRAPRSQEGLSDR

SEQ ID NO: 73725 - protein, 145 aa, Zea mays
  Coding DNA Sequence Number=SeqID_30350
MGGAEAPWEEASSSRTWGRSAKRQGARKGRRLGGVVQGGACRAVGGEQGAQPWRSWQQRLPRPAIQNGGGERLEQGHGRHGEEDREPMHRAMAEGVGSLELLRDGNGCAGEGRCPWEEPPAWRNGARWPWESQGNRGAAPWKGAR

SEQ ID NO: 73726 - protein, 82 aa, Zea mays
  Coding DNA Sequence Number=SeqID_30351
MKFYRVRELGKLHDLLAKLTEWLTRLGSDRSGLTTVGEARVAMVGGRELAGAKEGRLAGEGFELGIKVNTLGLWLKGSNSEI

SEQ ID NO: 73727 - protein, 72 aa, Zea mays
  Coding DNA Sequence Number=SeqID_30352
MDQIRRGRVVPTCLAAVASSCPTGKGKSTILGAIDLGAELGATSTPRQLVDDSAAGSSAPRSMAPRCVNSAP

SEQ ID NO: 73728 - protein, 123 aa, Zea mays
  Coding DNA Sequence Number=SeqID_30353
MPSQLASGPWRAGRRSATNCIMMGSGTNMYKLDTTHLPGWPTQMLSALVNASAVFKNHKDVYLLAILLENTLKDVAGEYTRREARELLRTDGRASCGSGLGTERLRSINFLEWDGSGSEENIP

SEQ ID NO: 73729 - protein, 170 aa, Zea mays
  Coding DNA Sequence Number=SeqID_30354
MELRSSNEEAERRRIPPIRGLGRWEDTTLKGERRHGCLTKGVSLLLKGNSPYVRPQTPRAESSPTRSKALPCDSGAGSRMSCKPAQGRRSQTAARGTGKGGYPERDPSPRRNRAPSPPLLIRGSKAGPPKGSTVASDRVGPTPTTGQGFEGQPPEGLHGRLRLLGLRAHY

SEQ ID NO: 73730 - protein, 237 aa, Zea mays
  Coding DNA Sequence Number=SeqID_30355
  Gene Ontology: Mol. function=phosphoric monoester hydrolase activity; Cellular component=cytoplasm; Biological process=dephosphorylation
  Homolog annotation: Hit_ID=A2XA28; Match level="QueryCoverage=68%, HitCoverage=79%, E-value=1e-35, Identity=53%"; Hit description =Putative uncharacterized protein
  Pfam annotation: Domain name=Y_phosphatase2; Domain location=52-203; Score=99.8; E_value=8.7e-27; Accession=PF03162.4; Description =Tyrosine phosphatase family
MTMKLDVPARQKSQDAEQNGRTAAAGVLGIDEPWSQPKLRHPGDAQADADALVPPLNFAMVDDGIFRSGLPDAGSFRFLLSLNLRSVVYLCPEPYPEENARFLQQNGIQLHQFGIEGSKSGPAVPDAMVVQEPFVYIPEEIIREALKVILDARNQPVLIHCKRGKASLLRSSWFSSASCFHDTTTVASGFPDADATSVFLSASHWLRRRVPEEAAEVVPVFGVRRVPALRGGEGEEH

SEQ ID NO: 73731 - protein, 78 aa, Zea mays
  Coding DNA Sequence Number=SeqID_30356
MTTDRETRGSSKRLRVLRNLIGCIVRQSIEQLVTFYILEYLTNFRGKVKANRWSKSGKEPTGNGRVQTESRGNEALQI

SEQ ID NO: 73732 - protein, 161 aa, Zea mays
  Coding DNA Sequence Number=SeqID_30357
MAGGRGDQRAGNRCCGGHGKKLGQGLSGSTWEGAWTSRILELASMAEEGKGRRRHGYLGVERSRGTTSWEREGTGGKAGGQIRPRLGEHAGEAWWSWERAPVPEQDEDQRAHPCEQEAWWLAVGGDGGCVMNVEHVRGRGKLPTIEAGRSSTFVGLKVSDD

SEQ ID NO: 73733 - protein, 71 aa, Zea mays
  Coding DNA Sequence Number=SeqID_30358
MGAVHGGAARRRHKSTPARNYTRQKALHGSIGVGEVLYLKAGSGDSSAAAMARRWPGAAVADPRGCTGNGG

SEQ ID NO: 73734 - protein, 40 aa, Zea mays
  Coding DNA Sequence Number=SeqID_30359
MVARRDAVGRHQSAVGEEPVAEDPGEQQIEVAEQELIEGK

SEQ ID NO: 73735 - protein, 169 aa, Zea mays
  Coding DNA Sequence Number=SeqID_30360
MGDARNPSALSSEERNFMEVGTFQPSFGFKDFHQAARPASPHRRSPKTVTSSSMVGRSESGRDLGPALSFKDVHHPGWGGGRAEPELFPPCGPAVRTYRCALSTVGVGGEADAAVCADVVAAGGSFPRVEAVGAAYGPAPGSLALMSGSRPLSGDANESLPVAASVLGP

SEQ ID NO: 73736 - protein, 293 aa, Zea mays
  Coding DNA Sequence Number=SeqID_30361
MAALSQRVGHAGKDGMALAQGRSLPPAWTLVTPYCKCTRPGRGAKHEGRGFHLPTHVSLRLLFPPFRVPPRADPSGLGHAATIHSSVQGPPGGRLTPYPDTRASVGQAEAKTDNKSRSTIEFGLGRNRKLRLARPQAPALGGGLRLARPPDSASTSVSGGIASSPDPGLDLKRSLRLARPWARADRANRGYIITLSLASSGCKEQDRRPIWLTPATGNDGAPRATHDACGSQPLTAARRCQQDPCRTASYAPTGLRRFSDGHAITYTGLKLSPDSHVGMYTALRHFSTGHVSA

SEQ ID NO: 73737 - protein, 120 aa, Zea mays
  Coding DNA Sequence Number=SeqID_30362
MHFLLSPPSSVAIVAVLLVWKVLLLSRVHRNHESSPGQSESESWQISELLQSLSPNGCRGGSIDVQTGHPARTRPEPVSARVSDKCLMFLKASPMNLTNLKVPRKIFFACVKPMASSYLQ

SEQ ID NO: 73738 - protein, 222 aa, Zea mays
  Coding DNA Sequence Number=SeqID_30363
  Gene Ontology: Cellular component=membrane; Biological process=plant -type hypersensitive response
  Homolog annotation: Hit_ID=A7QZU4; Match level="QueryCoverage=87%, HitCoverage=83%, E-value=4e-28, Identity=41%"; Hit description =Chromosome undetermined scaffold_287, whole genome shotgun sequence
  Pfam annotation: Domain name=NOI; Domain location=145-221; Score =39.0; E_value=1.6e-08; Accession=PF05627.2; Description=Nitrate -induced NOI protein
MGMQQQKNAHVPKFGNWDSDGNVPYTLFFENARKGKGAGAAGGRMINPNDPAENPEAFSVAAPSPPPGRHERRPSDAPPPPMSPNPYYAAGSPYHRHAAGEPPRRAAGYSVDQSPAHPYSSESAGYGLVASSVDRSRAKGASRGNETPTRGSAVPKFGDWDANPASADGYTHIFNKVREEKQTTQAGKPAAYGKDGMRTNGPKQHDDDGYVSSTLVPLGLGM

SEQ ID NO: 73739 - protein, 93 aa, Zea mays
  Coding DNA Sequence Number=SeqID_30364
MTLPVDVVSPCPRLGEVEAPPRSRSSLSSKVEVESEPPGRTRRRPSAEAKAESEPWGRARQSSSSSGAEPESESWGRAERSSSSSGAEPESEP

SEQ ID NO: 73740 - protein, 120 aa, Zea mays
  Coding DNA Sequence Number=SeqID_30365
  Homolog annotation: Hit_ID=Q6QP51; Match level="QueryCoverage=40%, HitCoverage=22%, E-value=1e-13, Identity=71%"; Hit description =Putative growth-regulating factor 1
  Subcellular localization annotation: CTP_CleavageSite=42; ConfidenceScore=5.60e-01
MEKGHGSRGGTMVTRSAIPKRKRTGGTFGRRSRRRFTSAIMTASKKGQKRGYSERDPSPRRKRAPSPPTDQRFEGWPLGRVQQPPQSDRAPRPLLVRGSKAGPSKGFNGRLRPLGLRAHY

SEQ ID NO: 73741 - protein, 278 aa, Zea mays
  Coding DNA Sequence Number=SeqID_30366
MARRRSQKNKKTQEIKEEEEENDRWRSNDESTSPRGLSSHFDSHICCVANENDSGSTNEDEEEERSFVQLYAHLSQEDKAVMLKLLERAREQSEARQRIENVLSMKMLHFDELTKEHEELKCSHVDLVQSKSSFELEFAGTKNDTYQELKEENERLKMGLTQLKGKCIAQPSQDNRDHMVKKLETGTTVACTKSLEENVKDLRIAKRKEQKKKTNTSSKSLNHASIKGNIQGNPKLQLVLEREDIDVVGNKELSCAKNQGLQHGGKSKDGNFYAFKYK

SEQ ID NO: 73742 - protein, 289 aa, Zea mays
  Coding DNA Sequence Number=SeqID_30367
MGCTGVAFFLPSLEEHVLVGVGTLQPPLGFKDFRRATRPHSLTNASRIFVILAEAEAATRLAPWHERLWRCFRCCPPPPVLTPGGCAFGADAVRRCGVGGQVAVGAEVVAAREGFSANETVGAICGRTPDSLALMACPRPSSGDVGEGLVTAASAMRSSLLLFSCPKRGSSSLLESLGSVGLATLGLSCSVFRTLGYSAMSRSQRQWCWRGRRRSRLEKRLHRPRSWWLPRPRKMWQQQLELGQDIHWRGAGVLPWVEVLSPGSPSEVGPGSAEGGNNAEGAAAPPADA

SEQ ID NO: 73743 - protein, 252 aa, Zea mays
  Coding DNA Sequence Number=SeqID_30368
  Homolog annotation: Hit_ID=Q6J9V9; Match level="QueryCoverage=19%, HitCoverage=17%, E-value=2e-13, Identity=77%"; Hit description =Putative uncharacterized protein
MAEARATLPRYPRTFPRPAGMICNGIPPEGGIEPSDIAEGVRVRRITRRPHEGTIRPAEAPRKALRPQRSQTTPLRPRGLHPAGALARTHQNKAKPRKAGPLTENVAKASKRVPTLPLRLEGYCRAKTDNKSRSTTEFSLGRNKKLRLARPQAPASGGGLRLARPPDSASTSVSGGIASSPDPGLGFKRSLRLARPWTRADRANRGYIITLSLASSGYKEQDRHPIWLTPATGNDGAPCATMTPMALSPLRQ

SEQ ID NO: 73744 - protein, 214 aa, Zea mays
  Coding DNA Sequence Number=SeqID_30369
MAGSKDHTKISTTNIIKPAMEALPADDQRPFEDLVMRDEKEVMRLWNEQRDKEEAELLHKLSERRKEAAEKYLSHFTVDRHQKIIRQGEIDMESPLPPLQGPTISAPNLSLTTFMDQRGDQLKQYVDESIKMHLRSYEKSTTPSFPSRESNTEPPAPNTSAINGSPLTQPSYGMPMHAFVSPSQPQPLGTRPGPFGPITDRPVLYDRRSGYETT

SEQ ID NO: 73745 - protein, 278 aa, Zea mays
  Coding DNA Sequence Number=SeqID_30370
  Homolog annotation: Hit_ID=Q67UY4; Match level="QueryCoverage=23%, HitCoverage=18%, E-value=3e-08, Identity=51%"; Hit description =Rhomboid-like protein
  Subcellular localization annotation: CTP_CleavageSite=42; ConfidenceScore=5.70e-01
MAAAASSAPHAVGAVASAKPRFVAPACRVIPVPSPRPPPGSQQAAVVPMASWLLLPFSSFPWPTLPPPGYSSCHGSGSDGGRDSGYWRPTVVAGAQVGCALRRRFAGLLRSPAAAYYFHGLILDEGNTSLARVLRVEDPCSAVAKWLLHRGGIAPTPISIVLAPLATPPPDTVHVGVHVRRLHFHLLIRYAFHLGRCQNRGVPEPTSECRRVPQPRWVEHEGKREGGRARRPETGMREVGIPWPSCSSRAQVGHKERIQVYNGGIAECYVSSGGELAP

SEQ ID NO: 73746 - protein, 53 aa, Zea mays
  Coding DNA Sequence Number=SeqID_30371
MVSVVYPLARRLGRLYLCEQPRSDRDAIRPFPARFSAHLPHSVEPQAHSPSSV

SEQ ID NO: 73747 - protein, 46 aa, Zea mays
  Coding DNA Sequence Number=SeqID_30372
MRAVSQRLVAHRTLVSDDNGRIQRSTATGANGRLTWHAPDIYCAVS

SEQ ID NO: 73748 - protein, 369 aa, Zea mays
  Coding DNA Sequence Number=SeqID_30373
  Subcellular localization annotation: CTP_CleavageSite=18; ConfidenceScore=5.31e-01
MKLWKETSRSSKITTSSRCGLAATPSRLPVKAALSTFLFRTLIYCKNYMDVSDMARLRHTARKSVIPFLPSRLAERPLRRPVAGQSSHLERLHHRLREEQERRRQEQQSSSFSLHQEIESLLEVAAGGDPDDGGGDDSSSHDTDFSANPEPEGWVARPITRDAARGCHFHDALDTLLRRAFDRHTWSVEYRCVVYQHSRGVYPDRWEATCLVRCPEDSLQGAEACSEHYSISERDSAEAAMQDAARRALSHYCSVFGGAADGLDLKYYPRRSSGSTGGVIVSPVGEGNPRLSSTVNLAAVLNTELDHALDELSRARAEIALLRAERAERRFLDGGSPAPVGTQHPYRSPQRGHQSYGNPACKTKINLEP

SEQ ID NO: 73749 - protein, 391 aa, Zea mays
  Coding DNA Sequence Number=SeqID_30374
  Gene Ontology: Mol. function=catalytic activity
  Homolog annotation: Hit_ID=Q6AV51; Match level="QueryCoverage=20%, HitCoverage=11%, E-value=4e-16, Identity=57%"; Hit description =Putative HIPL1 protein
MANLEATVKDLGTDQSDSQKWRPGIEAKVVEMTEALKSVRNPVVQKQIGVSLLLRRVKSRRWTTPLPPEATSGVAGADATRIPTPIGGASVPLNRTLGFCSAYGGGDSISSCCDAAADAVLRKRSNAMNVSDATCTGVIKSVLCADCSPFPADSFNSNSKIHRVPLLCNYTSSSISSAQAKDSARDYSATSSLFLATPPSVPLAILSRRAFGLWCLSPLTATVLGSSSRCRVARVARSVNPAVLSSRSDLAVPTACPHWTIGAARAASSTMSELLATPRSRALQPHRYTSKLLPLLTAPRLSRQLAIFSCFSSAPKLSVHDFTYVLCSSSPFFAHRPSAHGTARRAPPVYRAAITPSRSLSSARSPLRLPALRRLLKVEERRITSYPIDYA

SEQ ID NO: 73750 - protein, 228 aa, Zea mays
  Coding DNA Sequence Number=SeqID_30375
  Gene Ontology: Mol. function=sequence-specific DNA binding; Cellular component=nucleus; Biological process=regulation of transcription, DNA-dependent
  Homolog annotation: Hit_ID=A2WWW6; Match level="QueryCoverage=79%, HitCoverage=94%, E-value=7e-19, Identity=39%"; Hit description =Putative uncharacterized protein
  Pfam annotation: Domain name=WRKY; Domain location=20-90; Score=46.4; E_value=1e-10; Accession=PF03106.6; Description=WRKY DNA -binding domain
MGRIVRGPPKQDEAARWEDLVAGFVWRRTGRRSRKTLGHSVQYYNGPHKSRGSYYKCTSSRCGAKKHVEKSMDDSEMLIVTYEGSHLHGPQPLFPRRQWLSVDLSGAGVAASKTKQQQTRSSSPAASATLASDDGGGGWPPSLQIMTRNAETRGGGLTADAGESETTPGLQSGRTGVTADSCDDGSTASVPPPPQTAPSFHCDSPPTTWSWSCLDYTLAWSPEAPLLQ

SEQ ID NO: 73751 - protein, 106 aa, Zea mays
  Coding DNA Sequence Number=SeqID_30376
MVTSIIVSLNSEGGIKVLLRTEKDKVVSFKNAAELNQNLSQVRPLDITHPKLTVLHKVFSNHIPHRQESNLMVSFYKPPTLWRKFEWEPKTPRANEHKDVAHTISQ

SEQ ID NO: 73752 - protein, 135 aa, Zea mays
  Coding DNA Sequence Number=SeqID_30377
MCYSVSVQGEILLVDKDTRWEILHILKELKVCGLCVDTSPDKTQKGKGTSISGPAGLRRSVQCLECSLICEPNLSKTRRRQDIFILYSMDRGRANTTQAVQVGNILHGRACQRRNVADGTDRKQPLCLSMSRLGG

SEQ ID NO: 73753 - protein, 585 aa, Zea mays
  Coding DNA Sequence Number=SeqID_30378
MDGDATAEKCLAAASFPDKSARSEYSEEDARGDPRATIPPPEKGTRHSAVARESSVFVRPASSSGPRRRDSAVNLRGPATRPIRAKTPPPFVAVRRNVRVGVDVEGRSSNRRQIYADPICVFLGTRYKDAKLLQHLVLNLASSVETGAFDIRSFLEEAFRHLGDEHYLLNALLAIRKEVDQMEQDALESKARSDPEKERMEEQISLAEPVRPVPRQITFTPPSSPELYEASDNDSYDSDRMADNNSNTPIRPTGASPNSGNQCFPPPMWDPQMWQGQGFDPTHPSTFSTPTNHMTNPTWSQGANDPSTYTFRSPWNPFFGMINPGGPPQQPSFGQPQFAPPIPCPQGSTHVPNHTDPITFESEAEHSVQEVNSPTKPSDTPTTFRRTKEQNFKPAKDLLLCKTWLEISSDPVISTGQRKEGLWARIEKSPWRGNAGTEPVRSLTPTGSVNEVESDDGGSKGKRPLGRDSTKASRKKSMSSSSQSADYLSRLHDIQIARLKQSEEKSDLKQHNIEFMKEVELKKLEVQSKEIEVQEKKLMMEDRKQKVEELNKLYAMDMDALPEELRAVYMAMRKGLIDFFINNPI

SEQ ID NO: 73754 - protein, 655 aa, Zea mays
  Coding DNA Sequence Number=SeqID_30379
MDKDRQDRQGAAQKRQAAIRLVEARPKRQRLGAKAAAPGGGKPPLPAKSGAPASSRVPEATAGAGGAKSAKVVPPSGGVAEVAKAAQALPLSGKRVADFATNISVDDFLVGSDEGQLAIVAPVAATMTAAVVPKAKGGALGAGGEASAFAAVRDEAGAVSRRLAEVTEALSQASRRLKEVADFADRTASGALTAAVSAEVERLRTQHADAVREKSAADSKCRKLTDKVAVLEKEKADLRRQLAGERRETNDALAKEKAAQAEAKMARAEGNIARERAEQLQERLTALESRMERAEAVARAEAERTRKQLMDTYRELGAGTGCRHFEVFDQADEDFEQDIFKVEDPVVKESAGAIYDRLWDAYGREVVRERAETARAQAARGERVDDFGALNDVISDPEPAPAEAVPGPVLWPTLETAGDASGASVAAAAGEGLPPEVAEVAPGASAAAAPSAVEPAAVAAEITAEATTEPTAEAPAASGPSQVQDFGPAHTTATTKILAASTAEDGNECGGSASEFLDCADSGSSVEWTEESSEEDLDYFAALDVAAAEASPHVAGAGDVPGPSTGRRRRRAVAKRRFGCALRRLLRGGFGLLRTCCASPAAPLGDFCADSLRDRLRFFRTCCASPAAPLGDFCADSLRDRLRFFALVVLVRLHP

SEQ ID NO: 73755 - protein, 109 aa, Zea mays
  Coding DNA Sequence Number=SeqID_30380
TDLWASSGPRECTHGFGRKDWTWVCPEMLIVVRLSPPVAPRRGQLHCPAMYGKTSDLKFTIASFSGRDFWDKVSRSRRLVWWGSSVAAVGVYASCRVIRAVESLASSSD

SEQ ID NO: 73756 - protein, 105 aa, Zea mays
  Coding DNA Sequence Number=SeqID_30381
  Subcellular localization annotation: CTP_CleavageSite=39; ConfidenceScore=5.60e-01
MSLISWSNSSWSVGLVAFLFWLRTSRRERVSWFGSSGCSAAVPSAEAFFGGMTKVSACRRWSEEFTGGVYSYATFGDEADPQQSEDSSIVNFKIRYLTNLLNQKS

SEQ ID NO: 73757 - protein, 662 aa, Zea mays
  Coding DNA Sequence Number=SeqID_30382
MPSSSSSATATPPAAASSEETLSNVMVEELRAGDSVEFGVSRMTSARIEDMQWLGYFGGGVARAPGTEEVPEPEGELVVFEAFFAAGLRLPAHRVFELNQLPYDGYPGQDEADRRGKKPAVETGGDPALAAATSSKKRKLVMDKDRQGAARKRQATVRVHEARPKRQRGTAKAEASGRGKPPLPAKVGASAPGKAPEATVGAGGPKLSKVVPSVSGVAEAAKAARSLPPSGKRVADFGTEINVEDYLGGSDEGPLALVVPGAAIATAALAPKAGVETLGVGGEVTALALVRDEAGAATRRLKGAMEALSQVADFTSRTASGALTAALSAEVERLRTQHADAVREKSASDSKCRKLAEKVAALEKEKADLRRQLTEERREANEAIAKEQAAQAEARLARAEGNIAKELAGELQRRLAAFESRAEGAEAAARVEAERTRTQLMTSYRELGVRTGDFEVPEREAGLRCLEWVQEELQELPTVLAGLMSFTSLVTCEAAMNALSREGCRHYEALDQVDEDFGRDIFEVEDPVVKESAGALYDRMWGSYGREVVRARAEAARAQAERGERVDDFGALNSALPEPETTPAEAATGVAPGLTPVTAEDAPDAPAPAAAGEGLPPKVAEGAPDAPAAAVPSAEDPAEVGAEAATEAAAEAPAAAGPSQVA

SEQ ID NO: 73758 - protein, 106 aa, Zea mays
  Coding DNA Sequence Number=SeqID_30383
MEEEDERIGAGGIEWRSYPGARRAPYARRRRGVDIELFEQDDKVDTIEILRENADSDYVFGRRPTIETTDSDIVRITSQLSRVRIKESGQESRDEIDFRICIFFEK

SEQ ID NO: 73759 - protein, 72 aa, Zea mays
  Coding DNA Sequence Number=SeqID_30384
MDLRSKSPCYIQVRSIGVCCSSSPQIQKLFLKTKNHFNIIWLTMLSFPAELNFSCDELLQLQLSFSAELDFS

SEQ ID NO: 73760 - protein, 81 aa, Zea mays
  Coding DNA Sequence Number=SeqID_30385
MLLRLPFLALLELLRLFLLMWMSVSQISSLTFGAQLVLNLKTDKDSYVALIEARAKGSVGAGREEIELDDTKNLYLSSDEE

SEQ ID NO: 73761 - protein, 52 aa, Zea mays
  Coding DNA Sequence Number=SeqID_30386
MTRSESRIGEPQTLKGVYSLQREVDRRFMWTAGDVRRMDVQSGDKNSIWCLK

SEQ ID NO: 73762 - protein, 63 aa, Zea mays
  Coding DNA Sequence Number=SeqID_30387
MVNRYGGYKCGHYTTAVRVSEALYAKALGALEDMVVGVTWPSILPPGWTVEWDPTSAEEEHEE

SEQ ID NO: 73763 - protein, 119 aa, Zea mays
  Coding DNA Sequence Number=SeqID_30388
MTLEPHPLQPGWRSLDSESFGYRAEDIIEAIALHGLTTFCGFHPLELSTHPNGLFPAEKEDDPMWKDRVEHAKDEIQDMEADEDVDIEGGVEPEPASSLDTAGSGRPPSPESSVASFAH

SEQ ID NO: 73764 - protein, 82 aa, Zea mays
  Coding DNA Sequence Number=SeqID_30389
MVRTRKTARKSTGPVGVPRHQLAPGHEENVPADVVVMGARPSGTVDEGPDGELDLFRPPPSMNLADERSPAAGNEETKDDED

SEQ ID NO: 73765 - protein, 93 aa, Zea mays
  Coding DNA Sequence Number=SeqID_30390
MRLSGLTVRLPTAPICGGEILFQAAYTGRVQNSSCVSFTGPWRSQNKHSMIVYLAELSWPRCSGAHRHMIKENPYGASSSTNMDTQQQCMDST

SEQ ID NO: 73766 - protein, 108 aa, Zea mays
  Coding DNA Sequence Number=SeqID_30391
  Homolog annotation: Hit_ID=Q7XBD4; Match level="QueryCoverage=34%, HitCoverage=3%, E-value=4e-07, Identity=75%"; Hit description =Cinful1 polyprotein
MSEDKKIVAETKLSLSEEKNLGFLESIAKTNTKKITREILEAAGKTPKIDPGRCASTLVEAVAKMPEIGLPKQQKLQDGYPHTLECTLYLCLGKDWFPNDAIANTENP

SEQ ID NO: 73767 - protein, 117 aa, Zea mays
  Coding DNA Sequence Number=SeqID_30392
MEFGRGAPHFARPRNMATPVERLSAGQGAGVKLLGIARHGERLEVPASVVRWAAGALARIWNWAEKDLFGPTSLRGCRAVITPRMTKLQKSFLRERSSLNATEIEGEEAPKSFLREC

SEQ ID NO: 73768 - protein, 130 aa, Zea mays
  Coding DNA Sequence Number=SeqID_30393
  Subcellular localization annotation: CTP_CleavageSite=55; ConfidenceScore=5.03e-01
MPISPSEPDSVNSPADALLPSSDWLPASIKIGTTLVACALAISPHPQRNRDLPPTASARFTGVWFAGSLGASPQGLPQVRGALPKFGGVWGWLNFSSESYPATELRLAVDRAAATLKSGKDSSIALALFL

SEQ ID NO: 73769 - protein, 626 aa, Zea mays
  Coding DNA Sequence Number=SeqID_30394
  Gene Ontology: Mol. function=nucleic acid binding
  Homolog annotation: Hit_ID=A7QWV2; Match level="QueryCoverage=69%, HitCoverage=63%, E-value=1e-40, Identity=32%"; Hit description =Chromosome chr13 scaffold_210, whole genome shotgun sequence
MVAWPSSLAAMGCGSELELTGGRGRRVGAPLAAMVAWPSSLAAMGAAASWSSLAGGDVELELPGGQQVGAPWWEYVVVLLRNGRHKDEAAKELHVFLGDDNDAFVSWLWDHLSSNLHLYVQPKAASSKDDTRSSHNAARGLPVHSVISSTQVNHEPEAETQKTVITHKKKDWGHRKRDWGTIGRGQSETVPLRSVVDNVSLAKEKDLHESHADEKAFHKSHSVRRTRSPDMHNHRKRSREADVRSTKSATHPVNGAPRRLLQFAVRDAVRTVPPVTSGSESASKRLCSVVSTLASDSTLDITHIRLQKTNSDLRIPVATAALRAAAEAAEDALKDSFCGSVFSRLGRMPTINSSEQSPDRRSQDLEGKEYENIDNIQAENQVEFYGRNQHGGSDVYMRDRRTEEATGKESLVLGYVRGASEVRSGRLIAQGPPAGSGPRSSEKILNVSGNTKTQKLRTHVTRDALAFDPQVPMEKVSGARKSIGQGPHAGSGPRPSERILNVSGNTNTQKLPTHVTRDDLAFDPQVPMEKVADARKSHVKIAHANDMSMTTDKSKCLEVSSSLNLMLSKNAPQEFGRLDSRSGVGVSFFAESPGHGFKSDSLVEGLPRFILSLDSTHVRASGTRFT

SEQ ID NO: 73770 - protein, 145 aa, Zea mays
  Coding DNA Sequence Number=SeqID_30395
MDEAEKAVDEDDDECDVDVVAAPRRQIQASVLACCYASACGTGTWNACYGAALKAAALVRLLMLRVRGWVRVQVPTACSSAAARRMWPLWKSSSAEYVAVADGDRKRKEKLKSKSRTLGMSFLPWVQQKKMLICHSQIWLFIPSL

SEQ ID NO: 73771 - protein, 52 aa, Zea mays
  Coding DNA Sequence Number=SeqID_30396
  Gene Ontology: Mol. function=nucleic acid binding
  Homolog annotation: Hit_ID=A7QWV2; Match level="QueryCoverage=76%, HitCoverage=5%, E-value=5e-07, Identity=60%"; Hit description =Chromosome chr13 scaffold_210, whole genome shotgun sequence
MDGGEDRTFKANFTSEGVTMLQDRVKEKLSELMGDYSDDTLAVRKLWACYGV

SEQ ID NO: 73772 - protein, 663 aa, Zea mays
  Coding DNA Sequence Number=SeqID_30397
  Gene Ontology: Mol. function=sequence-specific DNA binding; Cellular component=nucleus; Biological process=regulation of transcription, DNA-dependent
  Homolog annotation: Hit_ID=Q7XAA9; Match level="QueryCoverage=98%, HitCoverage=74%, E-value=1e-171, Identity=51%"; Hit description=WRKY2
  Pfam annotation: Domain name=WRKY; Domain location=242-300; Score =139.4; E_value=1e-38; Accession=PF03106.6; Description=WRKY DNA -binding domain
  Pfam annotation: Domain name=WRKY; Domain location=450-509; Score =150.6; E_value=4.3e-42; Accession=PF03106.6; Description=WRKY DNA -binding domain
  Pfam module annotation: Pfam domain module=WRKY::WRKY; Domain location=242-300::450-509
MEWNDPNPGPESLTSFQTEAVRPDTAGGHSNDDVEAGFEKHGLAVTVRPPEEEARSVPLTPQLGQKSSPGSSLAERMQARAGFMVSKLNMPFSTAAGADNSVPEVPSPYLTIPPGLSPATLLESPVFVSNSMGQASPTTGTLFMFGSTNDNDPIRFGGGPPSVGDGPNAFPFKPLDLKSSHYTAEAMKTIINSGGPHDPKLSRPASGAGAGNEHISPPDHGQTAEESDAREDYPAMATTTPAEDGYSWRKYGQKQVKHSEYPRSYFKCTHPNCLVKKKVERSHEGHITEIIYKGAHNHPKPTQSRRPGVQPVHPFGDSAQADAADNLGSQANALDANQPRRAGVQDGMDATSSPSVPIERCDSPASMQVDSATRFGSPEGADVTSVSDEVGGDDRVTRGSMSQGGADAEGDELECKRRKLESYAIDMSTASRAVREPRVVIQTTSEVDILDDGYRWRKYGQKVVKGNPNPRSYYKCTYPGCVVRKHVERASHDLKSVITTYEGRHNHEVPAARNSGHPGTAAATGAGGPRRLEHPSLRDGLMGHLGGCGVPFGLPPPRDPLAPMGNYPTYASSIPLGGAGPTSLPSLPVPAGTLSAVDGLKLPMLAPSSLQQHPLLRHRQAMQAAGLVAPKDDVKVEGNVAGGAAPSVYQQMMCSGLRLRQQM

SEQ ID NO: 73773 - protein, 277 aa, Zea mays
  Coding DNA Sequence Number=SeqID_30398
  Gene Ontology: Mol. function=DNA binding; Biological process =regulation of transcription
  Subcellular localization annotation: CTP_CleavageSite=78; ConfidenceScore=5.18e-01
TEISLCRVYKRTGIDDGGHGHPASARSTPSRGVVTAPQQDNKQQASSSSTPTPPTTPSKMMQFLHGECTSSQPAAICRNSHHAAAAAHSNNKAAAAGAQRQSQLLPTKPYCSGYQQLSTASSAGSAVGAAVDHHHHQQQQQQAGTGAAAVSTSSSSSRNASYALAAASTYSLLSLVNAASMGGSGSAAAIDELSTLVGHVHGAPPYFNHQAAAAGGHGHGHGFVLPLPTTPSSQQPMAALGTLPLSLAAISDKIWDWNPVGPDATARDYGSATGGFK

SEQ ID NO: 73774 - protein, 290 aa, Zea mays
  Coding DNA Sequence Number=SeqID_30399
MMTVGLVVGRSKSGCGLCPAFSFKDVHHPCCGGGRAEPGFYLPHGPASRLFLQHSEERALTGLAEGANFDSAGPVGRKRRQLQRAWLAGSASSGAASDAASCRLVRAWPFVHRTGDCCAVRTEGSYNTSYAARAAFVFLDCLVLTPARRLRAEVGAGPSGRTLGRLPFAGAVSVGRWLSSSVLRWWQPEEAVFADETVSATCGRTSGSSALMACPRPRVGTWARALSTVALALRSSLLLFSRPRRRSLSPLVQRSLANCLGFVIPQALYIVTPSMGICSLWLLRPEHLGI

SEQ ID NO: 73775 - protein, 90 aa, Zea mays
  Coding DNA Sequence Number=SeqID_30400
  Subcellular localization annotation: CTP_CleavageSite=70; ConfidenceScore=5.26e-01
MHEGSAEAVYCPGDRSLFKGGSPHSHPQASWAKSPPMCSRVLTLRVKAWARMSCNQRNGYCVQGNRTATRANVASSRLRNQCRDSRQPYA

SEQ ID NO: 73776 - protein, 148 aa, Zea mays
  Coding DNA Sequence Number=SeqID_30401
  Subcellular localization annotation: CTP_CleavageSite=39; ConfidenceScore=5.27e-01
MGSGQQPCRNLRVPLTSPSYYLAFYKTRPAPLVLGMRTLGAVNRGRTFLHPSIAWREFHRTPLLSAPPHCRPLASGGTLGGPAVLVQPSVKAENRPRHGGFLAGNASPPRVVARVFHGINHHEQATVESEVQQVEVAEQELIEGKLCP

SEQ ID NO: 73777 - protein, 148 aa, Zea mays
  Coding DNA Sequence Number=SeqID_30402
  Subcellular localization annotation: CTP_CleavageSite=39; ConfidenceScore=5.29e-01
MGSGQQPCRNLRVPLTSPSYYLAFYKTRPAPLVLGMRTLGAVNRGRTFLHPSIAWREFHRTPLLSAPPHCRPLASGGTLGGPAVLVQPSVKAENRPRHDGFLAGNASPPRVVARVFHGINHHEQATVESEVQQVEVAEQELIEGKLCP

SEQ ID NO: 73778 - protein, 31 aa, Zea mays
  Coding DNA Sequence Number=SeqID_30403
MQITMISTWAIELYLDKINHPMEDIIVTIIN

SEQ ID NO: 73779 - protein, 172 aa, Zea mays
  Coding DNA Sequence Number=SeqID_30404
  Gene Ontology: Mol. function=calmodulin binding; Cellular component =integral to membrane; Biological process=cell death
  Homolog annotation: Hit_ID=A2WXS2; Match level="QueryCoverage=76%, HitCoverage=25%, E-value=1e-48, Identity=72%"; Hit description =Putative uncharacterized protein
  Pfam annotation: Domain name=Mlo; Domain location=8-172; Score= -257.7; E_value=7e-07; Accession=PF03094.6; Description=Mlo family
MADGSGESESTALEFTPTWIVAAVCSLIVVISLAAERCLHYLGKTFKGKNQKALFEALLKVKEELMLLGFISLLLTVFQGVMQRTCIPPGWTIYMLPCRSAKEQAELSPTEAHGHAAGILGLTRRRLLAEGGPRTQRCQKKIRQWKHWEDEIQKGATDNGSSISFAAHVLVS

SEQ ID NO: 73780 - protein, 42 aa, Zea mays
  Coding DNA Sequence Number=SeqID_30405
MERIASTCKYIFIGAIVGYIFKVTNDGVVTEDPLSGHMPRHG

SEQ ID NO: 73781 - protein, 47 aa, Zea mays
  Coding DNA Sequence Number=SeqID_30406
MVGSYCKAPCDALFILGNRNNPKDGSEEATNFCCFCSKVVSNEEVEE

SEQ ID NO: 73782 - protein, 161 aa, Zea mays
  Coding DNA Sequence Number=SeqID_30407
  Subcellular localization annotation: CTP_CleavageSite=56; ConfidenceScore=5.59e-01
MKSTKKVWVPKGKARTRAKTQKTVNSAPSGLGLGLRLSPRRRRTPLRPTQGSDSALASTELPPPRPTQGLGLGLGNGRQTRPQLRRSPHVARPRARARHVNRERHHHPTPSRLGPQRTRPGDVSKDSTAPTAVPPPNSVAPPTATTSHQQGAKISPAATLA

SEQ ID NO: 73783 - protein, 131 aa, Zea mays
  Coding DNA Sequence Number=SeqID_30408
  Subcellular localization annotation: CTP_CleavageSite=45; ConfidenceScore=5.62e-01
MERSTGSSAPLLLCAAPLSSAGATSFSATSSFISLNSHGRNSRCRSALVKEAPCAQRSLLHLLVRVGGMFSKIKLDGGSVKGLDGFNIGKDVPLPGSNFVLLLMVLSAGGLDLLISLSNPSILLIEDDPLS

SEQ ID NO: 73784 - protein, 260 aa, Zea mays
  Coding DNA Sequence Number=SeqID_30409
  Subcellular localization annotation: CTP_CleavageSite=46; ConfidenceScore=5.03e-01
MMNKNTGIQSALTNGTPVPPPQVRTTPLHGGGPVEQQKTDERRAVTCSSSGDNDDFCSGGPNSGNADLRVDAAARRPPPMPKLVRQGWAEGRRVGGPPLRRGGWDPHVMQTSSEQKKPKRRAWCTQPPSGYKRPPTLAQTNGRKGQAAMQAACNRARWTRFSDSQRVSMEAQAHASRNRRAGCCMQGPGKGDTPKRILHCEGTGLRAPLLIRGSKAGPPRGSTVASDRVGPTPTTGQRFEGRPPEGLHGRLRLLGLRAHY

SEQ ID NO: 73785 - protein, 312 aa, Zea mays
  Coding DNA Sequence Number=SeqID_30410
  Subcellular localization annotation: CTP_CleavageSite=55; ConfidenceScore=5.55e-01
MRPHRCFDAPEFPLKTTSSPWFLSVLSKTFPSNNLVKATTWRDCIVACTRSRSVDARSRSSRIFPSPQQEVESGRQPSPTPQPEMPLYRHKASWLLEETLMETETTTSVVVRATTRSSRSSRSWRDGSLDPSLVTLLAGVTFTMPSTPCCVEPLTDTPDDDLRGAEAFSKHYSITERDTVEAAMPDVAQRALSHYYLLFSRVADGLDPKYYPRRSTGRAGGVIVSPVGEDNPRLNNLVNLVAELNTELDHALEELGKARAEVAELHAERATRHYQDGGSPAPVRIQHSYRSPPRGRCDYGTPDCTTQIDLEP

SEQ ID NO: 73786 - protein, 102 aa, Zea mays
  Coding DNA Sequence Number=SeqID_30411
MLVDYTMGLLHQSGCPMVVHGASLAEVQGKATSQTPPPAEASGKSHAAPGPAPAPGVIAPAPRAGDDAVSLGDWTDLTPCDAGDAPLVEKAKRGSQTYMQCT

SEQ ID NO: 73787 - protein, 129 aa, Zea mays
  Coding DNA Sequence Number=SeqID_30412
MASGARARRGIPRFGPFDLNRTEGIRPRKQIAAGGAAPLHDGEVAGVKVGAGYGGSGVAGVGQRGRGCHDELDGGEEAMNPRTERGERRCESLGRAAVTPGFQIQIQSRFQIQINSNLCNTSKNILSSA

SEQ ID NO: 73788 - protein, 341 aa, Zea mays
  Coding DNA Sequence Number=SeqID_30413
  Homolog annotation: Hit_ID=Q850V8; Match level="QueryCoverage=56%, HitCoverage=69%, E-value=1e-08, Identity=26%"; Hit description =Putative uncharacterized protein OSJNBa0037J17.18
DADYTPTTDSEAQSSAGGSESMDTEDIPHTHPDYPIDNTGWTFPKRRFSMAEYCSSRTANQYTLPSDTNVQFFHTQLQFDVFWGTLMDTNFHKHQVIDWTFMLGQSVIEDLIPKFETCGMYQFMGQRSDFSEMAVKQFLATAEIDIEEESITWMTGFKRYSATFVDFATANSLNYGIISAGIDLYTEDIFEDFVQFYEPARLGYLGDDEKDPGYDVGAQGLQTHIDTRFQGMMTHMDQRLDDMQSSFDSNWDALNTEYSEFRDHIQTNVTDPIMTRLNNMQQSFQDNMGALSSQFDNLSTNDSMQEISQRQQQLQQDFGQFSSLFDTFSTHYYNMHPPPSD

SEQ ID NO: 73789 - protein, 151 aa, Zea mays
  Coding DNA Sequence Number=SeqID_30414
MAYRRARSMRGGGRPKSGEGDLGLPVMFCQVRGLGKLHGLMAKLIEGLAWLGRDWRELATAAEARKAWRGGGAACSGQIPVISGLGKTCEHAGRLGTGSCSVKVLVSECLVPRSNCVETVSNEFGLSSKFSRACSRKFGTTLIFGLLGFEF

SEQ ID NO: 73790 - protein, 361 aa, Zea mays
  Coding DNA Sequence Number=SeqID_30415
  Gene Ontology: Mol. function=metal ion binding; Cellular component =cytoplasm; Biological process=regulation of transcription, DNA -dependent
  Homolog annotation: Hit_ID=A7PGP7; Match level="QueryCoverage=73%, HitCoverage=45%, E-value=3e-44, Identity=38%"; Hit description =Chromosome chr17 scaffold_16, whole genome shotgun sequence
MSSIYIALQVKKANRRDARTGLSVDRELKSARLSLASGNQRLSLHDCRSLRMAAPPEGNVRLGEGWDEDDVLEPQPLEVIAPDVKSKKRNPAPGVRVVGRRIYDPENGKTCHQCRQKTTDFAAACKQVKKKGPCPVKYCLKCLLNRYGESAEEAAGKEDWICPKCRGICNCSFCRKKKGEMPTGIMAHIAKASGCTSVHDLLKKGSDVVSAAQAILKVNGSDKGTKRSRGTDAAAEVATEKDVNIGIDINTVIADEGDENIGVDLNSLPSVDTKKRQKRQKLKHRTKKDPADATSHGVNTEPLQMDGNLDFLNSKTVRPRGTPVTKIAGAELDDEDTGAAIQFIEFCRAFTEMKGSELKEC

SEQ ID NO: 73791 - protein, 137 aa, Zea mays
  Coding DNA Sequence Number=SeqID_30416
MGMICKINLMGVPLQVEDLLFNINKKNEKGHFRDSCPNMVEPTNGKNKDKALASFKTWDDSSIKDEPPRTRNQRSSSRSSWSSHKCLMARDKMSIPSSSDDSSSDDECEGKLSSDELAEAVKFFEDVCTKQKAQLKH

SEQ ID NO: 73792 - protein, 315 aa, Zea mays
  Coding DNA Sequence Number=SeqID_30417
MEVAATAKTTRETGEDTTAAGVGAEAAGSTSNLLAPTDLSRHRRLAAGDRSGGQPCIKKVEKEIKEMAKKISDLCVLHKGPLSFHDLARAPPSNTNHIRLGAPTRSPEHRSHLAPTLACHCRLLLFRHRPAPLGEPTVARPSPTTPAPPSLKPSTRFTTATGPASILPRRKRRWERAGQIRRTSPCSASPMDVTASVCRAAGRASRRPCLLRQLTSASARRRPRAPSSSLRWPRDAASMVPDSVRVHLQPLQGETGSCLQLVTRGPSLCDARLGVPLSPCSVDGVLTTGCYWPGGLRHRMGPTTAASEEKGRMLR

SEQ ID NO: 73793 - protein, 391 aa, Zea mays
  Coding DNA Sequence Number=SeqID_30418
  Homolog annotation: Hit_ID=A2X5J3; Match level="QueryCoverage=44%, HitCoverage=88%, E-value=1e-45, Identity=55%"; Hit description =Putative uncharacterized protein
MGNRINRTRLTLVTIRRWPLPSPAAFDSNPLPQDDEPLADCSSSSLLSPQHAPLRIDRLVVRPPPNPALAMPPLAPPHGEKGGRQRQGAAAAPAPAQRSASFHGRGTEQRHHQPQKQRPKTLPDLLAGVRGASFRSGSPPPDGDAGRRTPSKVLVSVAVQQSMWPLHVMAPAEWTVADLVAAAVALYVKEGRRPLLPSTDPAAFGLHYSQFSLDSLNPKEKIMELGTRSFFLCPRSWAAGQDASSSSGTANGVTSAASGKTPAWLSYMPFWPTIRRSPRAATPTIFLLASPPTPVYYSLSPWSHPQPRPIPSHVCPPLPLHEAADSAPPYCLLPWYRGPGGEGGVEGSHYRRGGRRFQYRGQHARRHALELVFFLKLGGFQAPPTFGGSFG

SEQ ID NO: 73794 - protein, 173 aa, Zea mays
  Coding DNA Sequence Number=SeqID_30419
  Subcellular localization annotation: CTP_CleavageSite=35; ConfidenceScore=5.61e-01
MDSVGHPFLALFASPPNAYHPVPRPRPPMFSPEARGSALAPNACAPNSIRMPIPSEASRLESPNHGTKPERFPRDAPRRGKKPWAEAPWHLEAQQHGKSYPTPGVFHAAELPRLSSQGGCSQGSDGDFRGSSFVPSVITLPRPLTVPTSRAVAPSSTAQSQPHQTEAQLEWRH

SEQ ID NO: 73795 - protein, 113 aa, Zea mays
  Coding DNA Sequence Number=SeqID_30420
  Homolog annotation: Hit_ID=Q10B96; Match level="QueryCoverage=37%, HitCoverage=7%, E-value=2e-13, Identity=88%"; Hit description =Phosphoesterase family protein, putative, expressed
MAINPARRGPGVLLLVALLVALVVSGHCPGCAPPRAEASPAEARDPLSDQGSGGRGDGKPQFRPHPRPGVDSDPGHGFEDIREQIFGYAVTSAVTPPMSGFAQNVRGMGLGES

SEQ ID NO: 73796 - protein, 42 aa, Zea mays
  Coding DNA Sequence Number=SeqID_30421
MEDLTATDSLSAFPSYTAMMEADTGSGLRPEFLLDLKFPFGY

SEQ ID NO: 73797 - protein, 212 aa, Zea mays
  Coding DNA Sequence Number=SeqID_30422
MARPSPRDSDDDVVAAIESTDHLLSVDFSASPEGATQPGSSVGRARVRAQNFGSRAGFGLGQRTRDGNGGGRGDSLPQCETRDLHRDGNGTTVAWVDNGVSGTARATTISEDKANQMKGNWGQVPSSWHRGEAHCGKDDSRSSVERHNGFTTAATLLRARWGKMGRARSGALWVWGPYMRPGEARGMRAVGCGWWLSAQNARSGHDLYRADG

SEQ ID NO: 73798 - protein, 62 aa, Zea mays
  Coding DNA Sequence Number=SeqID_30423
MAVNRARRGPGVLLLVALVVALVISGHCPGCAPPQAEASPAVARDPLSDQGSGGRGDDESLE

SEQ ID NO: 73799 - protein, 64 aa, Zea mays
  Coding DNA Sequence Number=SeqID_30424
  Subcellular localization annotation: CTP_CleavageSite=37; ConfidenceScore=5.06e-01
MWGRVVRTFPVPSDLDATISQQAPLGRSSRITENPPRLANQPTPPSPTTDLMGSVDTHLLDLVR

SEQ ID NO: 73800 - protein, 31 aa, Zea mays
  Coding DNA Sequence Number=SeqID_30425
MKKQATQWHHHQPCWLAAFVGMYRRLVEGLM

SEQ ID NO: 73801 - protein, 58 aa, Zea mays
  Coding DNA Sequence Number=SeqID_30426
MKTLLVSGRQDCENVKCITRSPSRQPEADKALGRVSVSLIGLRTSVEHYYSTPLYRRS

SEQ ID NO: 73802 - protein, 250 aa, Zea mays
  Coding DNA Sequence Number=SeqID_30427
MTDEKDSATERRLESPPRHMMDVSVISESGCMVLGPIGLSQRQRKRKNEWTEELKSDPVLCKCGIEFKYGLVPSEHGVGYFCGHMVDYDEQTRKCSWEIYAKKEDVMHTIKSKRLMGQKMSCGSQLVDSYIKDRRQEMCRFAESMCYDSPMCVERRRLKAANEKRAHDAREWEAVRAEKQMLGNLVGRLSAKIGCVVNYIADEARARYVQEKMATMELMEEEDTLRLSELIALDEAGLHGERGGRHIKVD

SEQ ID NO: 73803 - protein, 575 aa, Zea mays
  Coding DNA Sequence Number=SeqID_30428
  Gene Ontology: Mol. function=calmodulin binding; Cellular component =nucleus; Biological process=glucosinolate biosynthetic process
  Homolog annotation: Hit_ID=Q5JMB8; Match level="QueryCoverage=100%, HitCoverage=99%, E-value=1e-154, Identity=55%"; Hit description =Calmodulin-binding family protein-like
  Pfam annotation: Domain name=IQ; Domain location=101-121; Score=24.9; E_value=0.0003; Accession=PF00612.18; Description=IQ calmodulin -binding motif
  Pfam annotation: Domain name=IQ; Domain location=123-143; Score=21.4; E_value=0.0033; Accession=PF00612.18; Description=IQ calmodulin -binding motif
  Pfam annotation: Domain name=IQ; Domain location=149-169; Score=4.8; E_value=13; Accession=PF00612.18; Description=IQ calmodulin-binding motif
  Pfam module annotation: Pfam domain module=IQ::IQ::IQ; Domain location=101-121::123-143::149-169
  Subcellular localization annotation: CTP_CleavageSite=25; ConfidenceScore=5.15e-01
MGKSPGKWIKSVLLGKKSTKSGPTKSNESKADNNRYSTGEDRTLSESSPVISEPVLVNIHKNVAINGKAADASDRARQQDPQSQSVVESRSSAPAAQLGEDQAAAKAQAAFRGYLARRSFRALKGIVRLQALIRGYLVRRQAVSTLRATWLIVKFQALVRGRNVRLSGSRMQLNVKFGQSNFGGVRSSDAWKEKLSSNAYVRKTWEPKGKGFGGFSTRLLSSPIVLEPLHFQYDKRDPNSTYNWFERWTIGCIWKPAFQPKRVADGKPLVKKASYAMETQSAKLKRNIRKGSAAIAGSFHTSGESDKVKRNPKNFSSFPADSVPDSQLSELEKVKRNLRKVTDSMAEASKISSSRVDSSKVCNSTAEVPKESNPVAEISKIRSLLNGISDHQDIQCENTRESSFPLGTQEDSDNDHLLRYSNMDSLDLVPGLKSDQEIQLDSVSIGENVDDPTVVAPAVEEMSPQNIDTEDNVLCKKEEARSKEEHLSNGSLRTSKRKSSFPNKSEYVENGTHATPVQPRQPSYMAATESAKAKLRAQNSPSLDSDSAAEKNGFTRRHSLPSSTKSRALKAEWKR

SEQ ID NO: 73804 - protein, 632 aa, Zea mays
  Coding DNA Sequence Number=SeqID_30429
  Gene Ontology: Mol. function=inositol or phosphatidylinositol phosphatase activity; Cellular component=intracellular; Biological process=abscisic acid mediated signaling
  Homolog annotation: Hit_ID=A2ZX87; Match level="QueryCoverage=90%, HitCoverage=89%, E-value=0.0, Identity=60%"; Hit description =Putative uncharacterized protein
  Pfam annotation: Domain name=Exo_endo_phos; Domain location=55-536; Score=118.9; E_value=1.5e-32; Accession=PF03372.14; Description =EndonucleaseExonucleasephosphatase family
MCAWERKLHDEERSVRGFGAEAIGNQLGVVPCGLRRRRKSETLRAQYIDVRELRICAGTWNVAGRLPPNDLDIQEWLDMEEPADIYVLGFQEIVPLNAGNIFGAEDNRPVAMWEHIIRETLNKISPDKPKYKSHSDPPSPSRFKPSDDAFVMEDELISESDSEGDGEVHPLNEQDLVDSVDGIHGNKCEPQTILQDEEFSRLPSVKTFDRSNNLSFKESNLEEKICQKILTKTFSHSERLGMIWPEPPLDMFAQCLPDSTKPFASGKVLRSYLSFKSVNGDSGPFAEDNSVPDFYMSCAAVKRKRPYFVRIISKQMVGVYLSIWSIYVLAPIVFQSFHSHITGIYFPSIHQHYIWKRGSISVSMSIYQTHFCFICCHLTSGEKEGDELKRNADVQEIHRRTIFNLVSRVNMPKTIYDHERIVWLGDLNYRINLPYEKTHELISKQDWNKLFGKDQLKVELKKGHLFEGWTEGVINFPPTYKYKVNSEKYISDDNKSGRRTPAWCDRILSHGKGMRLLSYKTVDLRLSDHRPVTAVYMADVEVFSSKKLQRALTFTDAEAEEQLSFEEDNASGIYNLGLYESSSEVYTPLVRAKVFSKVTWLKPQPLMRALSRPRRNGLPAVSRSFPTLRLRR

SEQ ID NO: 73805 - protein, 51 aa, Zea mays
  Coding DNA Sequence Number=SeqID_30430
MTVRLNDGLMGIRGPLYTDEMKLPGRAKDEHGAAEYMIFYYDMEKKASNKN

SEQ ID NO: 73806 - protein, 212 aa, Zea mays
  Coding DNA Sequence Number=SeqID_30431
MRAGRKRWRRQSPKQPSNPTEKSILVRSTTQRGCHSDPTAKPVDTLLHRPHRAPVARAVLAVGRAGARGLPAYAEQQSALGATPALLWPDYRTAARPRVRPRRAGVGVARPSRREGHARGGRTAAMLRVRARSNGVGAHRAAGCRAGVGATPPRPRRAAEPSSEAGQLACTEPPCSRARAVEDPRPNSRIRTDGCVGYARRTYALWRPPLAR

SEQ ID NO: 73807 - protein, 171 aa, Zea mays
  Coding DNA Sequence Number=SeqID_30432
MAAVSLARRWKHRGLAPSTVRGLQICGEGQIWGRGSFSVRRPTILHCSLRTATALRFMAQEMEEEEVSALTGFYTQGPSLTSANPSGDYGDSVTGLSRVCYDLRRKSRAKILRTGVERITVLPVGEETTDKATHLAETTKPDARASLHALGCVAPHRAHEAWTRERRCPRP

SEQ ID NO: 73808 - protein, 260 aa, Zea mays
  Coding DNA Sequence Number=SeqID_30433
  Homolog annotation: Hit_ID=A2Y7H2; Match level="QueryCoverage=33%, HitCoverage=39%, E-value=1e-40, Identity=93%"; Hit description =Putative uncharacterized protein
MEESTSSAWRATQRLRRRDSRLRLRTTDDSASPYSRGGRPGWWIRGVPWPALWRQGNMLRRGGGRVNYVGRGKRVRRRTEPGARCCYVDVEEEEEEPRGGAGSAGGVPGVRSWLSFLVALLQCLHGPPAEMRFTASPVVELPVGGAVLMFEQDNDSFEVGTSVWPSSLVLVKFVERCIRDPALPFADVPRFPGTRAVELGSGCGPAGLGLSRLGLTDIAPVEAVKNSCNTKHGGYHVVDQEAPDGASEQAGTRSRLPAVA

SEQ ID NO: 73809 - protein, 465 aa, Zea mays
  Coding DNA Sequence Number=SeqID_30434
  Gene Ontology: Mol. function=diacylglycerol kinase activity; Cellular component=nucleus; Biological process=activation of protein kinase C
  Homolog annotation: Hit_ID=A7Q2R2; Match level="QueryCoverage=84%, HitCoverage=84%, E-value=2e-75, Identity=36%"; Hit description =Chromosome chr1 scaffold_46, whole genome shotgun sequence
  Pfam annotation: Domain name=PPR; Domain location=212-246; Score =36.6; E_value=9e-08; Accession=PF01535.11; Description=PPR repeat
  Pfam annotation: Domain name=PPR; Domain location=278-312; Score =17.7; E_value=0.043; Accession=PF01535.11; Description=PPR repeat
  Pfam module annotation: Pfam domain module=PPR::PPR; Domain location =212-246::278-312
MMRPLLRDPTTLLPSLAEASHLRALHAHLVVSGRLASPSHLAAFLASLASSNHLSYARLVLPQRPATLLAHNAFIRALARGPRPCLAFAAFRDLPLPPDHYSLNFLVRAATALVASAAEEKHVSAEVNARLQAVSAHGAAVRWGHAADPHVQSGVLSMYAALGDVASSRAAFAEIACPDVVCVTAMVAALAAGGDVDAARDLFDGMPQRDHVAWSAMIAGYMHVGRSREALMLFDEMLSAGTTVGEATLVSVLTACAQIGTLDRAMEVFESMAERNVYTWTSAVSGLAMNGMGTECLQLFKRMEGRLDDAISFINDMPMEPHEAHVQLSNIYAESQNWKGVSRVRGMMKAKGVKKVPGWSTIEVDGKVHEFYVGGRLHPRYNEIELMLAEMDRRLRLQGYTANTREVLFDIEEEEKEGAISLHSEKLALAFGLIVLPEDVEIRIVKNLRVQGRCFSQTFPTLYGY

SEQ ID NO: 73810 - protein, 330 aa, Zea mays
  Coding DNA Sequence Number=SeqID_30435
  Gene Ontology: Mol. function=kinase activity; Cellular component =cytoplasm; Biological process=phosphatidylcholine biosynthetic process
  Homolog annotation: Hit_ID=Q1KL28; Match level="QueryCoverage=100%, HitCoverage=100%, E-value=1e-131, Identity=68%"; Hit description =Choline kinase
  Pfam annotation: Domain name=APH; Domain location=49-262; Score=43.1; E_value=1e-09; Accession=PF01636.14; Description=Phosphotransferase enzyme family
  Pfam annotation: Domain name=Choline_kin_N; Domain location=1-48; Score=44.7; E_value=3.4e-10; Accession=PF04428.5; Description =Choline kinase N terminus
  Pfam annotation: Domain name=Choline_kinase; Domain location=83-254; Score=179.4; E_value=9.4e-51; Accession=PF01633.11; Description =Cholineethanolamine kinase
  Pfam module annotation: Pfam domain module=APH::Choline_kin _N::Choline_kinase; Domain location=49-262::1-48::83-254
MVAIENQSQAAVAAEAVAAPASRIPREARRLLHELAAAWADVADCRALEVVPLKGAMTNEVYQARWLTAGPAGQKEEPRAEREVRKVLVRIYGDGVDLFFDREDETLSAADLRDPEISALVASKLREFHNLDMPGPKSVLIWDRLRNWLRTAKSLCPPEEAKEFRLDSLENQITALENECSGDYQWIGFCHNDLQYGNIMIDEETNVLTIIDYEYASFNPVAYDIANHFCEMAADYHSSKPHILDYSRYPDVDEQKRFVKTYLNISGEEPDAEVVENLLQSIEKHTLASHLVWGLWGIISDHVNDIDFDYKEYARQRFEQYWHKSAILTS

SEQ ID NO: 73811 - protein, 279 aa, Zea mays
  Coding DNA Sequence Number=SeqID_30436
  Homolog annotation: Hit_ID=A2FXY5; Match level="QueryCoverage=89%, HitCoverage=26%, E-value=3e-11, Identity=25%"; Hit description =Agglutinin, putative
MALFPPILLEERRRRGARGLLSQNPAPAKPLTTSTYQPENLGLDRAPGLRPARMREQPDRPKHRETVRLTAAKSGLRRHRKLRIARPQGSDSGLAPEDDELRLARSQGSDSGSVPEDDELRLAQPQGSDSGSAPEDDELRLARSQGSDSGSVPEDNELRLARPQGPDSGSAPEDDELRLARPQGSDSGSAPEDDELRLARPQGSDSALASADGLRLTRPRGSDLTSASEDRLDLDLGGASTSPNPGLGPTTSQEAPSLPYPKLTQATGNKTGVPSGSPR

SEQ ID NO: 73812 - protein, 386 aa, Zea mays
  Coding DNA Sequence Number=SeqID_30437
MPKIHTCLGPDSHNEQTPALKVPLQMELRFRLRRYEQPPTIGGPAEQQKADGWLTAARSSSGDDDFCSERPNGSSDDLRADAAAIKPSPTSPLEGEDEQKAVELEVSPRAAPTISSAEKPLSAAAAEGGTGSSAEAARTGEPDTRQLGWWSPSWVATGEGMRPGCLMKILEAERWLKDQRVKRWTAMQATCNHTKWAHPFNSNAPSMGARAHTSCNRRAGCYVQDTAPPLAPLPRLLDCGTSTATRGNPAHDPTVPPRHIGHEPVSRGRRRDGRYGQKWADINGGGRRAKAAVKSDRERGYPERDPPPRRKRAPSPLLIRGSKAGPSEEFNSRLRALGLRAHHWSEVRRPAPQKGSTAASGHTGSAPTTDQGFVGWPSKGSQPPQT

SEQ ID NO: 73813 - protein, 283 aa, Zea mays
  Coding DNA Sequence Number=SeqID_30438
MRGVFTLSYGGSGPATRRRRSTAEIKLRRAIPPAPIVRSHRVFPHHVCHSTHDHPKLPRDGWGQGTLIPSSGWILRRAMVETVDGEGLWGREAQGSPGLGEVEAPPRSRSSLSSEAEVESEPLGRARRRPLAEARAEVRAESELWGRAKRSSSSSGAEPESEPWSRAKRSSSSSGAEPESEPWGRAKRSSSSSGAEPESEPWGRAKRSPSSSGAEPESEPWGRAMRSFLWRLRPDSAAVSLALLSGAAVGAAQAALSSCQGGQWSGEVTAVTSALSTEGCASG

SEQ ID NO: 73814 - protein, 277 aa, Zea mays
  Coding DNA Sequence Number=SeqID_30439
  Gene Ontology: Mol. function=voltage-gated anion channel activity; Cellular component=mitochondrial outer membrane; Biological process =anion transport
  Homolog annotation: Hit_ID=Q9SPD7; Match level="QueryCoverage=99%, HitCoverage=98%, E-value=1e-86, Identity=58%"; Hit description =Voltage-dependent anion channel protein 2
  Pfam annotation: Domain name=Porin_3; Domain location=2-270; Score =238.5; E_value=1.5e-68; Accession=PF01459.13; Description=Eukaryotic porin
MGPGLYSDIGRKARDLLTGGFNTGQQLVLITHCSNGTRIAASSTKSNEFIISEIQAQLKNKNVTVDVKANSEANLSTTVTVEELGVLGLKKIITIPYPHPAFGRLEIQYLHDYAGINASSTMNRKPLVNLSAVFGNKAIAAGADVVYDGATGDFTKYNAGLSFTNADLNAAVTLNNKGDSLTASYYHLVDTEKNTAVGVEVARNFSTKANRVTFGMRHALDPTTTVKARYSSNGMASALIQHEWRPKSFCTLSTEVDVNRFDFLQTPKFGLSLVLKP

SEQ ID NO: 73815 - protein, 151 aa, Zea mays
  Coding DNA Sequence Number=SeqID_30440
MEVGDDNSLIRRRGLNRLVPERVCGGRTLEVLLNLSILASECISGNALLLPDESGRPLTLPDSNDYSLGGSEGRNECGVGCSHLMGRRGGHVGPKLEGKPTPKCYVPALTGDRTTMAGSHRATTLCGDGETVNGGISAMPVNIGMTTVILA

SEQ ID NO: 73816 - protein, 176 aa, Zea mays
  Coding DNA Sequence Number=SeqID_30441
MPGRRSESAAATACATVRRVEGNTSDGGEDARARDSGGDGWDSRHCRWGAESRNVFKLINRPSRRVREGNTVDGGEASGGEVARTGDNGWDARARTCGEQSRVCASGRRDNGVVARGGMSGRAHVVEVEDTSRIQLCPPSPYHLCTIAGIRYEGPWASKAASSNASATDAEFTMYT

SEQ ID NO: 73817 - protein, 136 aa, Zea mays
  Coding DNA Sequence Number=SeqID_30442
  Gene Ontology: Mol. function=alpha-amylase activity; Cellular component=chloroplast; Biological process=carbohydrate metabolic process
  Homolog annotation: Hit_ID=A2WUF6; Match level="QueryCoverage=89%, HitCoverage=20%, E-value=7e-43, Identity=67%"; Hit description =Putative uncharacterized protein
MAWHMTILDTDVAKRGGDLGHVLKKSEGSSSQPQNTSPEDTGLSGKHISGFYEEYPILKSEYVQNLVTVTVRRDIEAHKRLVEFDTDIPGEVIIHWGVCRDNTMTWEIPPEPHPPKTKIFRHKALQTLLQLFIPLY

SEQ ID NO: 73818 - protein, 246 aa, Zea mays
  Coding DNA Sequence Number=SeqID_30443
  Homolog annotation: Hit_ID=A2WYS1; Match level="QueryCoverage=20%, HitCoverage=13%, E-value=2e-18, Identity=90%"; Hit description =Putative uncharacterized protein
MADTDRDLKALLRLLIKQLDEGFKQLNDASPRTGSYGPDQHCYVRLAALLLLLARAAVRCRTRRPMRWTDATVRDRRAFFPHTPSSDLRPSRPQPSASTLGCGGAFAGEVPGGGSDHDERRGAFLPPCPPPRRARPPRPADRDVGEVHIPLSELLSGAPDGPVPAKFVAYQMRKISSGKPQGVLNLSYKLGEFANGYAPAPPPSPPTPSLHRPPRTRLLQARLMPTRLPASRRVPASFRQGRLKGN

SEQ ID NO: 73819 - protein, 225 aa, Zea mays
  Coding DNA Sequence Number=SeqID_30444
  Gene Ontology: Mol. function=transporter activity; Cellular component= integral to membrane; Biological process=auxin mediated signaling pathway
  Homolog annotation: Hit_ID=A2WUF9; Match level="QueryCoverage=75%, HitCoverage=54%, E-value=9e-72, Identity=78%"; Hit description =Putative uncharacterized protein
  Pfam annotation: Domain name=Mem_trans; Domain location=41-225; Score= 13.1; E_value=2.3e-08; Accession=PF03547.9; Description=Membrane transport protein
MPELSSDRQWDRLTDWAGHLEYSSVQVPPIPTMISWPTIYHVLEETVPLYVAMIVAYLSIQWWKLFTPEQCSGINKFVAKFSIPLLSFQILSTNNPYSMNLKLIFSDVLQKSLSLLGFAVASRVCCEEKFDWLITGFSLSTLPNTLIVGIPLLKGMYGDEAVKLLSQIVALQSLIWYTLLLFLFEFRAARGMAITTSSEAIGKNLLTAFLKIDISICFCSTVRIT

SEQ ID NO: 73820 - protein, 64 aa, Zea mays
  Coding DNA Sequence Number=SeqID_30445
MREGVRASGVLAQVAGGGAVASSTRDVGAESAAARSSGGSYAEKTGLTGRAREQREGKAGDTFR

SEQ ID NO: 73821 - protein, 376 aa, Zea mays
  Coding DNA Sequence Number=SeqID_30446
  Gene Ontology: Mol. function=amino acid transmembrane transporter activity; Cellular component=integral to membrane; Biological process=amino acid transport
  Homolog annotation: Hit_ID=A3A1G1; Match level="QueryCoverage=99%, HitCoverage=63%, E-value=1e-130, Identity=62%"; Hit description =Putative uncharacterized protein
WAGTTSVDFSLAQLVQVIVLLATGGLNGGGYMASKYVVLAIYGAILVIHGLMNTWHGSAISERSGTPQVAVATERASTEFIFTHLNTDNGMGVHGKAYILALGLLMSQYSLIGYDASAHMTEETKNADWSGPMGIVTSVALSSVLGWVYLVALASLMTDIPYLLDPGNDAGGYAVAQALYDAFRRRFGSGVGGVVCLGIVAVTTFLCGSACVTSNSRMGYAFSRDGAVPFSHVWYKVNKQEVPLNVVWLSVSVAFAMALTSLGSQVAFQAMLSVATVGPYIAYGLPIVFRVTTARRSFVPGPFHLGRYGLLVGWVAVAWVAAVTVLFSLPVAYPVAEDTFNYAPVVVVGVLLLSVGSWVLHARFWFQGPITNVDVA

SEQ ID NO: 73822 - protein, 396 aa, Zea mays
  Coding DNA Sequence Number=SeqID_30447
  Gene Ontology: Mol. function=DNA-dependent ATPase activity; Cellular component=mitochondrion; Biological process=DNA metabolic process
  Homolog annotation: Hit_ID=A2WYY9; Match level="QueryCoverage=77%, HitCoverage=47%, E-value=1e-108, Identity=61%"; Hit description =Putative uncharacterized protein
  Pfam annotation: Domain name=RecA; Domain location=29-307; Score =163.3; E_value=6.5e-46; Accession=PF00154.12; Description=recA bacterial DNA recombination protein
NLYKFPVDMQLDYESDPPLDDTKAIEKESSLNVAVSQLAIDFDRDSNLCLERFSRARKASVVSTGSLKLDLALGVGGLPKVALLLIKVAQQGRMVEIYGKEASGKTTLALHVIKEAQKNGENAFNPSFAESIGVDSERLLIAQPDSAENSLSIVNTLVGGSVAVVVVDSVRTKRTSSNPGIYKEVPCGGNALGFYAAVRMRTSRRELRYSEDEATGVGISVQIIKNKLAPANLKKEAGIDITFGKGICHESEILETASSVGVILKDGCGYWINNEFLAGKVEAEKFLRENAAVADEICNTVRNEFLQRADLSSHGLRDGQEFQTVRRARIRVLSTASEVACKRPWEGIGEAEEAVIGAANDKEGLAATAGDGPCRAKRLRKCNPKVFGPAWLNSTK

SEQ ID NO: 73823 - protein, 370 aa, Zea mays
  Coding DNA Sequence Number=SeqID_30448
MQAANHTKGAHPFDSNASSVEAQAHTSCNRRAGYYVREAAPPLAPVPCLLDCGTSTATRGDPAHDPTVPTEHIDHGSVSRGRRRDGQYGQKWAGSNGGGRRVEAAVKSDRERGYSERDPSPQRKRAPLLIRGSKAGPSEGFDSRLRALGPRALLLIRGSKAGPSEGFDSRLRALRLRAHYWSEVRRLAPRRGSTAASSHSGSAPTTDQGFVGWPPKGSTDASEHAERGMTLGTFDTQPRLGLRSRGSGAALANPAPAEPLTASTYQPENLEPDYAPGLRPENSAACAAPTAVPLDRVRLTAAKSSLGRHGKLRLARPQGSDSTSTPEDGLRLARPQGSDSASTSEDGLHLARPQGSDSASTSEEPPPRPT

SEQ ID NO: 73824 - protein, 40 aa, Zea mays
  Coding DNA Sequence Number=SeqID_30449
MGKEEVKTHKCKKAFESSSDDLNEDAYMFIKSFKKFVRHC

SEQ ID NO: 73825 - protein, 94 aa, Zea mays
  Coding DNA Sequence Number=SeqID_30450
  Homolog annotation: Hit_ID=Q7XBD4; Match level="QueryCoverage=71%, HitCoverage=7%, E-value=2e-08, Identity=54%"; Hit description =Cinful1 polyprotein
MAVEKKTFCIVSLTGLILSNALRAQKDAEDEGCAIALSNLRSEVIELRNEDPAKASSGPQLKGDDEIKKMAEAIMDEVVNRLLNEAAEVVLRED

SEQ ID NO: 73826 - protein, 155 aa, Zea mays
  Coding DNA Sequence Number=SeqID_30451
MGKSKKGGSSSHHSGDKRKREPTPPSEVFGDSEYSEEEFSSESEGSPVRASPPVSSDDSDDSQGIAAEVWTYIRVVERVGLEGSDESEYSSDEENSSDSFEEGGGGDGGDGDDDGGDGDGGEGDNKGGDGDGKGGSGDGDNGSKGSSRDSNKASG

SEQ ID NO: 73827 - protein, 339 aa, Zea mays
  Coding DNA Sequence Number=SeqID_30452
  Gene Ontology: Mol. function=hydrolase activity, hydrolyzing O -glycosyl compounds; Cellular component=vacuole; Biological process =carbohydrate metabolic process
  Homolog annotation: Hit_ID=Q02437; Match level="QueryCoverage=90%, HitCoverage=93%, E-value=7e-97, Identity=60%"; Hit description =Glucan endo-1,3-beta-glucosidase GIV (EC 3.2.1.39) ((1->3)-beta -glucan endohydrolase GIV) ...
  Homolog annotation: Hit description=((1->3)-beta-glucanase isoenzyme GIV)
  Pfam annotation: Domain name=Glyco_hydro_17; Domain location=30-337; Score=623.2; E_value=2.4e-184; Accession=PF00332.9; Description =Glycosyl hydrolases family 17
MAITQDFAPLAVGAIVVGVLASLLSGAQSHGVCYGMTADDLPPPSEVVQLYKSNGIANMRVYSPVGEVMEALRGSGIGLVLGVANEDVASLATCAPCAASWVEANVRPYHQDVNILYIAVGNEVDAAAAAQTILPAMRSLQAALAAAGLAGSIKVSTCVRLDVVTDTFPPSSGAFAQPYMVDVARFLAAAGAPLLANVYPYFAYRGSPGDVGLGYALFQPGAAVRDGGSGLVYTNLFDAMVDSVHAALEKAGAPDVRVVVSESGWPSAGGAAASVQNAQAYVQNLVDHVAQGTPKRPGPLETYVFAMFNENQKPGEPTEKNFGLFYPSKAPVYPIVFRR

SEQ ID NO: 73828 - protein, 289 aa, Zea mays
  Coding DNA Sequence Number=SeqID_30453
  Homolog annotation: Hit_ID=A2Y3I8; Match level="QueryCoverage=98%, HitCoverage=28%, E-value=2e-96, Identity=67%"; Hit description =Putative uncharacterized protein
  Subcellular localization annotation: CTP_CleavageSite=37; ConfidenceScore=5.37e-01
MGPTFKAFCGPNVSSSKNVNRTGKHAALSFVKRVLVRCQNYEEAGTSCFDEPIFKDMFLSATSHRRSLDTASQDNNTTARPVHRAGAPDASRGSSHPTDLSFAKEDPWTNNVKQRELLLDEVVGSITGGALRTSSSVLGISLVSNTKGKRSEREGKGHNRDSLRSGRPSPSNAKGERKNKTKLRQKAANISAPSGGLQLPAKTTPPSSGNGKEESAAAAAAAAARHGGDPAANASNDAEMPDLANLELPGLDADFGGWLNLDDDDALQDLDLMGLEIPMDDINEINLMI

SEQ ID NO: 73829 - protein, 838 aa, Zea mays
  Coding DNA Sequence Number=SeqID_30454
  Homolog annotation: Hit_ID=Q5W6G8; Match level="QueryCoverage=94%, HitCoverage=61%, E-value=0.0, Identity=66%"; Hit description =Putative uncharacterized protein OSJNBa0077J17.11
MAKIDKLCPNIVRKRSRGDSSSNERSSVLSSGGVTPKNVPQSHLNADDMEAGLQREERTKNAGQNRRIRTSMVEGKLGAVVRAVSPSLQVAGLIWQCGLVAVFSMMDARTAGPSRGPGPTDRISDPGKATNGSSAVPEEKIRGLATTIDGWEKPKMKKKRSTIKADMSLAGVLRTVDVDRESKQGMQHKFTNDGRARMTSSSFRSGTVASGTTKADLLSTQNGLVMRPLNRSDQDNGFHPTNKRERQAALDKETPNPRTINKPNEDDSGCNIASLPKANGSARGPRSNSGSILKSYPNIHRSQASSDDWEHPSGTNKLISAGGSGIHKRTKSTHSLSPPIQWGGQRPQKISRSARKSNLVPIITTDSALVPGSLDSPVNEDCAGLPRRASVNSLQQTKRGDHGLSTGPEGNEPVVAEKKLRDKGKRAGELDDGHGSGFQKIAMLGHPSKRNKLPADEDIGDALRRQARVVPGFTLTRPGTPVSIDKLENAPITKQRSVRTVSERTESKSGRPLMKKISERKSNARPRHTSSSVQSDSPVQSEDDHEELLASANAALRSACASTFWRQVEPFFAFLTAEDITYLSQQIHLPDDSSSSRSMEGGECQKYKGGLEYISHPSTPAASNKDDHAALPNGFGLNQLDNDIGVGWEASCIEPILDQLVHGIGVPGWSSVGQRLIQALIDEDRIDSITNNTYISEGYAFDTHEIHFDGGGWKPHSNNYKLEPLANFEASRRGPNGLTMDSDWKYNDVSNRSGNVMDKTKVWPEFQYSEMCFNDRIIIELSEVGVSIEPVLYYLLICTFCYNDGVTSHRLTLLRHFPLDSASIQLNCAICLISLLFA

SEQ ID NO: 73830 - protein, 247 aa, Zea mays
  Coding DNA Sequence Number=SeqID_30455
MTLGTSDTWPSLGLRSRGTLGHFRDRRERFVTESHQREASSPRTLSKGSGSGESPAEPDHAPELRPGRMRERSDRPKHHEKHSDLRGVKPLLRGLSGYTRRENSAARSAPTAVSTTQAKTDNKSRSTTEFGLGRNRKLRLARPQAPASGGGFRLARPQAPASGGGLHLARPPDSASTPVSGGIASSPDPGLGLKRSLRLVRPWARIDRANRGYIITLFLARSGYKEQDRRPIWLTPATGNDDAPRAP

SEQ ID NO: 73831 - protein, 261 aa, Zea mays
  Coding DNA Sequence Number=SeqID_30456
  Subcellular localization annotation: CTP_CleavageSite=40; ConfidenceScore=5.38e-01
MSKYLKRLHFALAKTQYIPLQTGLRFRSRRPKQPPHQGARGMTNSKRLAGNRSGSSDNDLRLGRLDGSGDGLRANATAEGPSFVSLMEDENQPLKPKSRRLGAQVAPTVSSAETTAGARGSLTSGCHHLSTDNSGPLPSNTTPANSGRPEAHRQVLTPVLATRTRTGPSQNTNAALAAYDVLGDPPPPIAGGAARTGGGGRQRRQRQSRSCRGARRAVAASATGGERPSPQITEGRSGPLPMQRQAPAQPALRLSKDDENP

SEQ ID NO: 73832 - protein, 178 aa, Zea mays
  Coding DNA Sequence Number=SeqID_30457
  Subcellular localization annotation: CTP_CleavageSite=15; ConfidenceScore=5.36e-01
MISASPDPRARTRPRLGRRSPPRPTPGLGLDLDSGRRSPPRPTPGLGLSLNSGRWSLPRPTPGLGLDLGSGRRSLPRPTPGLGLDLDLGGVTTSLGPTTPQGEAIITLPLASPGYGEQDWRPIWLAPVKQVMMAPRVLHDNGGSQPPTEARIRQQGSDSPDSCASTGLKRSSDDHDAK

SEQ ID NO: 73833 - protein, 667 aa, Zea mays
  Coding DNA Sequence Number=SeqID_30458
  Subcellular localization annotation: CTP_CleavageSite=82; ConfidenceScore=5.25e-01
MRKKTQLYITKTKCSGLGDRKRHTHVQNKLLRQNQASPGGGAAPSASSPTSASTPPSAESDPASNSNMVGGSPPRRKMSAPRLGHRRQGLLYELGPSRRPDRLLRSLSQLSPEDTSPAHGLGSPTPGLVPPVDDLARSQPLLQHLVGLGSPDSHNEHTPALKVPLQTGLRFRSRDNDLRSGRPNSSSYDLRADAAATRSSPSSPLEGQGQAIKATELEDWSADGADDPVGDEDFSGCCHHLSNDGGVHLFANTAPVSGGRPKSAPAGPHSRPCHENENGNVPEHGSLPPAWLEDASSAELEDGFHPQKLEEEARRRPTPRRLSPLVSSSRRGLSLHQHAPRSSPYDTGAGSHASCELPQDRRSQTATRAERVTAQRLQAFLRLRPNQRVKGRTAMQAACNCTKGAHPFDFDASSMEDQAHTSWNRRAGYYVQKTAAPLAPAPRLLDYGTGAATRGNPAHVLAVPTRHVGHGSVSRGRRRDGQHGQKWAGSNGGGRRAEAAVKSSAGSRPHLEQRESSLPRREDDAPVFRSSNGSRIRNGCPANHSSYRINSAAGQATPLAGEAGNASPPPYRPCQKRDRERGYSERDPSPRRERAPSPLLIRGSKDGPSEGFDSRLRALGLRAHYWSEVRRLAPQKGSTAASGHSGSAPTTDQGFVGWPPRRVRQSP

SEQ ID NO: 73834 - protein, 283 aa, Zea mays
  Coding DNA Sequence Number=SeqID_30459
MSEILCAKQAKGANHVTSRSPAQSGTPDCPVVHRTVSGHICHWNSHTRDSPRCQEEICTGFVPIFASLRSQQSFEQGQKHTSTCSTRPELARARPAPDRAHPASRQAEPVPLPAPAPIKPAKASTVRPRSLSTSPERKITGVCPAHSVPAAARAPTTSEESGSASPETPDQGHRTSPDRRRTWTNLHGRSTRRRQARPPAHVDRPIPAFTVVKSYLAVTTRTSRSQPALRRTSLAADCNLTDGEYILMPEQGVAQEVAQDPAPEPTIEDLPAPALEGKPRFYA

SEQ ID NO: 73835 - protein, 323 aa, Zea mays
  Coding DNA Sequence Number=SeqID_30460
  Homolog annotation: Hit_ID=Q6J9V9; Match level="QueryCoverage=27%, HitCoverage=33%, E-value=1e-13, Identity=55%"; Hit description =Putative uncharacterized protein
MQAACNRTKGAHPFDFVASSLEAQAHTSWTGKEDTPKGILLHEGNGPRAPLLIRGSKAGPSEGFDSRLRALGLRAHYWLAPEGFDSRLRARGARDDPGYVRYITKARATLPRPRLHPRDTIPPRPSLASGKDSRPRRIHVSPEGIQRRLPCSDCRASGDLGSSASGDIGSSASSDPRARPPSRPRKMDSASPDPRARTQPRPGRRRTPPRPTPGLGLGLDSERRRTPPRPTLGLGLGLDSERRRTPPRPTPGLGLGLDSRRRRTPPRSTPGLGLSLGSGRRRTPPRPTPGLGLNLDLRGIATSPKLGPRPATSPGGHHYPTPS

SEQ ID NO: 73836 - protein, 85 aa, Zea mays
  Coding DNA Sequence Number=SeqID_30461
  Homolog annotation: Hit_ID=A2Z2G8; Match level="QueryCoverage=43%, HitCoverage=23%, E-value=2e-08, Identity=81%"; Hit description =Putative uncharacterized protein
MAMHLGRHLLGGILRRESFSIDRMSLRSQNSIVRRVSFRLPDESDVFIIPARKDPDEYSTDDESTEDVSEEVDPKKLVKTARRNE

SEQ ID NO: 73837 - protein, 160 aa, Zea mays
  Coding DNA Sequence Number=SeqID_30462
PDLRQRRVVQTDSPLRQEGIAWHLILTRVPQSARSKVTAVTSPPLLTVLTGKQRYSPRSGNCASHQGKTDNSKSRPPLSPASGATGSSALPDPGPRPQPRPRAKDSASPNPEPRPQPRPREKVSASPDPGPRPRPRRSRRLARPQPHINYATGDPSLPYP

SEQ ID NO: 73838 - protein, 152 aa, Zea mays
  Coding DNA Sequence Number=SeqID_30463
MNALSREGCRHYEVFDQADQDFERDIYKVEDPVVKESAGALFDRMWGPHGREVVRERSETARGQAARNEKVDDFGALNSVQPGSESNPVAAVSEVAPAPAPETAGGALDAPTATTAGGGSSPTAAPRADDPAKMAAEAAVEDPTRAGSSQVA

SEQ ID NO: 73839 - protein, 126 aa, Zea mays
  Coding DNA Sequence Number=SeqID_30464
MAPKKASSKADEAAKAALLATKKGKALALTHSTHQEATEDDAHRTSEGDAHRTCSPEGQPQPPPDFAPPEGMDFTEDGEELEQEIALMQREGHFGLQQGPPLQQRAQVEDLHFPYHDRAIPHVAPF

SEQ ID NO: 73840 - protein, 191 aa, Zea mays
  Coding DNA Sequence Number=SeqID_30465
  Homolog annotation: Hit_ID=O48967; Match level="QueryCoverage=83%, HitCoverage=34%, E-value=2e-35, Identity=55%"; Hit description =Putative uncharacterized protein
MVHIVEHHDFMPEDFLVEEEAASSTPRATNLPVPGAAVVHSARQHTPAQTSKASRAAPGALFAARELLRHPPSSTASPGAMKQWHDDVDRLLDMAHSGSARPRPRSSQRQHEASASVRSPSVRAAPTEDLRADLNRRRAGEDTPASLESEKCKSRQKGERLQVVDIPRKRDKTLKEKTVVFKLIIGSLERG

SEQ ID NO: 73841 - protein, 300 aa, Zea mays
  Coding DNA Sequence Number=SeqID_30466
  Homolog annotation: Hit_ID=A2XIQ6; Match level="QueryCoverage=82%, HitCoverage=48%, E-value=5e-24, Identity=29%"; Hit description =Putative uncharacterized protein
MVYCQGERDPKTGIEPTDLILWMSTHCKNGEWSEEASRGIYEKACEKIVEKVYQDDGFDLTREEENAIFQTSFKETTGCKANRLHGHGYLSRYPTRRQVMDSKFLEQARATAATNQKNIELETQVQLLNEKLASEVVERERIVQEKMQALQEEEERKRQLLREEMRKEMVAALTAAQQANRESITPVDPPLVIPTETFELIPADPLAPTPRSENNVCTPDTNNKKDNVPANYISSYALKNAVTRRVQARGNKRSECVWNANVHVQSVRCHRDIVVMITITCINGGDGGVHGGPKKLPLIC

SEQ ID NO: 73842 - protein, 196 aa, Zea mays
  Coding DNA Sequence Number=SeqID_30467
MVQRVTRSTRSGEVTNSGERERTVLVGLVLGSSSGKLHGLSRKLSEGSDRAEMGGKGLGHGERPRAALAGRGEVAGAAGGLRRVRRGAEGVTGKVVVHGGGLYSHSRAWHRRGHGGGLGRAGVRVRACSGAFPSVCPRRTRGGLLLPVFNGLFGRLSVQISAKTHVRSLLCTKSYLFHGSICLKGFELGFEPFSPL

SEQ ID NO: 73843 - protein, 244 aa, Zea mays
  Coding DNA Sequence Number=SeqID_30468
  Homolog annotation: Hit_ID=A2XR38; Match level="QueryCoverage=78%, HitCoverage=40%, E-value=9e-33, Identity=32%"; Hit description =Putative uncharacterized protein
MVYIKSKLGYSGRDFLFYKKRCGIDRSRLLALDYIHQEEAMLSDNVDERKISFVLTKDPPSDLEVSITPIKRPRQRTNVDEETIEVSTDAYKEWLAILQHDNPEMDNDGVFKKEGRGTLKGIAAATKRIKNGDHKLKIEFSSKLGGPVGPNTRTFGDEIVLFTKKKAPLIGVKKWKDIELNVRSSIASDVLRRWEFPRNEDAHEKIWLLGSCFGTPKVSHEEAASAKVVSKRWPKVPFHGASAF

SEQ ID NO: 73844 - protein, 152 aa, Zea mays
  Coding DNA Sequence Number=SeqID_30469
  Homolog annotation: Hit_ID=Q7XBE0; Match level="QueryCoverage=73%, HitCoverage=11%, E-value=9e-09, Identity=39%"; Hit description =Putative gypsy-type retrotransposon
MKIWSCGKIFENSGRHTLGVAATEGPAPEGGVGSDPAPEGVGAGSLSTASMDVHAGSPPVQSEDAVLTHLSAALAGLVTLEASDPDARSLPPVDEAEVPPSGAFDIIPVDIPSSSNVSILSTMGLPLFLSNLQLWLGDALILKRSIPRVRPT

SEQ ID NO: 73845 - protein, 129 aa, Zea mays
  Coding DNA Sequence Number=SeqID_30470
MPGDAGADHGGGWVWSTATLRRCAEGEGRRRLAGKRRGLEGDPIIQVSFSPPCSTATCLLECRCLLDHRITNITTRIADLTTHVLLLVAYTTLHSHYSNHGDNGMWRATHSGAPSRHPTYSLQLRSPAL

SEQ ID NO: 73846 - protein, 147 aa, Zea mays
  Coding DNA Sequence Number=SeqID_30471
MNKTSGIRSAITTELRFPSQVRTTPLRGGRPAEQQKTDERLAAARSNHDDNHPRPGQRSGLGSSFGAGVTTGGLSPAEDENQPFRSGDGDPGLLAPYLSRHGWRKSPWDSRMPFSPRRGGKKKAADPCGGSPPTRLIFHLGLDDENP

SEQ ID NO: 73847 - protein, 82 aa, Zea mays
  Coding DNA Sequence Number=SeqID_30472
FVILSGPTIPIIGEGDEEANDRPDYDWRISPIEPQVVYASGGKAHGSVEVHRGLLLVAPVAPLKIQQKWSNYEKNLGDIRIT

SEQ ID NO: 73848 - protein, 55 aa, Zea mays
  Coding DNA Sequence Number=SeqID_30473
MRMWGNYGGLTLSLTLCLSSTYRCARGPVAKGARKTAGAWAHVNQWESSAPKTDA

SEQ ID NO: 73849 - protein, 58 aa, Zea mays
  Coding DNA Sequence Number=SeqID_30474
MAQNKSPNHQKWPLEVCCRMAHRTVRCVSHVSRPLGFDRWSSDRWGLWAIRWCTRQVR

SEQ ID NO: 73850 - protein, 302 aa, Zea mays
  Coding DNA Sequence Number=SeqID_30475
  Gene Ontology: Mol. function=small conjugating protein ligase activity; Biological process=regulation of protein metabolic process
  Homolog annotation: Hit_ID=A7P0T2; Match level="QueryCoverage=58%, HitCoverage=56%, E-value=1e-48, Identity=53%"; Hit description =Chromosome chr19 scaffold_4, whole genome shotgun sequence
  Subcellular localization annotation: CTP_CleavageSite=72; ConfidenceScore=5.58e-01
MYTLIPRCHLQPVHRSPPPCQAATTTSSAPPSPSPSLSIRFRPDQDELRSTWPQRAWTLAGTAAILSSLSTSASLAASGSGSPAEPIAAALAAYSLADLATGVYHWFVDNYGDAATPVFGSQIAAFQGHHRYPSTITLRETCNNLHALARGAALALAPVDAALSATGAPAAAHAFVGAFTACVVLSQQFHAWAHEKRRRLPPGVEALQDAGVLVSRAQHAAHHRQPYNTNYCIVSGMWNGLLDRYKVFEALEMVVYFRTGIRPRSWGETDASWKEDTGAEAAAAAASNAGLLQTAGISSDSD

SEQ ID NO: 73851 - protein, 155 aa, Zea mays
  Coding DNA Sequence Number=SeqID_30476
MGKSNKRKREPTPPSEDFGDSEYSEEEFSSESEGSPAPVSPPASSDDSDDSQGIAAEVWTYIRAVERSGLEGSDESEFSSEEEDSDGGEGEDDDDDDDDGGDGDGDGSGSSGGSGGGDGSKGSTRGGSSTGSTRGGSSKGSTRGGGGGSSSKASG

SEQ ID NO: 73852 - protein, 92 aa, Zea mays
  Coding DNA Sequence Number=SeqID_30477
  Subcellular localization annotation: CTP_CleavageSite=51; ConfidenceScore=5.25e-01
MDSALVVTILSPRISLLRVYNYRRRSFPKPSQGNQTSPPTPLPLVAEVEVRCVEVSFHGIWFVGALEEVAAPLRALDKPRVTNCSSAFSTPR

SEQ ID NO: 73853 - protein, 224 aa, Zea mays
  Coding DNA Sequence Number=SeqID_30478
MAAWLLSEQGNKGAGDLLFCESWSLGEGEQRRCAGKKGTVAGWPWSRKVEVGQWDFNRGALGCWAARRGQQREAPWLEQRYPRPRRSLCAQGNSREKGSLAMALEVQERVGGGEPIWEQGGSSSMGDGGLACPSWGAGPAKEEQGREKLVRALDSRGNDLLAGGRRRGSQLEFSGRHGWPTGRSSCALAAACGRRRQGKEVAARKNAGVGVKKWPSARERDPYL

SEQ ID NO: 73854 - protein, 85 aa, Zea mays
  Coding DNA Sequence Number=SeqID_30479
MTSPTPSATSPERSRRRHCLKILSTLVYKINSSFAIKNYIFPKLRKLRKAIEVNEQRMNIFFLVYLSNEEPRKNTKNPSPEQIQG

SEQ ID NO: 73855 - protein, 225 aa, Zea mays
  Coding DNA Sequence Number=SeqID_30480
  Gene Ontology: Mol. function=hydrolase activity, hydrolyzing O -glycosyl compounds; Cellular component=chloroplast isoamylase complex; Biological process=carbohydrate metabolic process
  Homolog annotation: Hit_ID=Q41742; Match level="QueryCoverage=32%, HitCoverage=9%, E-value=4e-35, Identity=90%"; Hit description=Su1p
  Subcellular localization annotation: CTP_CleavageSite=36; ConfidenceScore=5.04e-01
MPARALASTATMPVPLHPPPPPPRRNIIANTLAVLEAMAAHNVRTLIYSSTCATYGEPDKMPSLKELPSIILVISQSWMHWKALLKGKQYSNMACSYLAFLFVCVVSCMFYTKSLYAHNLCILTSISAQKSLYASKQTFGIVVHIGFNTTSVVPGVPMFYMGDEYGHTKGENNNTYCHDHYVNYFRWDRKEEQSFDLYRFCCLMTKFRKECESLGLEDFPTSERL

SEQ ID NO: 73856 - protein, 128 aa, Zea mays
  Coding DNA Sequence Number=SeqID_30481
MLAPSERLPWVPVLGSSDKIRVSGVALCLRLLLHAPLGGRLGDVFLLESLRLLVLLEDGFDRLLTRGELGGDVHQFARLVGSLAPQFAHQVSARGAGEERADDVRVGDVGQLGIPLAVGGSFGDPMSS

SEQ ID NO: 73857 - protein, 157 aa, Zea mays
  Coding DNA Sequence Number=SeqID_30482
  Subcellular localization annotation: CTP_CleavageSite=62; ConfidenceScore=5.13e-01
MPSSLAPREIRRRDRWHIAVVRTSWGRRRVRALRIRCRSVSLDSPSRHRNPPSRACPQIRRRASEIRRRERVPRSVVAPQMLERRWRWPSQRRTGQPPLSPGLGCAAVVRLLQERRHRLLAYLGASLSLVPGGARPSVACLEVTPLLAPRITAARTP

SEQ ID NO: 73858 - protein, 147 aa, Zea mays
  Coding DNA Sequence Number=SeqID_30483
MREQDRRPIWLVPATGLRHFSDGHVIACTGLKHFSDSHVGMYTGLRHLSARHSPPCGTRIVSIVSSSGCCELRADLAFFPPLPEFSGGRFNRRCPGTRALDGTSPVGVHRGWVSRRCRSGRDEGEGRAPLDRALAATINSGVPIRAS

SEQ ID NO: 73859 - protein, 249 aa, Zea mays
  Coding DNA Sequence Number=SeqID_30484
  Homolog annotation: Hit_ID=Q8H6I5; Match level="QueryCoverage=27%, HitCoverage=8%, E-value=8e-08, Identity=48%"; Hit description =Putative RIRE2 orf3
  Subcellular localization annotation: CTP_CleavageSite=59; ConfidenceScore=5.40e-01
MALAALRRRRPPAMRGKANCCFLARVQLSVLHPGSGRAMHRRLLSPVLKRRPPLVRLPTAAVVSSVDETVSATCAPDLRLFSFNGWFSSPVRGRERGLFSSSVCPEAIAAAVLPPETEVVVADGGAVADKPPRVCYPAGPLKLRPLCDELKPEAAVLAWTEAESARKEASSAREHVASQAEEVRKRRLELGQVVRERDQSRSHAAEAVSQAEVLGGQLAEATERLADAFARAGTLAVRAQARCRRPPSG

SEQ ID NO: 73860 - protein, 441 aa, Zea mays
  Coding DNA Sequence Number=SeqID_30485
  Gene Ontology: Mol. function=aspartic-type endopeptidase activity; Cellular component=extracellular region; Biological process =proteolysis
  Homolog annotation: Hit_ID=A2YW35; Match level="QueryCoverage=95%, HitCoverage=96%, E-value=1e-166, Identity=69%"; Hit description =Putative uncharacterized protein
  Pfam annotation: Domain name=Asp; Domain location=88-436; Score= -109.1; E_value=3.8e-07; Accession=PF00026.14; Description=Eukaryotic aspartyl protease
MASLVLLLLILLVPTLSLPAAHCNDNVGFQLKLTHVDAGTSYTKLQLLSRAIARSKARVAALQSAAVLPPVVDPITAARVLVTASSGEYLVDLAIGTPPLYYTAIMDTGSDLIWTQCAPCLLCADQPTPYFDVKKSATYRALPCRSSRCASLSSPSCFKKMCVYQYYYGDTASTAGVLANETFTFGAANSTKVRATNIAFGCGSLNAGDLANSSGMVGFGRGPLSLVSQLGPSRFSYCLTSYLSATPSRLYFGVYANLSSTNTSSGSPVQSTPFVINPALPNMYFLSLKAISLGTKLLPIDPLVFAINDDGTGGVIIDSGTSITWLQQDAYEAVRRGLVSAIPLPAMNDTDIGLDTCFQWPPPPNVTVTVPDLVFHFDSANMTLLPENYMLIASTTGYLCLVMAPTGVGTIIGNYQQQNLHLLYDIGNSFLSFVPAPCDII

SEQ ID NO: 73861 - protein, 54 aa, Zea mays
  Coding DNA Sequence Number=SeqID_30486
  Homolog annotation: Hit_ID=Q8SA86; Match level="QueryCoverage=85%, HitCoverage=5%, E-value=9e-09, Identity=63%"; Hit description =Putative retrotransposon protein
MKHELVRLAYRFKFEKQFKKPCKEWLDIIETMCNGILGCHCNKVIELCEECDFD

SEQ ID NO: 73862 - protein, 36 aa, Zea mays
  Coding DNA Sequence Number=SeqID_30487
MSPWPRQLSKALVSVANLEINVGGVTLGKDHALEYA

SEQ ID NO: 73863 - protein, 619 aa, Zea mays
  Coding DNA Sequence Number=SeqID_30488
  Homolog annotation: Hit_ID=A3BU03; Match level="QueryCoverage=68%, HitCoverage=97%, E-value=1e-169, Identity=71%"; Hit description =Putative uncharacterized protein
MRHKLPYFHPKIEEFLARNRTFRACLDHHRRSHTAPHLACRSCGGRIDRRSLGEVWRQRLGSKQAFGPIAVSTPPCPRGGVKQCARAPRRQAARANSKREGRNLPTIPMFRNSNFTCPEKSPGIPSAVVAIIWKSKTTHAARPGLLPSLLLNFEPHLRSSIKRIAHASLTHPIHAHQPPFSAATRRSGKSPEIRVRCDGGMDALPDGVVQHILSQLSNARDVAACAAVARCWRDCMPFLPSLYFPRGAFESVGVGPASAVAAADDVIGRMVDAAARLEELVVYCPFSASLLPHWLAARAATLRVLELRVESAADDKSGHLDSIGVATSLEELRLWALRMTRAPAWGQMERLRVLEVVGAVLEDAAVNGAVAACPNLTDLALLGCECAGEAVISLAHLERCRLDFVGSGNTSLRFAAPRVSSLEVQGFSLIYLQGGNRLKHLTISKNTGSVYHVEMGKLPELDHLSLRGVQWSWGAISSVLQCAGEVKHLVMKVEFCGDYDTLQPFPELDLVEFFNSHPKLHKFEIHGAMFAALCQKNSLKKLDSRFVIPFLEHVLVTVRSPLNAEQKLDTLESLVRYSVRLRRMVIRISQMKNCHGAADDFFAEICKFAYMNSGRVCIE

SEQ ID NO: 73864 - protein, 260 aa, Zea mays
  Coding DNA Sequence Number=SeqID_30489
MAPALDLVPAELDFNSRPALAWSLAPSCASPGVAHPYVSPAVELVICHSSTASLSPCHVAIELGSSRLSGSALASCALFSWWPPSPLEQHRSARLAINLVGAGLPGTRPIDAGRPAYHPHLPAMVAPRLSFASRARLPGAGLLTVNSGAGRRRARGFDRLNYWRAIVALALRFNISHQFGMLALSMWAGDVHVFADLGETVNVVAFVNTKSHCDAPKILKKENTFGRSSQEQAPKLLPIELRHNDRSQDEGPNRLKDGLT

SEQ ID NO: 73865 - protein, 165 aa, Zea mays
  Coding DNA Sequence Number=SeqID_30490
MTKVDPLSKVVEDLRKGKAPKSWQDYGYMDANAHGLDPKDALTSIETRVNSDMLQTCDVARVTRLSHRHKEKELPYDKTTHLRRKSRLLAPELSVIVSTEQYNYPSTQRRRALCVSVAQTCIIFCVPSCPARTIKLQSTSSSSQKHYAVYPVVRRWYQTPKMTCQ

SEQ ID NO: 73866 - protein, 70 aa, Zea mays
  Coding DNA Sequence Number=SeqID_30491
MDVVGPPVSYLPSPSSSSCCPFLFLVAESYSMDAGRAALLGAHLCPLRWMACCSCPRLSSCPATVQQQQP

SEQ ID NO: 73867 - protein, 157 aa, Zea mays
  Coding DNA Sequence Number=SeqID_30492
MTTGGGVTSSGEVGVTWLGAIKDWESLEKTKEATMSSSDHNGGLGVDGGTPGVPGHGRWWVGGNRECGQRDMGRRGSRLVSMCCCFEERHVPELVASSRHRQSCCGPPSFFEGLSLGWLMRSWARYISSDVDVSLVKELFGGPQSLLNDSSNKDLIV

SEQ ID NO: 73868 - protein, 82 aa, Zea mays
  Coding DNA Sequence Number=SeqID_30493
MKVQMAITRKTTHKSTGGRICISTRVFPPPSPPEDGPSHIIVDDISEGFDEEIKYTKFENEEPMEVEQADDLSMWNLDAELQ

SEQ ID NO: 73869 - protein, 462 aa, Zea mays
  Coding DNA Sequence Number=SeqID_30494
  Pfam annotation: Domain name=zf-CCHC; Domain location=209-226; Score =2.6; E_value=0.62; Accession=PF00098.14; Description=Zinc knuckle
  Pfam annotation: Domain name=zf-CCHC; Domain location=385-402; Score =17.0; E_value=0.0041; Accession=PF00098.14; Description=Zinc knuckle
  Pfam module annotation: Pfam domain module=zf-CCHC::zf-CCHC; Domain location=209-226::385-402
MEDLSTMTPIIVIGKIAAFEMLRKMVVGLRIIHSTISNSQRSYVVILWSNRTGTFSIVRCPRRVTMQLHILRGMKAEVILAFAVICTHEFDIILLAEMCHLTLALLNADPGVLQTGQEEPTSSRPYAFACDEKKKGKKKAPTPSSSSEEEEEEESDDDDQPSTSSSEHKETIRRVGKVMGMIRKINLMGVPLEVEDLLFNIDMKKQRKRGCFTCEEKGHSGTTVQIWPKPQRGGARARCLQVSTWDDSSSKDEPPRTRNHRSSSHSLRSSHKYLMAREKFETFANLNCDLTTKIEQLESNASSSTTDDSLVKKNEKLKANDQVLVGNVVIETCLNEVAKENEQLRPEVARLGKALYDKKGKAKQIQPPQDNTTKGVNKPMEGETVICRLCHKEGHKSYQCKMRTRDKQKLKKKPTRKISNTYINKVDKKVATPYLIKKKKNGKVIAIKANKQANKGKGAKRI

SEQ ID NO: 73870 - protein, 55 aa, Zea mays
  Coding DNA Sequence Number=SeqID_30495
MELPKPSDRAQPHRRRQTTLAGLPPLTGECGPGIEFLRKIMIKNNSTYATVMRKI

SEQ ID NO: 73871 - protein, 476 aa, Zea mays
  Coding DNA Sequence Number=SeqID_30496
MAAAGGRKQQSNRLQAHVPSWDSDRALSHGDRQHLWQAKRATLHLRHNDRVKKGTEKGDTPKGILLHEGSGPRAPLLIRGSKAGPLEGFDSRLRALGLRAHYWSEVRRLAPRKGSTAASGRSGSAPTTGQRFEGWTLGRAGPEGLDNRLRARRARDDFGYVRYMAKAWATLPRSDSVTKSHQRETSSPQTLSNGIGSGKSPAGSGAALANPAPAKPLTASTYQPENLEPDYAPGLRPLVNPISTKLQRPDGRDSGQGSVHSRDTISPRPSPASGRNGKPRQIHALPDGLLKQQTHLRLTRGPARAGFAEKQPWPDHYTNRPYRRSIQCKDRLTPYPDARSSVDKAEPPRPASGAIGSSASLDPRARTQPRPRTTVFASPDPRARTQPRPRTTVSAPPNPRGSDSTSTPDNGLRLARPQGSDSASTPKGGLRLAQPLELGLNLDSGRRSPPRPTPESGLSLDLGNGKSGKLISKMNF

SEQ ID NO: 73872 - protein, 620 aa, Zea mays
  Coding DNA Sequence Number=SeqID_30497
  Homolog annotation: Hit_ID=Q7XBD4; Match level="QueryCoverage=40%, HitCoverage=25%, E-value=6e-09, Identity=25%"; Hit description =Cinful1 polyprotein
MPTSSSSAAATTPADASSEETLSTVVAEELRAGDTADFGVSRMSSVRVQDMQQLGYFGGGVARVPGTEEVPEPEGELVATTSYGGQPSVEVFAKYYFLHWQKRVIGNEVPQFGSCTFTPKTGKTSMEVVELVPCARNKWGNWHEFWFYVMEGTIEDHPGLPVSEMCSHYYLAYPPFEVAEKDADEGALRCAAGLSSGRNLVEEFVAYGVWPLAHGWALGEICPRQMPSHGGKLVRSPAFALDLHSRDPAAFVREAEDGAVQIVGQYVTKTEGQHSWDIRGSNDRLNRVFELNRLPYGGYPGQDDVDRRGKKPVVETGDDPAPAAALSSKKRKLGIAMGGLGVEEATGAAKAAAPGGSQPPLAAKSAVPASSRAPEAAKAAAAGGSKSVKAAPVSSRVPEAAKAARELPPPGKRVADFATDISVEDYLVGLDEGQLVVVPPAVVTAVAAVVPRAKGSALSASGEIPALTAVRDEAGAMSRRLKEALSQAVDIADRAASGALTAFVSAEVARLRTQHADAVREKSAAVSKCRKLVDKVAALEGEKTDLRRQVAEERKEANEALTKAQSAQAEANLARAEGSLARQRAEQLEERLSALQTRVERAEASTRSEAERTRKQLMDS

SEQ ID NO: 73873 - protein, 205 aa, Zea mays
  Coding DNA Sequence Number=SeqID_30498
MASRRCGRAGRLLEHLAEVRPGRGSPLELRGEGAGRGAEHRGQREAPDFLLDSQGVAWRREEGRWDGKDTTSCTKDRGAGRSDGLLGELGHGKWPSRHGWRAPARGWTRGGLAGESVGLLNLGQRHGAPKETSKEGAHGEISCAMGGEGNAGELDQRGCWPTMETSYCRAPWRELEMAWGTVGEMQPCGRRGRRLWRLGKIKGWE

SEQ ID NO: 73874 - protein, 311 aa, Zea mays
  Coding DNA Sequence Number=SeqID_30499
MNALSHEGCRHYEVFDQADEDFERDIYKVEDPVVKESAGALYDQMWGPSRSGGGQGAGRDGEGLCAVSQAARGERVDDFGALNSALPDPEPNPAAAASEAALEPPPETAEGIPDVPAATAAGGGPSPTAAPRAEDPVKVAAEPTAEDPSAAGSSQVQDFGPAHATATTNFLAASTVDDGNKSDGSASKFSDFGDSGSSVEWTEESSDEDLDYFAALDVAAVEASPHAADAEVVPGPSTGRRRRRAVAKCRVSGADDGRLRVSRASRQELLSLPAAVSAGEGELRSLFAGEELRIMLFNYREMGIIPKVEPM

SEQ ID NO: 73875 - protein, 113 aa, Zea mays
  Coding DNA Sequence Number=SeqID_30500
  Subcellular localization annotation: CTP_CleavageSite=46; ConfidenceScore=5.44e-01
MTSVCYVNLLVVYAVSPDGDSSRRRHPSRPRTVRPSAPDVAPPRVSGAKFPRLPSRQDYGLISKNSRVSLVKLAQRRASDPTAKRPSSSSQIERTYAIPAATDAIAGPPDSAI

SEQ ID NO: 73876 - protein, 233 aa, Zea mays
  Coding DNA Sequence Number=SeqID_30501
MRPRIWAWELRGVALVVLMVVPGAIVGRRHRNSSPWSNATADPPSSVGRKSHCVIVGSPNHDAILLPDFPWAASRELVSSSPPPRRPFLPPLAGALRSISLPQAPARTRQQQQAYFTPSAIHGEQQPNTIFPWCCYLQVELGHPFTSGHAPCTAPLPCSAAPIFQPWSTSQHLPAMARDSASSLLDNSSVVFAIDLSFVYTSSQQRKSSNRDTPLHPALATLNNNAYPFIDLA

SEQ ID NO: 73877 - protein, 222 aa, Zea mays
  Coding DNA Sequence Number=SeqID_30502
MKTKLKKEKTSTTIGPKIPRSAHSTLLPCAAQLSDVAPTLGLMVSHRRHTYGWALLVGTPDHSSARPWWLQCGPHMSGVSSFSASIVSRLRPENGVVPPELPGGSTRSEYHVELPGYICGPCALVPPIPAPCNGLARFAQLTQQTPQNARRHWDRCNRDWKNNLRPQAASSSSRDRIGIPGHRLGLLWHNSTGMERRHHHYWVLGGGEYEALTVGLDICGQD

SEQ ID NO: 73878 - protein, 135 aa, Zea mays
  Coding DNA Sequence Number=SeqID_30503
  Gene Ontology: Mol. function=DNA-directed RNA polymerase activity; Cellular component=chloroplast; Biological process=transcription
  Homolog annotation: Hit_ID=Q339H4; Match level="QueryCoverage=40%, HitCoverage=3%, E-value=2e-22, Identity=100%"; Hit description=DNA -directed RNA polymerase beta chain, putative
MGSLIPFIEHNDANRALMSSNMQRQAVPLSRSEKCIVGTGLERQTALDSRVSVIAWKLPSWSTTAGVKPEEGEDEAKSSCPLCPGRHTCYNGRDKRSRSLEGELTPKTRPQFALQAATRLHESGVTPTRRTAIAL

SEQ ID NO: 73879 - protein, 264 aa, Zea mays
  Coding DNA Sequence Number=SeqID_30504
  Homolog annotation: Hit_ID=A2X9Z2; Match level="QueryCoverage=55%, HitCoverage=83%, E-value=1e-25, Identity=49%"; Hit description =Putative uncharacterized protein
  Pfam annotation: Domain name=DUF1685; Domain location=114-231; Score =136.7; E_value=6.8e-38; Accession=PF07939.2; Description=Protein of unknown function (DUF1685)
MPNNYLTRPWVAAFFQFKNPPLDLHTLLYKEDVTQLTAARIRYANAATGTGSAIKSAAAASTHLDARFSKSPLRLARGRRGGGSGRVYRSALPMEKAGQQRHVIGGGGKKAPALGLQKQNSWSPDIERDEAWERRRRGMRRGGTALRRARSVTDDDLDELRGCIDLGFGFEPAHAAACACACACAGRNRLLETLPALDLYYAVHGGAAEAPPCSCGAASEASSSEESPLGSPMSILSPGDTPETVKMRLKQWAQVVALSMLSRH

SEQ ID NO: 73880 - protein, 224 aa, Zea mays
  Coding DNA Sequence Number=SeqID_30505
MGSAYMMELEAEVAKLKELNDELQKKQVEMLEKQKNEVITSHFEEAAFASVTCYTLFWFITGSELGPGEDETASWANGKENLSAEDIDRSMILQPEIGKVLAGEPASPFRASSVVLAGRVAFVVLDWKGISECLQSYDGTDVCMVPTRAVSEESVRPVGRLGPCNASKNPELKASHGARGIGPEDACCIPLIVRQVLDQGQSSAVQQTAPSIAALLAIANVICH

SEQ ID NO: 73881 - protein, 110 aa, Zea mays
  Coding DNA Sequence Number=SeqID_30506
  Gene Ontology: Mol. function=chlorophyll binding; Cellular component =photosystem; Biological process=photosynthetic electron transport
  Homolog annotation: Hit_ID=Q2MI75; Match level="QueryCoverage=87%, HitCoverage=36%, E-value=2e-37, Identity=64%"; Hit description =Photosystem II P680 chlorophyll A apoprotein
MALYELAVFDPSDPVLDPMWRQGVACFGFGAFHVTGLYGPGIWVSDPYGLTGKVQAVNPAWGAEGFDPFVPGGIASHHIAAGTLGILAGLFHLSVKSASTSIQRVTSGFF

SEQ ID NO: 73882 - protein, 349 aa, Zea mays
  Coding DNA Sequence Number=SeqID_30507
  Gene Ontology: Mol. function=DNA-directed RNA polymerase activity; Cellular component=chloroplast; Biological process=transcription, DNA-dependent
  Homolog annotation: Hit_ID=Q6L3A5; Match level="QueryCoverage=87%, HitCoverage=20%, E-value=4e-97, Identity=62%"; Hit description=DNA -directed RNA polymerase subunit beta''
MANDQVSHRLLDTFGKKDREILDYLTPDRIVFNGHWNCFYPSILQDNSDLLAKKRRNRLVVPLQYHQEQEKERISCLGISMEIPFMGVLRRNTIFAYFDDPRYRKDKRGSGIVKFRYRTLEEEYRTQEEEYRTQEEEYRTREEDSEDEYESPENKYRTREGEGEYKILEDEYRTLEDEYETLEDEYGILEDEYRTLEKDSEEEYGSLENKYRTREGEGEYEILEEESEEEYGSSEDGSEKEYGTLEEDSEEDSEEDSEDEYGSPEEDSILKKEGFIEHRGTKEFSLKYQKEVDRFFFILQELHILPRSSSLKNKSSKRVQLIHYRRISKGELRIGMNVYQEFLGFPGDS

SEQ ID NO: 73883 - protein, 76 aa, Zea mays
  Coding DNA Sequence Number=SeqID_30508
  Subcellular localization annotation: CTP_CleavageSite=39; ConfidenceScore=5.09e-01
MAGFRASAPAQPNHQQAAADNWICDGLMVIPNSPSTGAVQSLRGKLARTGGPRRAAWSVRDWSARSGPFHTDSDVE

SEQ ID NO: 73884 - protein, 135 aa, Zea mays
  Coding DNA Sequence Number=SeqID_30509
MMVLASVVTTPFVILLPFSLPLCLHLHATQFLAEGIGAGAFSPYSSDTSLDTDSHSGYCTCAPSFFAVVGRPVCLPGLRPVLPLQPAAPIHDSNREPTDARRRGYGASRSCSYPFSMRAVEEDMVAHATLRLSWR

SEQ ID NO: 73885 - protein, 257 aa, Zea mays
  Coding DNA Sequence Number=SeqID_30510
AAGLFFLTPGGDRVCEELLPCAPPGGAPAPPLSAPAPGVAAGGDLDDGDGDSSSSHDTDLSADQEPEGWVARPITRDAARGCHFHDALDTLLRRALDRRTWSIEEQSLGAEVCSEHYSISERDSAEAAMQDAARRALSHYCSVLGGVADSLNLKYYPRRPSGSTGGVIVSLVGEDNPRLSSTVNLAAVLNTELDHALDELSRARAEIAQLRAERAERRHLDDGSPAPVGTQHPYRSPRRGHQPYGNPDCKTKIDLEP

SEQ ID NO: 73886 - protein, 28 aa, Zea mays
  Coding DNA Sequence Number=SeqID_30511
MRQQPPPNEPLVEAAVAWRTGQSEFAKQ

SEQ ID NO: 73887 - protein, 168 aa, Zea mays
  Coding DNA Sequence Number=SeqID_30512
MWTWDKQTPSETGLRLAMERAKGSRADRLAFVGVARRRRLREKGSVFVFAPIFNQQNQKLNAQHWVPGKQGTQRRPEGRLKTTHELGGPPAKQLDGKDQKATLRRPAKPTNPPKNVCRATQRREAVDQPLVEKGSKRAVCFLKKHPCRTQMLLSPGSRNHDTQPQTIS

SEQ ID NO: 73888 - protein, 253 aa, Zea mays
  Coding DNA Sequence Number=SeqID_30513
  Gene Ontology: Mol. function=sequence-specific DNA binding; Cellular component=nucleus; Biological process=regulation of transcription, DNA-dependent
  Homolog annotation: Hit_ID=Q717U8; Match level="QueryCoverage=60%, HitCoverage=93%, E-value=1e-52, Identity=68%"; Hit description =Knotted 2
  Pfam annotation: Domain name=ELK; Domain location=123-144; Score =36.0; E_value=1.4e-07; Accession=PF03789.4; Description=ELK domain
  Pfam annotation: Domain name=Homeobox; Domain location=146-205; Score= -1.3; E_value=0.014; Accession=PF00046.20; Description=Homeobox domain
  Pfam module annotation: Pfam domain module=ELK::Homeobox; Domain location=123-144::146-205
MAMPHGVAMHATSGQPANLSVLDRTAWASERYAVVPGQGIHKIEGQGMNQQHSNNVPSSKRATQCVLREGGKAIALNWQISEEVDDNGYEEGGGSSDEDEQETVDLGGLPVPETGSPSGEGKELKNHLLNKYSGYLSSLWRELSRKKKKGKLPRDARQKLLHWWQLHYRWPYPSELEKAALAESTGLDAKQINNWFINQRKRHWKPAPPTMALGTPDYRMGQHGGGASSSSASAGLRVQGQYFTGGSSYPRGP

SEQ ID NO: 73889 - protein, 249 aa, Zea mays
  Coding DNA Sequence Number=SeqID_30514
MVGRIWPAEAYGGRSTAQWRVPTAAKPPMAHDEEVEDLGDLDSTLPEASGVELAPPADAGEGPSATPASTGADEDPALATTLTGADASKVVAEPADEEPRPSQVPTFGPAQATAADNTDFVVASTVVPADDNLFGSVSECFESDGESGSSFSWTVESSDEGLDYFAALDVAVAEGGAGDLPSVSTGYRRRRVVAKHSVGEFSRSGRRRRMGMECGRLRVDQIGKQEFLSSPIGASIGEGDLRNLLRVTN

SEQ ID NO: 73890 - protein, 192 aa, Zea mays
  Coding DNA Sequence Number=SeqID_30515
  Homolog annotation: Hit_ID=Q8W0X4; Match level="QueryCoverage=21%, HitCoverage=2%, E-value=5e-07, Identity=68%"; Hit description =Putative pol protein
MELIKGELGRFAMKRGEEPTEMYNRLKTLGLHDFSSGLARWLMSWATSSGSPPEREVEGKARTRVSTGPLHTQGSSSFRDPAGVWTYLEAPDLYVYRGPVSFCGVRTYRDVVSLLATWRPLARLTWWGQAPSSAWLGDVAWVRRLHAVGEGTPDLGYRQCPPVPPQGRIWGAPVFSGGIRVKAVSSGDFIVI

SEQ ID NO: 73891 - protein, 127 aa, Zea mays
  Coding DNA Sequence Number=SeqID_30516
MGMGNAFPSPFTRQERNFPIYIPVGEEPSSSSSPKWRNFPRGIRDQGPIAISTWAGGWRAGRNTGAMGWGMLSHPRLPVGGGFFPFTFPWGKNLLHPHPQMEEFPAGNQGSGPHCHLYLGWRVARRT

SEQ ID NO: 73892 - protein, 458 aa, Zea mays
  Coding DNA Sequence Number=SeqID_30517
METCVALGGRMSSPEVRESSARMLKVTGGRWPRNVLIPRAAGEDMFTSRMARELKIFPYGRNIATVVSAVMDKDRQVAARKRRAITRFEDPVREVKRARGGAKSAAPGGVKPPPAAKPTVPGPSKSSAGLRVAASGVGKPPSTEPAKERRLPSPVRTDKAAAGGADFDTDICVDDYLVGESFFRLGLEQDYGAGSNAGQLAIVPSTVMATSPATTVGAKGISRDPWSKFCASGEISSVAAARDVAGIVSQQLKHAAAFADHVASGALSSEFAAERQRLEGRIKHLRARHVDAVRDKSAAKNKSRRLAERLAAAEAEKEDLRRRLAEERRDAYSACGRELGLRFLGWLQEKLEVLPTIVTGLMSFASLVTCEGAVNALSREGCGQFEAFDQSDEGFEREIFQVEDPVMKRSAGALFDRMWGPHGRETVRERSDRVMDQAELGEDTAPSIKHSRKEVFSC

SEQ ID NO: 73893 - protein, 289 aa, Zea mays
  Coding DNA Sequence Number=SeqID_30518
  Pfam annotation: Domain name=Transposase_28; Domain location=71-227; Score=-62.4; E_value=0.055; Accession=PF04195.3; Description =Putative gypsy type transposon
  Subcellular localization annotation: CTP_CleavageSite=89; ConfidenceScore=5.03e-01
MRTWDKQTPSETGLRLAMERAKGRRADRLAFVGVARRRRLRVKGSVFAFAPTFALRGTSLTESSDTSSDLAAVELQPGHTVEFGVSRISSVRVQDMQQLGYFGDSVWRVPGAEEVPEPEGELVVFEAFFITVLRLPAHRFVAEVLQRFEVEPSVEVFAKNYCLHWQKRKIGGKIAQFGSCTFMPRTRKTSAEVVELVPCARNKWGNWWDYWFYVTGSEVEDLPGLPAAVMCSHCYVAFPQFEVAEDDEDEGALPSAARMSSGRDLVEEFIGYGVWPLAHGWVLGKVCPR

SEQ ID NO: 73894 - protein, 103 aa, Zea mays
  Coding DNA Sequence Number=SeqID_30519
  Homolog annotation: Hit_ID=A7QDH6; Match level="QueryCoverage=89%, HitCoverage=11%, E-value=3e-21, Identity=52%"; Hit description =Chromosome chr10 scaffold_81, whole genome shotgun sequence
MAVREHAMITSYMWAERWEAVKKLKNKIGGRGLRENTGYSWIEVRGKVHVFIADNRNHPDWNRIAEFLDDVARRMREGHDPKKKYALMGVDDAVHDEALCGHS

SEQ ID NO: 73895 - protein, 208 aa, Zea mays
  Coding DNA Sequence Number=SeqID_30520
  Homolog annotation: Hit_ID=Q6QP51; Match level="QueryCoverage=60%, HitCoverage=67%, E-value=2e-48, Identity=70%"; Hit description =Putative growth-regulating factor 1
MQEACSCTTVVHPFGFIASGGLAPRKGSTAAPEHSGFKLITDQGFEGWPLGRVRQPPQSTRAPHPLLIRGSKAGPSEGFDSHPRARRARDDSGYVCYMAEARATLPSHFTLSLTDLTEKQRCSPRSDCCATHQGLRLARPQGSASTSTSEGGLRLARPQGSASTSASGGIASSPDPDLGLKRRLKHFSDDHVIAYAGLKHFSYSHVVM

SEQ ID NO: 73896 - protein, 285 aa, Zea mays
  Coding DNA Sequence Number=SeqID_30521
  Homolog annotation: Hit_ID=A0EVG2; Match level="QueryCoverage=11%, HitCoverage=3%, E-value=3e-07, Identity=81%"; Hit description=Milt1a putative polyprotein
MNMIDFEGKKVLVRPNTADKGKGKETIIGNADESAFIPFVSFGDLDNNTFKGRIRVERDLALCGRLNEEVGHLGDVDPRAIDLAMRIAERMFLKMKEDETKNKIEEEEDDRWKPNDESTSSQAKQEKSDELLKLTKRAEEQKKCFIAEDFLIRKIEDLEKLTKEHEKLKCSHYDLVQRARTRAKSQKTANSAPPDPRGSDSAPASAVGLRLARPRGSDSTPATEDRLDLGFGGAYTSPNLGRRPTTSTGGAIITLPRADSGHRNKTGVPSGSLHQIGNDGAPHTL

SEQ ID NO: 73897 - protein, 270 aa, Zea mays
  Coding DNA Sequence Number=SeqID_30522
  Homolog annotation: Hit_ID=A2GBN7; Match level="QueryCoverage=64%, HitCoverage=33%, E-value=1e-08, Identity=31%"; Hit description =Putative uncharacterized protein
  Subcellular localization annotation: CTP_CleavageSite=52; ConfidenceScore=5.37e-01
MPTSTFNHSALPLKRRPRVRLLGITSKMPTPTFNHSALPLKRRPRVRLLGITSKMPTPTFNHSALPLKRRPHVRLLGITSKMPTPTFNHSALPLKRRPRVRSLGITSKMPTPTFNHSALPLKRRPRVRSLGITSKMPTPTFNHSALPLKRRPRVRSLGITSKMPTPTFNHSALPLKRRPRVQSLGITSKIPMPTFYHSASPLRRRSCVRLLSVTSKTLMSIFTTARCCFYYIKRIDSTFSKTSDESSKRGDKRQLSLKGKSQVANQLFMS

SEQ ID NO: 73898 - protein, 170 aa, Zea mays
  Coding DNA Sequence Number=SeqID_30523
MAQVLRSVGARRRGGRRRRGCGRARLVMGGAAAMQPRAPLGATGEVEAGAPPRPTSGLGLSLGLGRRSPPRLTPGLGLSLGLGRRSPPYPTAGLGLSLGLRRRSPPRPTPGLGLSLSLGRRSPPRPTSASTSGGVTTSPDLGLGLRRSHRLARPRPRTDYATGDASLPYL

SEQ ID NO: 73899 - protein, 23 aa, Zea mays
  Coding DNA Sequence Number=SeqID_30524
MPDEGGSSGGARASRLVAARVRA

SEQ ID NO: 73900 - protein, 207 aa, Zea mays
  Coding DNA Sequence Number=SeqID_30525
MAPSWCRDLWGGCHLSAWIRDLGAINYGAVSHNSRRSCCAADGDKVTPAGSACWPTETDNFKGVPARPTESRPSSPILAPASPPTPYHTPPWSGLASATRPRPLHLSASPCPQRRPRYSSSLALTLARAVPPCSGLATDPLPHPAMVRPSLRHRASPPPFVGLALPPVAPPLFLELGLDPGSGGAPCAPASPLTVLRSASTIPRHGA

SEQ ID NO: 73901 - protein, 63 aa, Zea mays
  Coding DNA Sequence Number=SeqID_30526
MFNEHVAQSFWYAPGIGRNVCFPLRELIEEHPLPSVHARNTFRLQSADDEVFASGDSAATESE

SEQ ID NO: 73902 - protein, 158 aa, Zea mays
  Coding DNA Sequence Number=SeqID_30527
  Gene Ontology: Mol. function=ATP binding
  Homolog annotation: Hit_ID=A2ZEN9; Match level="QueryCoverage=76%, HitCoverage=7%, E-value=6e-56, Identity=85%"; Hit description =Putative uncharacterized protein
MSSSAAETPREHVESIRRKRYYIGRGEQNPLAEDLHQATNYLSQELYSKDVHFLMELVQNAEDNEYPSEVAPSLEFLITSKDITGCGASSTLLIFNNERGFSATNIESICRVGKSTKKGNRHRGYIGEKVLHMMPLHHGNVFRGIVKTTSKTASRSSQ

SEQ ID NO: 73903 - protein, 281 aa, Zea mays
  Coding DNA Sequence Number=SeqID_30528
MACLSPSSSGRRLSELLEEKQEPFVLDLHLLEKGCCSSRLLDGYDSALCWPAAGNDAAAALRRLASKKNKAAKLKPARQHAAGGLLQLLLSKILRGSSAAAQRQRKPAAAALHFSGSLKLPAAVAPASCYVELDAVKTAASDVVVVVVKAQDAATAGRYNDSDCDDDEKQQLSPVSVLDHPPSTSTSGDADADADEDCYYGGYCVSPKSCRDDRSAATAYWDWDAHTGELARASQLVASELPTSRLVAADVGPERRDVRAEVEAAVFEALMRELVVDLRSC

SEQ ID NO: 73904 - protein, 246 aa, Zea mays
  Coding DNA Sequence Number=SeqID_30529
  Homolog annotation: Hit_ID=Q5GAU8; Match level="QueryCoverage=13%, HitCoverage=23%, E-value=9e-10, Identity=90%"; Hit description =Putative uncharacterized protein
MTDAEKEVATERRMDSPPRCDCGDRAVIDEDYEKQFCCPNIDYPYGWRKCRFREWLYGPLFHWPEPEVKEKRYNQWAEEEIKFDPVLCKCGIEAKYGLVPSELGVGYFCGHMVDYDEVGDEEMQFGKSYDVKGEEIGSGVNYLADEAHARYVQDKMATVELMEEEEDDTSRLSELIALVEAGLHEEEEDDTSRLSELIALAEAGLRAQEEEDEFMSQAAKEVEVAYYKKKSDEAEAEDELFSQSCR

SEQ ID NO: 73905 - protein, 116 aa, Zea mays
  Coding DNA Sequence Number=SeqID_30530
MAGRLSPATVVLGCWLAALPCLGFGLGFYAQCYWEEVSASPDLSLGLGRSHNLARPQPRPQEKSPPRPTSASDRLLYRGYIITLPLASRLRLRRNKTGVTSRLLRPQVMMVPRMHP

SEQ ID NO: 73906 - protein, 206 aa, Zea mays
  Coding DNA Sequence Number=SeqID_30531
  Pfam annotation: Domain name=zf-CCHC; Domain location=103-120; Score =12.9; E_value=0.017; Accession=PF00098.14; Description=Zinc knuckle
  Pfam annotation: Domain name=zf-CCHC; Domain location=32-49; Score =26.2; E_value=0.00012; Accession=PF00098.14; Description=Zinc knuckle
  Pfam annotation: Domain name=zf-CCHC; Domain location=57-74; Score =14.3; E_value=0.01; Accession=PF00098.14; Description=Zinc knuckle
  Pfam module annotation: Pfam domain module=zf-CCHC::zf-CCHC::zf-CCHC; Domain location=103-120::32-49::57-74
MNKEKGKNSISHVVCTDHLSMSSKSKKGRGKRRCFKCKELGHFIASCPHKDKDEGMRRCFGCNDKDHMITSCPLMKNQRRAPSKMTLTKQKDKQQVSSQVERRFCYMCGEHGHLPNICPRKNDLTNYWVLGPFVRPFTSLVDPGDIYPPQFLNRVYLLNHSMGSFSFDISTMINSLGTKSQGGKGKMSKKWSDQDLGTSTSRVIGI

SEQ ID NO: 73907 - protein, 658 aa, Zea mays
  Coding DNA Sequence Number=SeqID_30532
  Homolog annotation: Hit_ID=A2WQE8; Match level="QueryCoverage=48%, HitCoverage=85%, E-value=2e-74, Identity=46%"; Hit description =Putative uncharacterized protein
  Pfam annotation: Domain name=Transposase_24; Domain location=371-506; Score=-24.3; E_value=0.076; Accession=PF03004.5; Description=Plant transposase (PttaEnSpm family)
MTTQGGLQPTSNEANMCTNDNGSQLGTRIVDEIMAGKNVFFDLPDKLTGEIWTLKFHCIGGQPGKEIVTVNIDKAYVAFYNMVYIKSKLGYSRRDFLFYKKRCGIDRSRLLALDYIHQEEAMLSDNMDERKISFVLTKDPPSDLEVSVTPIKRPRQRTNVDEETIEVSIDAYKEWLAILQHDNPETVLYERQSNDDLILSDEEIHGSSKPTANWPSHARRHRKRDPDVIGIYVDNDGVFKKEGCGTLKGIAAATKRIKNGDHKLKIEFSSKLGGPVGPNARTFVDEIVLFTKKKAPLIGVKKWKDIELNVRSSIASDVLRRWEFLTNEDAHEKIWSIAKERYKGWRSTLSSTYKAYNSYAERMKNKPEDVDIVEWHYMMLYFGSEKFQKISSRNSKNRQKQRTKHIMGSRTFSQISFQQRDPETGIEPTDLSLWMITHCKNDEWSEEASRGIYEKAAEKIVEKIYQTERFKLTREEENAIFQTTFKETTGCKANRLHGHGYLSRYPTRSQVMESKFLEQARATVATNQKNIELESQVQLLNEKLACEVAERERILQEKMQALQEEEERKRQVLREEMRQEMVVALAAVAQQFCFCNPEYDNRYNPQVQARSKVDQLKKLYQSVFKAGAAAAFSGRDRVERLLLRASCCCVLLFVSCRC

SEQ ID NO: 73908 - protein, 139 aa, Zea mays
  Coding DNA Sequence Number=SeqID_30533
MGKNNKRKREPTPPSEEFGDSEYSEEEFSSEPEGSPAPVSPPASSDDSDDSQGIAAEVWTYIRAVERAGLEGSDESEYSSDEEDSDGGDEGEDDDDDDDDDDGDDSGRGGGDGSRDSTKGDSSRGSTKGGGGGRGRASG

SEQ ID NO: 73909 - protein, 39 aa, Zea mays
  Coding DNA Sequence Number=SeqID_30534
MAGIPGARAALVRGANSGPDHEFRFRGPGGDTLGGEGPR

SEQ ID NO: 73910 - protein, 948 aa, Zea mays
  Coding DNA Sequence Number=SeqID_30535
  Subcellular localization annotation: CTP_CleavageSite=26; ConfidenceScore=5.04e-01
MSSSSSSTADTPPVGASSEGTLSNVVAEELRPGDTVEFGASRLSSVRVHDMQQLGYFGGGVARVPGRRRSPSQKASWSSSRPFSPSVFVCLRTGPPVDTECRGGPGKVCLGDDFVWRAALCGSLREALLYALAEKRKLDIRLHNFGSCTFTPKTGKTSLEVVELVPCARNKWGNWWEFWFYVFEGTVEDHPGLPVAVMCSHHYVAYPQFEVAEDDENEGALRCAVRMSSGHDLVEEFVGYGVWPLAHGWALGEVCPHQMPSRGGMLVRSPAFALDLHGRDPAAFVREAEDGATRIVGRYVPKTEGPRSWDIRGSNDRLNQVFELNRLPSGCYPGEDAADRRAKKPMGGTEEGTSQVAAPATKKRKLGTIGGKGVSDNFAVELMGTCAAPGGRMSLPELRESSARMLEVTGGRWPKNLPIPWAEGEDMSTTRIARGMRIFPYGRYIAAVVSAVMNKDRQDAAQKRRAVIRLPDPMREAKRARGSAKAAAPGGSQPTLAAKPAAPGSSKVPESTKAVVFGGTKSATGEAAKVWELPSPGKRVVDFATNISVDNYFVRSGEGQLVVVPPAVATTASTAVLGVKGGAFSAGGEISAATAVKDEAGTMSRRLREASQQLSQQLSQAADFADRVASGALTADVSAEVERLRVQHADAVREKSAAESKSRRLAEKVAALEGERTDLRRQLVEERREANQAIAEAQAEAKLARAEGSLASQRAEEWEVWFNALHGCMERAEASTHSEVERTRTQLVDSYRELGAWTADFEVPNREAGLRFLEWLQEELLALPTIVEGFMSFASLVTCEGAMNALSREGCRHYEVFDQTDESFEREIFKAEGPVVKQSVGALFDRMWGAHGCEAVRERSDRAREQMERTEDVEDFGGLNSAPPEAAEGKPVLPSDAGEGPSDVPVPAAAGEDPVSAPVPTVEGAQEVVAELAVEGPMAADAPTQVAK

SEQ ID NO: 73911 - protein, 378 aa, Zea mays
  Coding DNA Sequence Number=SeqID_30536
  Homolog annotation: Hit_ID=A3AQ03; Match level="QueryCoverage=26%, HitCoverage=55%, E-value=5e-07, Identity=34%"; Hit description =Putative uncharacterized protein
  Subcellular localization annotation: CTP_CleavageSite=27; ConfidenceScore=5.36e-01
MAPPVGVAVYALGRATWGFLRSQARVRALGSGGAEFAVFRVLARVRALGSGGAEFAVFRVLARVRALGSGGAEFAVFRVLARVRALGSGGAEFAVFRVLARVRALGSGGAEFAVFRAALSFCQTGQWSSGVTAVTSALPGARVRIEVSGHLCVKCPRNLVSRCGDLVKVASERSQGLGQAGDVSAIKRGPRARRKSLELYADGGYQLRIRRLEGINNVSYKELKEENERLRMSLTQLKGKCIAQPSQDNHDDMVKKLESGTTVACTKSLKKNVKDLRNVKRKQCWNLLSVARGSNGASCVKDACALRHLGYPQNIPIKRGYRLWDDFVIGLRSMSYGAKGVPARCLVSVGPTTTAKASSEGWRLRLRPNICPSRDQFD

SEQ ID NO: 73912 - protein, 96 aa, Zea mays
  Coding DNA Sequence Number=SeqID_30537
  Subcellular localization annotation: CTP_CleavageSite=60; ConfidenceScore=5.87e-01
MRTFSLRFFPNPSLPPSSLPPPAVRTTPTVSVLRLSAKRSPPDKMMRLRRFALHTCVCLRAAAGVSKTALLTGLDRGPREDAKGELVGLNSLSLGK

SEQ ID NO: 73913 - protein, 260 aa, Zea mays
  Coding DNA Sequence Number=SeqID_30538
  Gene Ontology: Mol. function=carboxyl- or carbamoyltransferase activity; Cellular component=ornithine carbamoyltransferase complex; Biological process=amino acid metabolic process
  Homolog annotation: Hit_ID=Q8SA97; Match level="QueryCoverage=44%, HitCoverage=21%, E-value=5e-12, Identity=46%"; Hit description =Ornithine carbamoyltransferase
  Subcellular localization annotation: CTP_CleavageSite=30; ConfidenceScore=5.12e-01
MAPPVGVAVYAPRQGDVGVPPKPRLSLPFVAVAEPEPRGRARRKSFGRGQGGSPSPWGRAKRSFVVFRVLARVRALGSGGAEFAVFRVLARVRALGSGGAEFAVFRVLARVRALGSGGAEFAVFRVLARVRALGSGGAEFAVFRVLARVRALGSGGAEFTVFRAALSFCQTGQWSSGVTAVTSALPGARVRIEVSGNLCVKCPRNLVSRCGDLVKVASERSQGLGQAGDVSAIKRGPRARRKSLELYADGGYQLRIRRLE

SEQ ID NO: 73914 - protein, 208 aa, Zea mays
  Coding DNA Sequence Number=SeqID_30539
  Subcellular localization annotation: CTP_CleavageSite=23; ConfidenceScore=5.56e-01
MSSRSLMRRVFPPSKPPDGGPAVSPRRWSPKTVTTSSWVGRSKPGCDLGPTLSFKDVHDPRWGGGRAEPVLYLPRGFVGHPLPRRSGERALTGPAGGPDFDNAGPVDGGRRHLQRVGLVGLAPGSPSRRRAAAAPRGLGPGWRPWKMVGRGPWGNRPSRLLGPDSRRSPWTASPSEARSDLAEGVVDAEGATAPFQREDPSLQEQIVL

SEQ ID NO: 73915 - protein, 310 aa, Zea mays
  Coding DNA Sequence Number=SeqID_30540
MTVAGGREQRSRRRPGSRPIRGQQENPLSRREDRAPVIRSSNGLRTRNGRPANHSPCRINSAAGQAALLAGEAGDASPSPLAPRGVQQPPQIAWALHPLLVRGSKAGPPKGSTFASGYSGSAPITDQGSPETPCSVPIEGNMALSPPLLAERRRRGGSDSSKAPEDGELRSARPRARTRAKPRKTANSAPPDPGLGLGLSPGRRRTPLRPIQGSDSGSAPEDDELRFARPQGSDSALASAEQPPPCPTQGLGLGLGHGRQTRPRLRRSLHVARPRAQGSHVNRKRHHHPTPSRLGPQRTRPVSHLASSAR

SEQ ID NO: 73916 - protein, 420 aa, Zea mays
  Coding DNA Sequence Number=SeqID_30541
  Gene Ontology: Mol. function=binding; Cellular component=nuclear condensin complex; Biological process=mitotic chromosome condensation
  Homolog annotation: Hit_ID=Q2QP00; Match level="QueryCoverage=81%, HitCoverage=26%, E-value=1e-129, Identity=72%"; Hit description =G14587-6, putative, expressed
MSHLAPRVDERSFEDWWRKANKGVVFDGDRPSIQWMQQHFSNEFYCWLLAGASLDVLITSVMLCSEYWVMVTEAVIFVQRDYVKWRGVLFLRFLPSLVDESEKIRHLADYLFGNILKAKAPLLAYNSFIEAIYVLNDCTGHGVYSDSQSQGSLDRRPALFAIRGTDESTRSKRMHIYVSLLKQMAPEHLLATSAKLCAEILAAVCDGLLSVDDAGGRAVLQDALQILACKEMRIHPNILSENSEMDEEGGEGGGTASALLAAKGRAVTQVAKKNLIQIAVPIFIELKRLLESKNSPLIGCLMECLRALLKDYKNEMEEILVADKQLQRELLYDMHKYEAGKGKGKAAAQAEAEAGAGAGLSGIGRSPAVRSVLKEVNRKTTPTQPLHSMSVPKVKSILGSAGPGSGRPDVLQSVRRLQPL

SEQ ID NO: 73917 - protein, 514 aa, Zea mays
  Coding DNA Sequence Number=SeqID_30542
  Gene Ontology: Mol. function=binding; Cellular component=nuclear condensin complex; Biological process=mitotic chromosome condensation
  Homolog annotation: Hit_ID=Q2QP00; Match level="QueryCoverage=99%, HitCoverage=44%, E-value=0.0, Identity=67%"; Hit description=G14587 -6, putative, expressed
MARGKAKGRLLAVDLVLALLPVLLPFEGDACDMEEGSWGLKCLRVLVEKCSDSVGGVRARALINAAQALDILSERGVEVDRLQEVMRIGDMKLGELLRRRCTDDKAAVRKAALVLITKAIGLIGRPIDDSLLCAMGAACSDPLVSIRKAALAAISEEVFPEGTLDLLKSICDGEVAPCIKKICASLGKKRKLKPLLASSLQNIITLSESLWLRRCKPIENWTAPIGSWWLLSEVSSFAPKSVNWKFLSHHWKLLDNVGKDERGKACSQVEPNSALWAVNRVSLLQTISNVSMELPVEPAAELAHSLLTRIEDFDMNLSEVDAHVKSLKTLCKRKAKTAKEGDALILKWAQQLIRSAFDILDQYIKEASESARGHSFITPMTGKCKGMKQTSASKSTSQAVVAVFTVGSLILACPIANVKDITPLLHTIVTSGNSEPRPKNLVGGTISFKELAPSLYIQSWDTLAKICLVDEKVAKRYIPIFVQELERSDMATLRNNIMIAMADFYVRYTALVDW

SEQ ID NO: 73918 - protein, 486 aa, Zea mays
  Coding DNA Sequence Number=SeqID_30543
  Gene Ontology: Mol. function=binding; Cellular component=endoplasmic reticulum; Biological process=intracellular protein transport
  Homolog annotation: Hit_ID=A9PFU5; Match level="QueryCoverage=49%, HitCoverage=75%, E-value=6e-72, Identity=57%"; Hit description =Putative uncharacterized protein
MEPDPVAARASSSPPPYPASATSPPWQTRVENAEVGSEVEQEEPKKEAMAGVGETLRSFMKEFGDQGEDSIILSPWLKEISTPDRPTALRFLGEKYNNLMERYKKQVVKCSEECEPRYNALKKKYTDKCVERRRLYNELIELRGNIRVFCRCRPLSSNEVNRGCLSVVEIDPSHKTELQFVLNEKEKKPFKFDHVLGPEDGQACSLIVKWHDRELVLSRLRKDNEKAKDAFEKASKGQEMISSYPLEISLQELGCWNEVSDFYHRASELYRECGRPQPASDALAKGASVLEEKSPEEAIKMYDEACSVIEEDGKEQMAFDLYRAAAALYIKMENLTFSSMCYLIHDFLGTFFVRSSLFLHAKYLDAAALFLRLGLAADKCNAINSQCKAYLSAIIIYLYAHDFQQAQECYNDCSEVQAFLNSDQNRCATKLLSAYEEGDAEEIKHIAQSSAFNHLDHVAKSQVGEKIMVKVVFISISMLLQSDRSK

SEQ ID NO: 73919 - protein, 57 aa, Zea mays
  Coding DNA Sequence Number=SeqID_30544
MVQVYVLKKVTASAGGNQRPTGARTDVDKHVSEEYLGYACLACSNLRMGEVFSDAYE

SEQ ID NO: 73920 - protein, 192 aa, Zea mays
  Coding DNA Sequence Number=SeqID_30545
  Gene Ontology: Cellular component=chloroplast thylakoid membrane
  Homolog annotation: Hit_ID=A2Z256; Match level="QueryCoverage=30%, HitCoverage=30%, E-value=9e-15, Identity=56%"; Hit description =Putative uncharacterized protein
  Subcellular localization annotation: CTP_CleavageSite=44; ConfidenceScore=5.17e-01
MGAALTAQMATAQRLILGHPAVRVGQNTRGFRAEPTRYLNEPARARSRRAELARYPPLPAVVHETPPPTPEAVYGLDADHIVALHAQAAELHNIWSLVSIVLESASSHYPRWWGQVFLTLRRNLVICRALSMTKLDSDKSYSALIYGTSALVAIWISSIVVSALDSVPLENRDELFTRVSSIKKQILGSHEN

SEQ ID NO: 73921 - protein, 434 aa, Zea mays
  Coding DNA Sequence Number=SeqID_30546
  Gene Ontology: Mol. function=oxidoreductase activity; Cellular component=cytoplasm; Biological process=ethylene biosynthetic process
  Homolog annotation: Hit_ID=A2YEA7; Match level="QueryCoverage=49%, HitCoverage=76%, E-value=1e-96, Identity=77%"; Hit description =Putative uncharacterized protein
  Pfam annotation: Domain name=2OG-FeII_Oxy; Domain location=78-179; Score=122.9; E_value=9.7e-34; Accession=PF03171.11; Description=2OG -Fe(II) oxygenase superfamily
MEKNFYSSENAKILGCEKVPSNVDWECSFMYRHQPESNIHDILSCFEEVIKLAEQLAAAMSENLGLDKGYIEKAFSKPSVGVKVAKYPRCSHPELVMGLREHTDAGGIILLFQDELIPGLEFLKDGRWMAVPPTQGNMILVNLGDQIEAITNGTYRSICHRVLPNKNGSRLSIATFYNPGADAIICPASKLTYPSQYCFQDYLDFYSTTKFTDKMQGVTVQSPSTSSRGRIRPRHRPEASRSSSLLFEAPAFRRFATRRRRFGRASVPVPVGAVDDEVEVVSKVLRSRPKTKRAQIRLRPAQFRMASSKEDTMKSLVKVLVDCAEDATKSLRGLVDHALDHMHDEEILARTLFAMKEKLDLLHQDALEAKVQAFPEIAKYEGDDISVEPTSPSTPPTVTEPSVDEEEFYCPDVSDEWYFSDSDRSTRNSYWNIY

SEQ ID NO: 73922 - protein, 161 aa, Zea mays
  Coding DNA Sequence Number=SeqID_30547
MQHPAHRLRDAWAWASMLACRESEKRVHLARLHAACMAARLFRPLVWAKAEPELYLPRGFAGHPLLRRSKERALAGPAGGPDFDNAGLVDGGRRHPQRVELVGLAPGGPFCRKAAAAPCARGDRPRCRALLGRRSCSGVVLPLHRDDAFTRRPVPHSSGRI

SEQ ID NO: 73923 - protein, 533 aa, Zea mays
  Coding DNA Sequence Number=SeqID_30548
VRTTPLDRGGPAEQQKTDERLAAARSDYDDNDRRSGWPNCSSAGLRVGAAAILPSPTLTLEGRGQGPSALRQIPTQILPDEWGTGLRVKASSRRLPAERAAGSQADELDTLGVTTPAVDQPRVVEVRAARGASECPLLRTPQERVTREPAREVELRLSLAPTRARMMNILEAEGGTKIASRLASPHPGAGGHRLGPTGERGGQPCRRHATAPGGRASPTPDTPAWRPRPTRHAIGAPDAACKQLHRHLRHHRASSIAEPIPRLEATQRTTQQRQPDAAVNAAKSGPTVMTVAGGREQRSRRQPSTRPTRGQQENPLSRREDNAPVIRSSNGSRTRNGRPANRSPRRINSAAGQAALLAGSSGRRFAFAVITATKKAPSLPTDQRFEGWPPEGFDSRLRSHGPYTHYWSEVRRSAPRRVPRPPQATRAPRPLLIRGSKAGPRRVHSRLRRRARDDQGYVRYITKARAALPSSPETPCSAPIEGNMALSPPPPCGKATQGSSTYQPESLGPDRTPGLRPVRMREQPDQPKHYARH

SEQ ID NO: 73924 - protein, 332 aa, Zea mays
  Coding DNA Sequence Number=SeqID_30549
  Homolog annotation: Hit_ID=UPI0000E2386D; Match level="QueryCoverage =38%, HitCoverage=79%, E-value=3e-07, Identity=32%"; Hit description =PREDICTED: similar to opioid growth factor receptor
  Subcellular localization annotation: CTP_CleavageSite=53; ConfidenceScore=5.57e-01
MQSACNRAKWARPFDSNAPSMEAQAHKSCNRRRLLRVSNCTATRTTTAPPRLRNQYRDSRQPCGPGKGDTPKRILLREGNRPRASLLIRGSKAGPSEGFNGRLRALGFCAHYWLEVRWPAPQKGSTAASGHSGSAPTTDQGFVGWPSKGFTVASDTERGMTLEDSAACAAPTAEPLDRVRLTAAKSGLKRHRKLRFARPQGSDSGSAPEDDELCFARPQGSDSGSAPEDDELRFARPQGSDSGSTSEDDELRFARPQGSDSGSAPEDDELRSARPQGSDSGSAPEDDELRSARPQGSDSGSTPEDDELRFARPQGLDSGSAPEDDELRFARP

SEQ ID NO: 73925 - protein, 344 aa, Zea mays
  Coding DNA Sequence Number=SeqID_30550
  Gene Ontology: Mol. function=DNA binding; Cellular component =chromatin; Biological process=regulation of transcription, DNA -dependent
  Homolog annotation: Hit_ID=Q69MC4; Match level="QueryCoverage=96%, HitCoverage=87%, E-value=5e-84, Identity=55%"; Hit description=DNA -binding protein-like
  Pfam annotation: Domain name=DUF296; Domain location=119-243; Score =133.6; E_value=5.5e-37; Accession=PF03479.6; Description=Domain of unknown function (DUF296)
MSLGKRDMSQERLYQDRKDVPPIHFTTPPPPPSHHHPQQHGRHGEQQQQLECFSDEVDSRGSAERKEPASGGAPVVPGGGDDGASIELSKKRRGRPPGSKNKPKPPVVVTREAEPAAAMRPHVIEIPCGCDVADALARFAARRNLGICVLAGTGAVANVSLRHPSPGGPAVMFHGQYEVLSISATFLPPAMSAVAPQAAAAAACLSISLAGPHGQIVGGAVAGPLYAASTVVLVAAAFTNPTFHRLPADDDASVSVSVSVSLSAGSGDPADEHRGGHQDRREQPPQEHRPLAVRRQPAPHPASAAQTVEPCGPPDVPIYAACHPQPHDVMWPPPPRAPQMPPPY

SEQ ID NO: 73926 - protein, 111 aa, Zea mays
  Coding DNA Sequence Number=SeqID_30551
  Subcellular localization annotation: CTP_CleavageSite=41; ConfidenceScore=5.08e-01
MEPLWGLGFQVEKNSIVRPAPATVPTTRVKPSHDLPRVRPRAQQGAPPHRTSGLGLSPGLGRRSPPRPTPGLGLSLGLGLSLGLGLKRSLRLARPQPRTNYATWDASLPYS

SEQ ID NO: 73927 - protein, 141 aa, Zea mays
  Coding DNA Sequence Number=SeqID_30552
  Homolog annotation: Hit_ID=A2Z368; Match level="QueryCoverage=80%, HitCoverage=30%, E-value=5e-14, Identity=39%"; Hit description =Putative uncharacterized protein
  Subcellular localization annotation: CTP_CleavageSite=61; ConfidenceScore=5.59e-01
MPRELLMPSPSFPSHHTYLVNVRSFLLVFAVGYSLGLLSSSTRPSPRPSQTQWRRQRNHVSATADDDRTTAHLTDTAYAARNENDAAASRSTYPRPPPHDLFQFKEECGEPVPDDTVVQTLLDKLFGGESPLRGRRVFCYS

SEQ ID NO: 73928 - protein, 68 aa, Zea mays
  Coding DNA Sequence Number=SeqID_30553
MDAKKASRKGRNSEWVAEGWDYEMGQTQMEEACQVWADPWVGGPGADGGLPSLDYEAGSLGLSERRLA

SEQ ID NO: 73929 - protein, 124 aa, Zea mays
  Coding DNA Sequence Number=SeqID_30554
MAPTPGPAHQPFPAAFGHLQHHDPLVHLSYTKLRVAIDRGRSSPCCHRREIAEEDTVIATDSIGVAALMEPSLEGISGCSRSCRGYQCLVIRKGEAGPRESLDETAAPPRCCYSLQARISTPKI

SEQ ID NO: 73930 - protein, 193 aa, Zea mays
  Coding DNA Sequence Number=SeqID_30555
MAYRRARSTRGGGRPKSGEGDLGLPVKFCRVRGLGKLHKLMAKLTEGLVRLGHDWRELATAAEAWKDWRAVARRARGKFRRSLAWARLVSMRGGMAEARGCFIGTTRCTGGRGPASERGRALGSAGSCSITKVPVSERLVPRSSCAKTMSNEFDLSSKFSRVCSREFGTTLIFGLPGFEFRKTENAKDLWKGF

SEQ ID NO: 73931 - protein, 84 aa, Zea mays
  Coding DNA Sequence Number=SeqID_30556
  Homolog annotation: Hit_ID=O48967; Match level="QueryCoverage=100%, HitCoverage=18%, E-value=4e-22, Identity=68%"; Hit description =Putative uncharacterized protein
MVHIVEHQDFLPEDFMVEEAATSSTPRATNLPAPGAAADVHSARQHTPAQTSRTSRAGPGALSAARELLHHPPNSTASPGAMKQ

SEQ ID NO: 73932 - protein, 84 aa, Zea mays
  Coding DNA Sequence Number=SeqID_30557
  Gene Ontology: Mol. function=nucleic acid binding
  Homolog annotation: Hit_ID=Q6UU68; Match level="QueryCoverage=70%, HitCoverage=11%, E-value=2e-09, Identity=47%"; Hit description =Putative DNA-binding protein
  Pfam annotation: Domain name=zf-CCHC; Domain location=19-36; Score =16.8; E_value=0.0043; Accession=PF00098.14; Description=Zinc knuckle
MTIKKDESKRQMHCKDKHRICYNCREKGHLFKVFPKGKTPKPNLSIHSNMLRRPKFDSCARKPHRKNEALENELKRFYLALERI

SEQ ID NO: 73933 - protein, 123 aa, Zea mays
  Coding DNA Sequence Number=SeqID_30558
  Subcellular localization annotation: CTP_CleavageSite=36; ConfidenceScore=5.25e-01
MVKNFGSETVQIAMNAVVGRRSGGTVYTRRAVTHTRCAVDRKDQTVTLQSGFGTRSEVGSFLRNELREGVFWTFGFPKLKRFFFTGQARYEERSSTAKGATVGVVLRYAEGLTRRSSFGQSRF

SEQ ID NO: 73934 - protein, 124 aa, Zea mays
  Coding DNA Sequence Number=SeqID_30559
MAGFPRTRVTCRFFLAVGDKLLRDALSPKGFKVVDLRRALLKIHTPKIYKQIFHGMVRERRTRISTMNKNTRDTRFIPRFGHTTKVPYFLVEAPTKSQDSFNPNPPFADHKGQAHTIIFAQTSG

SEQ ID NO: 73935 - protein, 394 aa, Zea mays
  Coding DNA Sequence Number=SeqID_30560
  Gene Ontology: Mol. function=transferase activity, transferring glycosyl groups; Cellular component=cytoplasm; Biological process =metabolic process
  Homolog annotation: Hit_ID=A2Z360; Match level="QueryCoverage=98%, HitCoverage=82%, E-value=1e-115, Identity=54%"; Hit description =Putative uncharacterized protein
  Pfam annotation: Domain name=UDPGT; Domain location=2-388; Score= -86.4; E_value=3e-06; Accession=PF00201.9; Description=UDP -glucoronosyl and UDP-glucosyl transferase
MGARYFERLESAGSETLDELLRSESALGRPVHVVVYDAFAPWAQRVARRRGAACAAFLTQTCAVDIVYAHAWAGRVPVPPLPLRPEEARGLALAGLSTQLEVDDMPTFLGDTRFPPCFRELLMNQFLGLDTADHVLVNSFYDLEPQEADYLASTWRAKMVGPTVPSAFLDNRLPDDVSYGIHLHAPMAAESKAWLDAQQAGSVLYVSFGSMASLSPEQMGEIAEGLYGSGKPFLWVVRATEAAKVPKGFADRAQATRGLLVSWCPQLEVLAHPAVGCFFTHCGWNSTVEALSAGVPMVAMPDWSDQTTNAKYIQDVWRVGVRVRPDGRGVVRSEEVERCVRDVMEGEMGEEFRARASHWSSKARKAMGEGGSSDVAISNFLSCFGHSAHVTAAN

SEQ ID NO: 73936 - protein, 69 aa, Zea mays
  Coding DNA Sequence Number=SeqID_30561
  Subcellular localization annotation: CTP_CleavageSite=45; ConfidenceScore=5.07e-01
MKVVMRMMVLVLTLVMVVRVATTAQEKMKPWRKISRSSKITTSSRCGLATTPSRLLVKAACIYVSFFAL

SEQ ID NO: 73937 - protein, 154 aa, Zea mays
  Coding DNA Sequence Number=SeqID_30562
MCLVIEPGDGERRLVDGVVDALVEEEAREDAAVGGEAGERDPSVLSDAEHLPLVGEIRAQQVNARPRPRPAHGKRPHGQIPVEEATLVGASPGALTKALDSASDSPATSGEEGSEGAIRRTQVRGGRCVRQLLDGEGDGRDGGGEDEGNDSGYV

SEQ ID NO: 73938 - protein, 67 aa, Zea mays
  Coding DNA Sequence Number=SeqID_30563
MTGDQVSSKADRAEGLLRLRDTDTSLIAFREKNEQPPHQEACGITNSRWLASDHCTSSATTTSVSGG

SEQ ID NO: 73939 - protein, 134 aa, Zea mays
  Coding DNA Sequence Number=SeqID_30564
MMTSLMVGRSKPGCGLCPTLSFKDVHHPGWGGGHAELGPASAWAGGPLLPPAFGGEGHPSALRRRRPPAIQGKANCCCLVRVQLSVLHPDDGRTVRRWLLSPVLKRWPPMVMLPTAVVVASADETVSATCAPGL

SEQ ID NO: 73940 - protein, 170 aa, Zea mays
  Coding DNA Sequence Number=SeqID_30565
MSGAPATSPKPLEFDRWSSDFWARLDVRCTPDMYCSMSGAPVWACLTSARFWRALNAPAGDRWREVAVAPELHRTVRCTPDSPVNYSGAAVLIFPRLPSSRAASLWRTGHCPVNYSAPALKIPEAEEFSAESPGAPDSVVGPRPRLGEAETSPEAEAGLGQGCDAFRGRG

SEQ ID NO: 73941 - protein, 210 aa, Zea mays
  Coding DNA Sequence Number=SeqID_30566
  Subcellular localization annotation: CTP_CleavageSite=44; ConfidenceScore=5.21e-01
MAMVAPSPPPPARRVAGQTRVFLFCHGGKSSSSSPLPGEPTTVVAVALRGEEYHVVAAVKGHELETPEAEHRPRLKRLLEATHLELNGKAFVNTQRAPTWRANCRRFGPARTVNRPEVESNPTSWAHVGNHHYLLPELGEAETSPEAEARLEQGCDASRGRGLGSGEAEIFFRGRGWGRGLRLGEVELPVAPEAELVGDRDSVLSWWLAR

SEQ ID NO: 73942 - protein, 199 aa, Zea mays
  Coding DNA Sequence Number=SeqID_30567
MSSLKHGPYSKNSQNTLVPYSAYNSPVHTKSDDSFVTILTNSELHCATPHTPSYPLPLHTHSTPSAKANTPPTQLIRSAGYTHSVALPPVHPLVTQSKLVRSNPRVMKAGEHRKDKEGECFVRFGHGGGLTPSGITVKVWLLNRELWWTGSTVAVFGNENQWETAEIPGWFSPGDFVIILKNFLLLLERMRFAKKKEIG

SEQ ID NO: 73943 - protein, 155 aa, Zea mays
  Coding DNA Sequence Number=SeqID_30568
MGKNNKRKREPTPPSEEFGDSEYSEEEFSSESEGSPAPVPLRESSDDSDDSQGLAAEVWTYIRAVERSKLEGSDESEYSSDEEDSDGGGEDEDDGDDGDDDDDGDGDGDGSGSGRGNGGDSKDGDGGGSRGSNRGGSSRGSTRGGGGGSSNRASG

SEQ ID NO: 73944 - protein, 349 aa, Zea mays
  Coding DNA Sequence Number=SeqID_30569
  Homolog annotation: Hit_ID=A2ZTW0; Match level="QueryCoverage=80%, HitCoverage=51%, E-value=1e-52, Identity=40%"; Hit description =Putative uncharacterized protein
MAGARESGQWNVVWACRVRAGCPDMNRSLEQFRISIFLRNKGRLTRELIERFPGIYHSIQTSDPIPENSTDNTWKNFKNCLGALDGTAIKYLKLTSLKSYLIQEFRQLLISIPGLRYFKTKYSALEQMLNKSGFTWDPTKKMIQCEKQQYETHCKNNPDAKGLYGVSFPYYDELSMVYSKDMAIGEGAEDMTDVVKNLEEELVCVNVNDEEVGEDMTSVETLRRSVDSTSSSSKKRKKEWKGMKTASSDPLLDVFNEVSGDLKVATMSIGKMSQDMDRQASNQEKARDEDPQQKLREKAINEVRRLEFTGSEVIKAAVVFVRMPDQMGMLFALPEPLRREYIVDMLRGN

SEQ ID NO: 73945 - protein, 140 aa, Zea mays
  Coding DNA Sequence Number=SeqID_30570
  Homolog annotation: Hit_ID=A3A6V7; Match level="QueryCoverage=35%, HitCoverage=7%, E-value=2e-16, Identity=76%"; Hit description =Putative uncharacterized protein
MEQGQRRRAEEGVFPPAYGAQPVMYNTQPGASPHGYMHPAGPQYGQQMTIGGQTRPVYYYAPMEVAAIPTSGILTSKNRYYNGKNWSCCVARIGWTKKRTDFVLLGLPGQNALHCPVSVLLGSRFTGISYYFCQTIDVVN

SEQ ID NO: 73946 - protein, 185 aa, Zea mays
  Coding DNA Sequence Number=SeqID_30571
MEDVYRKGRKGRGGQEIASTAHGHGGTNPPRPSPWRGHWSATALQLARGFHEQLQRRLSPPTRRTRGPARPPKPEPGKEKLTPHAVASHGLSRFIRISFRLPTAAVSATQPQPDPTSRRRRRRRRRAFVVRSRVPVAASLSPAPLLHTRFTRRLATAGPRLDSRRAVRVSALGRLLEIVDRGAMD

SEQ ID NO: 73947 - protein, 409 aa, Zea mays
  Coding DNA Sequence Number=SeqID_30572
VADLVFTNTLQCLPPMTRGLGPTHHASWPRIEEAKPPRAVRVTAQRLQALLHFRPDQRVKGRTAMQAACNRTKGEHPFDSDASSMGAQAHTSCNRRAGYYVREAAPPLAPVPRLLYCGTSAATRGDPTHGPTVPTEHIDHRSVSRGRRRGGQYGQKWAGSNGGDRRAEVAVESSAGSRPLLGQQESPLPWREDDAPVFRSSNGSHTHNGCPANHTSHRINSAAGQAAPLAGEAGDAYLRHNDRVKRGTGKGYTPKGILLHEGSGPRAPLLIRGSKAGPSEGFDSCLRALGLRAHHWSEVRMLAPRMGSTAASGHSGSAPTTDQGFVSWPPKGSTAALEHVERGMTLGTSDTWPRLGLCSRGTLEHFRDQQERFCNGIPSEGGIEPSDPIKWDRVRQITCWYFWSAPLGH

SEQ ID NO: 73948 - protein, 202 aa, Zea mays
  Coding DNA Sequence Number=SeqID_30573
MEFVHHSSSVYQELKLGQSQLPTPISLKPDHISPWNSHELGDRTRAETNLHVFDVHCASESTPDARPRVPRIAPSQAGAVARAYKATRGFDRTPPHALDLTGALDHQRCPAHGVPAATRSPATFTVAGLHSTIGKRRPSATAGALAADEFTHLRTWTGRFRPTTAIERYLAVTARTSRSQPHPSPDHPRRRRLKGIVAQGYK

SEQ ID NO: 73949 - protein, 105 aa, Zea mays
  Coding DNA Sequence Number=SeqID_30574
  Subcellular localization annotation: CTP_CleavageSite=52; ConfidenceScore=5.29e-01
MAGIARSMSAGGMFSSVASVSAKPRRSGSIQGHGFWEIGFKRGLGFFSPLIQGSEVGSDPPENVAPEEGQEPDLLEIELLCQESFDEGKSILPLMYKLPTLSTTT

SEQ ID NO: 73950 - protein, 110 aa, Zea mays
  Coding DNA Sequence Number=SeqID_30575
MAPKRASSKAAPSVDEAAKAALLAEKKGKALADTTHQGACEDDTLSKRQRNEQPTPEGSLRTCSSGGQPQPPPGFAPPEGVDATEDGKVIGVSAEEQLQLWALRIKNCNL

SEQ ID NO: 73951 - protein, 126 aa, Zea mays
  Coding DNA Sequence Number=SeqID_30576
MGKGKREKEKEKRFPVNRAGGDFGSAERGHAHVRAGSRPRRPMSEETARAGTGTALLGRPIYGDVAGFHGGEVAGEATGRDRGKRMVRCVCGEVVKFVNHFNLTLRYWRGKEELTGAKEGDGTELD

SEQ ID NO: 73952 - protein, 40 aa, Zea mays
  Coding DNA Sequence Number=SeqID_30577
MKLWKETSRSSKTTTSSRCGTIWTSQTYDVIDYYSLLILF

SEQ ID NO: 73953 - protein, 402 aa, Zea mays
  Coding DNA Sequence Number=SeqID_30578
  Gene Ontology: Mol. function=protein binding
  Homolog annotation: Hit_ID=A2WKC1; Match level="QueryCoverage=78%, HitCoverage=75%, E-value=1e-103, Identity=60%"; Hit description =Putative uncharacterized protein
  Pfam annotation: Domain name=DUF266; Domain location=100-393; Score =552.6; E_value=4.3e-163; Accession=PF03267.5; Description =Arabidopsis protein of unknown function, DUF266
  Subcellular localization annotation: CTP_CleavageSite=83; ConfidenceScore=5.21e-01
MKDTSKPTRASRSVGKLLYVVHMFLFVSLGFVLGMASISKFPNMIYTPFVASLPFPTPPPPPPTPSPPRPPPLPATPLLPAPRNLGRMGLMDLLAPSGVIHNMTDEELFWRASMAPKGHRTPYHRVPKIAFLFLVRGELPLRPLWEKFFAGNDQELYSIYVHPDPSYTGSPPRDSVFYGRMIPSKETKWGHVSLVEAESRLLASALLDHSNERFVLLSEACIPVYNFSTVYAFLAGSATSFVDSYGNGDCRARYDRFFAERTNITIEHWRKGAQWFEMDRALALEVVGDEPYIQMFRDFCVGRWRCLTDEHYLPTLLNLLGWARNANRSLTYADWKRPQGMHPHTHDGAEVTEELLNRIREDGGNRCFYNGARAGICSLFARKFSPDTLQPLLRLAPKVMGF

SEQ ID NO: 73954 - protein, 611 aa, Zea mays
  Coding DNA Sequence Number=SeqID_30579
  Homolog annotation: Hit_ID=Q6QP51; Match level="QueryCoverage=30%, HitCoverage=91%, E-value=1e-16, Identity=37%"; Hit description =Putative growth-regulating factor 1
  Subcellular localization annotation: CTP_CleavageSite=60; ConfidenceScore=5.14e-01
MTNSKRLTGNRSSSSDNDLRLGRLDSCSNSFRANTAAEKPLPTKDENQPFKPKRRRSGVQAALAVSSAETTSSGCHHLSADGHLLTNVAPTYDVRFESAPAGPRSRPCHKNENGAVPEHERRPRGVRRVGRPPPTAGGAARIGSGGRHRKQRQSRSCRGAKRAAAAKHHRPPPRLHPLASRAKSPLTSSRVLPPRHGGWDPYVIQADPKHEEGEPLHARHVTVPRLQALSHPRRNRWSKGWTTTRQASNCTATVRPFGSIHIWWTSAKEAGLHVMDRERGRCGKDPSQRRKRAPSPPTDQGFDGWPLGKVSIAAPEHSDFKPITDQGFKGWPLGRVRQPPQSARAPCPLLIKGFIVKQPWPYRLTNRPLRRRIKCRGCLTPYPDTRASVGQAEVTAFTSPLFFAVRYDRKTAPLAPLRLPCQPPRQRLTTSHDQPPSSSLGCNRKLRLARPHAPASGGGLRLARPQAPASGGGLRLARPPVSGGIASSPDPGLGLKRSLRLDRPWARTDRANRGCIISLFLVCSGYKEQDRRPIWLTPATGLRRSSSGHAITCTAPKLSPNGHVGMATLREVRAREAADELCVPLSHATRFDNSLVGPGTPQGRNADTNIT

SEQ ID NO: 73955 - protein, 97 aa, Zea mays
  Coding DNA Sequence Number=SeqID_30580
MEYSPSCPASNFCHNGRSGRSSWPSRQEQESNLGRRGCPPQQLLACHVAHDAARLQETCQSYFYGSGFWGRVAAAPELATMARPRGSRRLGTWSCRL

SEQ ID NO: 73956 - protein, 98 aa, Zea mays
  Coding DNA Sequence Number=SeqID_30581
  Gene Ontology: Mol. function=hydrolase activity
  Homolog annotation: Hit_ID=Q5ZCN1; Match level="QueryCoverage=92%, HitCoverage=18%, E-value=1e-20, Identity=61%"; Hit description =Putative uncharacterized protein OSJNBa0083M16.21-1
MASPSYRLAAAITAPSTGEFLVVRQPRPPSPPEEEEDYRRFVDSDLYDLPSAPLGPLEGAPRSEVAIGGADSVASRLDLSRLDVSAALDQLVPVATVG

SEQ ID NO: 73957 - protein, 62 aa, Zea mays
  Coding DNA Sequence Number=SeqID_30582
MGSRHSACSIEAGCRDDDEEDGYDYAYGNGKWYSFRLERVKKKENGVEVDLQEFQDVDEFED

SEQ ID NO: 73958 - protein, 191 aa, Zea mays
  Coding DNA Sequence Number=SeqID_30583
PAHARRVLANWALGHRAERMLTGARMASSQRAQGEMVSCTKKRGNSIWEDGGQMGLLEGIHGKVGMAGLEKGRKPYGRGSVRAGSEQGAQAMGRAHLLELGPREMPCARSLGRGMLCRLPARGKTEEKLHPWRRLPRVGRAEEGRLAMEFLLGTMERGAEVLHGRRMKESVGRKRRLLVAARGGNENFPNA

SEQ ID NO: 73959 - protein, 212 aa, Zea mays
  Coding DNA Sequence Number=SeqID_30584
  Subcellular localization annotation: CTP_CleavageSite=75; ConfidenceScore=5.11e-01
MARFARLRSLEAFEHWKKLTATCSTPSARARARSRAPSHAPRRARAYKSLPGFGYTLPHTLHTSPELARRRLPVRSEPAAAQPLCHRRPASRAIPNPVLPSEKLVHTSVKLPEQGIGVPFTGEASPRSPELSPPPEHVDRCKLSKIPVVLIKQVKLRKTLQKWPQDCNLADEEYILVPEQGAAQEVAPDPAPEPAPEDLPATALEGKPRFYA

SEQ ID NO: 73960 - protein, 81 aa, Zea mays
  Coding DNA Sequence Number=SeqID_30585
MKDAKPIKTPLGTNGHLDLDMGDINRNIVELQVYLQLEGDDSTSVTQKVNAKSACPVRGYCSPIYRRGTQPTQNYIHALYT

SEQ ID NO: 73961 - protein, 206 aa, Zea mays
  Coding DNA Sequence Number=SeqID_30586
MRSPMFDVGQHGAAALDYVQAATAPELAEYSGACNHVGLLPEVELAVAKLLLVVDERRQHERLLLVVFVQARRVSGTIIRGTPKTPKSQLVTPISTKLQRPDGEERLWNSPASGICSAIIHRTCPVYTELSGEPAEQRLFDANGHLLQHLMRARSAQKSGTRETVHQTIYSTCPVYTGQPGGPRSQKLQRSNPNGLVTWLAHRTCP

SEQ ID NO: 73962 - protein, 47 aa, Zea mays
  Coding DNA Sequence Number=SeqID_30587
MSHAFDDYYIKDCGVISMPEVWHMLSNDETMQIVAYIEVCMIQMVAM

SEQ ID NO: 73963 - protein, 100 aa, Zea mays
  Coding DNA Sequence Number=SeqID_30588
  Subcellular localization annotation: CTP_CleavageSite=26; ConfidenceScore=5.25e-01
MSKNTKDTRFIPRFGHTTKVPYFLVKAPTKSRVSFNPNPPFADHKGQAHTIIFAQTSGSNQEEQEGFRDEAPKSQLFNLTQRFLSKDLKWERQEILRKLK

SEQ ID NO: 73964 - protein, 94 aa, Zea mays
  Coding DNA Sequence Number=SeqID_30589
  Gene Ontology: Mol. function=ATP-dependent helicase activity; Cellular component=intracellular; Biological process=DNA recombination
  Homolog annotation: Hit_ID=Q7XHW1; Match level="QueryCoverage=47%, HitCoverage=5%, E-value=2e-18, Identity=95%"; Hit description =Putative ATP-dependent DNA helicase recQ
  Pfam annotation: Domain name=Helicase_C; Domain location=33-94; Score= 12.9; E_value=0.0033; Accession=PF00271.22; Description=Helicase conserved C-terminal domain
MGSLLDVDSSFFSSVALNATGCTSGVEVTTPKSYTSYDFLTAYIFYNKLSIIRDEVLVMVATIAFGMGIDKPDVRCVIHYGCPKSLESYYQESG

SEQ ID NO: 73965 - protein, 149 aa, Zea mays
  Coding DNA Sequence Number=SeqID_30590
MGQSGHPSLGHDLDHDHVAWEIRAQGRDARHRQQKEMKISGFIFGGLPKIMNFDLVPRNVIIRESKNNGLMFLGKNYRVVKIHMLESPEPIPINPGIMNAQCRIPKADVLEKCRTPAGSKIRNWLIARMTGLRPVEDQPSNNRSVGRGK

SEQ ID NO: 73966 - protein, 173 aa, Zea mays
  Coding DNA Sequence Number=SeqID_30591
  Gene Ontology: Mol. function=ATP-dependent helicase activity; Cellular component=intracellular; Biological process=DNA recombination
  Homolog annotation: Hit_ID=Q7XHW1; Match level="QueryCoverage=71%, HitCoverage=22%, E-value=1e-20, Identity=87%"; Hit description =Putative ATP-dependent DNA helicase recQ
  Pfam annotation: Domain name=Helicase_C; Domain location=13-87; Score= 27.0; E_value=6.8e-05; Accession=PF00271.22; Description=Helicase conserved C-terminal domain
MECPYETECTVTRTEVYYSHWPCNQLIRKVKPLQIHRSFIRDEVLVMVATIAFGMGIDKPDVRCVIHYGCPKSLESYYQESGKPRGKQSWIPSWQHKNIASLLHVVGGSYCNILVKNGTLTVAKKIVDNNYDKLQMHGCGKDYSSNWWKALGGLLIAHGTNVDLSNHSIILII

SEQ ID NO: 73967 - protein, 112 aa, Zea mays
  Coding DNA Sequence Number=SeqID_30592
MELTGATGKCDGTSSIGSGRSGGDGRSWCGENGARAAPSIGAQKRDGGDGEHRRARHDGGNGANGDWDGSGRRGVRGWLGYSGGVITEAGASLNGEAMGREALGGERTDDLE

SEQ ID NO: 73968 - protein, 35 aa, Zea mays
  Coding DNA Sequence Number=SeqID_30593
MAGGRELAGAKEGRLVGEGFELGIKVNTLGLRLKG

SEQ ID NO: 73969 - protein, 127 aa, Zea mays
  Coding DNA Sequence Number=SeqID_30594
MCLSLLVLVSKEVEREKVDLDHERLPLHSDERCLTQVLKCKMVDKVQTKDKAKSAQSRSTGLSGGAPDCPVRQAGSSKLAALGNLPATYDYNSPDCPVCTGLSGEPTGGRANGRPRDLRGTRGRANG

SEQ ID NO: 73970 - protein, 202 aa, Zea mays
  Coding DNA Sequence Number=SeqID_30595
  Gene Ontology: Mol. function=helicase activity; Biological process =RNA-dependent DNA replication
  Homolog annotation: Hit_ID=Q8H862; Match level="QueryCoverage=81%, HitCoverage=36%, E-value=2e-36, Identity=43%"; Hit description =Putative DNA binding protein
MRLHGGAVPGKDVGQAGRTGRCRTLPVRRWDGDGGDGISWFWDFSDPQDDARLLHCDMVLLDEEGNNIHATTYPPFIEKFRPLIKEGSVYNMTYFRVRASNSLYKPVLNDIMITFTNWAKLEQDIEIPPAFPTLTYSLTHIEQIHSRINHKDYYTDAIGIVTSVSNVSPHRSKGQQASSLKRNISICSARFGLHGCSYLVFC

SEQ ID NO: 73971 - protein, 124 aa, Zea mays
  Coding DNA Sequence Number=SeqID_30596
  Subcellular localization annotation: CTP_CleavageSite=42; ConfidenceScore=5.49e-01
MGISWYQPRVHPHHDSTAAGSQVFKASLGGKVSGVNRNRSPRCASVSHPCLVVDLSLRVVSVNLDLTGVPQNTLKGWPAMSTTIGLWAPPPWVLTPPQFVLGKKKLANRMLGDERLWWVMGSWP

SEQ ID NO: 73972 - protein, 443 aa, Zea mays
  Coding DNA Sequence Number=SeqID_30597
  Gene Ontology: Mol. function=amino acid binding; Biological process =metabolic process
  Homolog annotation: Hit_ID=A2YQP9; Match level="QueryCoverage=92%, HitCoverage=93%, E-value=1e-144, Identity=66%"; Hit description =Putative uncharacterized protein
  Pfam annotation: Domain name=ACT; Domain location=112-180; Score =24.7; E_value=0.00035; Accession=PF01842.16; Description=ACT domain
  Pfam annotation: Domain name=ACT; Domain location=244-310; Score =15.5; E_value=0.19; Accession=PF01842.16; Description=ACT domain
  Pfam annotation: Domain name=ACT; Domain location=30-93; Score=23.7; E_value=0.00069; Accession=PF01842.16; Description=ACT domain
  Pfam annotation: Domain name=ACT; Domain location=322-388; Score =41.2; E_value=3.7e-09; Accession=PF01842.16; Description=ACT domain
  Pfam module annotation: Pfam domain module=ACT::ACT::ACT::ACT; Domain location=112-180::244-310::30-93::322-388
MEWLDEYEKLVIRMNTPRVVIDNAVCPTATLVQVDSARKRGLLLEAVQVLADLDLSINKAYISSDGRWFMDVFHVTDRLGRKLTDASVIAYIQQSLGTWVEPAAAAPPEGLTALELTGPGRAGLLSEVFAVLADMQCGVADARAWAHRGRLACVAHLRADDPADGDGDGRVSRILARLSHLLRGDGVVAPGAVAAVPASGVAHADRRLHQLMSADLHRAAPVPVPVPALAPAVSVQSWAERGYSVVTVQCGDRPKLLFDVACTLHDMDYVVFHGTVDTAAGRARQEFYIRRADGSPIRSEAEREMLTHHLQAAIERRSLEGVRLELCAPDRAGLLSEVTRTFRENGLLVAQAEVSTKGDQACNVFYVTDAAGKAPDRGAIDAVRERVGADRLVVSEEPRPPQQQLYPDASGPGSGGGGGLGLVYLGNLVRRNLYNLGLIKSCS

SEQ ID NO: 73973 - protein, 459 aa, Zea mays
  Coding DNA Sequence Number=SeqID_30598
MEVQAHASCNRRAACFVHTTAPPLAPPPRLLDCGTNTGPGKGDTPKRILPREGTRLRASLLIRGSKAGPSEGFDSRLRSRGLYTHYWSEVRRPAPRKGSTAASGYSGSAPTTDQGFEGWPPKGHFRDQRERSCNGIPSEGGIEPSDPVARGPGPADHPQRLGGYSRKPGSDQTVDSVNIPARELGTRPYTRATTSSHEGTTRPAKALREALRPRRSQTTPPRPRGLHPAGALARTHRNKTQPRKAGPLAKKCDKSLQESANTPFEARGLLSGTIIRCTLKAPNSQLSRSDRRHFAAPLTGLTERQRRLRRSDCGLRLGAKSRKDGELRSARPRARTRAKSRKTANSASPDPGLGLGLSPGRRQTPLRPTLGLGLHPGLSRRPPPRPTQGLGLDFGHGRQTRPRLRRSFHIAQPKGADQPRQQEAPSSPYPKLTWATGNKTGVPSGSLRQIGNDGTPLTL

SEQ ID NO: 73974 - protein, 27 aa, Zea mays
  Coding DNA Sequence Number=SeqID_30599
MALTGLAGGSDFDNAGLVGEVEPEFRL

SEQ ID NO: 73975 - protein, 158 aa, Zea mays
  Coding DNA Sequence Number=SeqID_30600
  Homolog annotation: Hit_ID=Q6J9V9; Match level="QueryCoverage=43%, HitCoverage=17%, E-value=2e-11, Identity=57%"; Hit description =Putative uncharacterized protein
MQAACNRTKRAHPFDFDASSMEAQAHTSCNRRAGYYVRETAPPLAPIPRLLDCGTSAVTRGDPAHSPTVPTEHIGHGDRERGYPERDPSPRRKRAPSPLLIRGSKAGPSEGFISRLRALGLCAHYWLAPEGFDSRLRRRARDDPGYVRYITKARATLP

SEQ ID NO: 73976 - protein, 212 aa, Zea mays
  Coding DNA Sequence Number=SeqID_30601
  Subcellular localization annotation: CTP_CleavageSite=51; ConfidenceScore=5.61e-01
MSSHSLMHRVFPPSKPPDGGYPSSFRLVVGGTQLRGSWYLSAIVRLQGFSSASPAVPLRRRSPEIVTTSPLGGGEASWGCDLGPTLSFKDVHHPHWGGGRAEPELYLPRGFVGRPLLRRSRERALTGPAGGSDFDNAGLVDGGRRQPQRVGLVGLAPGAPSCRKAAAAPCAREDRPRYRALPGRRSCSGAVLPLHRYGASARRSVPHSSGRT

SEQ ID NO: 73977 - protein, 212 aa, Zea mays
  Coding DNA Sequence Number=SeqID_30602
RARAMGSGEAEVVRPRPGRSPSPGVGRGGSRSAEARAESEPWGRARRSSFGRGQGGVEFAVFRVLARVRALGSGGAEFAIFRVLARVRALGSGGAEFAVFRVLARVRALGSGGAEFAVFRVLARVRALGSGGAEFAVFRVLARVRALGSGGAEFAVAPLARPDCLSDSLCRVAPQSEWRRWRCPSVRLLYADGGYQLRIRRLEGTPNYGPRQ

SEQ ID NO: 73978 - protein, 312 aa, Zea mays
  Coding DNA Sequence Number=SeqID_30603
  Gene Ontology: Mol. function=nuclease activity; Cellular component =intracellular; Biological process=DNA repair
  Homolog annotation: Hit_ID=A2YJM5; Match level="QueryCoverage=75%, HitCoverage=57%, E-value=4e-84, Identity=63%"; Hit description =Putative uncharacterized protein
  Pfam annotation: Domain name=GIY-YIG; Domain location=53-138; Score =54.5; E_value=3.5e-13; Accession=PF01541.15; Description=GIY-YIG catalytic domain
MARRGAAAKGTWRPRRKPSRAQADVDGDAVHRGAEGGRPPPKGHTTATGSGGFFCCYLLRSLCPRSKGRTYIGFTVNPRRRIRQHNGEIVSGAWRTRRGRPWEMVLCIYGFPSNVAALQFEWAWQHPTESLAVRKAAAEFKSLGGIGNKVKLAYTMLNLPSWESLNLTVNFFSSKNTKFTTGCPSLPSQMKAVVCGMEDLQCQPDGPSSEEDDNDIRDESQDNGEEPPDSPIRDGFSYSDYCFQQPSSDQAQPMDEQTISADAGDGRHILNGNHVVDLVTPTPLGRLRRRDCISSICPKIIDLTSSPIVIQL

SEQ ID NO: 73979 - protein, 95 aa, Zea mays
  Coding DNA Sequence Number=SeqID_30604
MATTATEEAHSEVQSKVGEVHTLRFLDVRHLTLIHYHQPSLDPAKESIPHSTWAQTNNPRVVDIGDDHEVPMFDDGQRGAVALDHVQAAAAPELA

SEQ ID NO: 73980 - protein, 95 aa, Zea mays
  Coding DNA Sequence Number=SeqID_30605
MKTGEKQKKTPTSKISNTYINKVDKKAATLYLIKKKKNGKVIAIKANKQTNKGKGTKRIWVPKEIISTMKSAKGSAQTNKKIKARVQKKGAKNPK

SEQ ID NO: 73981 - protein, 161 aa, Zea mays
  Coding DNA Sequence Number=SeqID_30606
  Homolog annotation: Hit_ID=A3BQ78; Match level="QueryCoverage=39%, HitCoverage=31%, E-value=9e-10, Identity=56%"; Hit description =Putative uncharacterized protein
MEIAKHGLHRTNPQTIYGVPLNSTLRKIHCLCFRYHLQTWANLCLVIVASYFCRMRKGAAFIALLPSPYCSTCHPIALQILERPIVVIQMSPRSFQDNMTCSTSQTDLCHYSSSARHNSRSNKVTSSRNGGRFLASRHRKISLSYFFISGSAQSESDTHQQ

SEQ ID NO: 73982 - protein, 79 aa, Zea mays
  Coding DNA Sequence Number=SeqID_30607
MEELDENPFLNACRRKYENNEYHVKALILPYVCYLSIKKGAIPLWEIILCVIIIMIGVVCAYIWSYTSNSRMFFTYSAR

SEQ ID NO: 73983 - protein, 406 aa, Zea mays
  Coding DNA Sequence Number=SeqID_30608
  Gene Ontology: Mol. function=oxidoreductase activity, acting on the CH-OH group of donors, NAD or NADP as acceptor; Cellular component =glycerol-3-phosphate dehydrogenase complex; Biological process =glycerol-3-phosphate catabolic process
  Homolog annotation: Hit_ID=A7Q3X8; Match level="QueryCoverage=74%, HitCoverage=76%, E-value=1e-111, Identity=65%"; Hit description =Chromosome chr13 scaffold_48, whole genome shotgun sequence
  Pfam annotation: Domain name=3HCDH_N; Domain location=96-222; Score= -103.2; E_value=0.092; Accession=PF02737.9; Description=3-hydroxyacyl- CoA dehydrogenase, NAD binding domain
  Pfam annotation: Domain name=ApbA; Domain location=97-252; Score= -31.7; E_value=0.088; Accession=PF02558.7; Description=Ketopantoate reductase PanEApbA
  Pfam annotation: Domain name=F420_oxidored; Domain location=96-303; Score=-41.4; E_value=0.004; Accession=PF03807.8; Description=NADP oxidoreductase coenzyme F420-dependent
  Pfam annotation: Domain name=NAD_Gly3P_dh_C; Domain location=234-376; Score=188.2; E_value=2.1e-53; Accession=PF07479.5; Description=NAD -dependent glycerol-3-phosphate deh
  Pfam annotation: Domain name=NAD_Gly3P_dh_N; Domain location=95-248; Score=125.7; E_value=1.3e-34; Accession=PF01210.14; Description=NAD -dependent glycerol-3-phosphate deh
  Pfam annotation: Domain name=PPI_Ypi1; Domain location=18-53; Score= -10.8; E_value=0.053; Accession=PF07491.2; Description=Protein phosphatase inhibitor
  Pfam module annotation: Pfam domain module=3HCDH_N::ApbA::F420 _oxidored::NAD_Gly3P_dh_C::NAD_Gly3P_dh_N::PPI_Ypi1; Domain location =96-222::97-252::96-303::234-376::95-248::18-53
MAAAAAVFFPSTPNPRHRLAAAARRPPPSFTGATDAVPLPEDEDSSDDDADDDGAPRRSGRRDRRRAVRVAWEKLVRWSRSWRRRNRSDVLETTRKVVVLGGGSFGTAMAAHVAAKKADLEVAMLLRDDHICRKYLSEHRLPENIVATTSAADALAGADFCFHAVPVQFSSSFLESISTHVDPKLPFISLSKGLELNTLRTMSTIIPRALGNRRQPFVVLSGPSFAVELMNKLPTGVEIAGALKNVLAIAAGIVEGMSLGNNCMAALVAQGCSEIRWLATKMGAKPTTLSGLSGSGDIMLTCFVNLSRNRTVGLRLGSGEKLDRIMGSMNQVAEGVSTAGAVIALAQKYKVKMPVLTAVARIIDNELTPTKAVLELMNLPQCLLLLCSSDNNILIMRKGVLVCLED

SEQ ID NO: 73984 - protein, 296 aa, Zea mays
  Coding DNA Sequence Number=SeqID_30609
  Homolog annotation: Hit_ID=Q6J9V9; Match level="QueryCoverage=24%, HitCoverage=17%, E-value=2e-08, Identity=49%"; Hit description =Putative uncharacterized protein
MPPLVQRHKDGRDVLLRPRLPQLEDAATDPHRHANSSFPRRRGKKLRKEEMGPQIPVGGNPQKPFANRREDGCLRDGVGAKIVQLHPVEVQNRPHEMTCRHSEPPLVKRDEAQHIPWRRGRGGSTRRDHPLRLRATGERTKQTIGNKSLQIVRRDGGERSRVARRNNGYPVGHHQAEEVAAGWTRDRERGYSERDPSPRRKRSRAPLLIRGSKAGPSEGFNSRLRALGLHATTGQRLAPEGFDSRLRAHRARDDPWYVRYITKAQATLPRLGGCSRKPDSGQTVDSVNIPARELGT

SEQ ID NO: 73985 - protein, 34 aa, Zea mays
  Coding DNA Sequence Number=SeqID_30610
MALMQRDVALVSGWKVENLDDLNEGWLGVTVGAK

SEQ ID NO: 73986 - protein, 192 aa, Zea mays
  Coding DNA Sequence Number=SeqID_30611
MTLREATCSQADEASPRADSASVHADTAASGSGSSQSSRRCSGLDSHNEQTPALKVPLQTELRFHSRGYEQPPHQRACGMTNSSWLAADHCSSSNSDLHSGRLNSSSDDLRADAAATRPSPTSSLEGRGQAIKAKEPEEEVAHRPIREVELRLSSPPATTRMMKILEAEGGAEAAARLASSHHRTGGHHPGD

SEQ ID NO: 73987 - protein, 155 aa, Zea mays
  Coding DNA Sequence Number=SeqID_30612
MVRICLYESAHRSGIAWWIEAESKRRRVENGRREVNAKHVPRWGAGVVDSLDSRQGAASCLATVAPPPPPAARKATGQTRMLLFRHGGKTSPSPLPPGGLTTVVVAAALRRKEYYVVATIEGHELETPETEQRPGLKRLLETTHLELNGKLFVNT

SEQ ID NO: 73988 - protein, 473 aa, Zea mays
  Coding DNA Sequence Number=SeqID_30613
  Gene Ontology: Mol. function=sugar binding; Cellular component =cytoplasm
  Homolog annotation: Hit_ID=Q6ZXK6; Match level="QueryCoverage=67%, HitCoverage=97%, E-value=1e-112, Identity=64%"; Hit description =Kelch repeat containing protein
  Pfam annotation: Domain name=Kelch_1; Domain location=162-209; Score =20.8; E_value=0.0052; Accession=PF01344.16; Description=Kelch motif
  Pfam annotation: Domain name=Kelch_1; Domain location=214-260; Score =26.9; E_value=7.6e-05; Accession=PF01344.16; Description=Kelch motif
  Pfam annotation: Domain name=Kelch_1; Domain location=267-306; Score =6.6; E_value=0.49; Accession=PF01344.16; Description=Kelch motif
  Pfam annotation: Domain name=Kelch_1; Domain location=367-421; Score =13.3; E_value=0.078; Accession=PF01344.16; Description=Kelch motif
  Pfam annotation: Domain name=Kelch_2; Domain location=162-209; Score =17.8; E_value=0.04; Accession=PF07646.6; Description=Kelch motif
  Pfam annotation: Domain name=Kelch_2; Domain location=214-260; Score =13.1; E_value=1; Accession=PF07646.6; Description=Kelch motif
  Pfam annotation: Domain name=Kelch_2; Domain location=266-312; Score =3.0; E_value=20; Accession=PF07646.6; Description=Kelch motif
  Pfam annotation: Domain name=Kelch_2; Domain location=365-421; Score =2.8; E_value=21; Accession=PF07646.6; Description=Kelch motif
  Pfam module annotation: Pfam domain module=Kelch_1::Kelch_1::Kelch _1::Kelch_1::Kelch_2::Kelch_2::Kelch_2::Kelch_2; Domain location=162 -209::214-260::267-306::367-421::162-209::214-260::266-312::365-421
MARFTLFCSGMSACDEDATILCTSKVRARAPPSTSLTPPKHGKAEEAEQSFVGASMAGTWVKFCKPSLILGSKVSWDQLAIVTHPLGWSGNWTLEPYVIYKGGLIAGLVGGVDEEVSIPSSMDLRLPSVKGMLTGKSVMPKFCSSQRASFAAMEQKGAGPGARSSHAITLLGGTAYSFGGELTPRVPVDSTMYAFDLNTQTWSALDATGDVPPPRVGVTMAAAGGTVFTFGGRDLEHKELNELYAFDAATRAWTLLSSGADGPPHRSYHSMAADAGAGRVYVFGGCGDAGRLNDLCVYDVAAGAMGAAAAAGGGVPAARRARAGRRRRERCGWCTGSRARSWKTCTATTRPTREWAAVQTTGDRPSPRSVFCAAGFGRHVVLFGGEVDPSDLGHLGAGKFSAEAFALDTETGAWTRLDDRAEAEHHPGPRGWCAFTAGEKDGQRGLLVYGGNSPTNDRLGDIYFFTPVLEAAS

SEQ ID NO: 73989 - protein, 220 aa, Zea mays
  Coding DNA Sequence Number=SeqID_30614
MGRGKWVARGRRARLGVDEHVARDRALRVAPKARRVAPKHCAHHASTHARKATLTRRGRAAHTLGPSRAHATQRGSAGGSRAIGTLGRAQGRAGADMPRPRRAGAGQAEARARTPSAASRGKRATPRHRGLSREGTGTARAGAGRRGGRARRAEGCRGRGSRTGPGGRAACHGWARRVRRAGAAEAGPRHGRAGLNGAASRKGRKRGSEEKRRGSYRDQG

SEQ ID NO: 73990 - protein, 340 aa, Zea mays
  Coding DNA Sequence Number=SeqID_30615
  Homolog annotation: Hit_ID=A2YGC2; Match level="QueryCoverage=45%, HitCoverage=70%, E-value=3e-08, Identity=28%"; Hit description =Putative uncharacterized protein
MESDDLWAERESRLVGKVAVRMMVLALSMVMVVYIATTAQEKMKPWKETSRSSKIMTSSRHGLLAGHISSVLTLMLMMSFVDGSSYHMEQEIESVRSCSPVLPLEAPPAPPPSAPATGVAAGGDQDDVGGDDSSSHNTDLSTDQELEGWVARPITRDAARWCHFHDALDTLLRQALDRRTWSIEYRCVVFQHSRGVYLDRWEVTCLVRRPENSLRGAEVYSEHYSISERDSVEAAMQDATRCALSHYCSLLGGVADGLNLKYYPRRLCGSTGGMVVSPVGEDNPRLSSTVNLAVVLNMELDHALDELSRAHAEIAQLRAERTAHLGVDTRLMATPTAGPG

SEQ ID NO: 73991 - protein, 98 aa, Zea mays
  Coding DNA Sequence Number=SeqID_30616
MGAVVGGRRGTNSGEAPWTPVTNSGEQESKRRVRERGSSGRKRGREFGHIYRERRGSASVIMASRLPLMAFINGESSQDAKVTWTKALRKASPKKKTL

SEQ ID NO: 73992 - protein, 118 aa, Zea mays
  Coding DNA Sequence Number=SeqID_30617
MGKIYAKLFFSFPCCFIFAMVTPLHFAHLYHLISCNSSQGIKNLDGILRSDTATDRIKYHNLTRSGIKLMVIKQRDGEACPITPHAPPQPRQGPTQQSNPVVRWTAKSLQQPCPPENL

SEQ ID NO: 73993 - protein, 184 aa, Zea mays
  Coding DNA Sequence Number=SeqID_30618
MNSMRKVGRAGNDEVWTRFGHVSGEQGNGRGRRWTARERRGSAGVIMASRLPLMAFINGERGVTPGLVVGSWRGVSGRCSASRAQEEGAAVEAARGRKGLVGCGRGSGWLRAQGRASGSGLERSAARPQPRRGLARTQATEGVGVSWLPGGALLGEKRGREEREGEGIKVAARGEADKGRRLPD

SEQ ID NO: 73994 - protein, 136 aa, Zea mays
  Coding DNA Sequence Number=SeqID_30619
MENHPKKQCYHKGGMRHPWPTELLAQQYPRSTFFLGVLGMLGKRGDRKGFSYATAAGEGVMWVGFSQHPAASLWDSAAVGAAGEHVAAEEADSAQQTEGTTGLTRGAQAAMIVRAARESGEDGPDTAVPLDSEHGK

SEQ ID NO: 73995 - protein, 61 aa, Zea mays
  Coding DNA Sequence Number=SeqID_30620
MDVYGYTDMGILRSVMYLQRRTYAQVTYLGVIYVFALVLDVLIEGGHCDKAIKLCEECDFD

SEQ ID NO: 73996 - protein, 93 aa, Zea mays
  Coding DNA Sequence Number=SeqID_30621
MDVGEWMLGYHTPGEIREGSPKRVSGVLSDPGTLRQADSGLRGTPNGLGRQWRAFVRPPVHQRFLPGPPRNGPGVPQRSSSFFPTGYKLCWGL

SEQ ID NO: 73997 - protein, 97 aa, Zea mays
  Coding DNA Sequence Number=SeqID_30622
  Subcellular localization annotation: CTP_CleavageSite=60; ConfidenceScore=5.71e-01
MDPAPDQLSISASAPFPTIPAASSPRPRAARTRRHAAPFRSDHPTAGSWRSGIDLPRRPSASAFSQQERYPSVASWSASRDANFVFGSGVAAKYFSF

SEQ ID NO: 73998 - protein, 141 aa, Zea mays
  Coding DNA Sequence Number=SeqID_30623
  Gene Ontology: Mol. function=endonuclease activity
  Homolog annotation: Hit_ID=Q2HUP4; Match level="QueryCoverage=82%, HitCoverage=40%, E-value=7e-17, Identity=38%"; Hit description =Endonuclease/exonuclease/phosphatase
MEMKLNRKPLGRNPLSDVPYRNPGKLRGLVDATSRRRVNILCVQETKWKGQRVKEVENTSLLWYSGTVVDKNGLGILIDKSLKDKVVDVKRQGDMIILVKLVWGCSLEHYKCICPQVGLRESEKSKFWEDLDGLVRAVPHQ

SEQ ID NO: 73999 - protein, 74 aa, Zea mays
  Coding DNA Sequence Number=SeqID_30624
  Gene Ontology: Mol. function=endopeptidase Clp activity; Cellular component=chloroplast; Biological process=proteolysis
  Homolog annotation: Hit_ID=A2WNB9; Match level="QueryCoverage=82%, HitCoverage=21%, E-value=1e-23, Identity=86%"; Hit description=ATP -dependent Clp protease proteolytic subunit
MVFFNHGLKFAPTVKLLARHIGKPMEEIARDIRRPKYFSPSEAVDYGIIDKVIYNEKIQEDGGVVSELKRSNLI

SEQ ID NO: 74000 - protein, 224 aa, Zea mays
  Coding DNA Sequence Number=SeqID_30625
  Pfam annotation: Domain name=IQ; Domain location=44-64; Score=7.8; E _value=6.3; Accession=PF00612.18; Description=IQ calmodulin-binding motif
  Pfam annotation: Domain name=IQ; Domain location=86-106; Score=13.0; E_value=1.2; Accession=PF00612.18; Description=IQ calmodulin-binding motif
  Pfam module annotation: Pfam domain module=IQ::IQ; Domain location=44- 64::86-106
MPVLNHQIAFPHSPSPIPSFTDPIPVPSQQHCDGVFYGDMDVIHASTAQLQAAARCLLAHRQGQHPIFKRRHPVVLATLQQLVERKAIARQLQAAVRGLLVHRRLQEVRQHMLEAALVAVDLDAWGHDLVLSDDHQQPRRPAVSKHKHSACPAGDKLQLYGSGSREGALLLVIDEGALPSATTFRYRLPRGRLRWLLLRPFQVAIHVLHFRPDGVHGIQVAAHV

SEQ ID NO: 74001 - protein, 130 aa, Zea mays
  Coding DNA Sequence Number=SeqID_30626
MGKSKKGSGSSPRSGDKRKREPTPPSEDFGNSEYLEEEFSSESEGSPAPTTPQGIAAEVWTYIRAVERSGLEGSDESEYSSEEEGSGGDGGDDDDDRGDGDGGGDSGRGGDGGSKGGNGGGSKGSNKASG

SEQ ID NO: 74002 - protein, 281 aa, Zea mays
  Coding DNA Sequence Number=SeqID_30627
  Gene Ontology: Mol. function=endopeptidase Clp activity; Cellular component=chloroplast; Biological process=proteolysis
  Homolog annotation: Hit_ID=Q0JNQ7; Match level="QueryCoverage=81%, HitCoverage=79%, E-value=2e-78, Identity=68%"; Hit description=ATP -dependent Clp protease proteolytic subunit
  Pfam annotation: Domain name=CLP_protease; Domain location=84-237; Score=78.0; E_value=3.1e-20; Accession=PF00574.14; Description=Clp protease
  Subcellular localization annotation: CTP_CleavageSite=43; ConfidenceScore=5.63e-01
MEAAAAAFLSPPRVALDVRTLFSPPRCLPVSPSSQLRLAARPRALAGAKPRFLSPHREPAVDGGRGARDVVAMVVPFLRGAAWEQPPPDLASFLYKNRIVYLGMCLVPSVTELMLAEFLYLQYDDAEKPIYMYINSTGTTKNGEKLGYETEALAVYDAMRYVKVPIFTLCVGNAWGEAALLLAAGAKGNRAALPSSTIMIKQPIGRFQGQATDVDIARKEIRNVKIEMDLEDEGFRRPALLIADAPLRSGRRELKGGSAMKRGESELGSGMIWRLAAGLLL

SEQ ID NO: 74003 - protein, 121 aa, Zea mays
  Coding DNA Sequence Number=SeqID_30628
MTPTLVIEKIVAFEMSQKMGQEEKPTSSKPYAFSCDEYKNMKGKKMAPSSSSSSKEEEDVSGSGDIDGDNFCTSSYGVGVLLNFHMPQPLTRSFTAPRRAAPHPDAVVPLRLLEPQRRIRL

SEQ ID NO: 74004 - protein, 147 aa, Zea mays
  Coding DNA Sequence Number=SeqID_30629
  Subcellular localization annotation: CTP_CleavageSite=17; ConfidenceScore=5.01e-01
MNHRRRGAPPRWPPLPYAARRSPQRPIPRFNRTTRYDECNGDRESSITSINAVSPTVHQERRRSKSDVKFRAQPRSSPTRTATRSSQTTREVPGLSSGARPIGEVDSGAGGQLLLPPHSLSVPAQCLAGDTMTWKGETLGEVNRYAR

SEQ ID NO: 74005 - protein, 165 aa, Zea mays
  Coding DNA Sequence Number=SeqID_30630
  Subcellular localization annotation: CTP_CleavageSite=61; ConfidenceScore=5.37e-01
MLHSKPRFGSTLSQHRTADPPPIFRLWRAVAPRRPPAPRSNTRQLSPPDRATLVAPEHENRASKRWDPIPASTQSQLAHGEARSPRPDPSPRGRSRPQLGRARVTTQRSQVGNGNSRARTLSSRFALDGCETRRRTREWALQVSRDDETWGWALCRASESGDRGK

SEQ ID NO: 74006 - protein, 140 aa, Zea mays
  Coding DNA Sequence Number=SeqID_30631
MASGGAEAPTCSKEQYPAAIPPPDRATLVAPEHENRASKRWDPIPASTQSQLAHGEARSPRPDPSPRGRSRPQLGRARVTTQRSQVGNGNSRARTLSSRFALDGCETRRRTREWALQVSRDDETWGWALCRASESGDRGK

SEQ ID NO: 74007 - protein, 396 aa, Zea mays
  Coding DNA Sequence Number=SeqID_30632
  Homolog annotation: Hit_ID=Q2QTF5; Match level="QueryCoverage=15%, HitCoverage=94%, E-value=7e-07, Identity=44%"; Hit description =Retrotransposon, putative, centromere-specific
METRALLFCLGIREKTEREKDLNMLDSDCRRTPTCDGHHDLDECPSGQGVTLHKIVTAIGGGVSVAKAQRLWKAIARLRHTARKSVIPFLPSRLAERLLRRPVAGQSSHLERLHHRLHEEQERRRQEQQGSSFSLQQEIESVRSCSPVLPLEAPPAPPLGAPASGVAAGGDPDDGGGDDSSSHDTDFSADQEPEGWVARPITRDAARGCHFHDALDTLLRRALNRHTWSIEYRCVVYQHSRGVYPDRSEATCLVRRPENSLQGAEACSEHYSISERDSAEAAMQDAARRALSHYCSVLGGVADGGVIVSPVGEDNPRLNSTVNLAAVLNTELDHALDELSRARAEIALLWAERAERRHLDDGSPAPVGTQHPYRSPRRGHQSYGNPDCKTKINLEP

SEQ ID NO: 74008 - protein, 157 aa, Zea mays
  Coding DNA Sequence Number=SeqID_30633
MAPKKASSKADEAAKAALLAAKKGKALALTHSTHQEATEDDILRTCEDDALLTCGPEDQPQPPPGFAPPEGTDFTEDGEIIVTDVRAWVLDVSRRAYTLDRGRCRVGPLCRMYLLRIVRPEKGIARKQLASTTSAPTSRVYRVRVARRSGILVMWVG

SEQ ID NO: 74009 - protein, 52 aa, Zea mays
  Coding DNA Sequence Number=SeqID_30634
  Homolog annotation: Hit_ID=Q7XBE2; Match level="QueryCoverage=96%, HitCoverage=7%, E-value=9e-07, Identity=46%"; Hit description =Putative copia-type polyprotein
MSGDHAKREIVTGDKPTSSGRTLSRESGDKHKEESSSSNKTHQKGDKHYRKL

SEQ ID NO: 74010 - protein, 232 aa, Zea mays
  Coding DNA Sequence Number=SeqID_30635
MTSLLPEPEITGVRHREQAPLPATTARAWPPWPDHSHPPPLDPAPRLASPEPDRAPRSKRPNATSPKTPIHPRRSCFPRRRAWPRLTVRKPSPSFGVPSSDEGHPRGGDIAGQSLPGYSEHHSSIPLVQNEGGICVNTEDRYSLTIRAQRSHATARYGTAVEIELWRQIVMDAGSHSLSRRHRRITRTLAHPHDYVPGTEHRRRGDSPAANFREPFSGGGGEKRGQRVESKG

SEQ ID NO: 74011 - protein, 76 aa, Zea mays
  Coding DNA Sequence Number=SeqID_30636
MESHDLRAERESRLVGGNETDGFGCDYGVGKWYSFRLERDECPSGQGVTLHKIVTAIGGGVSVAKAQRLWKAVVGP

SEQ ID NO: 74012 - protein, 117 aa, Zea mays
  Coding DNA Sequence Number=SeqID_30637
MEEGNALRSFMARGGWFNGSVVGMRERLRGLRCAPALRDAPLPGISMTTWAHRTQIATDGEYGEGLERRVASSPSPQLLPSEGPVQLSHLVTKTSLDGRDAALAQSGSTGVFDMTVD

SEQ ID NO: 74013 - protein, 35 aa, Zea mays
  Coding DNA Sequence Number=SeqID_30638
MAVFMLDRVVHIASVSIKSGPFIFDQAGDVRYWFR

SEQ ID NO: 74014 - protein, 160 aa, Zea mays
  Coding DNA Sequence Number=SeqID_30639
  Subcellular localization annotation: CTP_CleavageSite=49; ConfidenceScore=5.55e-01
MEGAAATSPQLDAPSFPRLPPSVLSSVPLLPAPVPPMDAAPSLSSLPLAAMELAPAQVRLPLFPPISVDGWRPISRNALQEQASNAKCREEDANCDNTQTVEQQQPSDDRQTIEHAPLQETDPGKETHVSEDSMLTTDADGNLSSSQQTGEYNELLRQYY

SEQ ID NO: 74015 - protein, 55 aa, Zea mays
  Coding DNA Sequence Number=SeqID_30640
MVRDLGAGAVSSLLHTGLSAALGRTISSPGRKDLKVLRVDRSPGASPDDVESPRN

SEQ ID NO: 74016 - protein, 134 aa, Zea mays
  Coding DNA Sequence Number=SeqID_30641
MAYVRRLGQHHVVKSQLKCISLFYSLRGQAWHKVCCKASFQDFTHAEQRWELGRQVIFPKPGIKLERCRPAIIDQARGNGSVEREQGAQGRPVVTRQVPEFRKADSNSQFYAPISTSKRDISIKSESLILNSVG

SEQ ID NO: 74017 - protein, 154 aa, Zea mays
  Coding DNA Sequence Number=SeqID_30642
  Homolog annotation: Hit_ID=A3AU58; Match level="QueryCoverage=77%, HitCoverage=22%, E-value=2e-24, Identity=52%"; Hit description =Putative uncharacterized protein
VSRQWFDCCLHRCFLIALNYIAVPFLLLNELYNTFQVISEEFPEFRNLLTLLLEKCDLSDNFQMLANFLQHSPDLEKLTLGRCKFSKDPKKKKGKARLSKGCLNQFNVRCKNLKLTEIIYEDDDAKKVVELLWSMSGDLPKNYIKLTKVDPDHP

SEQ ID NO: 74018 - protein, 188 aa, Zea mays
  Coding DNA Sequence Number=SeqID_30643
MKITSDDQRISSEVQETKKSVATGGLSGRGHRTVRCTKGTVAQRLVPGGTVEEAWTVRCDTGLSDAKVDSANGRLTDPTASGALDRAPDYPVLITGLSTVVIVLSGRESCETMTTEFVSWLPLCTGGNEARGVSAESLLVETAGSVREEPEEEHHLSVEKAYNSLRSYSTEVLGPRMGFPLRRGTNKD

SEQ ID NO: 74019 - protein, 84 aa, Zea mays
  Coding DNA Sequence Number=SeqID_30644
MGETFKGEIGLRLRERDCRRENDEGRCSGRVGYSDEESRPQGGGIGCAKAWTSSGEKEEAQRHIETTGVFKEDFTVGMSEVCTT

SEQ ID NO: 74020 - protein, 49 aa, Zea mays
  Coding DNA Sequence Number=SeqID_30645
MCLATLPEIWARGGAVGVGNPREHGDVFLSKPHLVKPALVFPPLAEPRP

SEQ ID NO: 74021 - protein, 75 aa, Zea mays
  Coding DNA Sequence Number=SeqID_30646
MARQTGFCPTYRLVTSPEAGPRVTADPREKVLDPSIHDLDLRIRPGTLRVPLNGTWIPLRPCDDQTTLLAACLSN

SEQ ID NO: 74022 - protein, 274 aa, Zea mays
  Coding DNA Sequence Number=SeqID_30647
  Gene Ontology: Mol. function=phospholipase A1 activity; Cellular component=extracellular region; Biological process=lipid metabolic process
  Homolog annotation: Hit_ID=A2FXY5; Match level="QueryCoverage=79%, HitCoverage=27%, E-value=6e-21, Identity=28%"; Hit description =Agglutinin, putative
  Subcellular localization annotation: CTP_CleavageSite=27; ConfidenceScore=5.42e-01
MFGALQGQHGAFPPPPCGKATQGRIVRLTAAKPGLRRHRKLRFARPQGSDSGSAPEDDELRSARPQGSDSGSVPEDDELRSARPQGSDSGSAPEDDELRFARPQGSDLGSAPEDNELRFARPPGSDSGSAPEDDELRSARPQGSDSGSAPKDDELRSARPQGSDSGSAPEDDELRSARPQGPDSGSAPEDDELRFARPQGPDSGSAPERRRTPLRPTQGSDSGSAPKHDELRFARPQGSDSGSAPEDDELRFARPQGSDSGSAPEDDELRFARP

SEQ ID NO: 74023 - protein, 117 aa, Zea mays
  Coding DNA Sequence Number=SeqID_30648
  Subcellular localization annotation: CTP_CleavageSite=70; ConfidenceScore=5.68e-01
MGRGLTLAAAATLRGAFSAYLGVSGGPPSSSASSRPSTPYSRSQRSRKAGEADTRRHHSGEKSSTSYSGVASTVRRPRYRAPEGTKGSAQGFSLPPLPLTTAIGFFLSSLLLRTLSR

SEQ ID NO: 74024 - protein, 229 aa, Zea mays
  Coding DNA Sequence Number=SeqID_30649
  Gene Ontology: Mol. function=cellulose synthase (UDP-forming) activity; Cellular component=membrane; Biological process=cellulose biosynthetic process
  Homolog annotation: Hit_ID=A2Y0X2; Match level="QueryCoverage=48%, HitCoverage=8%, E-value=4e-35, Identity=67%"; Hit description =Probable cellulose synthase A catalytic subunit 1 [UDP-forming]
  Pfam annotation: Domain name=zf-C3HC4; Domain location=92-136; Score =6.1; E_value=0.018; Accession=PF00097.16; Description=Zinc finger, C3HC4 type (RING finger)
MPGFTPCSPRFDRDFDFPTDAGAVGLTDRDPSSHGRLLGSHNRNEFVMIRHDGDAPAPSLLRVSARRFCLSISAMLPLRRAKPTKSANGQVCQICGDSIGVSATNDVFVAYNECAFPVCRPCYEYEREGNQCCPQCKTRYKRQKCWFPGNFFEWDYKDKDGVKGLADNITQALMSSRTSSETYTSHFTPIKEGTPSTSTDMRLRTSLHRCHWAYKGVEEDSTLEDPYFL

SEQ ID NO: 74025 - protein, 194 aa, Zea mays
  Coding DNA Sequence Number=SeqID_30650
MARRSGEERVGSRRWRSCPSGLALGWFGGGCRVPWVALGGRATCVGRAGLRRADGRVGGRVVRHGRGGICGLAVCGREDGSPWSRRGLQVCGVRVGGRREAGAIYNFDICHDLHGLIIGEHVSHIPEEIPSYIVSHRTRTTIRFCLNKKADEYADTDLIFAAHPIIKENVTENRDGQRPIQRLQRAVATDKSRA

SEQ ID NO: 74026 - protein, 95 aa, Zea mays
  Coding DNA Sequence Number=SeqID_30651
MGSGEAELPMSPEAGLSRCRPHFGEWHGSRSRAGDAVFLPGDRPFSVAFRSGGCARAHPPGVAPEASEEWFDSFEVLARFVMLRPVWLFPHANWP

SEQ ID NO: 74027 - protein, 413 aa, Zea mays
  Coding DNA Sequence Number=SeqID_30652
MGSARVAFVLLSLEERNFAGVGTFQPSLGFKDFHQAARLFKDLHHPGWGGGWTEPELYLPRGFVGHHLPQHSGERALTGLAGGSDFDNEGLVGGERRQLQRVGLAGSASSSLAPGAPSRRESGCRAARIGGPPKTSHAARAAFVFLGCPAFAPVWRLCVEMASVVGAEVVAAEEVLVADGITATIRAPGLRLFGFDSLSLPLEWGRGRGARCSSIRPEAIAAAVWPPRAEVVVAAARAGGGEPPGVSSPRRPSNVGGCSYLRGQNRSSVCNDTLSAGVCSLWLSGPEHESLSLVSLAARGFSCLVKGPLGRSSMSRSRRQRCQCGPRQSWLETRLRRPEPGRAVHWRDQYRSRVTEAMSRADVLGGQLAEASGRPAEPSARAGFLEETLAAMAQACRIAHPNASYFSQKAMSE

SEQ ID NO: 74028 - protein, 557 aa, Zea mays
  Coding DNA Sequence Number=SeqID_30653
  Gene Ontology: Mol. function=DNA topoisomerase (ATP-hydrolyzing) activity; Cellular component=membrane; Biological process=DNA unwinding during replication
  Homolog annotation: Hit_ID=A7PWL2; Match level="QueryCoverage=21%, HitCoverage=60%, E-value=4e-23, Identity=47%"; Hit description =Chromosome chr8 scaffold_34, whole genome shotgun sequence
  Pfam annotation: Domain name=TMEM14; Domain location=312-415; Score =3.6; E_value=0.00043; Accession=PF03647.4; Description=Transmembrane proteins 14C
MTAAAKDAVAPTVRPGCQRDEATAGCSTRSHRDRLSSDAAAIDHASSSERRKEGEKDQAKFIGGGVRTHLMPSLASNEPSLLRLHVPRLDRAASRRENGGVEWWRVRGATTSGSESRHQVRFLASRSGRRQEERMASRTSPLVFKRVAGIRTIAESGRFKASSFHFPIIKLLPALITIALPLLVLCWPSRVTVHSSSCKCLGFALRLAAECTILITRTQIPITRGYSVRSKILLLGKFIVYASDYTTPADSVATSEQTGGEAEATLETGGEAAATLEQTGGETEEPTIVAPANEYTEQEAAPQQKCAKIHDFCLGIPFGGLLLSMGLIGFLFWRSPASLTFGVAPGLAILALAVLSLKVWRSGKSSLLFILAQAGIAAAVAWKHGQAYTTTRKLLPWGFYVALSLLCHSESQMKAAPCRLRRQKSEILRAHCLRVSVRSMASRRSPRIEKKIATLEGKIEKMEMNKKIKEDLKAVALGTSKVNYLDSRITVAWCKRHEVPIEKVFFHGRIIVDWWCQVFFHGRCRGAPDCLTYLTSNKGRRLSTSGLTSIDHNSSFL

SEQ ID NO: 74029 - protein, 359 aa, Zea mays
  Coding DNA Sequence Number=SeqID_30654
  Homolog annotation: Hit_ID=Q8LIF0; Match level="QueryCoverage=43%, HitCoverage=35%, E-value=4e-24, Identity=39%"; Hit description =Putative uncharacterized protein OJ1316_A04.113
  Pfam annotation: Domain name=BSD; Domain location=237-285; Score=4.3; E_value=0.089; Accession=PF03909.8; Description=BSD domain
MSLAKRSAVHHCRSPRGRTAAPAHAAEVGHEAERGVRVGRPGATPRMLSTRLGHCTGVGDPWAVIWGEEREEIRGGWDCGRAVCGREESRAVCGREESRAAEIAAASVDGGQFEAEPVPSIGGLLKTPTSQSETVLEAYPRDLAEFGTGLRHEIEGKKALTPSASGTHVRYSCFEAQLHALQADPATFTPDPEDAEDFARGARRRSPSPPPPPVTAPRPLTAATPTPAPPPGPTSEDAEDYAVWSKGFILDEREEEIEALCYDSDVLEAMADRLVPDAMPRKEARPPELASLGFARQLLRYNSPDCPRAQTSGLPIPVHRTSNSACPVCTGHPGGPTSQKLQRLESNGNDDVAGGTGLS

SEQ ID NO: 74030 - protein, 271 aa, Zea mays
  Coding DNA Sequence Number=SeqID_30655
  Homolog annotation: Hit_ID=A3C0E4; Match level="QueryCoverage=23%, HitCoverage=16%, E-value=3e-15, Identity=64%"; Hit description =Putative uncharacterized protein
MGYSLQRSHGPWSITHSVLQMEVASVCRKESDVLCRYSSILSYPRRTPPHTIPLDQWIIWSRHPGSASRDQPQPWRPAWRHTVPGASVHFPARRDVGPGASLIRFRLPVQHRRVALATTRPVGLRSLPSRQAVRKTSDRVRRYSPYTYVESSKFDSTTIAPILAQSTSAPRYERGHPPPHAVGHAAEAEAGVLERLVYKHRNQHRGAAYFQYLLKVRRDLKLLLGAGLAEVLNAVFPVLACRKPANTILVPNKQTRETWCKPQPSPEAFGV

SEQ ID NO: 74031 - protein, 132 aa, Zea mays
  Coding DNA Sequence Number=SeqID_30656
MGVGKGRLASTMGKNNKRKREPTPPSEDFGDSEYSEEEFSSESEGSPAPIPPRESSDDSDDSQGLAAEGSDESEYSSHEEESDGGSEDEDDDDDDDEGGGGGDGDGSGRGGSSGSKDGDGGGSGGGGNRDSG

SEQ ID NO: 74032 - protein, 142 aa, Zea mays
  Coding DNA Sequence Number=SeqID_30657
  Gene Ontology: Mol. function=3'-5'-exoribonuclease activity; Cellular component=exosome (RNase complex); Biological process=RNA processing
  Homolog annotation: Hit_ID=Q53M91; Match level="QueryCoverage=95%, HitCoverage=81%, E-value=2e-54, Identity=79%"; Hit description =Expressed protein
  Pfam annotation: Domain name=RNase_PH; Domain location=48-142; Score=- 16.7; E_value=0.028; Accession=PF01138.12; Description=3' exoribonuclease family, domain 1
MAAETKPAAASGVAGEMEVEAYRRLFPVAFLERHLGESIRIDSRRLREARPTTVALGAVSSAHGSALARLGDTAMLASVKLEVMSPPAEHPDEGSVAIEFHMPPICSPLVRPGRQADVAPVISKALEDVLTRFFVSPLTSAL

SEQ ID NO: 74033 - protein, 167 aa, Zea mays
  Coding DNA Sequence Number=SeqID_30658
MAHRTVQCATGHCPNATICTNRRYNADYTTWAYYIAFAITQGHIMEGDPELIDDSEFYQLLKEFLESCDRGASDCYLIFFSELPFPNYLLNPKTKKQSPAKSKQNLLVKSLETIVEVEEKTELEEEADVLSEIEEEKLESELDVEEESSEVAKLRHGVERYAYEDSQ

SEQ ID NO: 74034 - protein, 91 aa, Zea mays
  Coding DNA Sequence Number=SeqID_30659
  Gene Ontology: Mol. function=cysteine-type endopeptidase activity; Biological process=proteolysis
  Homolog annotation: Hit_ID=Q10716; Match level="QueryCoverage=63%, HitCoverage=15%, E-value=4e-20, Identity=79%"; Hit description =Cysteine proteinase 1 precursor
MTSGQKYRDCRQGTQSDLQIFVEMYRFWLLVFISKAGGLEREKDYRYTGSDGKCKFDKSKIIASIQNFSIVSVDEGQNVASLIKHGPLASK

SEQ ID NO: 74035 - protein, 214 aa, Zea mays
  Coding DNA Sequence Number=SeqID_30660
MSENKSPAKEMFCSEIKSPAKQVFGDQNKSSSNQIFGDENKEPSAWGAIETPMCDVRVTDSPVSSQLSPIVCQVVGAPLSEELNTCSAMEGSDPSKEKNSLAGQKDGGGLLEVYIKWESGNLIKGLKLLRNSCLSDLRKLIEAHFEEVGSKQQQQQQFIFLLLGHVPTVQFTELYSDRWTAQRIRMTDLNTLEVAHRDAARVGQYVGEDEDTFL

SEQ ID NO: 74036 - protein, 264 aa, Zea mays
  Coding DNA Sequence Number=SeqID_30661
  Homolog annotation: Hit_ID=Q6QP51; Match level="QueryCoverage=77%, HitCoverage=80%, E-value=8e-17, Identity=33%"; Hit description =Putative growth-regulating factor 1
MAAPRTTRPVALTLRQDRWHLWQEKQATLRFRHNDRVKKGTGKGDTPKGILLREGNGPRAPLLIRGSKAGPSEGFNSRLRALGLRAHYWLAPEGFDSRLRRRARDDPGYVRYITKARATLPSHFAAPLTSLTRRQRRPRRSDCCATRQNSGSAPEDDEHRLARPQGSDSGSAPEDDELRLARPQGSDSGSAPEDDELRLARPQGSDSGSAPEDDELRLARPGARSRPRPWKTDSTLTSEEPPPRPTQDSDRPRHRGSHHYPTPS

SEQ ID NO: 74037 - protein, 89 aa, Zea mays
  Coding DNA Sequence Number=SeqID_30662
  Subcellular localization annotation: CTP_CleavageSite=56; ConfidenceScore=5.65e-01
MAGSAARPTPPARPLGRPAPCPAPLRALRLGRPAPCSAGSAAPCAARPPQPDPPPRARLAAGSTGRLSGSAARPAPPAPAPRLGPVQPP

SEQ ID NO: 74038 - protein, 139 aa, Zea mays
  Coding DNA Sequence Number=SeqID_30663
  Homolog annotation: Hit_ID=Q6QP51; Match level="QueryCoverage=58%, HitCoverage=37%, E-value=9e-17, Identity=59%"; Hit description =Putative growth-regulating factor 1
MPRPRVSSGSGCTLGSPEAQLGQASTRSNLGQIASPTDRIAGKQRHSPRSDYCASHPGKADNSKFSLGRDRKLRLARPWASASGGGLRLARPQDSASASASGGITSSPDPGLGLRRSLRLARPWAWTDRATGDTSLPYP

SEQ ID NO: 74039 - protein, 664 aa, Zea mays
  Coding DNA Sequence Number=SeqID_30664
  Gene Ontology: Mol. function=protein dimerization activity; Cellular component=nucleus; Biological process=regulation of transcription, DNA-dependent
  Homolog annotation: Hit_ID=A3BES8; Match level="QueryCoverage=96%, HitCoverage=92%, E-value=0.0, Identity=70%"; Hit description =Putative uncharacterized protein
  Pfam annotation: Domain name=Auxin_resp; Domain location=213-296; Score=181.0; E_value=3e-51; Accession=PF06507.4; Description=Auxin response factor
  Pfam annotation: Domain name=B3; Domain location=78-151; Score=60.8; E_value=4.7e-15; Accession=PF02362.12; Description=B3 DNA binding domain
  Pfam module annotation: Pfam domain module=Auxin_resp::B3; Domain location=213-296::78-151
MERERESDRCLDPQLWHACAGGMVQMPAVHSKVYYFPQGHAEHAQGPVDLPAGRVPALVLCRVAAVRFMADPDTDEVFAKIRLAPTVLAKDVHGVVWKFRHIYRGTPRRHLLTTGWSTFVNQKKLVAGDSIVFMRTENGDLCVGIRRAKKGGIGGPEFMHHHHQQPPPPQGGGYAGFSMFLRGEEDGGKMMAAAATRGKAARVRVRPEEVVEAANLAVSGQPFEVVYYPRASTPEFCVKAGAVRAAMRTQWCPGMRFKMAFETEDSSRISWFMGTVSAVHVADPIRWPNSPWRLLQVAWDEPDLLQNVKRVSPWLVELVSNMPVIHHLTATPFSPPRKKLCVPLYPELPLEGQFPAPMFHGSPLLGRGGAGGPMCYFPDGTPAGIQGARHAQFGISLSDLHLNKLQPGLSPHGLHRQLDHGVQVQVQQPRIAAGLIVGGHPAARDDVSCLLTIGTPKSKKPPSDVKKASTAAAPQLMLFGKAILTEQQISLGGGNVVPALAKKSPSDDDDDVAERTVSNSDVSSPGRSNQDGTSSGGGPAARACWQEEECNNRAAGSEDDLLGHCKVFMQSEDVGRTLDLSAVASYEELYQRLADMFGVDKAELTSHVFYRDDASGALKHPGDEPFSEFTKTARRLTILTDESSDSLASSSGHNHNAAAFGHSD

SEQ ID NO: 74040 - protein, 165 aa, Zea mays
  Coding DNA Sequence Number=SeqID_30665
MALELGEIVVTSRSGGGLRSENSKGEVPPEEANGGAWHGEGCAWSRMGGAGASRGVPNPRTGLPSMETADATTRTRTLMPGGGDDLGQRGTQSTREIGLSRTRIEGRRGDPGQRTHVPWIAESRGGEREWGEEGLAGALAVSTTRLREGEDGRIRCNVNAYNKAL

SEQ ID NO: 74041 - protein, 55 aa, Zea mays
  Coding DNA Sequence Number=SeqID_30666
MELVASSGVALRLALICNKTLFPGRYNGSPGLRILKEAQVGSEVWSAETGAPVFN

SEQ ID NO: 74042 - protein, 95 aa, Zea mays
  Coding DNA Sequence Number=SeqID_30667
MGGSEPGSFAEKDPFRGIPLSRSLLQEIEKEENGKGSEIGRRGQLARRLLDAWAWVPKLACQKSEKRVHLARLHAACMAARPFCPLVWAKMGGRL

SEQ ID NO: 74043 - protein, 235 aa, Zea mays
  Coding DNA Sequence Number=SeqID_30668
MALHVDVAGPRPRPGDVGVPPKLGSNLSSVAEAEPEPLGRARRKSFGRGQGGVRALGSGEAEFVVFRVLARVRALGSGGAEFAVFRVLARVRALGSGGAEFAVFRVLARVRALGSGGAEFAIFRVLARVRALGSGGAEFPMAPLASRSGAGGAVLPSDRSVERLSDGGHFGSAGGARQDKGLLLSEAKASGEPEMCPPLKGGPRAGRKSLELYADGGYQLRIRRLEGTPNYGPRQ

SEQ ID NO: 74044 - protein, 220 aa, Zea mays
  Coding DNA Sequence Number=SeqID_30669
  Subcellular localization annotation: CTP_CleavageSite=44; ConfidenceScore=5.65e-01
MGGGLLAAASTLRSALPLFGPPEQKSSSSPLLEQVTARRSSAFRCSAGLPPWSGVVRTCGGGTGVPFVMALRMPPVDRGPRGNRLSRLLGPDSRRSPWTAAPPEAGSGFAEDVVDAEGATAPFSVKTRACRIRSSCSVCFLRPPRPEEHTLAALAKLRLFSSCFEHQDSVGNRDVCVSESCFSRKGRVRYPYPGGVGIPRLGRPCGLRVLSLVHEALSPT

SEQ ID NO: 74045 - protein, 136 aa, Zea mays
  Coding DNA Sequence Number=SeqID_30670
MTTAAPGSLTEAGQRQQGLDRYNSCPSIRLRRTSDSHDITPAGCPDLSGCHIGIRNNEVRGCESASSAKCARNRSKGVYNLEPLAAKNFIIQWDVFKICYIINAVRNRNNIELQMYLQLDGDESTSVTQKRMSKSA

SEQ ID NO: 74046 - protein, 31 aa, Zea mays
  Coding DNA Sequence Number=SeqID_30671
MGVPAICARRARIKCAAESRWCLLLIKGSGK

SEQ ID NO: 74047 - protein, 278 aa, Zea mays
  Coding DNA Sequence Number=SeqID_30672
MTSHGSSDEGNAQSHTDGLAREGFPRILWEVLQGAGYMTPPQYAVQQFEKHRVPRCRPGWRSLDSKSFGYRAEDTIEAIALHRLTTFCRFHPLELSTHTIGLLPVEKEDDPMWKDRVEHAKDIWAIYLGQTAHLTVRCMNALYRLQVMRVEAMSHLMALLEATKITLDNREELVVDLSTEMVEKDLQVEQLSNEIQELEELVGTRENTIKVLEDQLINTQQQLAEANQHLDMHHQEIQDMEANEDVDIKGGEEPASSLDTAGSGRPPSPESSVASFAH

SEQ ID NO: 74048 - protein, 46 aa, Zea mays
  Coding DNA Sequence Number=SeqID_30673
MALLSTVETCSIFNLSWCCLTVLLVLECREGDGVGVGMGGKIRLPP

SEQ ID NO: 74049 - protein, 305 aa, Zea mays
  Coding DNA Sequence Number=SeqID_30674
MACLRHTTRKSVIPFLPSRLAERPPRRPVTGQSSHLERLHHRLHEEQERRRQEQQGSSFSLQQEIESVRSCSPVLPLEAPHAPPLGDPASGVAAGGDPDDGGGDDSSSHDTDFSTDQEPDGWVARPITRDAARGCHFPRCARHPATSGTLTDNSLQGAEVCLKHYSISERDSAEAAMQDAARRALSHYCSVLGGVADGLNLKYYPRRPSGSTGGVIVSPVGEDNPRLSSTVNPAAVLNPELDHALDELSRAHAEIAQLRAERVERRHLDGGSPAPVGTQHPYRSPRRVHQPYGNPDCKTKIDLEP

SEQ ID NO: 74050 - protein, 95 aa, Zea mays
  Coding DNA Sequence Number=SeqID_30675
MVAQGRDGATVAKLWLHRKNSDERGPEGLGANRGVFQVAGDRVELTGANDVARSSTMTIERAVDVGRGAQKGRGHGDVAENARTWARPRQGIVGE

SEQ ID NO: 74051 - protein, 182 aa, Zea mays
  Coding DNA Sequence Number=SeqID_30676
MCRNRSIEEVVHRCQTEALHDDFRGFTTSMGHPLPQRPPLPLTPSYPTNLNEWHQQEYVVPFVTPEDEAEEFDDSFFASAPPPPYPGLGPIPGDPRPFGSGHPPPPYKGPGPIPVDPRPSGSGHHHPPPPYQGPSSSSDFPSADEPPRESSIKEDMMCVFFSEYPSYPPPSGHYGGDDPRDN

SEQ ID NO: 74052 - protein, 146 aa, Zea mays
  Coding DNA Sequence Number=SeqID_30677
MGKSKKGGSSSHHSDDKRKSEPTPPSEDFGDSEYSEEEFSSESEGSPVHASPPASSDDSDDSQGIAAEVWTYIRVVESAGLKGSDESKVSSDEGNSSDSSEEGSDGDDDGEGDDDGGDGDGSKGDGKGGSGIDSGKGDSGNGKASG

SEQ ID NO: 74053 - protein, 104 aa, Zea mays
  Coding DNA Sequence Number=SeqID_30678
MEVWSELGWPNRRAEMIRQCGAAHAGQWDTRLDLGTSWGLRCNRSEVVVEVATLDVLSVLSRPLQRDAGILTRMPAVELCPQVIRPLQRDWSILSHTPAVELRL

SEQ ID NO: 74054 - protein, 159 aa, Zea mays
  Coding DNA Sequence Number=SeqID_30679
  Homolog annotation: Hit_ID=A3BUU4; Match level="QueryCoverage=72%, HitCoverage=47%, E-value=4e-19, Identity=53%"; Hit description =Putative uncharacterized protein
MELGPHGWCARLARHHLHCTIIHFERAERINDSLTTLEKEKDRLSTALRGAELDYDSVDSELQEVLESRIAAEEEDAALMEQFARGSIRGDIAAEAKALNFEKDELHGNLEKAVADLEKIEKDIVATTNKIQERVFILFPQGYNYSASPRPSFFIVTRW

SEQ ID NO: 74055 - protein, 325 aa, Zea mays
  Coding DNA Sequence Number=SeqID_30680
  Homolog annotation: Hit_ID=A2YGC2; Match level="QueryCoverage=64%, HitCoverage=92%, E-value=4e-08, Identity=27%"; Hit description =Putative uncharacterized protein
MDDFEEFQMARIRCTARQSSHLQRLHRRLHEEQERRRQEQEQQDSSALPQREVESERPPSPAPQPEMPPAPPHGIPAAGGDPDGDRDGDDAGGSSSHGTELSEEPKPEGWIARPITRDAAHGCHFHEALDTLLHRAFDRHTWSIEYRCVVYQHHRKLYPYQWEATCLVRRPDNDLWGAEAFSEHYSITKRDTAEAAMQDATRRALSQYCSLFSGVADGLDLKYYPRRSTGSAGGVIALLVGEGNPRLNNVVNLAVVLNTELDHALDELGKVRAEVAELRAECTARHYLDGGSPAPVGIQHPYHSPPRGRFDYGTPDCRTQIDLDP

SEQ ID NO: 74056 - protein, 368 aa, Zea mays
  Coding DNA Sequence Number=SeqID_30681
  Gene Ontology: Mol. function=sugar:hydrogen symporter activity; Cellular component=integral to membrane; Biological process =carbohydrate transport
  Homolog annotation: Hit_ID=A2YZT6; Match level="QueryCoverage=85%, HitCoverage=59%, E-value=1e-144, Identity=82%"; Hit description =Putative uncharacterized protein
  Pfam annotation: Domain name=MFS_1; Domain location=36-342; Score= -0.4; E_value=0.019; Accession=PF07690.7; Description=Major Facilitator Superfamily
  Pfam annotation: Domain name=Sugar_tr; Domain location=30-368; Score =158.3; E_value=2.1e-44; Accession=PF00083.15; Description=Sugar (and other) transporter
  Pfam module annotation: Pfam domain module=MFS_1::Sugar_tr; Domain location=36-342::30-368
MAGGFIGGGGAAAGRAELYEGKITGYFILACIVGSFGGSLFGYDLGVSSGVTSMDDFLRKFFPDVYRRKQAHPHETDYCRYDSQLLTLFTSSLYFAGLVSTFGASYVTKRRGRRASIMVGATSFFLGGAINAAAVNIAMLIVGRVLLGVGIGFGNQAVPLYLSEIAPYRIRGAVNQLFQLTTCLGILVADIINYFTDRLHPWGWRLSLGLAMGPATAIFVGALFLPETPNSLVERGHLEEARRVLEKVRGTRKVDAEFEDLKEASEAARAVPGTFRNLLALRNRPQLVIGALGIPAFQQLSGMNSILFYSPVIFRSLGFGSSAALYSSIITGLHARGWRAPLHGRRGPSRPPLPLHRGWHPDDLIHGL

SEQ ID NO: 74057 - protein, 123 aa, Zea mays
  Coding DNA Sequence Number=SeqID_30682
MELELDQFMAVYHGMLVEFTRKMEPQLSSLSTSGRSLHDTLSPGRWQKKHHPHEHLPEQEERRDRQRRPTGEVGDEEHELPGGETAERRSVGADPSGKRRRAPSEQVAHQVECHLGLEALRMD

SEQ ID NO: 74058 - protein, 56 aa, Zea mays
  Coding DNA Sequence Number=SeqID_30683
MARLAGLRWWVLGQPLAHRAGAGSGTGLAWRGMGRMGSGAGRALARSGHVEHVEIH

SEQ ID NO: 74059 - protein, 103 aa, Zea mays
  Coding DNA Sequence Number=SeqID_30684
MSQLMGLLEATKITLDNREELVVDLSTEMVEKDLQYAGYHADTDEKKRDRFRRGLSTKLHDRLNIVRANNYNELVNLAISQEDCITARQAEKKRKTPVAGPSA

SEQ ID NO: 74060 - protein, 228 aa, Zea mays
  Coding DNA Sequence Number=SeqID_30685
MSGAPGDSNFELLGFGIFQRPLRYNSPDCPVCTGHVRCSKEGRPQELASLGFSLQPLRYNSPDCPVYTGLSGASAEQRLLQAPTATCSAFIAHQRTQRSDTPMLAHRTPYSACPVRHRTSRRAQKSEASTSESNGTGDVAGAPDCPVCTGLSGVHRTVRCAIKQTASTNGQVGGWGYKYPNHPTIHCIQVFQFPTTIQELAIIAKHTNKRSNPLPIPFKALVTRESDL

SEQ ID NO: 74061 - protein, 57 aa, Zea mays
  Coding DNA Sequence Number=SeqID_30686
MVGQVRSLHGGSRGQWSIVCQGGTIQEMVDGVTWPTTLPPGWTVEWDVAPAGEEHEE

SEQ ID NO: 74062 - protein, 80 aa, Zea mays
  Coding DNA Sequence Number=SeqID_30687
MDRSGRSAHTVQASPPLNCSQERLLHHRAAPSRGQTSSSLDRRLLLIVHDKIIMLIRTWSDHPRKQCYHKGGMGIPWLTN

SEQ ID NO: 74063 - protein, 43 aa, Zea mays
  Coding DNA Sequence Number=SeqID_30688
  Homolog annotation: Hit_ID=Q9XEJ4; Match level="QueryCoverage=62%, HitCoverage=2%, E-value=3e-07, Identity=96%"; Hit description=Copia -type pol polyprotein
MTTDRPLELLHMDLFGPIAYISIGGRKISYPRDLKWMLETGSK

SEQ ID NO: 74064 - protein, 917 aa, Zea mays
  Coding DNA Sequence Number=SeqID_30689
MVALAKYVWATTSYDEAEVEDHPGLPAAIMCSHHYVAYPPFEVVEDDENEGALRIAARTSSGRDLVEEFIGYGVWPLAHGWALGEVCPREMPSLGRRKVRSPLFALDVRGRDPAAVVREAEDGAVRIVGRYVPKTEGLQSWDIHGSNDKLNRVFELNRLPYGGYPGEDAVDLRGKKPMGGIEEGPSQDAAPAAKKRKLGTTVGGMGVSDNFAVELMGTCAAPGGRISSPELRESSTRMLEVTGGRWPKNLPIPWAEGKDMSTSRIARGLRIFPYGLNIVVVVSVVMNKDHQDAAQKRRTVIRIADPRREAKKAWGSVKATAPSSSQPMPAAKPAAPESGKSSASAKASGAGGTKPPPVEAVKVRELPSPGKHVADFGTNISLEDYFVGRAEEGQMVVVPPLVATTSPSAVVRAKGTAQDPWAAFCASGEILTAAAAKDVAGTMSQRLRDASQRLSQQLSQAADFADRVVSGILTADVAAEVERLRAQHADAVREKSAAESKNRRLAEKVAALEAEKMDLRRQLVEERKEANQAIAEAQAAQAEAKVARAEGSLASQRAEEWESRFNALRDRVDKAETSTRSEVERTLAQFVNSYRELGAHTADFEVPDREAGLRFLKWLQEELLVLLTIVEGFMSFSSLVTCEGAMNALSREGCRHYEVFDQSDESFECEIFKAGDPAVKQLAGALFDRMWGRMMERAEDVEDLGGLVGVPPEAAEGNPVLPLDAGEGPSAVPMPAMTGEDPASAPEPTVEGAPEVVAEPTVEDPTAAAVPSQSDDSGISVVWTEEFSEEDLDYFAALDVAATEASPHVMDAEVLPGPSAGRRRRRAVAKRRVSEVEGGPLRVDGASKRELLSSPVGASIGEGELRNLFEGEKLRIMLFNYREMGIIPKVEPILAAPVGDFCTGSFGEDFDFGHLLR

SEQ ID NO: 74065 - protein, 760 aa, Zea mays
  Coding DNA Sequence Number=SeqID_30690
  Subcellular localization annotation: CTP_CleavageSite=19; ConfidenceScore=5.28e-01
MPTSSSSAAATPPADSSPPAAASSEETLSSLMAEELRAGDSVDFGVSRMSSVRVQDMQRLGYFGGGVARAPGTEEVPEPEGELVVFEAFFAAGLRLPAHRFVGEVLRRVFELNQLPYDGYPGQDDVDRRGKKPVVETGDDPAPAAAPSSKKRKLGTAMGGLEVSDSFARELMRTCTAPGGRMSSPELRESSARMLRVTGGCWPRNVPIPRAAGEDFFTSRMVREWRVFPYGRNIAAVVSAVMDKDRQGAAQKRQAVVRLVEARPKRQRGSAKAVAPGGGKPPLAAKSGAPTSSKAPEATAGAGGSKSTKAVPPSSRVPEVAKAARALPSAGKRVADFATNISVEDYLGGSDEGQLAIVVPAAATTTAAVAPKAKGGALSAGGEVAALAAVRDETGAASRRLKEVVESLSQVADFANRTASGAFTAVVSAEVERLRTQHADAVREKSAADSKCRKLADKVVALEGEKADLRRQLAGERRETNEALVKAQAAQAEASLARAEGNLAREHAEQLQERLIALESRVERAEAATRAEAERTRTQLMDTYRELGARTEVPDREPGLRCLEWVQEELQALPTVVEGFMSYASLVTCEGAMNALSREGCRHFEVFDQADEDFERDIYKVEDPVVKESVGAIYDRMWGPHGREVVRERAETARAQAARGERVDDFGALNSALSDLEPTLAEAVSGVALEPTPETAEDAPDAPASAVAGEDLLPKVAEGAPDAPAAAAPSAEDPAAVAAETTAEATAEPTAEAPATSGPS

SEQ ID NO: 74066 - protein, 106 aa, Zea mays
  Coding DNA Sequence Number=SeqID_30691
MKMTVALAQSSSGKGEEVAEAGLRSWGAWGGPFIGGQGRGEEGGGGEHPATLTAAAMMAHSGGDGIARAYGVTGWLGQVQGDRDARRQTLLASALMALLFWAGGAR

SEQ ID NO: 74067 - protein, 56 aa, Zea mays
  Coding DNA Sequence Number=SeqID_30692
MLVDYTTVLDGPSVSTEGSTQQGVESVVEVTPASSVAWGGLVPLVIASKRRRSLIG

SEQ ID NO: 74068 - protein, 103 aa, Zea mays
  Coding DNA Sequence Number=SeqID_30693
MENGTDLKAFENKSLTLILLSASPSGFVLHNRSMCGLLLALELLGCSGWLLGQEDELLGCSDADSDFLPAGCSDGTADAAATAETASGTVAGADVDAGVGDLA

SEQ ID NO: 74069 - protein, 180 aa, Zea mays
  Coding DNA Sequence Number=SeqID_30694
MRTSRRPAREADDSARVGAGHGVRTRGRIEGVTTDPAAKATAATDPAGKTRSSQRDDGTSREDRSNGESGRKGRDSDGSNEGDEGVGGGAGPAGQPVLSGGGSGRPVARGGDASAAKRPLGAAPAQHGGGRQGRCISWPPAAGGGDAAKGWGDHVEGVRKSDVSEAAAARWALASARPGE

SEQ ID NO: 74070 - protein, 250 aa, Zea mays
  Coding DNA Sequence Number=SeqID_30695
  Gene Ontology: Mol. function=3-deoxy-7-phosphoheptulonate synthase activity; Cellular component=chloroplast; Biological process =aromatic amino acid family biosynthetic process
  Homolog annotation: Hit_ID=Q10MW5; Match level="QueryCoverage=70%, HitCoverage=36%, E-value=3e-41, Identity=56%"; Hit description=DnaJ domain containing protein, expressed
  Pfam annotation: Domain name=DAHP_synth_2; Domain location=2-172; Score=-256.5; E_value=0.0006; Accession=PF01474.7; Description=Class- II DAHP synthetase family
  Pfam annotation: Domain name=Rep_fac-A_C; Domain location=37-167; Score=-26.1; E_value=5.6e-05; Accession=PF08646.1; Description =Replication factor-A C terminal domain
  Pfam module annotation: Pfam domain module=DAHP_synth_2::Rep_fac-A_C; Domain location=2-172::37-167
MPYTYRELAHRVDEALGFMTAAGLTVDHPIMTTTDFWTSHECLLLPYEQALTREDSTSGLFYDCSTHMLWVGERQNEPQYIMVIKVSDPTGEAWVSVFNEHAEKIIGCSADELDRIRKEVHDVSHPLLKSLGVKNLPTVIGRTVNGEELLLKDGISVKDLRSGVKELKTLLDSFEKKNKKLLSNLANKKPSGQWEEIKKIPLLTASNFEEICGEKTPVYIIGVFGSNKAKGQLEAVLSEISKKTLIRGQN

SEQ ID NO: 74071 - protein, 149 aa, Zea mays
  Coding DNA Sequence Number=SeqID_30696
MRKDKGAAHGGLGHSLLEVARLSGEHHRRERLDGLQHRVQLLRVRVLGSCNAFFDLQLSTTHFPGAAGFFSGVATAEEDDLAPAAAGTTGPLFLDGSATWMVEMVRLFSGRNAAARRGYDAAPPDTAVVAAAELVASAIAICERGVLDG

SEQ ID NO: 74072 - protein, 77 aa, Zea mays
  Coding DNA Sequence Number=SeqID_30697
MWTRGISLPCIAQLTAWARLVTYVWGHRVLYYILRTVDWDLGRVCVVSPCSGELCGGGSRAPPGAVTGEGGAGRSAV

SEQ ID NO: 74073 - protein, 166 aa, Zea mays
  Coding DNA Sequence Number=SeqID_30698
MQGLRTSWRSALYAREPRREPGTRTGRGQRLRESGRGEMEWATAVGVGGGGRSGRVGEDRGGENETGEWTGGARASLDCWKPGDWRTLVALWAVVMWPMGLRDGCNFNGYSDFTAGALPWVPPLNRNKKTLLFPHLQQHGFENPEYRVYFRKSYPTKEKTLKDMLA

SEQ ID NO: 74074 - protein, 89 aa, Zea mays
  Coding DNA Sequence Number=SeqID_30699
MGVVGAWQGEEEKLGALRVAGGETAGEDKDVNGFRKYPVELSPRPEAYDPKVDSSLKGALDIIRIANEAVDEAINRLLNEAADKVLKED

SEQ ID NO: 74075 - protein, 202 aa, Zea mays
  Coding DNA Sequence Number=SeqID_30700
  Subcellular localization annotation: CTP_CleavageSite=32; ConfidenceScore=5.52e-01
MGARAAAQAGGGAQPSAPTSVPRLASWLAPSSAQPPRGRPLKMGEFSPGWTHSGSLDRKQKFPVTLPPLGSSHGWIDSFDSWYSGVHLTDWKKVEAGAVDVSHGLSSGSSISVNLSPCRSGPAILWSVCLVASPLVSFLKRRSLLPGGCELAPTLLLDLDIDPSHISPTLSSSPSGELAQASVASCSFNSYNTALVVVHPSA

SEQ ID NO: 74076 - protein, 259 aa, Zea mays
  Coding DNA Sequence Number=SeqID_30701
  Subcellular localization annotation: CTP_CleavageSite=24; ConfidenceScore=5.08e-01
MGSKTLSTKCTFTSITRLRKKTLKDMLAFGNQGQSVGAVLLARAPALSLCLADPTCQSIPNLSPTSLTADARTTTRSSATFSSPRPFRSRTLLAHFPSLTCALSRTLSPSLSPYAHDQTSSAAAHRRPSSILRSSSSPLPVRCLGEFRLAVSYLGHPSVCPFPLCLAWSTLTGALLAQPKPATVETSLPPCRPLGAPDFALVSRPNLSPSIKIWPFSSLSLIRAPTAGSGLSALPWDADTPSPPVSARHAPAPALGLEI

SEQ ID NO: 74077 - protein, 393 aa, Zea mays
  Coding DNA Sequence Number=SeqID_30702
  Gene Ontology: Mol. function=ATP-dependent helicase activity; Cellular component=intracellular; Biological process=DNA recombination
  Homolog annotation: Hit_ID=Q2QZ07; Match level="QueryCoverage=39%, HitCoverage=22%, E-value=4e-72, Identity=80%"; Hit description=ATP -dependent DNA helicase, RecQ family protein, expressed
MESIYNCQLQMTVLMQEAHCCSQWGHDFRPDYKNLGILKIQFPSVPMIALTATATSKVQMDLMEMLHIPRCIKFVSTVNRPNLFYKVSEKSPVGKVVIDEITKFISESYPNNESGIIYCFSRKECEQVAKELRERGISADYYHADMDIVNREKIHMRNATGVSTVHPLLPLGILTALRGHGLLFHLTEDSPVLAADRSNAAAIKTWQINDGKLCLAQLTSSSRSFLPTDLLWEFNLNLILFVQDCFTVLILTMAQALSELLAEETRLKSMSSITGVSSDSVLAAAQKSRNTCFQPCEHCKMATHRSENCFAKFPEKLADFRVRRATRGRGTGPSPRGSVAVAATSSAGALSSSWVLDYGASFVTSDQSRLASTTPVTEGTSVQTADGSNTQGM

SEQ ID NO: 74078 - protein, 188 aa, Zea mays
  Coding DNA Sequence Number=SeqID_30703
MPPRTRKTARKSTGPIGVPRHQLAPRHEDNSSGSNDPKGDLEARVSQLQAELQHRTNAWVADGDRINELRRDIRHLRDQLVDRDLALDWAIQSRLLACAKEARAQARIKELSSAVDDLQVYCNTLHEEVHVLYSQLHPSAPAHPVEAEAGPSHVAGHALGGVNTDLKKKNCFMRGLNDRLQRKKWPPA

SEQ ID NO: 74079 - protein, 154 aa, Zea mays
  Coding DNA Sequence Number=SeqID_30704
  Gene Ontology: Mol. function=protein binding; Cellular component =endoplasmic reticulum; Biological process=intracellular protein transport
  Homolog annotation: Hit_ID=A2WUA8; Match level="QueryCoverage=55%, HitCoverage=50%, E-value=2e-38, Identity=95%"; Hit description =Putative uncharacterized protein
  Pfam annotation: Domain name=TRAPP_Bet3; Domain location=19-136; Score=59.2; E_value=1.4e-14; Accession=PF04051.7; Description =Transport protein particle (TRAPP) component, Bet3
MDLCRSFDTSLMSGYIEVIMWTTHRGRVISDCPVHRAEFEYRYKDDCFIMNQVADSLEKGTEHEDEYMISEKELLVNRFISVPKDMGAFNCGAFVAGIVKGVLDNAGFPAVVTAHFVPIEGQQRPRTTILIKFAEEEDADLQFCAQWKFGGLVF

SEQ ID NO: 74080 - protein, 26 aa, Zea mays
  Coding DNA Sequence Number=SeqID_30705
MIGVGKAKQYANVLDKPLSRGRQELG

SEQ ID NO: 74081 - protein, 43 aa, Zea mays
  Coding DNA Sequence Number=SeqID_30706
MARAEDVEDLGGLAGAPPEAAEVNLVPPVDAGSGVWACARNRY

SEQ ID NO: 74082 - protein, 93 aa, Zea mays
  Coding DNA Sequence Number=SeqID_30707
MSQRLREASQQLSQQLKQAADFADRVASGVLTADVAAKVKGLRAQHADAVREKSAAESKKPQARGESGCHGGREDGPPAPAGGGEEGGESGHR

SEQ ID NO: 74083 - protein, 179 aa, Zea mays
  Coding DNA Sequence Number=SeqID_30708
MDRENKSQELAHVEFREAMERANVEKITDEMLIRLLDDSEDSEDFDFEEDADDRRASLEAKPGGEAIVPLPKEDEVVIKETSFEQRKYIIRHASGGKLIVKQIVEVQNYVEGLKYPSGFLDYGRNDEDAALSPLPEPYIPENDPELKDVLVELEVVHKIIDEVVDEELNKIVERVLKGN

SEQ ID NO: 74084 - protein, 96 aa, Zea mays
  Coding DNA Sequence Number=SeqID_30709
  Subcellular localization annotation: CTP_CleavageSite=55; ConfidenceScore=5.25e-01
MAIDDIDVSAQRFPFDKDGAATPGGGPMSGAMRRTSRIKCTVRRGVDKASCQRSCAAGDWNVDGRRGWEAEHRDNTRVEEVRRLGVLRLQAQQHCR

SEQ ID NO: 74085 - protein, 75 aa, Zea mays
  Coding DNA Sequence Number=SeqID_30710
MPEIDLPKQQKLQGGYPHTLRYKASGTKHLWHLCPLELEAEDNSAAAPKPRKPERNIAASAAGFPCHQSEWNESI

SEQ ID NO: 74086 - protein, 146 aa, Zea mays
  Coding DNA Sequence Number=SeqID_30711
MDLAQRPPLPWLHTSLSPWFPPYFCSLHADAIPCPLMAADPMASSPKLHLPALSLPIAVGRVSLVADLAPAFPLYPGRARRAPCTGVCRSPRLQLGLHSSSLPLSVFVPAEFAQPLASPPHQRPQPWMQNPLSSMPFFAAPVSLCV

SEQ ID NO: 74087 - protein, 113 aa, Zea mays
  Coding DNA Sequence Number=SeqID_30712
MDEAKNEVNKFGHTWANLGLTGQSHKTPSGESEMALLVRGWPRASCDCISRLELPQASHDLGPSCFGKVKNMFAYDPFLLKHCWNLLSAARRPTRVNGGDNRVTCTGAIALLI

SEQ ID NO: 74088 - protein, 139 aa, Zea mays
  Coding DNA Sequence Number=SeqID_30713
MGKSKKGGSSSHHSGDKRKREPTPPSEDFGDSKYSEEEFSSESEGSPAPASPPASSDDSDNSQAIAAEVWTYIRAIERAGLEGSDESEYSSDEEDSSDSSEEGSGGDDDGGDGDGGNDSGKGGDGSGKGGGGGSNKASG

SEQ ID NO: 74089 - protein, 291 aa, Zea mays
  Coding DNA Sequence Number=SeqID_30714
  Subcellular localization annotation: CTP_CleavageSite=65; ConfidenceScore=5.14e-01
MAARAWPRLHVASLLVVRHQRLTDAQLPSGFGFPQSHGLGATSTRSDAVMPHTSMLGDWSRPSLQAFAAAAGPTEAKRAGTPFAGLDTLTKTCGDVLTRRGLIQPQGPPESKFQHLAPTVRVTTKPPAMAPKRANPKADEAAKAALLAARKGKALALTQSTHQEPIEDNVPHTGKNDTFRTCGTEGQSQPPPGFAPLEGANLPQDGEALGVSTEKKLQLWALGLMGPQIPKGKKNLGGNAQLFPLIQMGGILTAKRKKPKTHGKIRYVARRALRFGKNTPFKKRSLRDFAK

SEQ ID NO: 74090 - protein, 60 aa, Zea mays
  Coding DNA Sequence Number=SeqID_30715
MASAPWGRRALRLGASTASAHGSEAEQRDGVGEKGRGTGAAIYRAKLWTWQAAPAGDRKT

SEQ ID NO: 74091 - protein, 402 aa, Zea mays
  Coding DNA Sequence Number=SeqID_30716
MAPTPWGRRALRLGASTASAHGSEAEQRDGVGEKGRGAGAAIYRAKLWTWQAAPAGSSGPTSGMGARPTCHAPGAPVSVCGEGEPTREERASAYGSASLRVRQNQQPSPWHKGLGPRVKNLGRRLLGAEKSHRRSRQYRASSGPPQKTEKVNFQNQCSGIEAPRAWPSETIKYGSHRLVPSPKVGPGATVGTLNQGGAAWPEKIIYPMMQSVGPDLHEEAPDPCTHSSDPRIRFGTPKLYPMRLRSPLSGDPMLPRGLVARDVMCHLSIYCDMSTQLAGGVQAILQAACLSSPLPNSTPVLQGALCPSSLMRCQVCTGLSGEPTAPRQRSTSRSTGDTWPEPTVTRLHRTVRWAKGTEGSTVGFAKEGKKSCIVHVRWYTVLSGAPTDRRQELSTKSRSNGS

SEQ ID NO: 74092 - protein, 238 aa, Zea mays
  Coding DNA Sequence Number=SeqID_30717
MGGPDLTRRDPAPIQGTRHAYLGVLDRIRGFELCVQGSSASSWRSGPIDCILGYIIFSGHAAPLEPSTWWGQVLFTVRLEIAARAPCLHTVSQGGRRKLSKLWSNLDLGTSTDSWEDMCIKDYLDLREKLNLRVKVFCVLKGSKLNLVMRMSSPWLSLETIGRTKDGGKKNFEVLSAWEKVKQTEAPKARVKKKACKVKGVGSLELIDIYNGHVVETWSFGVQPRPQTGQKGQNDEES

SEQ ID NO: 74093 - protein, 135 aa, Zea mays
  Coding DNA Sequence Number=SeqID_30718
MWRSWTYSCAGTDLTSLVPLKESGLVGASPERIPLWDMWRPRNCRYAGLGGVKVIQQAACLLGLLANSAPVSSSALCYPFYKKLPLHAERYTDLGRQDTRGLPWQQIFIVPSVIFSMSLGPRVGLSTFVHAPLQL

SEQ ID NO: 74094 - protein, 126 aa, Zea mays
  Coding DNA Sequence Number=SeqID_30719
MYHSCILISGVDNLESCTVVKNGLPFTNLGGTSSFLYTEILVLRLYHLSLFVGFTEGGKHLVTSNDLRAGDVCELVKGPDDADIREEKRTDEAGAALNFVTTHPDRVHRLTIVWPLNKLADVPSPK

SEQ ID NO: 74095 - protein, 191 aa, Zea mays
  Coding DNA Sequence Number=SeqID_30720
MVTSSSMAGESKPGHGLCPSLSLKDFHHQGWGGDCRVPGSRTRVASEPLSAPTSATTAGRGSSADEIAGAAYGPTSDSTTFCPSLPHVFGHGRGPPGSSIRPEVIAAAVWPPGAEVVVVAAAGAGDGTPFVGLLLLRRPPLEWGYSPVGCLNRFTKRESPRVKVTSESGDPWTVSPSEARSDLVEGVVDAE

SEQ ID NO: 74096 - protein, 331 aa, Zea mays
  Coding DNA Sequence Number=SeqID_30721
MAERYQLPRSCVPPTARRKDCGYPPSGGLEGGKARCIRERETWSPFKGVTLLLKATLPTCVPSRRGLSLLQHAPRSSPYSAGDWVPHVMQAGPEQKKPNRRARCMQPPSGYKRLSTSAQTSGRKGGQPCRRNATAPGGRTSPTSNMPSMEAQAHASCNRCAGCFVQATAPPLAPLPRLLDCGTNTATRGDPAHDLAAPAWRDGQCGQKRAGSNGGGRRAGAAVTSSSKLTSHPGAGPGKGDTPKRILPREGTRLRASLLIRGSKAGPSEGFNSHLRARGLHTHYWSEVRRPAPRKGSTVASGYSGSAPTTDQGFEGWPPKGSQPPQTQSEG

SEQ ID NO: 74097 - protein, 53 aa, Zea mays
  Coding DNA Sequence Number=SeqID_30722
MDVDDICGIDNNVSHEDEIHDTGEDVNANNSEHMVEEDHVPAPIGSKLHKMEV

SEQ ID NO: 74098 - protein, 231 aa, Zea mays
  Coding DNA Sequence Number=SeqID_30723
MVIGEEARSGVEMQREAWRRAMEAQRRPWMGAAGGVSERMGELANTTDTAKMQGSYILNRTVPDYFAKKHLLHSTIFVSLPCLPIENKASKPRAVRILPMVDAPAMHLDDQLSAPPWLNAKTPAPHSDTSTTAPRPDTLSTGLRLDASTTMDHSSPPCPNVQTRSCLDAGSIITRLDNHLLVRQWDTHPTLMSPNIRARQPSVLTLGSSWVQEHVNAFSCESKWVWGVSVN

SEQ ID NO: 74099 - protein, 467 aa, Zea mays
  Coding DNA Sequence Number=SeqID_30724
  Subcellular localization annotation: CTP_CleavageSite=59; ConfidenceScore=5.60e-01
MGRQKWQWQAGGSSGQVVSQAHVPSWDSERTLSYGVKTTRPTGGTFGRRSRRRFTSAIMAASKKAPSPLLIRGSKAGPSEGFNSRLRALGLCTHYWSEVQRPAPRKGSTAASGHSGSAPTTDQGFVGWPPKGSTAASDAKRGMTLGSGAALANSAPAKPLTASTYQPENLGLDCAPGQRPGLDSASAPENDELRLARPQGSDSASAPEDYELHLARPQGSDSALASADGLRLARPEAQTRPRPRKTDSTSTSEEPPPRPTQGSDRPRHRGAIITLPLASSGYGEQDRCPIWLAPRHKLHLFPSIRSPDRPPQWCDARKATMLCTPAHGIRRIHGDDSSSARNSGHAAQPRYQRRDQLSLDARLNDGAKHRDARQGRLLSPKHTASVVQSLNLSISLMDDGMPNDRGSGGTSWRDGVAPVVNLLRLARAIWATGKTVPNTWAHLTVMARLRGMRVKLGRGEVSAQEVQ

SEQ ID NO: 74100 - protein, 103 aa, Zea mays
  Coding DNA Sequence Number=SeqID_30725
MRGTMRLHILRGMKAEVILAFADICTHEFDIILLAEICHLTLALLNAVLESGETILEKLAVYSQKAARSGCTGLSGGAPDSVRCAQAGVCQLATLGTSSAAYN

SEQ ID NO: 74101 - protein, 52 aa, Zea mays
  Coding DNA Sequence Number=SeqID_30726
MGDHVSGRVRGKVHCQVQSGFNNIMLNKKTELRSNLGFLGHAGLLVGYAYHF

SEQ ID NO: 74102 - protein, 118 aa, Zea mays
  Coding DNA Sequence Number=SeqID_30727
MEQGRDRTQWFCQDTHAKVLKSPVEPWQKRAPTCSTRADTRGLNLRAPAATRDHARATAIKPFPVLDCLPRCLLRTTPNSPELALSSGDLPATRQSRPRATTMASPFPALLRSIQALG

SEQ ID NO: 74103 - protein, 103 aa, Zea mays
  Coding DNA Sequence Number=SeqID_30728
  Homolog annotation: Hit_ID=Q6ZDM1; Match level="QueryCoverage=90%, HitCoverage=32%, E-value=4e-23, Identity=50%"; Hit description =Putative uncharacterized protein P0025F03.21
  Pfam annotation: Domain name=DUF676; Domain location=5-103; Score= -74.9; E_value=0.074; Accession=PF05057.5; Description=Protein of unknown function (DUF676)
MELTSWGNAYIVNEVLDVISQRPEITKISFLAHSVGGLAARYAIARLYRHPDNASNGNTKGTICGMVPLLFGSVAMEKVACHIVHWIFRRTDRHLFLTDDDEG

SEQ ID NO: 74104 - protein, 88 aa, Zea mays
  Coding DNA Sequence Number=SeqID_30729
MEQSGLGYLHNSSNWYLKLYPFGSGALNWYINETTDQAKDGGKKSFEVPSAREKVKETRNPKPGVKKKTCKVKVDRVKKSYGASRITT

SEQ ID NO: 74105 - protein, 259 aa, Zea mays
  Coding DNA Sequence Number=SeqID_30730
MARLRHTARKSVIPFLPSRLAERPLHRTVSGQSSHLERLHHRLREEQERRRQHGEQQGSSSSPQQEVETAFDRHTWSIEYRCVVYQHSRGRYPDRWEATCLVRRPEDDLRGAEAVSEHYSISERDTAEAAMQDAARRALSQYCSLFGGVADGLNLRYYPRRPTGSTESVVVSPVGEANPRLSSTVNLVAVLNTKLDHSLDELSRARTEIAELRAELAERHHQEGGSPAPVGTQHPYRSPPRGHHTYGSPVCKTRIDLDP

SEQ ID NO: 74106 - protein, 136 aa, Zea mays
  Coding DNA Sequence Number=SeqID_30731
MENHPGKQSYHKGAYGAEVTQLGAIGYGAERDEEISHKSIFLQIKRDESCCTVRVLQAAVGVRVQLREPDGVDQNTKNWVDIAAMAVRRGIPALELPRNCSGFSEASGTLLRPRSGTLPRFLGRGVWGPINPVANG

SEQ ID NO: 74107 - protein, 80 aa, Zea mays
  Coding DNA Sequence Number=SeqID_30732
MALGILACTTIRFLTQMVNTRKGGGIDLPPNQYSRRIFRQPQQQPEMDPPQPLPAGADPAVTVEMRIMQQMADTMVDMHA

SEQ ID NO: 74108 - protein, 50 aa, Zea mays
  Coding DNA Sequence Number=SeqID_30733
MGAPARESRISVAITRSTLWAIQVWHVLSNNETMQIMTYIEVCMILMVAM

SEQ ID NO: 74109 - protein, 361 aa, Zea mays
  Coding DNA Sequence Number=SeqID_30734
  Homolog annotation: Hit_ID=A3BUG6; Match level="QueryCoverage=81%, HitCoverage=98%, E-value=1e-61, Identity=44%"; Hit description =Putative uncharacterized protein
MSKDVFFKLCTKFRSMDALRDTWHYSMEQVVMLLQTVGHKEKNGDIIFYALLKLLVDVLVKFSDTDMVGNSVMWQHLEVEDLLLYHKEKILLYYKEKIHESGRAFVLREVHHEECARRLNEKYGANFTWKQTYNKYHKLKGEWKVIMEAKSARGAGFDDVQKKITYDEIEVVKMKAKGDKKAKYYNVPIPLYDEMEFVFTGKHATGEFSVIEAPFDRSGRQEDDAVGNVNLDQEPADLNGDSSQHDFDTLAESDSPNPVGSKRRHEEKEKEKEKEWKWARQGVPIFMQALSEAVSFTHGGTDPYEGIYKAIEDMDEYPLPARLDLLTYLAQNRHIASMLKGRQEETFKQWVARWVAGHYPL

SEQ ID NO: 74110 - protein, 92 aa, Zea mays
  Coding DNA Sequence Number=SeqID_30735
  Gene Ontology: Mol. function=catalytic activity
  Homolog annotation: Hit_ID=Q9M9W9; Match level="QueryCoverage=53%, HitCoverage=13%, E-value=5e-10, Identity=65%"; Hit description =Putative uncharacterized protein F18C1.9
PSQESLGLSISRVFDDYYNKDYGVISVPEVTQRRTDINDQFVILATFGVPFVPPRWVERVGEREGGRGEVAGAERERGGSPAAFVFVPRSGQ

SEQ ID NO: 74111 - protein, 88 aa, Zea mays
  Coding DNA Sequence Number=SeqID_30736
MANQPPAGQRLIGEVAHAREEGGCRGMDMYGRRTRPLYNLRGKQTGPKVYFNNVAPMTNHDRRREAISHVTRGVTESASIKQITYITV

SEQ ID NO: 74112 - protein, 144 aa, Zea mays
  Coding DNA Sequence Number=SeqID_30737
  Gene Ontology: Mol. function=nucleic acid binding; Cellular component= intracellular
  Homolog annotation: Hit_ID=Q6KAB8; Match level="QueryCoverage=93%, HitCoverage=55%, E-value=4e-19, Identity=42%"; Hit description=Zinc finger (C2H2 type)-like
MTPPPHFWHQFTVQERETATSLLMLRGDRPAGAAGSRGRKSTLGAAGTSASSSLPRCECDDHKCSVCVRGGFATGRALGGHKRCHWEKTEGAPPAVATCSGDGFSASSSQAAPATTLDLNLPLLPRKSDQDGSLDATLDLKLGF

SEQ ID NO: 74113 - protein, 354 aa, Zea mays
  Coding DNA Sequence Number=SeqID_30738
MNGGNHPRGGEPFFSQLLQGLQKGLEVLLSIARGPVAPVLASGGHHSLRKRREPPVVISEIEPPALPSFVRRREDGRDVLRRPRLPQLEDAATSPHRHTNPSFPRQRGKKLRGEEMGPQVPVGGNPQISFTNCREDGCLRDGVGAEIVQLHPVDVQYRPHKTACRHSEPPLVKGDEAHHIPRRRGRGGSARRGHPLRLRVTGERGRSKPSATRASRSSAVTVEKGHGSRGKITVTRSAITKQKRWRRRGRGTRKGNIPKGILLREGSGPRAPLLIRGSKASPSEGFNSRLRALGLRAHYWSEVRRPAPRKGSTAASGHSGSAPTTDQGFVGWPPKGSTAASDAERGMTQGTFDT

SEQ ID NO: 74114 - protein, 76 aa, Zea mays
  Coding DNA Sequence Number=SeqID_30739
  Homolog annotation: Hit_ID=A2X239; Match level="QueryCoverage=71%, HitCoverage=5%, E-value=6e-13, Identity=60%"; Hit description =Putative uncharacterized protein
MARARIRTGTVESASSRRLKLSAQVVPPKLATVDSPSLMIILHRDKGLEVKHPQRRMKFHFQTFVSFSDAHRVYHD

SEQ ID NO: 74115 - protein, 67 aa, Zea mays
  Coding DNA Sequence Number=SeqID_30740
  Subcellular localization annotation: CTP_CleavageSite=46; ConfidenceScore=5.02e-01
MAGKELVRGARNFVAGARIGRGAAPSRGRSRRRIIPRIPWVSVKIVAAVQVTQKTIRFNSEILFNAK

SEQ ID NO: 74116 - protein, 141 aa, Zea mays
  Coding DNA Sequence Number=SeqID_30741
MGKSNKRKREPTPPSEDFDDSEYSEEEFSSESEGSPAPVSPPASSDDSDDSQGIAAEVWTYIRAVERSGLEGSDESEYSSDEEDSDGGEDEDDDDDDGDDDGSGSGRGSGDDDESKGSTRGGSSKGSTRVGGGGSSSKASG

SEQ ID NO: 74117 - protein, 521 aa, Zea mays
  Coding DNA Sequence Number=SeqID_30742
MGGSEPGSFAEKDPFRATGAPVARRVGLGSKLVCQKSEKRVHLARLHAACMAARPFCPLVWAKMGSRLNATPWELVPLGHRSASRIFITQPGRTPSPAVTRDGDLQLDGGGKRAGLRPLPLPQPQGFSSPRLGRGECRVGVGPCVGGGPLLHSVMGGEAGIARGVRQLQRAWSSAASGFGATCGVGVCHGSRKRFFRRRGGRDRPRADLQLLRPSARPCLTSFGMGGGLLAAASTLRSALPLFGPPEQKSPSSPLLEQPTPKSVSRGLGSGWRPWKPVDRGPRGNRLSRLLGPDSRRSPWTAAAPEAGSGFAEDVVDAEGATAPFGVKTRACRIRSSCSVCFLRPPRPEEHALAALAKLRLFSSCSEHLDSVGNRDVCVSESCFSRKGRVRGPRLKLFALGNSRKPARYNSPDCPVCTGHVRCSKEARPPELASLGFARQPLRYNSPDCPVYTGLSGVPAEQRLPAAPTAPCGALNARAVRAEVRIAHAGAPDIKQYMSGVHRTPRRAHKSEAPTARIQRQ

SEQ ID NO: 74118 - protein, 145 aa, Zea mays
  Coding DNA Sequence Number=SeqID_30743
GKAAAKFDDNARRRTVLLRGIDDAWLVVHFIERIASVNGALRSSAQAGEWSLGAERSSHGHGGPCCWGTRKGGAEPIWEQGVVQGARPQVKGDARACRGRHGKARPRPWERRGKEEGEPAALRGRGIGRAPGRGDGSRELGGHHD

SEQ ID NO: 74119 - protein, 78 aa, Zea mays
  Coding DNA Sequence Number=SeqID_30744
  Homolog annotation: Hit_ID=O48968; Match level="QueryCoverage=52%, HitCoverage=18%, E-value=8e-10, Identity=68%"; Hit description =Putative uncharacterized protein
MSDEKTEAAKAEVYCLLEAKFIEPIDYPTWLMNVVMAEAKRLKHRSRDFAVIDGQLYKKGIDQAMLNCITAVEGIELL

SEQ ID NO: 74120 - protein, 121 aa, Zea mays
  Coding DNA Sequence Number=SeqID_30745
MTYVHAVKGMQKNDVCLAALIDEYFVQIPPCHSTIYHQRICMGRTAEVDIPSIEVVGEVVGVGLDARTVEAIALGFLVVEGVVDVEMGCGSTVGGNSGVRFEIDAGYIVGVGFWPFNPSLL

SEQ ID NO: 74121 - protein, 62 aa, Zea mays
  Coding DNA Sequence Number=SeqID_30746
MAMTGSTSKKMYLCQLCLVGPIPERPPRNGSGEMARVACTIRDKRLDGGVFVLSVSVNPFWS

SEQ ID NO: 74122 - protein, 37 aa, Zea mays
  Coding DNA Sequence Number=SeqID_30747
MAVGYFTCKFVVAPAGARAQRWPKSSWIKRYKGTNFA

SEQ ID NO: 74123 - protein, 191 aa, Zea mays
  Coding DNA Sequence Number=SeqID_30748
MALNKTTQRKATGPHGVPRHQLAPRHEGSSSGSNDPIGDLEARVARFMSELRDGGRERARDSRRIAELSAKVQRLQLEIAEHDTTIDKAINSRSFAWDCEAKALARVAELSASLENLQAYCNTLHEEVHVLYDRLHPNVPTEVAAVGAGPSGIANGGPNGELDLFEAPPSMNLPAERSPEAGSGAAKDKEN

SEQ ID NO: 74124 - protein, 50 aa, Zea mays
  Coding DNA Sequence Number=SeqID_30749
MAVMGSTSEKMYLYQVMKQPSFVVSALRWCQNRRKITKLVCGRVFCLPVM

SEQ ID NO: 74125 - protein, 144 aa, Zea mays
  Coding DNA Sequence Number=SeqID_30750
  Subcellular localization annotation: CTP_CleavageSite=36; ConfidenceScore=5.50e-01
MVKNFGSKNSANSSKCCGKKAKRQGFYTRRAVTCTRCAVDRKDQTVTLQGGTDTISGNESFLGNELREGVFWTFGFPKLERIFSRFKLVTKNDLAPRKGLLLGPCFVAPKALREEAASAEIVPRKWPKVPFYRASALQTDIKIE

SEQ ID NO: 74126 - protein, 196 aa, Zea mays
  Coding DNA Sequence Number=SeqID_30751
MTGGAADGSGGHAGVVGAGAESLVWMGEWRRPAWTVMVRTTNGGGCREVTKPYKREKQRIGGAEWRRLGRTRGCRLHVSLVAVSSTGAHLQLRPGNESSQEDGAELSTTGELEGSEQGGRVGGELEPPWWLALEEDGEGMEKMRCVQEIWRAGGQRAGRARRGRARTSLVTGARGRWGGYGEDAVRARDRAGRTAE

SEQ ID NO: 74127 - protein, 69 aa, Zea mays
  Coding DNA Sequence Number=SeqID_30752
MERKGAVLPVAGVGNPGRKMAWGGRERLLAAVGFLGSEKANRDILKSLSIRGFEFGSDMRYLAESDKID

SEQ ID NO: 74128 - protein, 258 aa, Zea mays
  Coding DNA Sequence Number=SeqID_30753
  Subcellular localization annotation: CTP_CleavageSite=68; ConfidenceScore=5.44e-01
MTEPPRPARPPHLFHLRPLPSSLALSLALPTRIKNLRHRPPTSTACSVAAVALVPRALWCSHASVVPTAESARSPCACLGQPPSLWCPAVAGLLVSGEVPPREREATWEREDDLRAKARTQAKSRKTANSAPPDPGLGLGLSPVTPQRTFGVRPCELHSPSHGGHRAPCSHLLCPAPSLFLFHAGQLAPLPPFPFFPMAEAELSHGAPCRLGHPLLPVAAPPAQRPAPILARHPPFLYPTARASMVEATPLGAQAPFP

SEQ ID NO: 74129 - protein, 143 aa, Zea mays
  Coding DNA Sequence Number=SeqID_30754
MMLAEGVQDSENGSEFTGDKNKLQMYLRIEGEKIQVWRKSECQNGIGIQVGQVKTVEIKEAAEKGRNGETETAEKKRNINHGLVGILCRNSDPVANPPRTKLPRGKDPDGHKVEKVRLGDNGHMVTYERQLAVGVDWGNHHGG

SEQ ID NO: 74130 - protein, 149 aa, Zea mays
  Coding DNA Sequence Number=SeqID_30755
MGKNNKRKREPTPPSEDFGDSEYSGEEFSSESEGSPAPVSPPASSDDSDDSQGIAVEVWTYIRAVKRSGLEGSDESEYSSDEEDSPEKDGEGDDDDDDGGDDSDDGDGGSRGGNGGSRGGNGGSRGGDGGSSRGSNGGGSNKGSNRASG

SEQ ID NO: 74131 - protein, 116 aa, Zea mays
  Coding DNA Sequence Number=SeqID_30756
MCTKNLRIAHRIAQSTCGRGRPKSGEDDLGSLVKFCQVRELGKLHELLVKLSEWLARLGSDWRELAMVAEARVVMAGGGAACSRACSRKFGTTLIFRLFGFEFWKTGNTFDLEKGF

SEQ ID NO: 74132 - protein, 110 aa, Zea mays
  Coding DNA Sequence Number=SeqID_30757
MTLRGGWPSGRGLLRGCWLWEGKAAAKFDDNARRRTVLLRGIDDAWLVVHFIERIASVNGALRSSAQAGEWSLGAERSSHGHGGPCCWGTIKGGAEPICEQGVFQGARPQ

SEQ ID NO: 74133 - protein, 275 aa, Zea mays
  Coding DNA Sequence Number=SeqID_30758
  Subcellular localization annotation: CTP_CleavageSite=68; ConfidenceScore=5.33e-01
MSSRSLMHRVFPPSKPPDGGYPPSFHLIVGGTQLRGSWYLSAIVRLQGFSSCSPAAPLRRRSPKMVTSSLMVGESEPGCGLCPSLSLKDFHHQGWGGDCTVPGSRTRVASEPLAAPASATAAGRGSSTGEVARAGHGPTSNSTAFCPSLPHEFGHGRGPPGSSIRPEVSAAAVRPPEAEVVVVAAAGAGDGAPFVGLLLLRRPSPIEWGYSPIDYLNRFTKHESPRVKVTSESGDPRTVSPSEARSDLAEGVVDAEGATAPFQRQDPSLQDQSVL

SEQ ID NO: 74134 - protein, 433 aa, Zea mays
  Coding DNA Sequence Number=SeqID_30759
  Subcellular localization annotation: CTP_CleavageSite=47; ConfidenceScore=5.35e-01
MAPRLLCDDGGSQPPYGSKRTSLALSLTLTTRIENLRHRPPTSTACSVAAVAPVPRPVPRRSSATVAPSHPCASVVAPCLQRFPSTALWCSRAGVVPSAESARSTLCAPRPTPKPLVPRRGRSARLPIAHIRCTTHMSVIPFLPSRLVERPLCRMVQGQSSHLERLHHRLHVEQKRRRQEQEQEQQDSSPSPQREVEFERLPSPAPQPEMPPAPPQGIPAAGGDPDGDGDGDGDDDDAGGSSSHDTERSEEPEPEGWIARPITHDAARGCHFHDALDTLLRRAFDRHTWSIEYRCVVYQHRRGLYPDQWEATCLVCHPDDDLRADGLDLKYYPRCSTGNAGGVIVSPVGEGNPKLNSMVNLVVVLNTELDHALDELVKVRAEVAELRAECTAHHYLDGGSPAPVGIQHPYHSPPHGRFDYGTPDCRTRIDLDP

SEQ ID NO: 74135 - protein, 37 aa, Zea mays
  Coding DNA Sequence Number=SeqID_30760
MTKLMLAEGVEKLRKWKCTFGPERRYIKGNNLYSLGT

SEQ ID NO: 74136 - protein, 85 aa, Zea mays
  Coding DNA Sequence Number=SeqID_30761
MEKVGCDHAKTVAQPDFAFSDDDVRNPSAEATTLAELSPPLDPYDPETDPSVKEALDIIKIVDDAIDEVIDKLLNEAANKVLKED

SEQ ID NO: 74137 - protein, 74 aa, Zea mays
  Coding DNA Sequence Number=SeqID_30762
MALPKVAVLLSEYILQTLMIRVYLTLGPHDIMPPYLKRMHYACQFQVMSGVVPGSLSLKEIIAVGFQGVKSILS

SEQ ID NO: 74138 - protein, 62 aa, Zea mays
  Coding DNA Sequence Number=SeqID_30763
MEIAEYAEATPLASETIPAMAAEVTVAPISTPASTEASKNEIEGLAEVAAASASPTCVTFGI

SEQ ID NO: 74139 - protein, 331 aa, Zea mays
  Coding DNA Sequence Number=SeqID_30764
VMKAGEHREDKEGECFVRFGHGGGLTPSGITVKKKEIGSQMEVRCQTSLCQNEDCFPKLLRACTVRLGIRSQPEYDGREFVEHGIEKCVVTVYIGSSPHHVEWSVTAAGHRFKDTCQVVARKALRALCQIYEEEVTDTPLIFFPPFQRDRPVWMARMRALEGQQLLEDDPTVVYLTAYLLTQDAQYDFLARHHRHMIARAEDAEKLNRKLHVDLTIAQARVAALESREVIAVEALKQAKDEHVQKLMEAYLVTHNQHRALRIQEHPESSQDPLPELFEPLTMKKIPAPSREIKEEAASTPLAPPPYEELQGSVPFEEEFNPVLPSQSPPEE

SEQ ID NO: 74140 - protein, 132 aa, Zea mays
  Coding DNA Sequence Number=SeqID_30765
MTSHGSSDEGNALSHTDGLAREGFPRILWEVLQGAGYTTPPQYAVQQFEKHRVPRCRLSTHPIGLFPAEKEDDPMWKDRVEHAKDIWAIYPGQTAHLTVRCMNALYRLQVMRGEAMSHLMALLEATKITLDN

SEQ ID NO: 74141 - protein, 300 aa, Zea mays
  Coding DNA Sequence Number=SeqID_30766
MSMIYSGHVHEMQRLGYFGNGVGQAPGVEDVPEPEVLAKFVWAVTSYGGQPSVEVFAKNYCLHWQKKKIGGLIAQFGSCTFTPRTGKASIKVVEIVLCAKNKWGNCLWYGPYLEGDSADAGDDREKKVKTQSKEGTSKGKTVITTTRKRKIEAKGTETGQVVVAPARPLANTGALAKGAVLTSLDPWAHFCAAADGGGEVTGASATEGVAAAVVRQLHYTTVFANQVWGAEVVRDKSVAENKSQNLLDKVTSLEKENEDLGRQLNNEKDATAEAKTEPESARAEAQAAHKCGGTARIIPA

SEQ ID NO: 74142 - protein, 722 aa, Zea mays
  Coding DNA Sequence Number=SeqID_30767
  Gene Ontology: Mol. function=nucleoside-triphosphatase activity; Cellular component=integral to membrane; Biological process=transport
  Homolog annotation: Hit_ID=Q10AA7; Match level="QueryCoverage=86%, HitCoverage=87%, E-value=0.0, Identity=73%"; Hit description=ABC transporter family protein, putative, expressed
  Pfam annotation: Domain name=ABC2_membrane; Domain location=427-639; Score=103.3; E_value=7.2e-28; Accession=PF01061.15; Description=ABC -2 type transporter
  Pfam annotation: Domain name=ABC_tran; Domain location=130-318; Score= 83.8; E_value=5.5e-22; Accession=PF00005.18; Description=ABC transporter
  Pfam module annotation: Pfam domain module=ABC2_membrane::ABC_tran; Domain location=427-639::130-318
MEVVASSDQYRSSSSSASSPARRYYLPKPGALRRPISFEDSPDWDDIHPDDTIHLATAASASISIASSAYPSPSPSLPQGSSSASAACRDRKVAGVTLVWKDLTVSSLAAATNRFSDRLVKSSNGYALPATLTVIMGPARSGKSTLLRAIAGRLSSTERIYGEVFVNGAKSPLPYGSYGYVDRDDVLIESLTVREMLYFSALLQLPGFLSSKKAIVEDAIAAMSLGDHADKLIGGNCFMTRLPTGERRRVSIARELVMRPHVLFIDEPLYNLDSVSALLLMVTLKKLASTGCTIIFTMYQSSTEVFGLFDRICLLSNGNTLFFGETLACLQHFSNAGFPCPIMQSPSDHFLRAINTDFDRIIAMCKNFQDDQGDFSSVSMDTAVAIRTLEATYKQSADSVAVESMIAKLTEKEGPCLKGKGRASDAARIVVLTWRSLLIMSRDWKYFWIRLVLYMLIAVSIGTIFTDIGHSLSSVMVRISAIFAFVSFVILLSASGVPAQIDEVKIYSHEEANRHSGTMVFLLGNLLSSIPFLFLVSILSSLVFYFLIGLRNEFSSLMYFVTTIFVCLLANEALMMVISYIWLETYKCTLTLVFLHVIMMLVAGYLRIRENLPYPVWTYPLSFISFHTYAVQGLVENEYVGTSFAVGQIRTIPGVQAVRGSYDISSSPNAKWVNLLVLLLMALGYRILLYLLLRLDVRKNARRLGNWRSWWSSVHSAATGAK

SEQ ID NO: 74143 - protein, 414 aa, Zea mays
  Coding DNA Sequence Number=SeqID_30768
  Gene Ontology: Mol. function=RNA binding; Cellular component =ribonucleoprotein complex; Biological process=RNA processing
  Homolog annotation: Hit_ID=Q10AA9; Match level="QueryCoverage=51%, HitCoverage=55%, E-value=2e-61, Identity=55%"; Hit description=La domain containing protein, expressed
  Pfam annotation: Domain name=Extensin_2; Domain location=6-412; Score= -135.4; E_value=0.054; Accession=PF04554.4; Description=Extensin-like region
  Pfam annotation: Domain name=La; Domain location=252-309; Score=90.8; E_value=4.4e-24; Accession=PF05383.8; Description=La domain
  Pfam module annotation: Pfam domain module=Extensin_2::La; Domain location=6-412::252-309
  Subcellular localization annotation: CTP_CleavageSite=35; ConfidenceScore=5.27e-01
MDANNWPALSDAAKGNKLPDSSAPSPAPVAAPSAVANSSSSQKHGAHHGRHKSARRIGGGGDHSPRDHPDRNVAAGWDHAAGGGGGRGAQRNHNNGGGRRGNGAPASATGPSHHGSGAGGGSGGGFGARRRGAYEPPFYRGPPPPMGMGHYMRGAPPPPPMTVAPPFMGPPPPPVSSMRPYAGPMMFHDMPSPMSPVSPIYFYGPPPPEALRGLPLAPPMVGPPAYPYFQAQPEPEPQPDPEPDAEEERVKLLKQIEFYFSKENLCSDVYLRQQMDGQGWVDLSLIAGFKKVQGLKKDLQYIKETVQSSSVLEMKDNKIRKHGDWEKWVIPRESNPDAPSRLASVSRPNVNNLTSHLGGMGLHESASSTGAEELNHHDVVQNGSPSGGGVGQLVKQQRRKAVVTSGGASDDMED

SEQ ID NO: 74144 - protein, 220 aa, Zea mays
  Coding DNA Sequence Number=SeqID_30769
  Subcellular localization annotation: CTP_CleavageSite=30; ConfidenceScore=5.48e-01
MSSRSLMHRVFPPSKPPDGGYPPSFRLIVGGTQLRGSWYLSAIVRLQGFSSVSPAVPPRRRSPKTVTTSPWVGRSKPGCDLGPTLSFKDVHHPCWGGGWAEPELHLPRGFMGHPLLRRSRERALTGPAGGPDFDNAGLVDGGRRHPQRVELVGLAPGGPSCRKAATAPYSPVGCLNRFTKHESPRVKVTSEARGSDISMNRGRVGSKMIPGWPEPSQVVR

SEQ ID NO: 74145 - protein, 53 aa, Zea mays
  Coding DNA Sequence Number=SeqID_30770
MDIEGVETVARTNESNQRGKVGKLRAQQHFEHKRLPVRNTEWGPENSNLAVYR

SEQ ID NO: 74146 - protein, 82 aa, Zea mays
  Coding DNA Sequence Number=SeqID_30771
MCVYRERTESTTRAEEKLEPLPSIVTGLMSCASLVSCEGAANALALRGLQALASILRGLCVTWHCLVKNLTLCEEKSAGTTR

SEQ ID NO: 74147 - protein, 137 aa, Zea mays
  Coding DNA Sequence Number=SeqID_30772
MRRSPSGRRGRRKPGRRLRHAGGDDARRRSAPRCLSPRRPQGQRAPPPPNAAGKGDPRTRAEGTGKGGYPGRDPSPRRNRAPSPPLLIRGSKAGPPKGSTVASDRVGPTHTTGQGFEGQPPEGLHGRLRLLGLRAHY

SEQ ID NO: 74148 - protein, 338 aa, Zea mays
  Coding DNA Sequence Number=SeqID_30773
MTAPVKAPSLPTDQRFEGWPPEGFDSRLRSRGPYTHYWSEVRRPAPRRVPRPPQATRAPCPLLIRGSKAGPRRVHSRLRRRARDDHGYVRYITKARAALPSSPEAPCSAPIEGNMALSPLLLAERRRRGRLGGCSRKPGSGRTVDSVNIPARELGTRPYTRATASSHEGTTRPAEALREALRPRRSETTPPRPRGLHPAGALSRTHRNKTQPRKAGPLAKKCDESLQASANTPFEARGLLSGTIIRGTLKTPNSQLKDSAACATPTAVPFDTVRLTGSQAPPEGSDSGSTPEDGELRSARPRARTRAKSRKTANSAPPDPGLGLGLSPARRRTPLRST

SEQ ID NO: 74149 - protein, 193 aa, Zea mays
  Coding DNA Sequence Number=SeqID_30774
  Gene Ontology: Mol. function=nucleoside-triphosphatase activity; Cellular component=protein complex; Biological process=protein catabolic process
  Homolog annotation: Hit_ID=Q6YWQ2; Match level="QueryCoverage=37%, HitCoverage=36%, E-value=2e-21, Identity=69%"; Hit description =Acidic 82 kDa protein-like
  Pfam annotation: Domain name=Fcf2; Domain location=53-147; Score =44.6; E_value=3.4e-10; Accession=PF08698.2; Description=Fcf2 pre -rRNA processing
MGAVISLFRPNPYKTRLHMDGFDQTVNVKVVMATNRAHTLDSTLLRPGIVIKVCTTKMNLSDEADLEDYVCRLDKISDADVELLRHIIDLKRHFKRVGKFKVVLKYFQVGTVVEPASEFYSSRLKNRERKATLVDELLSDQSLKSYRVQCSLQLLISLSAPSVLNLTEMSTSTDGNLQGSCYRWTTIGRLGVD

SEQ ID NO: 74150 - protein, 424 aa, Zea mays
  Coding DNA Sequence Number=SeqID_30775
MQATCNCTKGAHPFDFDASSMEAHTSCNRHTGYYVRETTPPLAPVPRLLDCGTGVATRGNPAHGPTVPTEHIDHGSVIRGRRRDGRYGQKWAGSNGGGRRAEAAVKSSASSRPLLEQQENPLPRRKDDAPVFRSSNGSRTHNGCPANHSSRRINSAAKQATLHLRHDDRVKKGTGKGDTPKGILLHEGSGPRALLLIRGSKAGPSEGFDSRLRALGLRAHYWSEVRRLAPRKGSTAASGHPGSAPTTDQGFVGWPPKGSTTASEHVERGMTLGTSDTWSRLGLRSRASTPEDGLRLARPQGSDSTSTSDDGLCLARPLSSDSASTSKGGLRLARPQGSDSTSTSNDGLRLARPLSSDSASTSDDGLRLARPPGLGLNLDLGRRSPPRPTPGPGLSLDLGGASASPDLGLGPTTSQGGHHYPTPS

SEQ ID NO: 74151 - protein, 78 aa, Zea mays
  Coding DNA Sequence Number=SeqID_30776
SETTDQAKDGGKKSFEVPSAREKVKEAEEPKAKAKAAQSGTPDCPVVHRTVSGGAPDSVRCARLNSGEVAALGEFTGD

SEQ ID NO: 74152 - protein, 309 aa, Zea mays
  Coding DNA Sequence Number=SeqID_30777
  Gene Ontology: Mol. function=protein serine/threonine kinase activity; Cellular component=cytoplasm; Biological process=protein amino acid phosphorylation
  Homolog annotation: Hit_ID=Q75H77; Match level="QueryCoverage=100%, HitCoverage=100%, E-value=1e-145, Identity=75%"; Hit description =Serine/threonine-protein kinase SAPK10
  Pfam annotation: Domain name=Pkinase; Domain location=23-226; Score =167.0; E_value=4.8e-47; Accession=PF00069.16; Description=Protein kinase domain
  Pfam annotation: Domain name=Pkinase_Tyr; Domain location=23-224; Score=-72.8; E_value=6e-08; Accession=PF07714.8; Description=Protein tyrosine kinase
  Pfam module annotation: Pfam domain module=Pkinase::Pkinase_Tyr; Domain location=23-226::23-224
MDRAALTVGPGMDMPIMHDGDRYELVRDIGSGNFGVARLMRNRADGQLVAVKYIERGEKIDENVQREIINHRSLRHPNIIRFKEVILTPTHLAIVMEYASGGELFERICNAGRFSEDEQVCHRDLKLENTLLDGSTAPRLKICDFGYSKSSVLHSQPKSTVGTPAYIAPEVLLKKEYDGKRILGVQYSIPDYVHISPECQNLVSRIFVADPATRITIPEIRNHPWFLKNLPADLMDDSTMSKQYEEPEQPMQSMDEIMQILAEATIPAAGPHGLNQFLNDGLDLDDDMDDLDSDTDLDLESSGEIVYAI

SEQ ID NO: 74153 - protein, 56 aa, Zea mays
  Coding DNA Sequence Number=SeqID_30778
  Subcellular localization annotation: CTP_CleavageSite=31; ConfidenceScore=5.12e-01
MTDIGHASHRCPILDCASPRRRLVASSQRCPASSEAPVSQVVNFRRPSYFTPSEVS

SEQ ID NO: 74154 - protein, 266 aa, Zea mays
  Coding DNA Sequence Number=SeqID_30779
MMVDEGRVGEMVGSMGLRVHEKRREWRHRGHVWPRQKHERRRRNHAWSEERHLGGSNKGKDIFVKNNVTRYEYAVGGEIKAVVPLMEGVVPYMAKWGVGWLTSFEGRGGDWGDGCWCSGPPPSSWQGETPEIRGSDHIGGGANDAFGPAILGKGVGARDTQLDAVGEEERARCVVVELVAIITLEGMERAAKLGGDPGEEVRVLNVSYFNQSGKVQKMREVVQNDQIVFVTREAEDRRRSRDHNGQGRRSEQPWTWRWKREDESDG

SEQ ID NO: 74155 - protein, 239 aa, Zea mays
  Coding DNA Sequence Number=SeqID_30780
MSRSLRRQSQLGENKWSRHEVACMWVKLDAIMKDKAHGMIKIREGAPDKCMLWRRTRTRTVPRMGATMEGVAKGEAREAEDGETPVGAVTPLGRVAAAGTTRGTPGVLLMLLRSEGSKEDGGMGPNAGDVRGPIPNKLDGSRGGVGGDRTRVLQGRAHGDGRTQHRGEDANDGLKTDDHRGEVESCVMVVRGEVVVCASVDAGVEGKGGRVLPTATSVAMATTVRWGRRRTGPGWGRGR

SEQ ID NO: 74156 - protein, 88 aa, Zea mays
  Coding DNA Sequence Number=SeqID_30781
  Subcellular localization annotation: CTP_CleavageSite=56; ConfidenceScore=5.48e-01
MMTPSQAFVWCRTKRRVSLPVLSPSDQRLQRRPRAKGGVFAFAPTSTTQSDEGGVIAMMLKVVVRAAGSHPPASGDQGVKVEVPGGGS

SEQ ID NO: 74157 - protein, 111 aa, Zea mays
  Coding DNA Sequence Number=SeqID_30782
  Subcellular localization annotation: CTP_CleavageSite=37; ConfidenceScore=5.09e-01
MGTVARTSSSVVATVDRCWVDAGTSRHLDASTTPRIAASPGMGATGLPATGGLSAISSVDGTATDGGSASHAHGSEGGVNVQDFLVHGAGGSGHLPGGGGGSGQNSHSPPE

SEQ ID NO: 74158 - protein, 111 aa, Zea mays
  Coding DNA Sequence Number=SeqID_30783
MASTSPTGRRVAVGRVRAEVFSHRRDKSQQKPVPSFASTSLHVAKILILIADRRWIDSSSGICRGGSDPVPVGEITGIEAVGGLPLLKTATGDFDFEMKVCVIWRYNLKAG

SEQ ID NO: 74159 - protein, 551 aa, Zea mays
  Coding DNA Sequence Number=SeqID_30784
  Gene Ontology: Mol. function=iron-sulfur cluster binding; Cellular component=mitochondrion; Biological process=biotin biosynthetic process
  Homolog annotation: Hit_ID=Q69U93; Match level="QueryCoverage=73%, HitCoverage=95%, E-value=1e-153, Identity=72%"; Hit description =Putative biotin synthase
  Pfam annotation: Domain name=BATS; Domain location=307-399; Score =153.3; E_value=6.8e-43; Accession=PF06968.4; Description=Biotin and Thiamin Synthesis associate
  Pfam annotation: Domain name=Radical_SAM; Domain location=132-296; Score=87.0; E_value=5.9e-23; Accession=PF04055.12; Description =Radical SAM superfamily
  Pfam module annotation: Pfam domain module=BATS::Radical_SAM; Domain location=307-399::132-296
MAMMMLARNLCSRLRPPLAAAAAFSTVPAASAAAAEAERSIRDGPRNDWSRPEIQAVYDSPLLDLLFHGKCELFIGPSVVLIGRYCPQGHLTATYAFGVELLHPEYLDLSWIAQVHRNVHKFREVQQCTLLSIKTGGCSEDCSYCPQSSRYDTGLKAQKLMNKDAVLEAAKKAKEAGSTRFCMGAAWRETIGRKTNFNQILEYVKEIRGMGMEVCCTLGMIEKQQAEELKKAGLTAYNHNLDTSREYYPNIITTRSYDDRLQTLQHVREAGISICSGGIIGLGEAEEDRVGLLHTLATLPTHPESVPINALVAVKGTPLEDQKPVEIWEMIRMIATARIVMPRAMVRLSAGRVRFSMPEQALCFLAGANSIFAGEKLLTTANNDFDADQAMFNILGLIPKAPSFGEEEAAAAAVAAPKRIEQSVCVQKRIEQQRQIRLRERTQDCERIFFYVHRFSYYILRQVPKLKSQLTNGLATDSTALHRTTSHMVPTGSSSTDEEVARKKIESKLFWPPPKPLRRPSSPAPGYRLLLPLQADATAQALLVYANPALD

SEQ ID NO: 74160 - protein, 401 aa, Zea mays
  Coding DNA Sequence Number=SeqID_30785
  Subcellular localization annotation: CTP_CleavageSite=46; ConfidenceScore=5.10e-01
MNKHTGIRSAITNGTPVPPPQVRTTPLRGGRPAEQRKADEWCAVTRSSSGDDDAFCSEGPSSGNADLRLDAAARRPPPMPKLVRQGRAEGHRVGGQPVAGPGYLAGSRTSSSCRGGCRHRERLRSHSRLKARHAAAASATDDGRLSLQSLSEGAGRRPRGGRPQLGALPSPALVMKILEAEGGEEAAARLAFPHHQAGGRHLRRPPIFAQTNGQKGRAAVQAACNRARWTRFSDFWHASLGTQAHASSNRRASCCIQATAPPLVPPSRLFGCGAYVTTRGDSTAPAWRVGQSDRKWAGSNSGDRRAGAAVTSSARLTSHPETAREPPLTAWRRDRERGIPRKGSFSAKEPGSEPPITDQGFEGWPPEGFNSRLRSRGPDTHYWLAPEGFIVASDAERGMTR

SEQ ID NO: 74161 - protein, 128 aa, Zea mays
  Coding DNA Sequence Number=SeqID_30786
  Homolog annotation: Hit_ID=A2Y7C4; Match level="QueryCoverage=54%, HitCoverage=28%, E-value=8e-10, Identity=47%"; Hit description=50S ribosomal protein L21
  Pfam annotation: Domain name=Ribosomal_L21p; Domain location=7-79; Score=-40.0; E_value=0.04; Accession=PF00829.12; Description =Ribosomal prokaryotic L21 protein
MFGTEAMFADLGLFSVRAIQVRAYKNVELQNFGQGGGDRSWLVLNRVLMLGSQAQTVIGKPILPDAAVHAVVEEHISDLLECIYFSNSVDPNKKEEKHNIKSSNIELATTEIAKKLRNRWQKVTDNRI

SEQ ID NO: 74162 - protein, 159 aa, Zea mays
  Coding DNA Sequence Number=SeqID_30787
MAMGTRYPKSVGMGNPLGTRNPHGYGFGQNFIPIMETNGLLKNQFPGEPNMIDLFADSKAGCNLEKGAPRLVENEVNLKVDPYKQVANVDYTDMVDSKSVVAFVNSEMIGCLNVSTLQEPCLVILEPESESTCSRNAEGFMKERMHVLHTMPKHHQDHQ

SEQ ID NO: 74163 - protein, 93 aa, Zea mays
  Coding DNA Sequence Number=SeqID_30788
  Homolog annotation: Hit_ID=A3AMH7; Match level="QueryCoverage=58%, HitCoverage=7%, E-value=6e-07, Identity=51%"; Hit description =Putative uncharacterized protein
MESWELLLLHNLQFQFGNRQESTPQIGTLKQMKEFHHLIDGNIEFLVKLRDLVIDGYKKVFKFFSRNLMGIFMCFLGEAKKFPGVNYSGFCAN

SEQ ID NO: 74164 - protein, 134 aa, Zea mays
  Coding DNA Sequence Number=SeqID_30789
  Homolog annotation: Hit_ID=A2X0G7; Match level="QueryCoverage=57%, HitCoverage=24%, E-value=1e-18, Identity=64%"; Hit description =Putative uncharacterized protein
MAPGSSIVTVVPESDCGDDDGLPESIGGIRLDVDSASKPWSTSASLANVALSSLCGLNDLLECPVCTNSMRPPILQCIAVNPTMESWELAALTDFQRRFCSTLGMTNQAVNAAKEAVQRSEDLDIRFGISDSTC

SEQ ID NO: 74165 - protein, 54 aa, Zea mays
  Coding DNA Sequence Number=SeqID_30790
MACQPLDPRWMSAIRSAHIGSRLNPDRRSDDVRIGVDLGPELRKIGGINLENDF

SEQ ID NO: 74166 - protein, 170 aa, Zea mays
  Coding DNA Sequence Number=SeqID_30791
  Gene Ontology: Mol. function=protein serine/threonine kinase activity; Cellular component=integral to membrane; Biological process=protein amino acid phosphorylation
  Homolog annotation: Hit_ID=A3A392; Match level="QueryCoverage=72%, HitCoverage=10%, E-value=2e-34, Identity=57%"; Hit description =Putative uncharacterized protein
  Pfam annotation: Domain name=LRR_1; Domain location=106-127; Score =7.1; E_value=15; Accession=PF00560.24; Description=Leucine Rich Repeat
  Pfam annotation: Domain name=LRR_1; Domain location=58-80; Score =10.5; E_value=3.5; Accession=PF00560.24; Description=Leucine Rich Repeat
  Pfam annotation: Domain name=LRR_1; Domain location=82-104; Score =6.1; E_value=23; Accession=PF00560.24; Description=Leucine Rich Repeat
  Pfam module annotation: Pfam domain module=LRR_1::LRR_1::LRR_1; Domain location=106-127::58-80::82-104
MSKNTRDTRFIPRFGHTTKVPYFLVEAPTKSRVSFNPNPPFADHKGQAHTIIFAQASGLKVLDFMDNNFTGIVPESLYSCNDLITLRLSSNGFHDQLLPGIGRLKSLRFLSLTNNLFTNVTNALQILKSAPSLTTLLIDTNFRGEAMPEDETIDGYRNLQVLSLADCSLS

SEQ ID NO: 74167 - protein, 151 aa, Zea mays
  Coding DNA Sequence Number=SeqID_30792
  Homolog annotation: Hit_ID=Q2RAS4; Match level="QueryCoverage=41%, HitCoverage=32%, E-value=3e-13, Identity=61%"; Hit description =Uncharacterised protein family containing protein, expressed
  Subcellular localization annotation: CTP_CleavageSite=31; ConfidenceScore=5.24e-01
MDGGRILDPLLSGAVDSASLLRSHPTRPPPRTASRMPSMADPPPHPHPNHLLLVASTIPFVGAASTAGPASLIIGPYLVPFLLPTSASASFGHVISGKLYAPSHAALAELDAFEASASPPRQNRCSLSTGLVFYISYDLPLIFPTTCHSHL

SEQ ID NO: 74168 - protein, 235 aa, Zea mays
  Coding DNA Sequence Number=SeqID_30793
  Gene Ontology: Mol. function=oxidoreductase activity; Cellular component=cytoplasm; Biological process=metabolic process
  Homolog annotation: Hit_ID=A3ATJ9; Match level="QueryCoverage=68%, HitCoverage=58%, E-value=2e-46, Identity=65%"; Hit description =Putative uncharacterized protein
MPWPGFGALDIMFNNAGIGGAACHNIRENTKEDFERVLSVNLVGPFLGTKHAARVMVPAGRGGCIIGTSSLASAVAGAASHAYTCAKRALVALTENAAAELGRHGIRVNCVSPAAAATPLATGYVGLEGESFEQAMEAVANLKGVRLRVADISAAVLYLASDDARLSRSAERKDHAPREEDGVPTATLCVECVEHYERREASDVRAKAAGTNLTLTFFPGWPHADEPQTSHKVQQ

SEQ ID NO: 74169 - protein, 82 aa, Zea mays
  Coding DNA Sequence Number=SeqID_30794
  Gene Ontology: Mol. function=structural molecule activity; Cellular component=protein complex; Biological process=microtubule-based movement
  Homolog annotation: Hit_ID=P29512; Match level="QueryCoverage=92%, HitCoverage=16%, E-value=2e-34, Identity=93%"; Hit description =Tubulin beta-2/beta-3 chain
  Pfam annotation: Domain name=Tubulin; Domain location=1-82; Score= -69.6; E_value=0.024; Accession=PF00091.16; Description=TubulinFtsZ family, GTPase domain
MGTLLISKIREEYPDQMMLTLSVFPSPKVSDTVVEPYNATLSVHQLVENADECMVLDNEALFDICFRTLKLTTPIYYIHMAA

SEQ ID NO: 74170 - protein, 306 aa, Zea mays
  Coding DNA Sequence Number=SeqID_30795
MAIISKIWAQSTLELDLSLRCLVLDAVPGARARTGDFTGSPRSTSPDFGLPPPRVDRANQPDYSPPTSIPACARGLANSDHPRRRPAHRCDPQDLPNVLDHFTGAISPPMNSPTPASGGDTRFSSDFLSRDGFPSILWEVLNSVGYPTPPLYMVQLYEEHQVPRCRVWLTLEAHPLQPGWRSLDSETIGLRTDDTVEAAAMKTLTTFCGYHPLEMVMHPLGLFPAEKKDDPMWCNRVSHVKDVWAMYPDLVGRVTVQCMSALYRLQALQSDAMALLANTAQTAKLTLDSREDFVVDLSTELVEKDL

SEQ ID NO: 74171 - protein, 125 aa, Zea mays
  Coding DNA Sequence Number=SeqID_30796
MRPDLISHFTASFYDIVFELSLPNDTESSVSLGTDGVVNTSEPESVYTLKTTLFQIGDVCDMLEKCALSIKKYVDSKRAKIIQDEALQYAEDDEAADDLEELPSPDLLTQADILEKYFGIEYDSD

SEQ ID NO: 74172 - protein, 643 aa, Zea mays
  Coding DNA Sequence Number=SeqID_30797
  Gene Ontology: Mol. function=nucleoside-triphosphatase activity; Cellular component=chloroplast; Biological process=protein metabolic process
  Homolog annotation: Hit_ID=A2XT33; Match level="QueryCoverage=90%, HitCoverage=58%, E-value=0.0, Identity=77%"; Hit description =Putative uncharacterized protein
  Pfam annotation: Domain name=AAA; Domain location=338-560; Score= -35.9; E_value=0.028; Accession=PF00004.20; Description=ATPase family associated with various cellular activities (AAA)
  Pfam annotation: Domain name=AAA_2; Domain location=334-530; Score =333.8; E_value=3.1e-97; Accession=PF07724.5; Description=ATPase family associated with various
  Pfam annotation: Domain name=AAA_5; Domain location=338-535; Score= -1.7; E_value=0.0039; Accession=PF07728.5; Description=ATPase family associated with various
  Pfam annotation: Domain name=Sigma54_activat; Domain location=308 -516; Score=-186.3; E_value=0.075; Accession=PF00158.17; Description =Sigma-54 interaction domain
  Pfam module annotation: Pfam domain module=AAA::AAA_2::AAA_5::Sigma54_ activat; Domain location=338-560::334-530::338-535::308-516
MQRIFSTAAAGMREKGVRIHCLFLIVRGHTAKQIQAEREDVRAGESDCQRRHGRTGLEHRGALLLGVGTRRGRYDCVALTAWGLGSGIGWGGGGSRCIASTTLDEHRLHFEKDKALARRFQPVLVNEPSQEDAVKILLGLREKYETYHKCKYTLEGINAAVYLSARYIPDRHLPDKAIDLIDEAGSRARMESFKRKKEEQCSILSKSPDEYWQEIRAVQSTHEVALANRLKYSLDENDKDDGVNIEVIGDNKIASPSMPPTSVDEPILVGSEEIARVTSLWSGIPVQKLTADETKLLVGLDDELRKRVIGQDDAVVAISRAVKRSRVGLNDPDRPIATLLFCGPTGVGKTELTKALAASYFGSVGYAFLLASFSRSEKTCCMDHESAMIRLDMSEYMERHAVSKLIGSPPGYMGFGEGGTLTEAVRRTPFTVVLLDEIEKAHPDIFNILLQVFEDGHLTDSQGRRVSFKNTLIVMTSNVGSTSISSGRRSIGFSTQRDTEETTYAAMKSLVMEELKAFFRPELLNRLDEVVVFHPLEKTQMMAILNLILQEVKSRLLALGIGLEVSESMKILISQQGYDRSYGARPLRRAVTQLVEDVISEAILFGQFKPGDTILMGTDATGKPCLSRLNDQTVQLSDTAPTI

SEQ ID NO: 74173 - protein, 42 aa, Zea mays
  Coding DNA Sequence Number=SeqID_30798
MAARSKNRLFGSGRGVTNGIKADPDDFTGVCGLGVQVQKGSI

SEQ ID NO: 74174 - protein, 247 aa, Zea mays
  Coding DNA Sequence Number=SeqID_30799
MEAQAHASCNRRAECFVHTTAPPLAPPPRLLDCGTNTATRGDPEHDPAAPAWRDGGASGRRSERRFAFAITTASKKGPGKGDTPKRILPREGTRLRASLLIRGSKAGPSEGFNSRLRARGLHTHYWSEVRRPAPRKGSMAASGYSGSVPTTDQGFEGWPPKAAASSLISTPTYRAPPSIHGRAELPPVVLCADRQHEHAWPEATAGLATGTGGRARDAASPGQPLPAQPKPTSVLPKRWWQPCVHAV

SEQ ID NO: 74175 - protein, 368 aa, Zea mays
  Coding DNA Sequence Number=SeqID_30800
  Subcellular localization annotation: CTP_CleavageSite=51; ConfidenceScore=5.44e-01
MYSRFLMHRVFPPSKPPDGGYPPSFRLVVGGTQLRGSWYLSAIVRLQGFSSASPVVPLRRWSPETVTTSPWVGRSKLGCDLGPTLSFKDVHHPRWGGGRAEPELYLPHGFVGRPLLRRSRERALTGPAGGSDFDNAGPVDGGRRQPQRVGLVGLAPGAPSCRKAAAAPRAREDRPRYRALPGRRSCSGAVLPLHQYGASVRRSVLHSSGRDSLGSVSLVARGFSCLVKGTPRPLFDEPRPGVAVSARTEAELARKEDLVGRSLAGSSVSGIDAGIDLPRPRAGLISLEDSWPRPRGDRPSRLLGPDSRRRPWRRWPELGDDVVLQSRDPRTASPSEARSGLVEGVVDAGGAAAPFSHQDPSLQDRIIL

SEQ ID NO: 74176 - protein, 95 aa, Zea mays
  Coding DNA Sequence Number=SeqID_30801
  Subcellular localization annotation: CTP_CleavageSite=46; ConfidenceScore=5.18e-01
MYLQLERRSPAYNFGSAPTFVFFVLLHVVVLIRVRRTFERRRPPTKSEEPKQSQDQLSYSNQAPPPTQDEKQAQDDENEDQEDELPQEEDNKTNL

SEQ ID NO: 74177 - protein, 151 aa, Zea mays
  Coding DNA Sequence Number=SeqID_30802
MVALSSLTEAGGRQQGPNRSDSCPSARLRCSSDSHDTTPAGCQDLSGCHIGMAFLEKVGRAGTRTGQALSWGRSLPSPAWTLVTPYCKRTQPGRGTNTKVAGSPPLSRPSPATLLPPFALAHALDPSGLGHAAHSLVGLGTPRSRNADNFK

SEQ ID NO: 74178 - protein, 306 aa, Zea mays
  Coding DNA Sequence Number=SeqID_30803
MAARRAGRAVLSSLARSLGLQKPKRQAGSGAKNRHRTLSWVYKDQGEDGSNVPPGPDAGFKNARRNGRSSNGSRTRNGRPTNYSPRRIDSAAGQAALLAGAAGDASPSPKQPRQKRLRASLLIRGSKAGPPEGFNSRLRSCGPYTHYWLEVRRPAPRRVPRPPQATRALCPLLIRGSKAGPRRVHSRLRRRARDDQGYVRYITKARAALPSSPETPCSAPIEGNMALSPLLAERRRRGVCKKAESVPDRPLALCRGSGAALANPAPAKPLTASTYQPENLGPDRTPGLRPARMREQPDQPKHYARH

SEQ ID NO: 74179 - protein, 182 aa, Zea mays
  Coding DNA Sequence Number=SeqID_30804
MAVHKSSAERNENMYRKKPRASGSEKIRSCHIARSVWGYVAKCLNTSTVPGNIVQCWFWLSLNLPYAKDISVIGAPCFCHLLGFVEEFGRRRQDNVEVIFPESQVVGSGNPSSVADNTVLASASSASAAADSAALVDKAIAKLPADVRAHATDSKRKAKSQDPGWKFGWWPDPTKKVCVILV

SEQ ID NO: 74180 - protein, 263 aa, Zea mays
  Coding DNA Sequence Number=SeqID_30805
MSAEQPLQFPEAGEFLRPLFLGAPDTVRCTPDSPVNYSGAPLEIPEGGEFELESSGAPDTVRWCTGHCPVVHRTVRCPRPETADRTEGEGQKDFKVPKAREKVKRTEVPKAKVKKRFCKSTIEMCWAQGMARMIKSCDLEVWSPTLSLNKPKRINMVKNVKYDRFEHFIFEYVAYTFYNVISTMVLKKVQIDWKKNKKGLRSYNLGAPDPLYESVWCTPGPNRELYGLRNLAKIHHTIHSTRATGASDLMVQRLIGGQQSANG

SEQ ID NO: 74181 - protein, 113 aa, Zea mays
  Coding DNA Sequence Number=SeqID_30806
MVRERRTQTNTMSKNTRDTRFIPRFDHTTKMPYFLVEAPTKSWVSFNPNPPFADHKGAKGSQKANKKTNKRVQQKEQGITEVCPGLAHRTVSGAPGDSKLNFAPSGILRDASL

SEQ ID NO: 74182 - protein, 813 aa, Zea mays
  Coding DNA Sequence Number=SeqID_30807
  Gene Ontology: Mol. function=aspartic-type endopeptidase activity; Biological process=DNA integration
  Homolog annotation: Hit_ID=Q10LM4; Match level="QueryCoverage=15%, HitCoverage=10%, E-value=1e-10, Identity=36%"; Hit description =Retrotransposon protein, putative, unclassified
MYSPVYGAEAYLPPETLLDSPWVQASDKSMQKWLQHEDEDSIIKRRWEPRDLSAKAGGPDSLRAGSKEQEPVPWGGPEPVWLLSLVPYPKACTLHHPVMGTLVFGAISPVGPATWGPELENEHLSPGVVRRRVVAQSGPVPWACTLHHSMTGPGPSRGYLLGAIANSFLGMLVCSLDKLSLHPKGASGGGHLCSERLASGGDHLYTEQLASGGDHLCTDDLPAAATTSAPGSLPSGGNHLSVRAMAKRPSPLPSYGGEDKTIQAMELGARQQAEEAGHQPMWEVEPRLSSLSTTMRLMNILESKHWWKSAAPTRPRTSSRGKTRPAAPTRWGGQKAQTLERQVHRGGGCQRKSFRRTPAHPIQAGEKSHRRSRQYRASSGPLQKTEMVNFQNQCSGIEAPRAWPSETIKYGSHRSVSRGDRRDSWHEQEAITTASARKQRANRQSNFDPTCRLVPSPEAGPGATVGTLNRGTPYYSMKARVQSVGPDLHEEAPDPCTHSPDPRIRSRTPKEDASPVHPADRRCAASAFIVTYPLNWQAASRPSCRQRACPVHCQTVRPCCKELKTSHNNLKESCEKLKEAQKPSCVDDIVVVTKDVGVTLDLLDNPTSEPHTTNILCGKCNMSLMNDIIVCDESQVIVENEMLVGKLNALTHDLEKAYGGKAKLDFISRSQRCSLKSEGLVYVPKKWNAKREPEPYLGDEVPAKEVATSDLREARDLEREDVEHAKLHEDRSQGAADAGREVTLAACLLVADACAARIVDGAAPFDSYVPAYAAQFDGFDLDHAAFLSNGTNSGLMGSAFFKEREEAYKCMPS

SEQ ID NO: 74183 - protein, 113 aa, Zea mays
  Coding DNA Sequence Number=SeqID_30808
MDGSMGATWPEKMIYLRVQSVGPDLHEEAPDSCTHSPDPRIRSGTPKRRPDAATWLVACDAMCRLSIYCDLSTQLAGGVQAIPQAACLSSPLPNSTPVLQGALWAIITYALPG

SEQ ID NO: 74184 - protein, 695 aa, Zea mays
  Coding DNA Sequence Number=SeqID_30809
  Gene Ontology: Mol. function=hydrolase activity, acting on glycosyl bonds; Cellular component=beta-galactosidase complex; Biological process=carbohydrate metabolic process
  Homolog annotation: Hit_ID=Q6Z6K4; Match level="QueryCoverage=91%, HitCoverage=80%, E-value=0.0, Identity=81%"; Hit description=Beta -galactosidase 4 precursor
  Pfam annotation: Domain name=Glyco_hydro_35; Domain location=46-396; Score=560.5; E_value=1.7e-165; Accession=PF01301.10; Description =Glycosyl hydrolases family 35
  Subcellular localization annotation: CTP_CleavageSite=10; ConfidenceScore=5.06e-01
MAAAPRSLVTCSGGGSSSSRILLAVFLAAALLASAANAAVSYDHRSLVINGRRRILISGSIHYPRSAPEMWPGLIQKAKDGGLDVVQTYVFWNGHEPAQGQYYFADRYDLVRFVKLVRQAGLYVHLRVGPYVCAEWNFGYRPPPPSTNTTLLQTLKIVADVCTCSFFSGFPVWLKYVPGIRFRTDNGPFKAAMQKFVEKIVSMMKSEGLFEWQGGPIIMAQVENEFGPMESVVGSGGKPYAHWAAQMAVGTNAGVPWVMCKQDDAPDPVLNSFQFLLCVSRSLQINTCNGFYCDYFTPNNKHKPTMWTEAWTGWFTKFGGAAPHRPVEDLAFAVARFVQKGGSFVNYYMYHGGTNFGRTAGGPFIATSYDYDAPIDEFGLLRQPKWGHLRNMHRAIKQAEPALVSGDPTIRSIGNYEKAYVFKSKNGACAAFLSNYHVKSAVRIRFDGRHYDLPAWSISILPDCKTAVFNTATVKEPTLLPKMSPVMHRFAWQSYSEDTNSLDDSAFARDGLIEQLSLTWDKSDYLWYTTHVNIGSNERFLKSGQWPQLSVYSAGHSMQVFVNGRSYGSVYGGYDNPKLTFSGYVKMWQGSNKISILSSAVGLPNNGDHFELWNVGVLGPVTLSGLNEGKRDLSHQRWIYQVGLKGESLGLHTVTGSSAVEWAGPGGGTQPLTWHKVLPSIRQRSEEMHGKAAWQ

SEQ ID NO: 74185 - protein, 65 aa, Zea mays
  Coding DNA Sequence Number=SeqID_30810
MAGGNTLAGAKERWLAGEGNLARLRYLDLLALSLEKQRTQMIFEKRSEIQKFRNLNFSKGSLIKG

SEQ ID NO: 74186 - protein, 108 aa, Zea mays
  Coding DNA Sequence Number=SeqID_30811
MRKWARPSPLLLMLLSCRSNIPLDRPTRWQGGRPSHTINYILHGTCKNGATSKAEYTNTQLDLTVTALVPTIDSMGDPVSSRMRDKVRARLHSGQKGYFELQLLFNSG

SEQ ID NO: 74187 - protein, 184 aa, Zea mays
  Coding DNA Sequence Number=SeqID_30812
MAGDASQCLRVKVPILVVHHGVGTEGKLMGITVPGMKMPRARDDGESTRPPWRLPTLFYGDEFGATTALIALRWRNFPLMAASAFGGQGGAEQYGRARRVAEALRVLFPHDAASSVPPFRNPREDHALRHARKFVDGDEAVMRVPHFSVSCPSARLRRSSDGHDITPAGCQDLSGCHIGMYLGR

SEQ ID NO: 74188 - protein, 177 aa, Zea mays
  Coding DNA Sequence Number=SeqID_30813
MAKNFGSETVQIAMNAVADTRSHSLRGGPQRPNSNSARWDRYTLEDGIVSRERAQGSDEVVRLLGLHDYVVNIYIDVATDLVGDALEHASLKRKELAPYGGVYDLVDTMKREMIFWTCLVKASGMLGDFPLDPRHVCELPRERCRSTVTFFGSSKNLKVPVLTLGASGAPEGVSFWS

SEQ ID NO: 74189 - protein, 69 aa, Zea mays
  Coding DNA Sequence Number=SeqID_30814
  Subcellular localization annotation: CTP_CleavageSite=58; ConfidenceScore=5.59e-01
MEKTPATASSPWRTMRSQSLSTVMGDTLNVGRPPVWCTAQRTTSTVQKLSQSTTPSLRETAEVTIQDAA

SEQ ID NO: 74190 - protein, 202 aa, Zea mays
  Coding DNA Sequence Number=SeqID_30815
MSIYEHQFGFGIQNQKVDRNWKNEYQAADRPPMDRGPSAASGNGQSEQPRRPSEIIRARTVRRPRADRPRQGRKRDRARSLASCAHSVVLFCSPLAYTLLCRVCADREEKLRADSPTASSTIHSTCLHHVVLVVSARNLQVALNQSALVAMMMIIHLEEPKRPNPQLGALNPWMLKIFLMFIQIIPLISKDGLIPSGDFIWL

SEQ ID NO: 74191 - protein, 347 aa, Zea mays
  Coding DNA Sequence Number=SeqID_30816
MTVADAREQRARRQPSSRPIRGQRESSLSRGEDNAPVIHSSNGSHTRDGCPANHSPRRINSAAGQVALLAGATGDASPSPKQPHQKRLRASLLIRGSKAGPRRVQQPPQIAWALHPLLVRGSKAGPPKGSTAASGYSGSVPITDQGFEGWPPKAHRRHHVRRPSRRLGGCSRKPGSGRTVDSVNIPARELGPRPYTRATASSHEGTTRPAEALRKALRPRRSEITPPRPRGLHPAGALARTHRNQKQPRKAGPLAKKCDESLQASANTPFEARGLLSGTIIRGTLKTPNSQLVTPISIKLQRPDGARTRAKPRKTANSAPPDPGLGLGLSPGRRRTPLRPTKGSDSG

SEQ ID NO: 74192 - protein, 823 aa, Zea mays
  Coding DNA Sequence Number=SeqID_30817
  Gene Ontology: Mol. function=transcription regulator activity; Cellular component=nucleus; Biological process=regulation of transcription
  Homolog annotation: Hit_ID=Q6EPG4; Match level="QueryCoverage=99%, HitCoverage=99%, E-value=1e-157, Identity=43%"; Hit description =Transcription factor-like
MEAALGALCRAGGWSYAAVWRFHPQDPRILTGVTPFDTRLLTLGDCYCEDEAKAMVQKMLNLVEVVGEGILGQALVSGECQWIYDDTCHALNQISHADNGDLHQTIAVLPLQLHGLVQFGSTRKVRDIFDRMKNASSDGPMEYTQNNSLACGQQPILTSSRPVNDMLVHNKVNPLQTEKLLEDIERTESIRSSICSPSNSQRSLNDLTSHGTGNSSMDTNILAMPVNSKSIYDLKRFDNVTELFHRSSNDRIGFQVSSSKEPDSTIAGVMSEYKSLNNIHMTENDSCGQNIGYTPYLYTTTNSSNSGLDELSYSGVALSSSFTAVSGKVKDCLQTESDKFLCKSVSFGSNPCASKFQENRLSPYHALMHEQSLIPDPGESVRLLSQEESFIVQGDSSQFKDTADFTGQGNSTFPELPNRSPEEATAETLENNMKDCSGNNSLLETMMLDLSTNSFVQDWWDNSVLLAENLPNSSEKDPEPAMELANRHSLPTGERGSPFIPVIEQLLGDVAHPPTPTGHSSLEAEATALAGRVSDYQLPQFAFRDCLTVDNAQIPALACSNYTCRTRSAQNGSSEVPSANVSVDDTCSLNTANSNGSQSSNPEGTKVAKRRARAGESTRPRPKDRQLIQDRVKELREIVPNGAKRTIKHMLFLQSVNKYAEKIKQADEPKIIDKGSGVILKDNPVAGTNGGATWAYEVAGQTMVCPIIIEDLSPPGQMLVEMLCEEQGLFLEIADNIRGIGLTVLKGRMELCDGKIWSRFLVEANREVTRMDIFLSLVQLLEQNSLVRSTDQMAKVMNNGVPSFANHQRSPLLVPVGIPERLQ

SEQ ID NO: 74193 - protein, 137 aa, Zea mays
  Coding DNA Sequence Number=SeqID_30818
MEHPKEDHGVRADYVAKGHTQAVEIPNVGGGSRWRWRRGLLVLGGHHRLRHDRVEPRTTERRLRSMGQFRDSTCRLGCLDGAEACRKHGGTELNNQGATKSREPSRRLSGYDTGDGTSGSKVWRKPYLAIPEAPPLS

SEQ ID NO: 74194 - protein, 420 aa, Zea mays
  Coding DNA Sequence Number=SeqID_30819
  Gene Ontology: Mol. function=zinc ion binding; Cellular component =nucleus; Biological process=regulation of transcription
  Homolog annotation: Hit_ID=A5HWF1; Match level="QueryCoverage=86%, HitCoverage=97%, E-value=9e-66, Identity=44%"; Hit description=Dof zinc finger protein 2
  Pfam annotation: Domain name=zf-Dof; Domain location=104-166; Score =137.1; E_value=5e-38; Accession=PF02701.6; Description=Dof domain, zinc finger
MAFLLSPRLTTPCIKRTTMLSQGDVLQTCSAAAVLKHTAQPYKSTSSKGVFCAVSLGLVKPLEEMLMAASAGAANPSQGSNPNPPPLAAPLTDAGSTERRARPQKEKALNCPRCNSTNTKFCYYNNYSLQQPRYFCKTCRRYWTEGGSLRSVPVGGGSRKNKRSSSSSSSSSSSAAAASASTSSSATSSSMASTPGAASKSPELAHEGAHDDLNLAFPHHGGLHAAEFAAFPSLESSNDMCDQGGGMTSNGRGGGAGPAVGALSATELLRSSGCYMPLQMPGGDYTAAGFALGEFRTPLLPPPSSQSPLGFSLDAHGPGSSGAAAAAGYGSSAGLPQGVPGNAGRLLFPFEDLKPPVSPGGGGVGGGGASATGGAGDGNSSHDQFDHNKERGGGGGRGAGAGHDTPGFWSSMIGGSGASW

SEQ ID NO: 74195 - protein, 90 aa, Zea mays
  Coding DNA Sequence Number=SeqID_30820
MADLEVGSIWSEEVGRGLPAGRWRSFAAGVAVERKRKEGEGLTGGENDVGASRIVLRGEEERDGRGWCEEGGARGEPFIGARGKGGGGAP

SEQ ID NO: 74196 - protein, 180 aa, Zea mays
  Coding DNA Sequence Number=SeqID_30821
MRRAKENRGLLLRQAAAAEGGGEEGQGRGGGTPKDVCSTFAMNLLVGCLGYRWKETVGDESKEFGRYMRQREEQEKQEVELFTRAPVTKHDKQIEKLIRRQLHGTWFAHWDFQLVLISNVHHHLISDPDNRLGGLTDGFGLGMNMLLGGDKEDDGGSSKSHGKSGNRKKRPKNSKKRMRH

SEQ ID NO: 74197 - protein, 91 aa, Zea mays
  Coding DNA Sequence Number=SeqID_30822
MGFWLALSSISAIPGVQLQPSERISEGERVGGEGKLWARIRLIIDSTTWTRTGESIGHGEDTRGRGQSNRVSAARGFEDLKNHPGNWNLKC

SEQ ID NO: 74198 - protein, 295 aa, Zea mays
  Coding DNA Sequence Number=SeqID_30823
  Subcellular localization annotation: CTP_CleavageSite=66; ConfidenceScore=5.38e-01
MASSRPPLQSTPLPLRFPSPTALIFHWWQRAGFYNIPSSLSSCPSLAGQSSPERLPPHNSLLVVPREDTEVHGLLSQRPDWNKGNKFLMEPVVLNRERAAADHLKRMPMMFDDYREEDFYGLPRKYSIVARVEVKFPKEPRFHDRQHFVLSDINGAKIEAITYMYETVKHFDNMLHEKHVYKMHNVKFSLHPGEFNFRHLNGPMELCLDQQTIVEPYTVPIQMAPFPKQILLNLADIAELPNRTLVECLESSDHTAIHFNPFHHNTHHFGSIQKALVAQNNRQFAVTFLEEQRRT

SEQ ID NO: 74199 - protein, 97 aa, Zea mays
  Coding DNA Sequence Number=SeqID_30824
MAGLKARLDELEKQEKYAIEWGRGSEGADPKLRASTASTSISLIALLHSLPLRLPLPFHRLRIALKTSCSKIRHDIEKQAGEDKTRLPTMVFGAAEQ

SEQ ID NO: 74200 - protein, 279 aa, Zea mays
  Coding DNA Sequence Number=SeqID_30825
  Homolog annotation: Hit_ID=A3AQ03; Match level="QueryCoverage=30%, HitCoverage=44%, E-value=5e-08, Identity=41%"; Hit description =Putative uncharacterized protein
MAQRRSQKNKNTTRKEVTLEILFSDCYNYDSWSTSVLNAFRTIDPRLEQIIDKSIIPSDYDASEEDQRCIRLNHLALDILGSKVNLMSPNMIVHFELLLPLVLMILNPLRKKKKMDDGDQTMNPPLQKLTKEHEELKCSHVDLVQSKSSFELEFAGTNDDTYQKLKEENESLKMSLTQLKGKCIAQPSQDNRDHMVKKLETGTTVACTKSLEANVKDLRIVKRKEQKKKINTSSKSLNHASIKGNIQVFFFLYSFPFARNLHNLESLALTIRIKVKALE

SEQ ID NO: 74201 - protein, 67 aa, Zea mays
  Coding DNA Sequence Number=SeqID_30826
MENAYLPDDDLLTDEVKINLHMLGALVKKQAIRTSLNDDDKETVKLPKGCYNDNSWGLVYGHHKHMV

SEQ ID NO: 74202 - protein, 104 aa, Zea mays
  Coding DNA Sequence Number=SeqID_30827
MSCHANRNSYRSGRGVEMREGSITSEGTDPATTIKLPKPSSVFAATPRKRRMASVLDVVLESVKMPAPASVEASSEQTKDVKEAVALSAVIAPTEAGPSETGPI

SEQ ID NO: 74203 - protein, 82 aa, Zea mays
  Coding DNA Sequence Number=SeqID_30828
  Subcellular localization annotation: CTP_CleavageSite=43; ConfidenceScore=5.15e-01
MVSRKLANVTTAVDRLHRQAPPPSFVARPAPSTRDTDRYLDVTARYSPSSPNHSLEPYQRRKTKEDTNNRNQRTILFFNKPK

SEQ ID NO: 74204 - protein, 45 aa, Zea mays
  Coding DNA Sequence Number=SeqID_30829
MGRVRLAHGSRLSARCAHDYSMGHVGVGKLGRLNSIRPMSRDKPS

SEQ ID NO: 74205 - protein, 210 aa, Zea mays
  Coding DNA Sequence Number=SeqID_30830
MDMLEIRPPQQDPAPVASAVVFSPAEDDDDDDRDVDASLRRCLAHNRQGILPRASERKRIAGSPTAEEQHLRSTTANDTNQGIIFFGRTNIHTFLHQQHAQHRTFGITRTRQQYVLGAFGRKNLGRITQPCVRRALATPEHAPALGPARTAPRQAKPVPTPAPAPIKPIEASTVHPHSLSTSLERKFNGDRSVHGVQAAAREPTTVDRPP

SEQ ID NO: 74206 - protein, 133 aa, Zea mays
  Coding DNA Sequence Number=SeqID_30831
MAAVSVPLFKLASALCIATLLTSLDAPKHQSYSHGSPVLGLGRALTPSLAGDACREAPLPSPPSSSWSAASNPWAPQPLPLMRLPGAGLLVGSTAPSLCALDRQLIAVLDLPELASGGRASLHLEPPWAPARQ

SEQ ID NO: 74207 - protein, 107 aa, Zea mays
  Coding DNA Sequence Number=SeqID_30832
MGKLGPSLLILPLYRATTLVPNIFRMGDHVSGSVRGKVCGQVHSGTRLTDLPNFSLCIEPGLAFQSWGRKILDGRLWCWLLGYLLSNSLLRNEDVLPVSEITVYRMQ

SEQ ID NO: 74208 - protein, 222 aa, Zea mays
  Coding DNA Sequence Number=SeqID_30833
MSIYFASCFSLGPRNNDLTIYWALGPFVGSFTLLVDPGDIYPPQAPDLWVNLEAEALFRARALEVGILICRILNFIGCTGEIGMKLFALCFGGIHCVPCTDVTVLKNILIIPGRPPRWVWARDGLGIAAEVWTYIRAVERSGLEGSDESEFSSDEEDSDGGGEDEDDDDDGGDDGDGDGDGSGRGDNGGGRGGDGGSRSGSGGSSRGSGGGGSSKGSNKASG

SEQ ID NO: 74209 - protein, 371 aa, Zea mays
  Coding DNA Sequence Number=SeqID_30834
  Gene Ontology: Mol. function=nucleoside-triphosphatase activity; Cellular component=integral to membrane; Biological process=transport
  Homolog annotation: Hit_ID=Q9M2V7; Match level="QueryCoverage=64%, HitCoverage=33%, E-value=6e-97, Identity=69%"; Hit description =Probable white-brown complex homolog protein 16
  Pfam annotation: Domain name=ABC2_membrane; Domain location=8-275; Score=107.3; E_value=4.6e-29; Accession=PF01061.15; Description=ABC -2 type transporter
MTAHQPSARILAILDRLLLLSRGRTVYAGTPAGLKPFFADFGAPIPDNENPAEFALDTIREYERCPDGAAPLADFNVKWQNGSSSTSTFDNNNDDDNDSSSKLMPLELAIAESVSRGKLVAGSAVTASSVPTFANPPWTEERHIYLRETAHNAYRRISYVLANAVVAFPPLVFLSLAFAVTTFWAVGLAGGAPSFLFFVLIILASFWAGSGFVTFLSAVVPHVMLGYTVVVAILAYFLLFSGFFINRDRIPDYWIWFHYLSLVKYPYQAVLQNEFRDASRCFSRGVEMFEGTPIGHMTEPVKLKVLQAISRTLGSNMTATTCVTTGADVLAQQAVTDIGKWKCLLVTVAWGFFFRALFYVVLLVGSKNKRK

SEQ ID NO: 74210 - protein, 147 aa, Zea mays
  Coding DNA Sequence Number=SeqID_30835
  Subcellular localization annotation: CTP_CleavageSite=52; ConfidenceScore=5.59e-01
MSFSSSSSSVASVSPTTPSSEKTISDSAAFGFCTFTPRTGNTSAEVIEIVPCAKNKWGNWWEFWFYVAPGDVEGLPSLPPAILCSHCYVVFPQFKVAKGDQDKEALRYAAYLSSGCDFVEEFIASGVWPLAHGWALGEIIPHQMPTM

SEQ ID NO: 74211 - protein, 83 aa, Zea mays
  Coding DNA Sequence Number=SeqID_30836
MGRRKRQDGGESKGGGHGAESGGGGMAHPVAEGEGRGRGLVWGKIPGGESFEREGSRFGTVELGGTWRVEKEKKRLRFKKHEI

SEQ ID NO: 74212 - protein, 83 aa, Zea mays
  Coding DNA Sequence Number=SeqID_30837
  Gene Ontology: Mol. function=ubiquitin-protein ligase activity; Cellular component=ubiquitin ligase complex; Biological process =protein ubiquitination
  Homolog annotation: Hit_ID=Q9AV81; Match level="QueryCoverage=62%, HitCoverage=9%, E-value=4e-19, Identity=84%"; Hit description =Putative WD-repeat containing protein
MSDNDISICSQMSQSLRVMSDQSLLCLSLKNGYFLATAAHDGVKLWDLRKLRNFRTFSSYDLDTPTNTVEFDFSGNYLAIGLI

SEQ ID NO: 74213 - protein, 295 aa, Zea mays
  Coding DNA Sequence Number=SeqID_30838
  Gene Ontology: Mol. function=electron carrier activity; Cellular component=nucleus; Biological process=cell redox homeostasis
  Homolog annotation: Hit_ID=A7P525; Match level="QueryCoverage=69%, HitCoverage=88%, E-value=8e-54, Identity=42%"; Hit description =Chromosome chr4 scaffold_6, whole genome shotgun sequence
MEESRGILREMFQCKEVTELINSVGDKIQAESLVDLLSSACDQGRIDEILLFEDLNVNNGVSVCLLLVYVCYSCWISCFIFWDVEIIFVSLDRDEASFRDHFQGMPWLAVPFDAAGLLRQKLCARFAIERIPALIPLSASVTSSSGLGCGEDSVRLVGEYGVDAYPFSAQRRELESMDDARREGGRLQELLGCEERDFVISADDIKIPIADLTGKTVGLYFGAHWCPPCHVFTKQLKEVYNELKILRPGSFEVIFVSIDRSKGEFQASMSSMPWLAIPYSDAARKRLIIKETNFD

SEQ ID NO: 74214 - protein, 168 aa, Zea mays
  Coding DNA Sequence Number=SeqID_30839
  Gene Ontology: Mol. function=nucleic acid binding
  Homolog annotation: Hit_ID=A2XZS4; Match level="QueryCoverage=54%, HitCoverage=27%, E-value=5e-50, Identity=93%"; Hit description =Putative uncharacterized protein
  Pfam annotation: Domain name=zf-CCHC; Domain location=107-124; Score =32.0; E_value=2.2e-06; Accession=PF00098.14; Description=Zinc knuckle
  Pfam annotation: Domain name=zf-CCHC; Domain location=129-146; Score =27.4; E_value=5.1e-05; Accession=PF00098.14; Description=Zinc knuckle
  Pfam module annotation: Pfam domain module=zf-CCHC::zf-CCHC; Domain location=107-124::129-146
MAMGALQVAISAALFVDTLLLTVRYDICTVMRLYKIGHSYSFPRFRTSVWQIWKEFSDHRDADEARYQLDGRDVDGSRIVVEFAKGVPRGSGGSREYMGRGPPPGTGRCFNCGVDGHWARDCKAGDWKNKCYRCGERGHIERNCQNSPRSLSLSLTVLLALDEYVTNL

SEQ ID NO: 74215 - protein, 215 aa, Zea mays
  Coding DNA Sequence Number=SeqID_30840
MARLDGYRPRPAARLELGRLANGDLAKATADERKCLRVLEEQLPVEGLEVQEDLTYIEKPAQILETADRVLETVIAGFGPRGELPSPLPLSLPLPLPFLFPYACPLRARGPAASRICALAAAHPAPLSAPAASPVAPAPLPAPAASPATLAPRWPGVPAPVPLRVHALWRLVPTPRAPRPGGPRTLRACAPRDPALACPRHAQRVRARVTVLRGV

SEQ ID NO: 74216 - protein, 181 aa, Zea mays
  Coding DNA Sequence Number=SeqID_30841
  Gene Ontology: Mol. function=aspartic-type endopeptidase activity; Biological process=DNA integration
  Homolog annotation: Hit_ID=Q8H8K3; Match level="QueryCoverage=56%, HitCoverage=7%, E-value=2e-10, Identity=39%"; Hit description =Putative retroelement
MACYLEAIDLGVQRVTRDGMKPPKNPKKLTTKNELVRDMYSRLNLIINELNSFGINKLGDADIVRKIISLLPQQKYESIITILHNMEDLSQMTPTIVIGKIATFEMSRKMGRQEEPTSSRPYAFACDEKNNGKKKAPTPSSSSEEEEEEESDDDEDNQTINIILQGRRNNPTRWKGQGSSL

SEQ ID NO: 74217 - protein, 296 aa, Zea mays
  Coding DNA Sequence Number=SeqID_30842
  Gene Ontology: Mol. function=protein binding; Cellular component =chromosome; Biological process=nucleosome assembly
  Homolog annotation: Hit_ID=A5AKG7; Match level="QueryCoverage=33%, HitCoverage=72%, E-value=5e-42, Identity=89%"; Hit description =Histone H2A
  Pfam annotation: Domain name=CBFD_NFYB_HMF; Domain location=197-262; Score=5.3; E_value=0.052; Accession=PF00808.14; Description=Histone -like transcription factor (CBFNF-Y) and archaeal histone
  Pfam annotation: Domain name=Histone; Domain location=191-265; Score =86.5; E_value=8.4e-23; Accession=PF00125.15; Description=Core histone H2AH2BH3H4
  Pfam annotation: Domain name=MA3; Domain location=42-146; Score=5.2; E_value=0.0042; Accession=PF02847.8; Description=MA3 domain
  Pfam module annotation: Pfam domain module=CBFD_NFYB_HMF::Histone::MA3 ; Domain location=197-262::191-265::42-146
MAKKGQYVKSQETGTALDRASAEQLKMSSPILPLPKLHTQENKKKKYYLEARLGLVDMNKPPEMISGNMKVGSANSFERKDLERELLAKLLVYLCTAQEHLLSQRQLLQGFQHVLSTLEDVVTDAPKATKFLGQIFARVVLEDGISLTEGGGLLQEWDGREEPAGQHALEDSLASEDLGSMLESIRVERAKYSLMCFQFPVGRIHRQLKQMTQANGRVGATASVYLAAILEYLTAEVLELAGNASKDLKVKRITPRHLHLAICGDEELDTLIKGTIAGGGVIPHIHKSLINKSSKE

SEQ ID NO: 74218 - protein, 207 aa, Zea mays
  Coding DNA Sequence Number=SeqID_30843
MMSPDMWAQGQNGRKLRPLAHVTGSRPRGSIGSPPEWGAEAYTVWSGHVSALDPCLALVKAWVFFVPESQDPTVSGPDPTQRGPEPILGVRFAPVEVPDLSRRSGLHIQGSDTLPWGSGLTVDTLEYIIFSSHVVALELSTWWGRVMFTTRLDIVAWAPRLHTVVRGTPVSGYRQWSPGPPWGRIRAYRWGQSLIGDWRAAFVRLLT

SEQ ID NO: 74219 - protein, 176 aa, Zea mays
  Coding DNA Sequence Number=SeqID_30844
MGAKQGCRDDGLYLNYSESLLGSWRCQGNLMPTRLALAGASPPALLAAAFLLAPVLGLPPVLTGPRKPTNATFFRSDKGRGGGAVSNVERHLAAGNKKKLVGERETGTLQLLAPLLLTGAKGADLVIRGNVVLNTLSARSTSTLLWDQICVNSSSSRQVPGLAELSYATGFDFCST

SEQ ID NO: 74220 - protein, 132 aa, Zea mays
  Coding DNA Sequence Number=SeqID_30845
MEAGRPLLLLLLLLLLLLLVPLGEIAPGWWWRRRTRRWWWLWWRWTRWLWWRGTDAPLRALGLGAGLLGPTSSPLTLLGAGLLGPNGGVRNKRSVGAAQPTSPLFLRHPGAAWGEGAACSPFALFQGAGGHD

SEQ ID NO: 74221 - protein, 210 aa, Zea mays
  Coding DNA Sequence Number=SeqID_30846
  Homolog annotation: Hit_ID=O48967; Match level="QueryCoverage=96%, HitCoverage=39%, E-value=6e-42, Identity=51%"; Hit description =Putative uncharacterized protein
MVQIVEHHDFMPEDFPVEEEAASSTPRATNHLAPGVVVVHSARQHTPAQTSRASRAAPGALSAVRELLRHPPSSTASPGAMKQWRDDVDRLLGMAHSGSARPRPRSSRRQHEASASVRSPSVRAAPIEDLRAELNRRRAGEDAPVSLERSNDLRAELNCRRAGEDARVSLERARERRKNVEGCNLDYDFVVVASQTPTGPGSRRVSHWSA

SEQ ID NO: 74222 - protein, 493 aa, Zea mays
  Coding DNA Sequence Number=SeqID_30847
  Homolog annotation: Hit_ID=Q6J9V9; Match level="QueryCoverage=28%, HitCoverage=49%, E-value=6e-59, Identity=80%"; Hit description =Putative uncharacterized protein
  Subcellular localization annotation: CTP_CleavageSite=41; ConfidenceScore=5.32e-01
MASGQTLLLKGPRSRPLTGDENQPLKPKSRRSGAQVALMVSSAEATTAAVGSLTSGGHHFSTGDSSHLRTARPSSGWRMDSYTLTRQRQFAFPRIAGERLLRKAGGCPSPPNVGGRSGSPAHTGGKTQLGAPSSPARMMNIIEAEGRGEATTRLALPHHEAYEPVPRFEAALRVTQQCQLSATIMGQSAARIGAMVDMAKSGPAGKRHLQQEKRAPFHLRHDDRVKKGTGKGDIPKRILLSEGNGPRALLLIRGSKVAPSGVRQPPQSTRAPSPLLIRGSKAGPSEGFDSHPRACRVRDDPGYVRYMVEAQATLSRYPRTFPRPAGTICNGIPPEGGIEPSDPIEWVRVWQITCRDQERGYSKKDPSQQRDDPGYVCYMAKARATLPRYPRTFPRPAGTICNGIPPEGGIEPSDPIEWVQTGKQHCSPRSGYCANHQGEGLRLVRPQASASASASGGVTSSPDLGLGLRRSLRLARPQPQTDYAIGDTSLPYS

SEQ ID NO: 74223 - protein, 45 aa, Zea mays
  Coding DNA Sequence Number=SeqID_30848
MAEKLLVPPKRTDKRVGSAIRACMSAVLIARTRMADEMNGDITHI

SEQ ID NO: 74224 - protein, 274 aa, Zea mays
  Coding DNA Sequence Number=SeqID_30849
  Subcellular localization annotation: CTP_CleavageSite=98; ConfidenceScore=5.44e-01
MGGRTPPRVRRARARPAPDPTRPAPRHATPVSPARARAYKVSKGFSCTPPRTLDLTGARDRRSQPCRRRASGRPSTRHRRPASRAIPNPVQLLEETLRASVKLPERGIELCLAGDARSRLLDFTRPLANVDRAPRRLYPSRDLIEPGSRLYPSRDLRRGLPFRLWWVQVRSLHDGSRGQGVHYDVEAPRTVHDVEVVAKELADPLVLRHGRQALVQQELQAIMVSTNIKMTPPQVRAPMAHCLHQPNQLALICRQLEVASGSYAEESERLGALV

SEQ ID NO: 74225 - protein, 117 aa, Zea mays
  Coding DNA Sequence Number=SeqID_30850
  Subcellular localization annotation: CTP_CleavageSite=89; ConfidenceScore=5.68e-01
MSSPNPPPSLHHPQPPPSPGLSQPSGAQPQALASQGTSALMLGDHTAATLAPTAPPGDALTGSSCLQAFTQHEMTVAILELGQEVAGIRAFLAGPYTPPPPQPPASATSYHYGMPSD

SEQ ID NO: 74226 - protein, 101 aa, Zea mays
  Coding DNA Sequence Number=SeqID_30851
MGRRETEHEGGRNSKGESRGLRVVLRPGRPKVTRGRGSSEVEAESEPWGRARRSPSSEVVAESEPWGRARRSPSSEVEAESEPWGRARRSPSSEIEAESEP

SEQ ID NO: 74227 - protein, 184 aa, Zea mays
  Coding DNA Sequence Number=SeqID_30852
MAPEAGLGCYQPHYVEWHSSQSGAGGVVSLSVRWRGDLAKVASPRRLGLGRAEEPSPPRNPRVYQNADLAAHDRVRAENSGTVELISTTSFLELSLTVFSCPNLYSRRRCEVRVEPMEREYPPASSTVEETRDSGGGPGASRDHAERVQLILGGDWRLVLEELLTVDLGHPRIRLTPWAELWSH

SEQ ID NO: 74228 - protein, 119 aa, Zea mays
  Coding DNA Sequence Number=SeqID_30853
MGRRETEHEGGRNSKGESRGLRVVLHPGRPEVERGGGSSEVEAESEPWGRARRSPSSEVEAESEPWGRARRSPSSEVEAESEPWGRARRSPPSGVEAESEPWGRARWSPRSGVEVEPEP

SEQ ID NO: 74229 - protein, 93 aa, Zea mays
  Coding DNA Sequence Number=SeqID_30854
MAMTRSTVQGVTDGIGDPSEEFPGVAEINPERDTMEDTDSKIGVQLWRGAILPEVGDDIRALRVSDGAVRSARAVNKRRGHPCRRAYWDEILF

SEQ ID NO: 74230 - protein, 145 aa, Zea mays
  Coding DNA Sequence Number=SeqID_30855
MLLYSMWFRGSVIQPIVVVRGNEMVVRARLQALSAFRDRGVPKPTIGVAQAALSFCQTGQWSGGVTAVTSALPGARVRIEVSGHLCVKCPCNLVSRCGDLVKVASERSQGLGRAGDVSAIKRGPRARRKSLEVGCLRPRLGSGEA

SEQ ID NO: 74231 - protein, 92 aa, Zea mays
  Coding DNA Sequence Number=SeqID_30856
MEIPVKSSRGVAEINPERDTTEVFPPDLVEAAKTSRGVDDGLTENSTVAAAVFFPPCATAQSFLGGGGKRRRHREEREGSRVRFLKPIFLSI

SEQ ID NO: 74232 - protein, 131 aa, Zea mays
  Coding DNA Sequence Number=SeqID_30857
MAITFQHKMKRELYIESRIHRTENLPQQSLGKSERSRKKRDLQRSERRLPPASQEQRILYSENPAVHLLYGKMDTDHKEKGSKRGEGSSSCSSGTSALKGEQKEACHCDGSILPRRPLHRGKSGIDPRLRR

SEQ ID NO: 74233 - protein, 139 aa, Zea mays
  Coding DNA Sequence Number=SeqID_30858
  Subcellular localization annotation: CTP_CleavageSite=29; ConfidenceScore=5.09e-01
MRPQAPQAESSPTRSKALPCDSGDGPRMSCKPAQGRRSQTAAHGTGKGGYPERDPSPRRNRAPSPPLLIRGSKAGPPGVQQSPQIAWARHPLLVRGSKASPPKGSMAASGYSGSAPITDQGFEGWPPKGSQSPQTPSEG

SEQ ID NO: 74234 - protein, 628 aa, Zea mays
  Coding DNA Sequence Number=SeqID_30859
  Subcellular localization annotation: CTP_CleavageSite=13; ConfidenceScore=5.00e-01
MPSSSSSANATPPAAASSEETLSSVMVEELRAGDSVEFGVSRMTSARIEDMQRLGYFGGGVARAPGTEEVPEPEGELVVFEAFFVAGLRLPAHRVFELNQLPYDGYPGQDEADRRGKKPAVETGGDPALVAAASSKKRKLVMDKDRQGAARKRQATVRVHEARPKRQRGTAKAEASGGGKPPLPAKVGAGGPKLSKVVPSVSGVAEAAKAARSLPPPGKRVADFGTEINVEDYLGGSDEGPLALVVPGAAIATAAPAPKAGGETLGAGGEVSALALVRDEAGVATRRLKGATEALSRATEALSQVADFTSRTASGALTVALSAEVERLRTQHADAVREKSASDSKCRKLAEKVAALEKEKADLRRQLAGERREANEAIAKEQAAQAEARLARAEGNIAKELAGELQRRLTALESRAEGAEAAMRAEVERTRTQLMTSYRELGVRTGDFEVPEREAGLRCLEWVQEELQELPTVLAGLMSFTSLVTCEAAMNALSREGCRHFEALDQVDEDFGRDIFEVEDPVVKESAGALYDRMWGSYGREVVRARAEAARAQAERGERVDDFGALNSVLPEPETTPAEAATGVAPGPTPETVEDAPGAPASAAAGEDLPPKVAEGAPDAPRSCCAER

SEQ ID NO: 74235 - protein, 117 aa, Zea mays
  Coding DNA Sequence Number=SeqID_30860
  Subcellular localization annotation: CTP_CleavageSite=78; ConfidenceScore=5.70e-01
MAPRMLPDDCGSQPPYGSKRTSARTRPPRQLSFRQAPALLRRPRHHTNRVPKPLRLPRRHAFVKEPSPAKAVPARFVSVGTAAAAKASSEGWRLCLRPNICPPRDQFDKVTWCRRRR

SEQ ID NO: 74236 - protein, 54 aa, Zea mays
  Coding DNA Sequence Number=SeqID_30861
MDLVFAPTGSEPPPVQVNGGATEDEDSPPRHETDGGILNLYLDRTLKEEATEKA

SEQ ID NO: 74237 - protein, 46 aa, Zea mays
  Coding DNA Sequence Number=SeqID_30862
MANYFKEEAKKEFKDDHSIDANNSSSSNAGFHRGYDHPKLCRVNGK

SEQ ID NO: 74238 - protein, 199 aa, Zea mays
  Coding DNA Sequence Number=SeqID_30863
  Subcellular localization annotation: CTP_CleavageSite=53; ConfidenceScore=5.30e-01
MAHQNFSDPLEAFSPSFSPHCPWSHGLFPAIEFVVAPSSPLPNSSDPGATLARASLNSGDLTAAEMNNAARSLSVNSASPDLGPRPQEEVSTLPDPRARSQPRPRKEDSALPDPKARPQPRPRKVVSASPDPGLGLYLDLGKNRVLVRPRPQPQEESPPRPILGSDRPHNGGYIITLPLARSGYLEQDRRPIWLALVNE

SEQ ID NO: 74239 - protein, 273 aa, Zea mays
  Coding DNA Sequence Number=SeqID_30864
MYRTLPPSAPPDGEHPRRLRLAVVGGARPCGGWHPLAIARLQGFSSCSPAAFPHQWSPRTVTTSSMVGRSKPGCGLCPALSFKDLHHPCWGGGQGEPGFYLPHGPAIRFSLRHPGEEAILQLYGGGVLQPCGGRRTAAVWPGCSIPSSIRGTVAGCTRGSHNTSYAARVVAAVVGAEVVAAGEGFSADDIVSATCALGLRLFGFNGWFSSPVRGKVTSENLRLLCDELEPEAAVSAWTEAESAREEASSAREQVASQAEEVQQRRLKLGQVVR

SEQ ID NO: 74240 - protein, 244 aa, Zea mays
  Coding DNA Sequence Number=SeqID_30865
MQVACDRTTVVHPFGFVASSMEAHAHTSWTGKGNISKGILLREGSRPRALLLIRETDEHDSGQGFVYSRDAISPRPSPASGGNRSPRRIHASPEGLLKQRAHPRLARSPARAGFAVKQPWPDHLTSRPYRRRIQCEDRLTPYPDTRASIGKVEEEVSTSPDPRARPQPRPRKEDSALPDPGLGLNLGLGRWSPPRPTQGSASTSTSGRIASLLDPGLGPRRSLRLARSWARTDRTMGDTSLSYP

SEQ ID NO: 74241 - protein, 569 aa, Zea mays
  Coding DNA Sequence Number=SeqID_30866
  Homolog annotation: Hit_ID=Q10E61; Match level="QueryCoverage=78%, HitCoverage=95%, E-value=1e-150, Identity=57%"; Hit description =Expressed protein
MKLEPSAHEELHDEHTILDAPTLGVVKLPRGCYWANSSDRPQAKELSAFPPSCHPSHRDPRGHEPTSSSSCYSEGFWIWEPSDWRSGRARRTRSPLSPILFLPERHPRVLPLVASGRKIQRKDMRDPFDAPVDLINVDHNGGYQLSRTGAVSAGDHGLQNGGPKSLAPNSDTVVRHQLQGASLHKDLALEDPNTRIMDPETKELYFRSQSQEDEILLLRKKIAEASLKELSLLSEKHILERRLTDLRMAVDEKQEEAISGALKQLNQKKTHLEDNMRLANELKDNLGDMPQPGNIYNSSHQQQQVTLPRNEASPSYNMVSNKNALQQYAQGPSDRHIEQMDTGGTTPSNYFEEGRVDGGSQLYPSDGDALPGIEGFQIAGEPRPGCQLTACGFPTNGTTLCNFQWVRHLENGIKQSIEGATMYDYVVTADDVGTLLAVDCTPMDDNGRQGDLVTEFANNGNKITCDPEMQSHIDACISKGRAEFEVFVLQAYSPEEWELATLVLTRPNYQIKFKQTGNVVIDEKYSQSLQTKIPNGRTTQFVLITAGTTLPFNTQGISEPNNEDYDVSI

SEQ ID NO: 74242 - protein, 760 aa, Zea mays
  Coding DNA Sequence Number=SeqID_30867
  Gene Ontology: Mol. function=binding; Cellular component=microtubule; Biological process=beta-tubulin folding
  Homolog annotation: Hit_ID=A2Z975; Match level="QueryCoverage=87%, HitCoverage=93%, E-value=1e-152, Identity=63%"; Hit description =Putative uncharacterized protein
  Pfam annotation: Domain name=HEAT; Domain location=305-341; Score =15.9; E_value=0.11; Accession=PF02985.13; Description=HEAT repeat
  Pfam annotation: Domain name=HEAT; Domain location=481-517; Score =7.0; E_value=2.4; Accession=PF02985.13; Description=HEAT repeat
  Pfam annotation: Domain name=HEAT; Domain location=648-684; Score =6.5; E_value=2.9; Accession=PF02985.13; Description=HEAT repeat
  Pfam module annotation: Pfam domain module=HEAT::HEAT::HEAT; Domain location=305-341::481-517::648-684
MEEAAAAAAAWASNAATPVPSEPMRSPPDAEASVDPTAVGDDEHDSKEVVLRRYFLQEWELVSAILHRVVAGGGVAESADVHRIRSIAREHRRMETKCVVLLWLYILVLIPFDISTVDTSIATADNVDGPEVVPLVTRILDICKDYLSSSGPMRRMSGLLLARLLTRPDMAKAFSSFMDWAHKMLLSVSDDFVDQFRSIGIVEALASIFKIGNRRALHDAVSGTWSDCSLVMKTNVSARSPLLRKFLVKLAQRVGLISLPPRLPSWQYKALHYDVRRGPHSIGSHCAAVEALKHFIPTYLVSSGEKIASDIISKYVALLDDPNVAARRGAALALGILPFKFLMLKWMPVMSKLCSSCTIEDKPDDPDAEARVNSVRGLISVCETLTASFDQLSNGDSLYAYIKDYVMRALFRALDDYAVDNRGDVGSWVREAAMDALVRCMFILCKRDIVALRAVSATGHDSELGDMEVNASSTAYRLFDSGIAQDLVAGIAKQAVEKIDKIREIAIKTLQRILYHQEHLIPFIPHRELLEEIIPNSRDLEWAESLKKASMSALVGYLQDSDINTNCEGKSREYLLSCDLLWGLQHYQKCDRTIEALFSKKVFLNKEGYSEFYSGLVDSVSSELKGSKDFTKLCAGLSILGYISSESDGTCTKAFSQLLTFLGHRYPKIRKAAADQVYLVLLQNDDLIVSENMDKAQELLAETCWEGDVEEARRRRSEINEMAGFRVTTSQKSGKQETRTVAASTDENRSYSSLVDFSGY

SEQ ID NO: 74243 - protein, 214 aa, Zea mays
  Coding DNA Sequence Number=SeqID_30868
MVMGFNRISEVHGQLPESIAPAPEFSRSVSMEGESADASGPPASGFADADSASRDRTREVRASWEPEGRAPPASECSTRWPREGGEHAGAGGCGRAAIAGSARRGSWAKGVEIGLGAGPNARKLFCQNDFHAFSTISITESCRRVRVHVQTSAEGAAAPSALFPPSAESGPASDGDTGGRISASKEDASTALGPSQPGSAQGFRPERTPRLAAP

SEQ ID NO: 74244 - protein, 383 aa, Zea mays
  Coding DNA Sequence Number=SeqID_30869
  Gene Ontology: Mol. function=methionyl aminopeptidase activity; Cellular component=cytoplasm; Biological process=proteolysis
  Homolog annotation: Hit_ID=A3C6C4; Match level="QueryCoverage=86%, HitCoverage=90%, E-value=1e-126, Identity=64%"; Hit description =Methionine aminopeptidase
  Pfam annotation: Domain name=Peptidase_M24; Domain location=140-346; Score=-38.4; E_value=2.1e-06; Accession=PF00557.15; Description =metallopeptidase family M24
  Pfam annotation: Domain name=zf-MYND; Domain location=12-55; Score= -0.4; E_value=0.053; Accession=PF01753.9; Description=MYND finger
  Pfam module annotation: Pfam domain module=Peptidase_M24::zf-MYND; Domain location=140-346::12-55
MEKGASEASAPCARCGKPAQLQCPKCAELKLPRENAAFCTQDCFRAAWSSHKSVHPKPGALASQQSPEGWKYCLRKGRGRALQLPRFEWTGPLRPYPISKMRVVPDEIEKPDWALDGIPKIEPDSDLQKRVEIKTPELIERMRETCRIAREVLDAAARVIKPGITTDEIDRVVHEETIARGLSMKSFAMEFQMPDPFISEVIIKETSQELLCLITAHLGFPFYQGKLVHFPLKNGIAKLALNDAVREGKLEDGDIVNVDVTVYYKGVHGDLNETYFVGNVDEASKQLVKSYCGHGIGELFHCAPNIPHYSRVWNDRLWPDDWTAVTTDGDRHRMRSFDGTVTLITRRFSMVETVIGHPNSNKKVILTNRGCKIFVLLFISQSS

SEQ ID NO: 74245 - protein, 183 aa, Zea mays
  Coding DNA Sequence Number=SeqID_30870
  Gene Ontology: Mol. function=metalloendopeptidase activity; Cellular component=membrane; Biological process=proteolysis
  Homolog annotation: Hit_ID=Q6EPN8; Match level="QueryCoverage=50%, HitCoverage=21%, E-value=2e-41, Identity=91%"; Hit description =Putative Ste24p
  Pfam annotation: Domain name=Peptidase_M48; Domain location=1-127; Score=-51.2; E_value=0.099; Accession=PF01435.9; Description =Peptidase family M48
MPSGNQTMTFVAVQLLMILQFGGYTLVRNSKVLFESFGFEDQPIIIGLIIFQHTIIPIQHLLSFCLNLVSKAFEFQADAFAKNLGYAPQLRAALVKLQRDASLWRVEMRTDLTLKKLLGICGNGGSLLLHVDERQRHELTTHIGRTSREHAGRGHIILLTGYGPPGVGTTGRPRDNKLIISRA

SEQ ID NO: 74246 - protein, 118 aa, Zea mays
  Coding DNA Sequence Number=SeqID_30871
  Subcellular localization annotation: CTP_CleavageSite=65; ConfidenceScore=5.47e-01
MACPTPVDESLRPTPVDSLSVSLKRAANRFSLLSVSVSVSSNTPHPTPHTVYDTWGPPTGARTQRAAERREKAWKWGVQGHGVYFAERDAKPAGERNSASDRAKCGCGVGWGALLELA

SEQ ID NO: 74247 - protein, 307 aa, Zea mays
  Coding DNA Sequence Number=SeqID_30872
MARLRHTARKSVIPFLPSRLAERPLRRPVAGQSSHLERLHHRLREEQERRRQEQQSSSLSLHQEIESVRSCSPVLSLEPPPAPPLGVPASGVAAGGDPDDGGGDDSSSHDTDFSANPEPEGWVARPITRDAARGIVAGVYPDRWEATCLVRCPEDSLQGAEACSEHYSISERDSAEAAMQDAARRALSHYCSVFGGAADGLDLKYYPRRSSGSTGGVIVSPVGEGNPRLSSTVNLAAVLNTELDHALDELSRARAEIALLRAERAERRFLDGGSPAPVGTQHPYRSPQRGHQSYGNPACKTKINLEP

SEQ ID NO: 74248 - protein, 157 aa, Zea mays
  Coding DNA Sequence Number=SeqID_30873
  Subcellular localization annotation: CTP_CleavageSite=66; ConfidenceScore=5.65e-01
MEISDASWRRSGGRQTRPSLTRRLRRPRPKWRGRRAVSPANAPRSWRQGSTPCAAAWTRSSPLHARRSSGRTRSLWTHTASWEELLVLLTIVTGFMSFAFLVTCKGAMNALSREGCSHYEVFDRADENFEREIFRVEDPMVKQSTGALFDRMWGPHG

SEQ ID NO: 74249 - protein, 183 aa, Zea mays
  Coding DNA Sequence Number=SeqID_30874
MDEGWSEGWRLCLRPNNCLLIDDPLTGHMPRHGWYPRKSPSIEVGRERMFASHFEINKLVCERCFASLYEISEWDSAIDWAVNSHSFAWDCEAKALARVAELSAYLESLRVYCNTLHEEVHVLYARLHPDVPSNIAAMGARPSGIANEGPDGELDLFRPPPSMNLADERSPAAGNGAMKDEED

SEQ ID NO: 74250 - protein, 369 aa, Zea mays
  Coding DNA Sequence Number=SeqID_30875
  Homolog annotation: Hit_ID=Q6J9V9; Match level="QueryCoverage=29%, HitCoverage=29%, E-value=3e-26, Identity=57%"; Hit description =Putative uncharacterized protein
MQAACNRTKGAHPFDFDASSMEAQAHTSCNRRVGYYVRETAPPLAPVPHLLDCGTGAATRGDPAHDPTVPTEHIGHGSVSRGRRRDGRYGQKWAGGNGGGRQAKAAVKSSASSRPSWDSERTLSHGVKTTRPCSVPRTARARTTAALRTTRPVALTLQQDRRHLWQAKQATLHLRHNDHVKKGAPCHSISYPFPLPLSLSCHRDRERGYSERDPSPRRKRAPSPPTDHRFEGWPLGRVQQPPQSTWAPRPLLVRGSKAGPSEGFNGRLRPLGLRAHYWSGVRRLAPEGFDSRLKACRARDDPGYVRYITKALATLPRYPRTFPRPTGTICNRIPPEGGIEPSDPVKRGPGPANHPQVLLERASGPLADP

SEQ ID NO: 74251 - protein, 35 aa, Zea mays
  Coding DNA Sequence Number=SeqID_30876
  Homolog annotation: Hit_ID=Q8S474; Match level="QueryCoverage=71%, HitCoverage=3%, E-value=7e-07, Identity=96%"; Hit description =Putative pol protein
MKDAKPIKTPMGTNGHLDLDTGGSKPILRKFTLGP

SEQ ID NO: 74252 - protein, 148 aa, Zea mays
  Coding DNA Sequence Number=SeqID_30877
MGKNNKRKREPTPPSEDFGDSEYSEEEFSSESEGSPAPIPLRESSDDSDDSQGLAAEVWTYIRAVERSGIEGSDESEYSSDEEDSSEGGGGDGDDDDDDDDEGGGSNDGDGGDDGDGSGRGSSKDGDDDSSRGSNRGGSGRGSNRASG

SEQ ID NO: 74253 - protein, 313 aa, Zea mays
  Coding DNA Sequence Number=SeqID_30878
  Homolog annotation: Hit_ID=Q6ZCG3; Match level="QueryCoverage=99%, HitCoverage=99%, E-value=1e-102, Identity=66%"; Hit description =Putative uncharacterized protein P0486F07.20
MAAAQPKPAKRLGGMAEALAIAADLGFPASTTQEDQTSSDKSDDLVKVFEGTDCRAEEHCQLASGATGKKGESKWLLEPALKLATWSRSLALAPGGPSVGLVKKEKNDNVIFMKFCLPQDDKNIAHLTHVSEMEKKCESLARMTAILKDVIQNKDRIIARLQQPYSLDCIPVEAEYQKQFSELLLKAASDYGALTASVGDFQWSQNFRESPAVWGEMLRPIPAALASCTRFFEAMSAMRESFSTLQKLRVGHSSLSITPSDSSDDSKFLTPPQWRDGSILDSWKQMDDINLESSGIDAMNQRRLSWPSIKRDP

SEQ ID NO: 74254 - protein, 72 aa, Zea mays
  Coding DNA Sequence Number=SeqID_30879
MKPLRKCIILLKMNRIEDPNTGSFVKKACSMKMDGCRLLDGLVVVPRELFKGDCEEAAVVIVRGVVLASPER

SEQ ID NO: 74255 - protein, 40 aa, Zea mays
  Coding DNA Sequence Number=SeqID_30880
MSIPQHVNDHVTGMVCNCCAGSLQSLGSASSWLKVLHSST

SEQ ID NO: 74256 - protein, 241 aa, Zea mays
  Coding DNA Sequence Number=SeqID_30881
  Gene Ontology: Mol. function=thiosulfate sulfurtransferase activity; Cellular component=mitochondrion; Biological process=sulfate transport
  Homolog annotation: Hit_ID=A2ZMK4; Match level="QueryCoverage=57%, HitCoverage=28%, E-value=1e-34, Identity=58%"; Hit description =Putative uncharacterized protein
MALGKEPNSGSDDHDRRADDLKILYKAYAIEVLSDGIVDDKKEVLYMFWKEIYRQKLQQFVADGELSKEEVEALMAFQVRLCIPQETVDAAHTEICGQLFKKVGPTTFEAKLQPHLLWSLDQVKENIKTQTHQLIDARSKPRLHAFGSFYDCLKVCSSLFSFERHNNFLSRCNEIIPQCAAAQCILFDGAVPEPRKGIRSGHVPGSKCVPFPQVLDSSQKLLPPDELRKLFEQEVTTHAAI

SEQ ID NO: 74257 - protein, 90 aa, Zea mays
  Coding DNA Sequence Number=SeqID_30882
MERELGGRGHGDELGEVRNRGQEAGARWKDGKLEQRLSTCRTTARENRDKEKGSLAEEETSKFPTPSPVLDERDMHQLALEHVKNINKTC

SEQ ID NO: 74258 - protein, 71 aa, Zea mays
  Coding DNA Sequence Number=SeqID_30883
MTQLFEFYKAEDPEHLFGEGKDGWFTDGDKDDGFNYGNGKWYSFRLERVNKKENSVEADLREFQDFDKFED

SEQ ID NO: 74259 - protein, 86 aa, Zea mays
  Coding DNA Sequence Number=SeqID_30884
MEGLGAKGNRGEHQGDAVLVTKGVSAGDQHDGHQSTRGQNTTAEQGVTRQETMASVGEPERWARTATRARCREAEQHIITAGTTAP

SEQ ID NO: 74260 - protein, 123 aa, Zea mays
  Coding DNA Sequence Number=SeqID_30885
MASGGEEMGGRSVFGQIRWCNSKARATLVRRSTKILIREWLLRLLRRMGIVVLTRQVVDRHPRLRQVMLQWVGMFSKRKTCDGGSIRALMGSTSEKMYLCQVMSHLIVIGVKRRWARPSYKSK

SEQ ID NO: 74261 - protein, 95 aa, Zea mays
  Coding DNA Sequence Number=SeqID_30886
  Subcellular localization annotation: CTP_CleavageSite=20; ConfidenceScore=5.48e-01
MPPTAPASSPPPAAPALPTRAARRNLPYFAWYASCRRRNLLLPVTRTGVIPCAIAQIVCMYWSFGVSLSKCCPCVLAMYVAIQADLSLYASGCTT

SEQ ID NO: 74262 - protein, 70 aa, Zea mays
  Coding DNA Sequence Number=SeqID_30887
MGASPTAPGKLGRRELAGRGAEGGACCSPEGGAGRASLVAVAAMKKKRQGRKKVAAGKMEGWECKNASTC

SEQ ID NO: 74263 - protein, 88 aa, Zea mays
  Coding DNA Sequence Number=SeqID_30888
MEWIALGVLEISPLWITPVTKQVRPPYQVATAATDEFAENEEEIEVTEEKTPPPSDSQAGNCFYFDICGSEPNSPTNEGKPRCICHLP

SEQ ID NO: 74264 - protein, 101 aa, Zea mays
  Coding DNA Sequence Number=SeqID_30889
MASTVQAVHKCYKGAGIRIYRPGRRGRMAPATARRNPRELEEVIGSEFAAARDLSVRQVRCLEVEGALTPWSHRQGYQRMHTDLVPVEFAARNCHELVYFE

SEQ ID NO: 74265 - protein, 333 aa, Zea mays
  Coding DNA Sequence Number=SeqID_30890
MVTTSSMVGRSKPGCGLCPTLSFKDLHHPCWGGGRGKSGPASAWAGDPLLPLAFGGGRHPPALRRRRPPAMRGKANCCCLARVQHSILRSGDCGRLHRGVAQHVARREGSTRVLGRSRSRSRGENGSEDLPVRFGAAAARWCGVGGQVAAVVGTEVVAAGEGFSTDGTVSATCAPGLRLFGFNGWFSSPARGHERGPSSGSVHPGAITAAVLSSETEVVAALLVQRSPASHPEFVVPQALRSPSARSALPLKASLAQFEILRPLCDELEPEAAVSAWTEAESAQKEASSTREHVASLAEEVEILLPVSSSEAGPDFAEGGNNAEGAAPPSVDV

SEQ ID NO: 74266 - protein, 370 aa, Zea mays
  Coding DNA Sequence Number=SeqID_30891
MASTVQAVHKCYKGASILIYRPGRRGWMAPATARRNPREPEEVIGSEFAVARDLSARQVRCLEVEGALTPWSHRQGYQRMHTDGDALVVGVTSVREGERVSLFVSPPSRATLLHEGPGPSFYRCKERVQGNDVSLVAWSVRAQGRARRRLLLRPRPGSGEDVIPPEVEDEAEPWGRARRRPPSEAEAEAEPWGRARRGPPSEAEVEAEPWGRARRSPPFEAEVEAEPWGRARRSFLLRLRLNLVVASLTLPGGTAVGAGRAALFSCQVGQWKGEVTAVTSTLSTEARWFVDVVNGLAVTGFARVAPESLHGARGRSRTVSTFIIRPFVAFPQGGRGESAMLPSEGAEHGVSSDLPDPVPFDRVRGLDASL

SEQ ID NO: 74267 - protein, 110 aa, Zea mays
  Coding DNA Sequence Number=SeqID_30892
  Homolog annotation: Hit_ID=Q6J9V9; Match level="QueryCoverage=42%, HitCoverage=16%, E-value=4e-07, Identity=61%"; Hit description =Putative uncharacterized protein
MAAADERKRRSNRLQAHVPFCSSRGALSHGTGKGDISKGILLREGSGPRALLLIRGSKAGPPRRVRQPPRALGLQAHYRSGVRRLAPRKGSTAASEHSGSAPTTDQGFEG

SEQ ID NO: 74268 - protein, 98 aa, Zea mays
  Coding DNA Sequence Number=SeqID_30893
MARQRNGRLQRSPAEATVRGQFAQSQSSRQKAHHTVNSACPVRAPDCPVPHEDKAPTIETVRTLDICVDAIVDINPQSITLNQRSKSDKYHKNKHSSS

SEQ ID NO: 74269 - protein, 122 aa, Zea mays
  Coding DNA Sequence Number=SeqID_30894
MAPVLRQGNHNMSSSSEEIHGSRRGAGNVEVIFLESHVVGGAPASSVADNTEPVSTSLAATDSSALAEKDIAALSPELRAQATDPKSTQGHRTLDGSLGGGQTLSHCKGLCSVYFLFEDSSF

SEQ ID NO: 74270 - protein, 200 aa, Zea mays
  Coding DNA Sequence Number=SeqID_30895
MQDESVATAQDTTSQGMGRAAGARERSAGTTEVETEQRMGELGPSWWPVSREGALALSGTWQGRRGGSTGAARSGLRLLLASCSGCSCFVLQTLGKAWKTFDKLFLESESQQRRLGELYIGKVNGRQLYTATDGPLSSVAFCRECDTRQSLLCRVSSYAKCFALGIRASGHQKLMRIAKCPSFSARFYKNRFGKNHPKST

SEQ ID NO: 74271 - protein, 132 aa, Zea mays
  Coding DNA Sequence Number=SeqID_30896
MALQRLRKREFMVCRPEAEPREAEEDGSAGAENSTRESGAGSSHNYVGRALGCVDRVPNYLALGRIDRSLDGTRSIFSYHKIESSNPYIEEVLRKVNIPVFDDEYQDFVVRYGNHLVAHIDLVKDHDQLEMV

SEQ ID NO: 74272 - protein, 188 aa, Zea mays
  Coding DNA Sequence Number=SeqID_30897
  Homolog annotation: Hit_ID=Q5Z9G5; Match level="QueryCoverage=65%, HitCoverage=60%, E-value=3e-15, Identity=36%"; Hit description =Putative uncharacterized protein P0655A07.24
  Pfam annotation: Domain name=Hin1; Domain location=59-163; Score=6.8; E_value=0.00043; Accession=PF07320.4; Description=Harpin-induced protein 1 (Hin1)
  Subcellular localization annotation: CTP_CleavageSite=62; ConfidenceScore=5.84e-01
MTRAPVSSRAPAAAALSSRRNGRRGGGARRRSLSVHDGTASGGTGRARRSGRRPARRTWAVRAASLNTLVYGQTGALDDVQLTVRVEARNGNAHSAAYFSRLECRLAFAGATLAGVPLGDAGSAAMEAALRDGVVPFRVEGEARTRWKVAGIVAIDQWTRLACQLRFFWPNGTALPFRCSSKSKFLFF

SEQ ID NO: 74273 - protein, 741 aa, Zea mays
  Coding DNA Sequence Number=SeqID_30898
  Subcellular localization annotation: CTP_CleavageSite=36; ConfidenceScore=5.04e-01
MTTSIGGAAAPSAPTPPSAESDPASDSDTDEGSPPRRKMSAPRLGHCRRGLLQEPGPSRRLDRSLRSLSQLSPEDISPAHGLGNPTPASAPPVDGPARLWPTKLLFEPTPPLSMMTPMPLALAHRRAAAGFSLTEQEKPWAARPTEPRDSYASGIRIPHSSPSARGNSHLVKRHNEQTLALKVPLQTELRFHSRGYEQPPHRRACGTTNSGRLASDLCSSSDGPGTDAAAGRLSFASPLKGREPDIKAKEPEVGPRVALTVSSAEKLSPAATTSAPTAASTCPPTPHRRAPAAPKRTGSNSSPSPAWLEGASSEELEDGFHPQKLEEEVARRPVREVELRLASLSAPARMMKILEAEGGAEVVARLASPHHQTDGDSPRLRPQPSRTESSPTRSKVLPLTTRGLGPTRHASWPRTEKAKPPRAERVTAQRLQRLLHFRPDQQMKGRTAMHAACNRTKGAHPFDFDASSMEAQAHTSCNRRADYYVRETTPPLAPVPRLLDCKTGAATRGNPAHGPTVPTKHIGHGLVCRGEGATVDMAKSGPTVMAAAGGWEQQSNRLQAHVPSYDSERALSHGVKTTRPCSVPRTAHARTTAAPRTTRPIALTLRQGRRHLWQAKQATLHLRHDDRVKKGIGKGDTPKGILLHEGSGPRALLLIRGSKAGPSKGLDSHLEALGLRAHYWSEVRRLAPQKAASGHLGYAPITDQGFVGWPPKGSTTALEHAERGMTLGTSDTWPRLGLRSR

SEQ ID NO: 74274 - protein, 139 aa, Zea mays
  Coding DNA Sequence Number=SeqID_30899
MGPRTAALPRDYIGSTKSVAGCVAPGRIAELVELGSSGNGIEREGIELTNRSHPAVTPSQTRAQQYKSVADTWPPLAMNVARNRGIGVTADQGPPVSARGVGKNGPHRCYLQMGQMKYLRPRFLTKWLLQILPPLTTHK

SEQ ID NO: 74275 - protein, 219 aa, Zea mays
  Coding DNA Sequence Number=SeqID_30900
MQAAHCGYEGSVNEAIKMFNPMVHAGFIQNMWHVPAICFVAVDNELCFLQCLYLPVQLHLAVEECLFGSFRVFSDSELWIWSTTRTKAESDEGRGQPKLNDSLVMLISYFMLYVSPSSLLVMFTKVFGAEDERIMAHRLALAALRCTVHSQCDCWLCIGYSALACSKSGAWSHPLVLPCRVCSCRSMMALPTGYHITISIEVLQRGVLCGVLYPMDCLW

SEQ ID NO: 74276 - protein, 130 aa, Zea mays
  Coding DNA Sequence Number=SeqID_30901
  Gene Ontology: Mol. function=aspartate-tRNA ligase activity; Cellular component=cytoplasm; Biological process=tRNA aminoacylation for protein translation
  Homolog annotation: Hit_ID=A2ZPD7; Match level="QueryCoverage=49%, HitCoverage=12%, E-value=4e-16, Identity=53%"; Hit description =Putative uncharacterized protein
MGDLILLAVGKQSLANEYRQIRLFISHKLEGIYTVLHHPFTAPNPKDMNDLPSTRALVYDMIYNGGGNYTSTGSVGLKPRTRVGDARRGRRHRVRPRSRAGGMMAGPSNDFDQLSAMVTVLLNLVNLPLR

SEQ ID NO: 74277 - protein, 159 aa, Zea mays
  Coding DNA Sequence Number=SeqID_30902
  Gene Ontology: Mol. function=aspartic-type endopeptidase activity; Biological process=RNA-dependent DNA replication
  Homolog annotation: Hit_ID=A2Y2J4; Match level="QueryCoverage=94%, HitCoverage=31%, E-value=9e-18, Identity=40%"; Hit description =Putative uncharacterized protein
MDPNVEIEECVTLIQFNELKQSIEAKQDLLAQDLQTLMAEIRGRRRLPDGVRNHDEDGEEDEGNYSRRASEHGRRNQSAAYGRGRGRNRRNNDNEESEFGDDQSQHRYGRRHHRGVNQEERFGKLKFTMPKFDGRYDPEDYFTWELKVEKSSAYIIIQR

SEQ ID NO: 74278 - protein, 302 aa, Zea mays
  Coding DNA Sequence Number=SeqID_30903
MARLRHTARKSVIPFLPSRLAERPLRRTVSGQSSHLERLHHRLCEEQERRRQHREQQGSSSPPQQEVESVRPRSSVAQLEAPPAPPRDAPAVGGATGGDPGGDPDDNDSDHSTESSEPQEAEGWVARPITRDAARGCHFHDALDTLLRQAFDRHTWSIEYRCVVYQHSRGERRLCRMQHACTLPVLFFVGGVADGLNLWYYPRRPTGSTESVVVSPVGEANPRLSSTVNLVAVLNTELDHSLDELSRARTEIAELRAELAERHHQEGGSPAPVGTQHPYRSPPRGHHTYGSPACKTRIDLDP

SEQ ID NO: 74279 - protein, 43 aa, Zea mays
  Coding DNA Sequence Number=SeqID_30904
MEAKSHHQAKQEGLTALAYNAPLTPTAAVQWSHLYPPYLEWET

SEQ ID NO: 74280 - protein, 88 aa, Zea mays
  Coding DNA Sequence Number=SeqID_30905
MEGEYEEASVHYWRVVARSEVAGGAPPTAASRTTAAMDGSSREWEGQRWERGEGMENVGECPGAVYIDGGGREGSDRRGQWQMFCNFY

SEQ ID NO: 74281 - protein, 263 aa, Zea mays
  Coding DNA Sequence Number=SeqID_30906
  Homolog annotation: Hit_ID=O48967; Match level="QueryCoverage=67%, HitCoverage=71%, E-value=2e-32, Identity=62%"; Hit description =Putative uncharacterized protein
  Subcellular localization annotation: CTP_CleavageSite=21; ConfidenceScore=5.08e-01
MAHSGSARARPRSSRRQHEVSASVRSPSVRAAPTEDLRAELNCRRVAEDAPASLERPEDLRAELNRRHVGEDARVSLERARERRQNLKGHNLDQDFVVVAPQTPRGARFQTGIPLAGVGCAALVDHLRATTWPSKFWPHLLDKYDVRQEPGETLWAFISRFTKGGKKKKKNRGHEKPWTAAPVVAVVAGGWNERNKRLRPQGGNSGTCHVHPNSHHSATECREIIKLAKRVSERREQSSKDGSPPRRWPGKERADEGAAAVGE

SEQ ID NO: 74282 - protein, 177 aa, Zea mays
  Coding DNA Sequence Number=SeqID_30907
MDEGTPLGGLESEDDAKPSHGLHAVLSSIWGQGYLAHKLRIRLPKDKDVRRPKQPGQSRRLTGPAGRGSGHGLTTIGTVQTSVGGAAAPSASTPPSTESDPASDSNTVGGSPPQRKMSAPRLGHRRQGLLQEPDPSRQLDRPLRSLSQLTPKDISPAHGLGSPTPGLVPPVDDLTKF

SEQ ID NO: 74283 - protein, 388 aa, Zea mays
  Coding DNA Sequence Number=SeqID_30908
MDKGKGHASSASAPGDSRGAEDERRHRLRRADGSFVTEPAQKRQWTTGVAEEMGSQAHDAQRHVSLPPPPPPPPLSGPPPPPPSRGDLPQGQQQQQGRRSRFQGQWMVQGPKASSPSTPKIAPPPPDARPTNGFGSQQQASAGSGAGVPPPAATETAPAASHAPTGDPAAAGPSSDSSAAAPALGGAATAEETPAGGSAPPPDTEVEAGGVSSSYPPPAPEEVEVVFGRRLRSGTEPEEALVPLPRVLSCAHQKVYARELEASRKENRLARREEALSQREAVATELRAKRSALDQILEEQRAQQTGAIERLQVWQQELDGKASEAALAEERLKAKEQSLDRRETDLARRETDLSRRETNLAFREEMLTRRGEMLAEHKLEAEAKEKEL

SEQ ID NO: 74284 - protein, 102 aa, Zea mays
  Coding DNA Sequence Number=SeqID_30909
MCECFYGLLGIVAGSRPTDCNGVCGRADCGELTAWCAWAGGHYSEAGGFVGDCGGVCVVRGMVCGGGRIAAALAALVAWFVEVFGSAAVFVGGGEGGGGLQY

SEQ ID NO: 74285 - protein, 201 aa, Zea mays
  Coding DNA Sequence Number=SeqID_30910
MVTTSSWVGKSNKNCDLGPTLSFKDVHHPHWGGGQAEPALYLPCGPAGHPLPRRSGVEALTGPAGGADLDNVGLIDGGRRHLQRVGVVGRAPGGPSCRRAATAPCAREDHPRYHALLGRRSCSGVALLLHWDGALSQRPTDPHSNPLVSPAIGAEAEAAREVLVADGITAAIRAPGLRFFVLVLAPRASAWARARLQQRPP

SEQ ID NO: 74286 - protein, 59 aa, Zea mays
  Coding DNA Sequence Number=SeqID_30911
MNKNTRDTRFIPRFGHTTKVPYFLVEAPTKSRVSFNPNPPFADHKDFEKTEVNQGIWEF

SEQ ID NO: 74287 - protein, 214 aa, Zea mays
  Coding DNA Sequence Number=SeqID_30912
  Gene Ontology: Mol. function=transferase activity, transferring phosphorus-containing groups; Cellular component=chloroplast; Biological process=phosphorylation
  Homolog annotation: Hit_ID=A3B3X0; Match level="QueryCoverage=37%, HitCoverage=9%, E-value=4e-24, Identity=68%"; Hit description =Putative uncharacterized protein
MQVRAIFEAAIAMTNQGVQVFPEIMELGHQVALIRQVANKVFTSMGKTIGYKIGMMIEIPRAALAADEIDAIRGWLDGGNNASPVISQPLAHRERAPNITGIGSKNSPPPELLDLIRDVRTLNALVETGSKKNTGEKQTPEEIDASRREESGLRATVATRMRRALHACCPNPCWSVRSDLLSACVWDISPPRSDRAWFQGLGDEERPGSSPCRA

SEQ ID NO: 74288 - protein, 131 aa, Zea mays
  Coding DNA Sequence Number=SeqID_30913
  Gene Ontology: Mol. function=nucleotidyltransferase activity; Cellular component=soluble fraction; Biological process=biosynthetic process
  Homolog annotation: Hit_ID=Q7EYE4; Match level="QueryCoverage=75%, HitCoverage=48%, E-value=4e-30, Identity=57%"; Hit description =Putative CTP:phosphorylcholine cytidylyltransferase
MTIDEHYESLQHCKNADTSGPANDVYELVRTSELKRTKGISTSDIITTILKDYNQYIMWNLTCGYNHKDLGISYVKENQLMVNMGISKLREKVKEQQEKLCGGDIHPHRMNNKQTQIPVTTQCGIVDPFNP

SEQ ID NO: 74289 - protein, 124 aa, Zea mays
  Coding DNA Sequence Number=SeqID_30914
MSGSRARLRRSGAEETTVVAAPQRRHKIEKARFVAAGVVGEDDRGKDGKVRHARRRKWWRCGAEILGGGGASGAEDVRVGGRTVGVDAYTLFLRSSRDNKRTIFHHYLMSCVCILREGNGEHVA

SEQ ID NO: 74290 - protein, 195 aa, Zea mays
  Coding DNA Sequence Number=SeqID_30915
  Subcellular localization annotation: CTP_CleavageSite=71; ConfidenceScore=5.16e-01
MALHKLYDDGGPPALLRKQDNVSRDSTAPTAVPPSGSAAPPTATTSRQQALCYTPIVHLDPLLTTIKGRTRAFSEKVGRAGPRTGQALSWGRSLPSPAWTLVTPLLQAHLTWARDEHEGRGTYTSLTLDSGHLASPPFALAHALDPSGLGHATHSLVGLGTPLSRNADRPRRTTATAIEPAVSTAAQEQAKAQCG

SEQ ID NO: 74291 - protein, 92 aa, Zea mays
  Coding DNA Sequence Number=SeqID_30916
  Subcellular localization annotation: CTP_CleavageSite=36; ConfidenceScore=5.30e-01
MALLSAATPISLLALSIAVTLLAPPRSNCCPPYSTSSSSPPPRLWCMLGHHDVPAPMKLPLARLPGAKSVRRAMCLGLWSKDIGALCPCSPL

SEQ ID NO: 74292 - protein, 137 aa, Zea mays
  Coding DNA Sequence Number=SeqID_30917
MASPNDLALHNGRILSLLFAQGLSGHSDWLLGQEGEVSDYSTFDTDFLSVGCAGDTTAAAEGTTFGIVADADTGSGVDVPEVIIALSIRCWKVGKAFWNVVPVKVVSELLLSDGFRVGVGGENIYSTHIGGGGGGNG

SEQ ID NO: 74293 - protein, 80 aa, Zea mays
  Coding DNA Sequence Number=SeqID_30918
MAQGHISLSHVSQLKRCVRVPKEVLIKPEMEIELDLSYKEHHVKVLDCKDRSIHRKTIRKTTKDYLNKNYLEFLPKGVGT

SEQ ID NO: 74294 - protein, 121 aa, Zea mays
  Coding DNA Sequence Number=SeqID_30919
MCTGEAFFSDVVDSTILMRYSLGSSSGRLHGTLGELTVELDWAEHDQSRLTMAASARRQGQRVWSLSELGTGSGKCGSWLRVQRSAGTDDMEVADRGWGARAQVGCDPVCQPRSGMWRRSV

SEQ ID NO: 74295 - protein, 158 aa, Zea mays
  Coding DNA Sequence Number=SeqID_30920
  Subcellular localization annotation: CTP_CleavageSite=41; ConfidenceScore=5.56e-01
MASGRTLLQRAPRPRPHSRGEDKLSKPKSRRPGARMVAVIPSATRTSSATTTLAPTTEAICPPADPHSDPPGRASTDLRVEASYRSKGRTAQEHERRPSSARRIGRSSGARGAITRSCGGRGHSEPSPEPAEPASPNALKLTTLATDRPRVVGVCPSR

SEQ ID NO: 74296 - protein, 292 aa, Zea mays
  Coding DNA Sequence Number=SeqID_30921
  Gene Ontology: Mol. function=nucleic acid binding; Cellular component= ribonucleoprotein complex; Biological process=positive regulation of growth rate
  Homolog annotation: Hit_ID=Q6YVH4; Match level="QueryCoverage=65%, HitCoverage=50%, E-value=9e-84, Identity=80%"; Hit description =Putative heterogeneous nuclearribonucleoprotein A2
  Pfam annotation: Domain name=NID; Domain location=137-209; Score= -0.5; E_value=0.048; Accession=PF07320.4; Description=NmiIFP 35 domain (NID)
  Pfam annotation: Domain name=RRM_1; Domain location=183-254; Score =85.5; E_value=1.8e-22; Accession=PF00076.13; Description=RNA recognition motif. (a.k.a. RRM, RBD,
  Pfam annotation: Domain name=RRM_1; Domain location=95-164; Score =76.2; E_value=1e-19; Accession=PF00076.13; Description=RNA recognition motif. (a.k.a. RRM, RBD,
  Pfam module annotation: Pfam domain module=NID::RRM_1::RRM_1; Domain location=137-209::183-254::95-164
MAGYGEENQNAMNGYEEEEEEEEVEEVEEVYEEEEEGDGEGEGDEGAAAEAAAMAAETRSVDGGRGLAEAVGNVDAGGEDERDADSSGGDASGKVFVGGVAWETTEETFTKHFQKYGAITDSVIMKDKHTRMPRGFGFVTFSDPSVLDRVLEDEHVIDGRTVEVKRTVPKELSSKDGPKTKKIFVGGIPPSLTEDKLKEHFSSYGKVVEHQIMLDHSTGRSRGFGFVTFESEDAVERVMSEGRMHDLGGKQVTSLSLIVFCVGKYHWHPQLAAQPEKLQQGSEKFLPFTDSI

SEQ ID NO: 74297 - protein, 81 aa, Zea mays
  Coding DNA Sequence Number=SeqID_30922
MENHPGKQCYRKGGMGHPWPNGFSRTSGTLERPRSATLPRLLGRDHMGLLDPLRNGVAWLVGKDVQSLQSVKLVYQSCSQS

SEQ ID NO: 74298 - protein, 353 aa, Zea mays
  Coding DNA Sequence Number=SeqID_30923
  Gene Ontology: Mol. function=aminoacyl-tRNA ligase activity
  Homolog annotation: Hit_ID=A2YJ32; Match level="QueryCoverage=47%, HitCoverage=26%, E-value=5e-29, Identity=47%"; Hit description =Putative uncharacterized protein
MNKASKENQMTTETAMVNKKMRHLIADVDSNFDSDDDIMGEAVYDDEYLRSCKQNKPSSAFEEDEEFHLEEDAEDDDEEEEYSLSTSEDLEELQRHKKLETRDRRSTKLRSLGEIQKGLRRSKRSFCPRINYRQYDFLDSDTEPRKVRKPNASDPDAGSDAENDMKLSTSGQEQEEEEDDSHGGQNGNNANDKMEEGHTAAENKNRTRRRGEGADTTAAARLDQPCTQAPIDAARPTAPARPEAAGPHPKHRVVTPMPRRSTKPQPRKPRRPDRAQLLAATSLPSPTRTPPLPARPTPLAEQDRAAVRSRDARRTPEPDALQTEDRRDPDTEDSTTEQPRPFVSRVMEIYCVR

SEQ ID NO: 74299 - protein, 255 aa, Zea mays
  Coding DNA Sequence Number=SeqID_30924
MLFTPITELDPRNINVVIRVRVIRKWEFRGATNDGPLRHINLILADEQGTAIHAEIPAALATEKGSLVQMMPLLKSRFGADQASGFSTDNVCNQGNNKPIVIMFFGCLAKQFKGQSYLSGTAATTWYFNPDIPEAQEYYIKKRKNGYPNSGYPYPTRISGHRALSAPPLYHDSYKIANGGFHLAPNAKSLHLKPPLDTAVRRVLEYYDASKNSENVDEYTDRLTNNELSSPTKRIKHTQVSKAMPDSTCSKNDNI

SEQ ID NO: 74300 - protein, 308 aa, Zea mays
  Coding DNA Sequence Number=SeqID_30925
  Gene Ontology: Mol. function=phospholipase D activity; Cellular component=cytoplasmic vesicle; Biological process=phosphatidylcholine metabolic process
  Homolog annotation: Hit_ID=Q9SSQ9; Match level="QueryCoverage=37%, HitCoverage=13%, E-value=4e-28, Identity=57%"; Hit description =Phospholipase D alpha 2
MSWGHIACQKGGQAACPFRNKCAAQSPYVMLRPLAYVTDNKPCGSIRPSTEWGAEALRIEPGHASIPNSCLGHGTSSHGTLLWVVRSSLGGVRTLSNGSGLLYFGGPGCAYRGPVPSGPDGVVSENATLTAHEILLGLFSTRLRVAAQASCLHTVARGTPNPGYRQGLEEQAFVNDNMAWMITNEQWSSGCRPRWHRRILGFAGGLDLCDGHYDMLCHSLFWTPDDAHHNDFHQPNFTIAVIAKGGLKEPCMHEIHCFLEVSMALDVLYNFEQWWHKQGGKDLLIQGGTKFVRPSSESRSYCWFKCRT

SEQ ID NO: 74301 - protein, 161 aa, Zea mays
  Coding DNA Sequence Number=SeqID_30926
  Subcellular localization annotation: CTP_CleavageSite=41; ConfidenceScore=5.41e-01
MAHRTVSGAPTTSPGRWVPTIGALTAGPAWMSGGTPDMYCRVSGNRCKPNSLSATLLRTIPWNELPFFGTAPRLSDLPAFVKEVLNSIAKLASLGLAYFHRLEGFLPAGGEVADPLLVQYFAAGLGPDPGFPTVHEPSAIVLGRLVTMCISGCNLTPESAA

SEQ ID NO: 74302 - protein, 160 aa, Zea mays
  Coding DNA Sequence Number=SeqID_30927
MSWGHIACQKGGQAVCPFRNKCATQSPYVMLRPLAYVTDNKPCGSIRPSTEWGAEALRIEPGHASIPDPCLGHVTSSPGTLLWVVRSSLDGVRTLSNGSGLLYFGGSGLCVQGSYAFWARWHCLRERHLNCSRDTPGAVLRAAKGSRTGIVPSYRSKGYP

SEQ ID NO: 74303 - protein, 170 aa, Zea mays
  Coding DNA Sequence Number=SeqID_30928
  Subcellular localization annotation: CTP_CleavageSite=38; ConfidenceScore=5.27e-01
MAATSAPVAHRRRWLPHRVQKGPRPLPPTGVRTRPSKNADATSAAYDVLYNPLGGIRAGRPVAQGTPRMRQTCARRDRRPCGGRTPAPHLAAGGGAGGGAEAIQAKELDTRQLTAPAAGRPRVAKVRLLRKAGEHPSPPNARGRSGSPSLAEGRTPTRLAFHPSEDDEHP

SEQ ID NO: 74304 - protein, 105 aa, Zea mays
  Coding DNA Sequence Number=SeqID_30929
  Gene Ontology: Mol. function=catalytic activity
  Homolog annotation: Hit_ID=A3B342; Match level="QueryCoverage=55%, HitCoverage=18%, E-value=2e-13, Identity=65%"; Hit description =Putative uncharacterized protein
MNPCFLLQTPNKLHEQEAFALSSLIDDEKKLDDWGYYLADEPGVHFVWQPNQESSVLVMLRAFDDYYIEDCGVILAPEVTQRRIDNSDQFVILATVKVAFVPACL

SEQ ID NO: 74305 - protein, 319 aa, Zea mays
  Coding DNA Sequence Number=SeqID_30930
  Gene Ontology: Mol. function=hydrolase activity; Cellular component =nucleus; Biological process=metabolic process
  Homolog annotation: Hit_ID=A2YIF6; Match level="QueryCoverage=90%, HitCoverage=93%, E-value=9e-67, Identity=47%"; Hit description =Putative uncharacterized protein
  Pfam annotation: Domain name=Abhydrolase_3; Domain location=90-291; Score=183.4; E_value=5.7e-52; Accession=PF07859.4; Description =alphabeta hydrolase fold
MPAVSAATGASSPPAAANAVVEDIYGFLRVLGDGTVLRSPEEPAFCPASFPSSHPSVQWKEAVYDKPNNLRVRMYKPSAAGRTREKLPVLVHFHGGGFCLGSCTWANVHAFCLRLAAEAGAVVLSAGRPPPPTDGSPRPPTSARVFVTGDSAGGNIAHHLAVRAEADADVDVLRPVTVRGYVLLMPFFGGVRRTRSEAKCPAEVLLNLDLFDRFWRLALPPGATRDHPAANPFGPDSPDLGSVHFRAPLLVVVGGLDMMRDRTVDYAQRLAAMGKPVELVEFAGKPHGFYLHEPGSEATGELIGLVSRFLRSCEARAGA

SEQ ID NO: 74306 - protein, 84 aa, Zea mays
  Coding DNA Sequence Number=SeqID_30931
MGGLLLELKLLDCFGKLLGQEGEVPSCSDAGNDFLPTRCSDGTAATTEGTASGTAAGADAGDLEVIIALSIKCWKVGKVWFISW

SEQ ID NO: 74307 - protein, 88 aa, Zea mays
  Coding DNA Sequence Number=SeqID_30932
MASPSPVLLRAIQALRELPELNKKTTQNPILGGKIGILFDQDCNLADGEYILVPEQGAAQEVAPDPAPEPAPEDLPATALEGKPRFYA

SEQ ID NO: 74308 - protein, 148 aa, Zea mays
  Coding DNA Sequence Number=SeqID_30933
MAVWSGRAAPREWGAPWRGGSSCCNPWTWSQLHCVEEEQGGHSATIIAGEWRSVVDPDTAMELCSAMGEKLQGRVGAWSAERHGQTREAAGFLLPENRGTEGGDPWLASSESGDLQGGSAMGKLGLEPWRREEERAPCCCAWEKEEEG

SEQ ID NO: 74309 - protein, 218 aa, Zea mays
  Coding DNA Sequence Number=SeqID_30934
MRVEWDTLRWLIRGTKGVVGFAMARIRCFARKSVIPFLPSRLVECPLRRTVTDQWESTCLVRHPNDDLRGAEAFSEHYSITERDTTKAAMQDATRRALLQYCSLFSGVVDGLDIKYYHHRSTDSARGVIVSPVGEGNPRLNNMVNLVTVLNNELDHALDELGKVQAEVAELHDERATCHYQNGGSPAPVGILHPYRSPPRGRFDYGTPECRTQIDLDP

SEQ ID NO: 74310 - protein, 57 aa, Zea mays
  Coding DNA Sequence Number=SeqID_30935
MTKISVTQLKLFQKQFSGEQWTEEDLTFSEPAAGDPCAMIHVGFMIHAQGEVGNTRG

SEQ ID NO: 74311 - protein, 116 aa, Zea mays
  Coding DNA Sequence Number=SeqID_30936
MAITWRSWEHVVQWDVPCYSSTDRGTKKGLGCEEEECLHLGRRVKGVEVRANDGGRQPRREQEGVLPCWLEEGRCWSLLLGRRSSRQKKLWQSDTEVIFSFAEDTQDKDLAYKQYC

SEQ ID NO: 74312 - protein, 57 aa, Zea mays
  Coding DNA Sequence Number=SeqID_30937
  Subcellular localization annotation: CTP_CleavageSite=14; ConfidenceScore=5.00e-01
MEHRGFVVNPSVVLAGRIKSRCMRNCSSACHRRRKSHRPVGSLFLASIPENSYELQI

SEQ ID NO: 74313 - protein, 283 aa, Zea mays
  Coding DNA Sequence Number=SeqID_30938
MTVLTADDSLHRDSCYQRPDSCPGWMDNLVGMMWQKVGGMFSKIKLDGGSITAVMGSTSEKMYLCQVRKRQIFVASALRWCQRKNARNEVREERILHLGLLCKNLSGGVFASLESSSGSNDPIGDLEAQVELLQSELRHRNDLWVADGERINTLRAAIRYLQDQLAKRDLALDWAVNSRPFAWAKEAKARARVEKLSSAMDNLQVSYNTLHEEVHVLYSQLHPNVPADPAGMEAGPSHVAGEALDGELDLFRPPPSMKLVDEWSSPPDSKATKSEKKWLIKCP

SEQ ID NO: 74314 - protein, 102 aa, Zea mays
  Coding DNA Sequence Number=SeqID_30939
MKPHRRCPAVSALCRPKSLLFMILMFQMGCLMLGAGRGRQERGHLASSYSSGSGRLDTGIVPKALPCSLDYKLVTHLRNEDSREKPRSETLAIHLGSEYGSS

SEQ ID NO: 74315 - protein, 209 aa, Zea mays
  Coding DNA Sequence Number=SeqID_30940
MASRVVETDSRSRAPQSQVEQLHQSLDVSFNERCIDAAHILELLAENKQLQKELVEQKERLAATMRSQEVAFVREDHLRGRFQDLVIACNNLEDYSNELHEEFHHLYYQLHPNDASGAAKAEGGVVLADGGEPDADLEEAAPMLVLGGESPGCIDASEVASDTDGYVDFGIVMNKTPFTCLMYKSLYLRHNNFTKLPVLGGPTLSPYNL

SEQ ID NO: 74316 - protein, 233 aa, Zea mays
  Coding DNA Sequence Number=SeqID_30941
MAVMDSTLEKMYLCQDRANVGLLTEDPLTGPMPRHGAAPAPGRGAAAPALPRRSPAPAPSLRGALDASARPGALPRPLPLSSAWPTATALAVPARGPIPCPRRCVPAPPGELPCPRPQRPDLGGLRSAPGPPWPRSVPAAVCLPRAARRPARALGLGPAPASRPAPAQRGPGSARLRLARPCCPCVAWRVRSSAPVCARPVRDASARPCARVLAWCVWCFGTSRRALGALIYP

SEQ ID NO: 74317 - protein, 27 aa, Zea mays
  Coding DNA Sequence Number=SeqID_30942
MAGVLVEAFCAAIIGASRAGLNKSISG

SEQ ID NO: 74318 - protein, 109 aa, Zea mays
  Coding DNA Sequence Number=SeqID_30943
MIGAANADFPDSPAARFELPTAPSLSGNGDGDGLDEMKHLLRSPTNQRFNELRQARRQIGPSPERFLRSRGSTGQTPGSDARATREREEEAVRRGQIKYSNQIFQYEKM

SEQ ID NO: 74319 - protein, 422 aa, Zea mays
  Coding DNA Sequence Number=SeqID_30944
  Homolog annotation: Hit_ID=Q6QP51; Match level="QueryCoverage=13%, HitCoverage=38%, E-value=2e-09, Identity=45%"; Hit description =Putative growth-regulating factor 1
  Subcellular localization annotation: CTP_CleavageSite=45; ConfidenceScore=5.41e-01
MVAFQGGHPPFKGNSPHLRPQPSRTESSPTRSKVFHLRHKGWVPRVMQADPGQKEPKPPRTVHATAQRLQAFLHFRPDQRVKERTAMQAACNRTKGRTLSTSTRPAWRPRPTRHITDAPVTTCKKLHRHSRQYRAFSTAEPVPRLEATLRMTQQCQPSTSVTSQSAAGEGTTVDTARNGPAAMAVAGGRKQRSSRQQAHVPSWDSERTLSHGVKTTRPCSVPRTARARTTAAPRATHPVALILRQDRRHLWQAKQATLHLRHNDRVKKGTGKGDTPKGILLREGSEPRAPLLIRGSKAGPSEGFNSRLRALGLRAHYWSEVRRLAPRKGSIAVSGHSGSAPTTDQGFVGWPPKGSDSRLRACRARDDPGYVRYITKARATLPRVRLTATKSSLRRHRKLRLARPQGSTPVSASDDGLRLARP

SEQ ID NO: 74320 - protein, 66 aa, Zea mays
  Coding DNA Sequence Number=SeqID_30945
MDAGSVLHLADQIDKDNGSRREAGEDKSYRDALGPEFHYLGSWEAEHVSEGEGQVVDAAIDEIDKD

SEQ ID NO: 74321 - protein, 200 aa, Zea mays
  Coding DNA Sequence Number=SeqID_30946
  Gene Ontology: Mol. function=ribonuclease H activity; Cellular component=nucleus; Biological process=RNA-dependent DNA replication
  Homolog annotation: Hit_ID=A3B2V8; Match level="QueryCoverage=92%, HitCoverage=45%, E-value=5e-66, Identity=67%"; Hit description =Putative uncharacterized protein
  Pfam annotation: Domain name=RnaseH; Domain location=46-167; Score= -8.2; E_value=0.00018; Accession=PF00075.15; Description=RNase H
MAAPNDPNLYHHASQLSPWARPYHPGRVILVQWSPPPRGWYKLNFDGSVYHDGSARASIGGAIRDSDGRVVLAFAEPTEHSTVGIVEARAMARGLCLALGLNLQRVVVEGDDLVLVRLLRSEDTQTRIPVALQEEIHELLRCFEGCDVRHVYREGNQVAHTLCRQAYHCPGVWVGTVPFVVFDKAEEDRRGVLHERAVVR

SEQ ID NO: 74322 - protein, 245 aa, Zea mays
  Coding DNA Sequence Number=SeqID_30947
  Subcellular localization annotation: CTP_CleavageSite=34; ConfidenceScore=5.05e-01
MEEKHLHVFDASYPRQSTLARAPACPVPRPSQASAMARARAYKTLPDFDCTLPRTLKPHRSPARRRLPVRSVSAAAQSLCHRRPASRAIPNSVQPSEKTVHTSVKLPERGIGVCFAGEASPRSPELSTPPEYVDRVNHSTILRFLVHTVATLPREAHRALGLNQFAVVWPVHSPPTRTPACARGPGDSGHPRRQVVPRRDRRSLPEPTPPFAGPPSPPIDYEPDIRSTNQKRGDEALAEPVTATF

SEQ ID NO: 74323 - protein, 320 aa, Zea mays
  Coding DNA Sequence Number=SeqID_30948
  Gene Ontology: Mol. function=oxidoreductase activity; Cellular component=integral to membrane; Biological process=electron transport
  Homolog annotation: Hit_ID=Q5ZAJ0; Match level="QueryCoverage=97%, HitCoverage=31%, E-value=4e-93, Identity=63%"; Hit description =Respiratory burst oxidase protein B
  Pfam annotation: Domain name=NADPH_Ox; Domain location=123-249; Score= 178.9; E_value=1.3e-50; Accession=PF08414.1; Description=Respiratory burst NADPH oxidase
  Pfam annotation: Domain name=efhand; Domain location=250-278; Score =27.8; E_value=3.9e-05; Accession=PF00036.23; Description=EF hand
  Pfam module annotation: Pfam domain module=NADPH_Ox::efhand; Domain location=123-249::250-278
MADTVTGSSRRSQDDTATLIPHSGNLGGSSRKGVKAARFKDDDEVVEITIVQRDSMAIEDVRVVDDGGSGHGGGFDGLSLVSPSSSRSGKLASKFRQVKNGLKMNNSSNKAPQTQLGKNVRKRLDRSKSGAAVALKGLQFVTAKVGHDGWAAVEKRFNQLQVDGVLLRSRFGKCIGNFSGPIEFVSAYSYLNNTNTSIALDCAGMDGSDEFAMQVFDSLARKRGITKQVLTKDELKDFWDQLSDQGFDNRLRTFFDMVDKNADGRITAEEVKEIISLSASANKLSKLKERADEYTALIMEELDRDNLGYIEVYQMPYSYS

SEQ ID NO: 74324 - protein, 68 aa, Zea mays
  Coding DNA Sequence Number=SeqID_30949
MQESLAGPPSQQNPPEGLPTLTTPLLPLPLSDFIILWTGHMITREHRGNGASIPKTQSYSRMDGGLNV

SEQ ID NO: 74325 - protein, 121 aa, Zea mays
  Coding DNA Sequence Number=SeqID_30950
  Gene Ontology: Mol. function=protein serine/threonine kinase activity; Biological process=protein amino acid phosphorylation
  Homolog annotation: Hit_ID=Q6RK06; Match level="QueryCoverage=37%, HitCoverage=6%, E-value=5e-14, Identity=91%"; Hit description =Tousled-like kinase 2
MARVACTLCGKRLDGGVSVLLVGVNLVWVVQGPLDKNNCREESRKCLARVVFVPGSDGFVARDPVQLQSVAMSGSSAAEEDIVQHLSSNFNPSSSMLAKLEARMTGKAVSAPSSPPQAGFV

SEQ ID NO: 74326 - protein, 187 aa, Zea mays
  Coding DNA Sequence Number=SeqID_30951
MQYNGSSSLISCEKQTIRIEFYPCKIRAHRLGVQCLTDPDCRRAVTALVPTITGMGDLVSGRVRGYVCGQLAARVGGGARCATSERGSGSGGDVRQQCKGGARCRGLLAMGAEHRGRLGGAETCCFGEGVGKWASTVERSAQGARRRGEERFCAQRRLSGDGALAGRGQRWASCCWWPWSKENSELG

SEQ ID NO: 74327 - protein, 181 aa, Zea mays
  Coding DNA Sequence Number=SeqID_30952
MAIAWQARVNDDHQCDDSTATSRRKWMGRQSGHTEITNGENRVTWRSLATLLLLVLSCGSNNPLDRLSRRAWLAAAIRRALNARGEGACCCGVQLAARVGGGARCATSERGSGSGGDVRQQCKGGARCRGLLAMGAEHRGRLGGAETCCFGEGVGKWASTVERSARELDGAGKKGFAHKGD

SEQ ID NO: 74328 - protein, 165 aa, Zea mays
  Coding DNA Sequence Number=SeqID_30953
MGVAPDLQMDFLKTIHSKVFLPLVETGMKLLCIMLLRYSLHALHGCDRLKNILIIPGRPPQWVWARDGLGIAAEVWTYIRAVERAGLEGSDESEYSSDEEDSDGGDEGEDDDDDDDDDDDDDGSGRGGGDGSRDSTKGDSSRGSTKGSSRGSTKGGGGGRGRASG

SEQ ID NO: 74329 - protein, 150 aa, Zea mays
  Coding DNA Sequence Number=SeqID_30954
  Subcellular localization annotation: CTP_CleavageSite=30; ConfidenceScore=5.12e-01
MGASCTASSVQLISLISHQIWTVRMCWRRRCQRLAASACAWPASVATFLLVCLCIPMHAWSRDPWPSSNSKSGAFVRARAAAPSPASGINGPHGLLQGRLGLGGARDTAWHGRARESSRMLVALPQLPGRSYCTNGRMNRSPKLRVEDLA

SEQ ID NO: 74330 - protein, 146 aa, Zea mays
  Coding DNA Sequence Number=SeqID_30955
MSANEPEDGWTKRMSKRKLIVKWPSSNNTNIVFISGKPRTCNGERIICSDEFIIQVWYLCQNLFPLQMMVCDLCLLNLAILALSEVFETRTGACGPDNLGGSATAGCDVEYLLFGIQYPMDVYGYTDMRILRSVMSLQRRTYAQVH

SEQ ID NO: 74331 - protein, 19 aa, Zea mays
  Coding DNA Sequence Number=SeqID_30956
MRILRSVMSLQRRTYAQVH

SEQ ID NO: 74332 - protein, 166 aa, Zea mays
  Coding DNA Sequence Number=SeqID_30957
  Gene Ontology: Mol. function=hydrolase activity, acting on acid anhydrides, catalyzing transmembrane movement of substances; Cellular component=integral to membrane; Biological process=proton transport
  Homolog annotation: Hit_ID=P15718; Match level="QueryCoverage=62%, HitCoverage=12%, E-value=1e-08, Identity=37%"; Hit description =Putative Pol polyprotein from transposon element Bs1
MASTSEANITGALEAQAKTMAARSKLLQQISDRLDAQDRHREALERTVPANSHSISALPTKVDNVDAATVRADMSRTLQAQLDVHVAELAATTWERIDAVESTSTLSTRVAALETSTATFEMWRPSVEHSVGRALFCRGSTARDRTCRACRIQGIVRRSTSTVQAF

SEQ ID NO: 74333 - protein, 50 aa, Zea mays
  Coding DNA Sequence Number=SeqID_30958
MAAAPAESLPMSAASTPCFLPMAVCSFSHDWKRVLGKINGEETVFQFDAL

SEQ ID NO: 74334 - protein, 100 aa, Zea mays
  Coding DNA Sequence Number=SeqID_30959
MERRGGGCEYYRREVDTDGMAPSGCDDALNSWEDEVALQRQFPNSAAWGQAAAEEGGNVSRPTIKDGGNTKLEEEARNLPVLGRRVPKPNGCYPASVWSK

SEQ ID NO: 74335 - protein, 81 aa, Zea mays
  Coding DNA Sequence Number=SeqID_30960
MPRSVLVFLPMELRSALIRSSSGQLRRLFGLLHLSELKEVWLKGSYEETLKHDLEVQLAAHPNNPVLKLGKNTLCTLSWMA

SEQ ID NO: 74336 - protein, 112 aa, Zea mays
  Coding DNA Sequence Number=SeqID_30961
MFAPSGVAHGYVDAVSEDDVTNFGVAFRDGHTDVQDVVIKLAGNAAHGDGDVGCQDDVTKVACDATHGDGDAGCQDGVTKVACGASHRNTGCQDDMTKVACGATHGDGDVGC

SEQ ID NO: 74337 - protein, 98 aa, Zea mays
  Coding DNA Sequence Number=SeqID_30962
MGKHVPSLLMLLLSRVTTLVPTITGMGDLVSGRVRRAICCQVHSGRLPTASCGWHHITGSIIISRSYMRCKMPMYEYNESSTKIAQDILRHSGELNIN

SEQ ID NO: 74338 - protein, 202 aa, Zea mays
  Coding DNA Sequence Number=SeqID_30963
  Subcellular localization annotation: CTP_CleavageSite=8; ConfidenceScore=5.19e-01
MDKGKSVVAELVASFSDVRVTPRQPPEPQAKSFLPSPSFLTATAPLVNLKHSKRTDWPARLLQFYFAASSEFGHCLDLEWHFKPAKGPDPPSMAVLPTRQDPLLNIPAAPSPLPAGRLEHEHDGPTPFLFPARRINNLALASTVLPKRVPLHLLQKITNDFSKDRELGSGAYGKVYKGYLALHIFMDRVPFSALQLLALTHA

SEQ ID NO: 74339 - protein, 96 aa, Zea mays
  Coding DNA Sequence Number=SeqID_30964
MSLLVSNASTEVLVDPLGLTLSQSRSHNVGALSLVGAGWIEASLSKQEGPAGDSRCDPRVERPSSRSAGQRRILGAPKFAVDAMSLGGRGLQQGVE

SEQ ID NO: 74340 - protein, 122 aa, Zea mays
  Coding DNA Sequence Number=SeqID_30965
  Subcellular localization annotation: CTP_CleavageSite=26; ConfidenceScore=5.07e-01
MSKNTRDTRFIPRFGHTHKVPYFLVEAPTKSRVSFNPNPPLPTTKYQSSNQEEQEGFRDEAPKSQLFNLTQRFLSKDLKWERQEQTGRKSEQRKNRLNLFPPDKNRLSVRLSVRLNQYFPKR

SEQ ID NO: 74341 - protein, 184 aa, Zea mays
  Coding DNA Sequence Number=SeqID_30966
MSKPDKTFPLLILPVLPSLHNPGVGPHTYTYEHEESYEENICRDLKNDSEDVSELQRGGDAENPNVTGGDTLLDEVQVDLHVLRALMLHEIGGEVDCADVVAVDEGGALEGTVELVEELSQPGGLCHAVGHGAVLGLSTRVRDDGLPLGGLGDELGTQEHGVTEGGSTCVWTASPVGVSVDHEL

SEQ ID NO: 74342 - protein, 70 aa, Zea mays
  Coding DNA Sequence Number=SeqID_30967
MAPPGVDRGNPVKAVALRPPQGNEIPIRTGKEDKAVTRDPCVGDRVDPCADERRLTMWAHASLVQCHGAG

SEQ ID NO: 74343 - protein, 147 aa, Zea mays
  Coding DNA Sequence Number=SeqID_30968
MGKGHKRKREATPPSEDFGDSEYSEEEFSSESEGSPAPVSPPASSDDSDDSQGIAAEVWTYIRAIERSGLEGSDESEFSSDEEDSDGGEDEDDDDDDDGDDDDGGDGDGDGGYGGGGSGGKGSTRGGSSTGSTRGDGGKGSSSKASG

SEQ ID NO: 74344 - protein, 131 aa, Zea mays
  Coding DNA Sequence Number=SeqID_30969
  Subcellular localization annotation: CTP_CleavageSite=83; ConfidenceScore=5.69e-01
MPPPAKRTPPLPARRMPPPPSASAPSPPPQPLPPQQAAAPNQPPPSPTRRRPQPAVVRRPHHSAVRRCPDATVSHHHRGLAIRSAFESSRYNPIPKCSLEDMVAGVTWSSILPPGWTVEWDPASAEEEHEE

SEQ ID NO: 74345 - protein, 314 aa, Zea mays
  Coding DNA Sequence Number=SeqID_30970
  Subcellular localization annotation: CTP_CleavageSite=58; ConfidenceScore=5.22e-01
MPLVRRFAFLTTGCPENGGAHNCGAVARSFFRGVQPHGGWHSSAIARLQGFSSRSPVATSGRWSSTRMTTSLVVERSEPGCSLPPTLSFKDVHYPRWGGGRAESGLRLFAWASGPLLPPAFGGEWRSPALRRRQTSATWGRPSEAPSAAACLAPRPGWPWCRLRRCLLPLGWGVAVRPLHGRRLRHAQVGHIHGFSRAAGRTGGSYKTSYAAGAAAAAFLDGLVLTPAVRKGARTSSRVLGQPPPIGAEVVAAAGGAEVVAAAGEAAHCRGGCLCWRYRQCHLLPDPWLFGFNGLVVAPRRETGARTFPQRRTC

SEQ ID NO: 74346 - protein, 294 aa, Zea mays
  Coding DNA Sequence Number=SeqID_30971
  Gene Ontology: Mol. function=transcription factor activity; Cellular component=nucleus; Biological process=regulation of transcription, DNA-dependent
  Homolog annotation: Hit_ID=Q6ZH77; Match level="QueryCoverage=100%, HitCoverage=98%, E-value=2e-52, Identity=40%"; Hit description =Enhancer of shoot regeneration ESR1-like protein
  Pfam annotation: Domain name=AP2; Domain location=38-89; Score=72.2; E_value=1.7e-18; Accession=PF00847.11; Description=AP2 domain
MEDVANAHIYAHAHRSKRPQSAAIKDGDGDVDLSMKGARYRGVRRRPWGRFAAEIRDPMSKERRWLGTFDTAEQAACAYDIAARAMRGNKARTNFPGHATAGYWPWGAPQPAAVAHPINPFLLHNLIMSSSNHGCRLLNHAGHGHVHSAAPRPPAPAADATSTTIAAPFPVAAHPAVAMDEDVDDWDGVLRSEPADAGLLQDALHDFYPFTRPRAGGGRRGLSAAGTDARAAAALVAPVKPDAFVVPSPFAGVEGDGEYPMMPQGLLEDVIHSPAFVEVVAAPPSVPTRRGRRG

SEQ ID NO: 74347 - protein, 92 aa, Zea mays
  Coding DNA Sequence Number=SeqID_30972
MVRAPHGRKDTPNPPPEQTTLAEAIAALVNATADNTRFLREMAGNQFQQQGGRAPPQGPHETSYLDFSEMRPPLFVKAENPLEADEWIRVME

SEQ ID NO: 74348 - protein, 135 aa, Zea mays
  Coding DNA Sequence Number=SeqID_30973
MVFPELLRPLDGSASHGCSVSEHDCLLPTEVHSVLLGHWGPAAVEPSSSDNASPNGPALHSGSILYLLLALGLVDCSDWLLGQEVEVPDYSVSGTDFFLSSCSSGTVADAEGTTFVNVVEEDPGSAADIPKGDSA

SEQ ID NO: 74349 - protein, 206 aa, Zea mays
  Coding DNA Sequence Number=SeqID_30974
MAERSSPTARGLGPTRHASWPRAEEAKPPRAVHATVQRLQASLQFRPDQRVKGRASRQAACNRAKWAHFSDFQHAHVSCKQLHRHSHHYRASSTAEPVPRLEATQRTTQQHQPGATVNTAKNGLAVMAVAGGQEQRSRRQPGLRPIRGQRENPLSRREDDAPMFRSSNGSRTRNGRPANRTPRRINSAAGQAAPLAGEASDALPSP

SEQ ID NO: 74350 - protein, 64 aa, Zea mays
  Coding DNA Sequence Number=SeqID_30975
MAIVACTLCGKRLDDDVSVLSVGVNLVMKQQTFAVFALRWCPRMWCPRTNLNSNVVAEGRGPSF

SEQ ID NO: 74351 - protein, 73 aa, Zea mays
  Coding DNA Sequence Number=SeqID_30976
  Subcellular localization annotation: CTP_CleavageSite=55; ConfidenceScore=5.12e-01
MAPKKVQGLGLQLCNHWTTIRRQSPCGRPEARKGRLMSNTEGLSIKTFIRRVFPTKMTGMTISVGDLFSNAKS

SEQ ID NO: 74352 - protein, 46 aa, Zea mays
  Coding DNA Sequence Number=SeqID_30977
MAMMGSTSEKMYLCQVKKQQILVASIPRWCPKKKTKTEAAGGSVLL

SEQ ID NO: 74353 - protein, 149 aa, Zea mays
  Coding DNA Sequence Number=SeqID_30978
ERFTSGLPPASPLPPIVAADPLADGFHRKTGGKPPTGRGDMSDEDRDRERDRDRVWLHGEKVGAGFKCKQQLTADETARTHFGDDEYEDELKAALHQSRVEHKFSQRAGARYDRGGGSSSQRVPERVRDYNLAQASELRQQRIDTGPWT

SEQ ID NO: 74354 - protein, 132 aa, Zea mays
  Coding DNA Sequence Number=SeqID_30979
MAGFGGGSRDDACGFGGGFWERRARRIMPRPVPACAAAGGRALGWGVGARGRGWGWRGGFLGSGTASALGVGTCCRDGAVMVGLGARRGSGMGRWRSGTGMEVAGRAGGSAGMAHGSTGMARGSAGMEGVLL

SEQ ID NO: 74355 - protein, 27 aa, Zea mays
  Coding DNA Sequence Number=SeqID_30980
MAINGTDGTAGRSWNDSGCNPTQMNKA

SEQ ID NO: 74356 - protein, 96 aa, Zea mays
  Coding DNA Sequence Number=SeqID_30981
  Homolog annotation: Hit_ID=O48967; Match level="QueryCoverage=97%, HitCoverage=20%, E-value=3e-20, Identity=54%"; Hit description =Putative uncharacterized protein
MGVRDKKMLEKLATHDVEIITTLFTLADKCARAAEGRAWHSVPQTGVTWTGGSGATTQGGGKKKKKNRGHDRPQSGALVVVAATRGRDECGKRPKQ

SEQ ID NO: 74357 - protein, 74 aa, Zea mays
  Coding DNA Sequence Number=SeqID_30982
MARVLVGSFFVFRSPALVVDHEVEASSFHFTYVVEMKAYLHGVVSGGGGGPCGDRTLAEIRLNHITIHANPLVL

SEQ ID NO: 74358 - protein, 198 aa, Zea mays
  Coding DNA Sequence Number=SeqID_30983
  Homolog annotation: Hit_ID=Q2QPR7; Match level="QueryCoverage=36%, HitCoverage=53%, E-value=6e-07, Identity=37%"; Hit description =Retrotransposon protein, putative, unclassified
MHYLYGSDVFIMCDQLPPSVEVLLPDRLRALPRHVERVVLEGAYLESNMVLGQIVSHFDEIDASVITEGYATRQSEEELDAIEEQVHPYARSLASRGFGNCLGIELPQVFDVPCNAQKIVVDSLESVSHSGSIDADVEVIAELQKRLSRELGPIVSDDRVGYPKLIDDVSKGCGGLRRPDFGDWFGLDPLREFVHRHE

SEQ ID NO: 74359 - protein, 515 aa, Zea mays
  Coding DNA Sequence Number=SeqID_30984
  Gene Ontology: Mol. function=protein binding; Cellular component =plasma membrane; Biological process=protein amino acid phosphorylation
  Homolog annotation: Hit_ID=A2Y4C2; Match level="QueryCoverage=89%, HitCoverage=83%, E-value=0.0, Identity=73%"; Hit description =Putative uncharacterized protein
  Pfam annotation: Domain name=LRRNT_2; Domain location=368-407; Score =30.6; E_value=5.8e-06; Accession=PF08263.3; Description=Leucine rich repeat N-terminal domain
  Pfam annotation: Domain name=LRR_1; Domain location=413-435; Score =5.6; E_value=28; Accession=PF00560.24; Description=Leucine Rich Repeat
  Pfam annotation: Domain name=LRR_1; Domain location=437-458; Score =11.8; E_value=2; Accession=PF00560.24; Description=Leucine Rich Repeat
  Pfam annotation: Domain name=LRR_1; Domain location=460-482; Score =12.2; E_value=1.7; Accession=PF00560.24; Description=Leucine Rich Repeat
  Pfam annotation: Domain name=LRR_1; Domain location=484-506; Score =12.9; E_value=1.3; Accession=PF00560.24; Description=Leucine Rich Repeat
  Pfam module annotation: Pfam domain module=LRRNT_2::LRR_1::LRR_1::LRR_ 1::LRR_1; Domain location=368-407::413-435::437-458::460-482::484-506
MLPARPLLVAAAVFLLLLPVHVAIVAAQGFRGFSYLLNCGAASPTTDSRGLRWDPDGDYVSAGTPGVVSLSGLINPTLATLRTFPLRYGAKFCYELPVDRNRRYLIRPTFFYGALFASSSAPPPPVFDLIVDGTFWTAVNTTDDALAGAASSYEGVFPASGRNMSFCLGVNPDYTDARPFISALQVIQLDDSVYNATDFPTSAMGLIARTKFGSTGGIERYPNDSFDRYWQPFPDDKHAVSSTQNVTSADFWNLPPPDVFNTAFIAEQDAPLVLQWPPVPLQNDSYYVALYFADTLPDNSRTFDVYINDYLFFKDLNVTSAGLSVFATQWILSGLTTIILKSASPSALPPLINAGEVFGLFPVGRLTYARDVLALESIKKSLQNIPEDWNGDPCMPSGYSWTGVTCDEGSKIRVISLNFSSMSLSGFLSPDIAKLTALTDISLAHNMLSGPIPNLSNLRNLQRLHLQENQLSGSVPETLGTINTLREIFLQYNNLTGTVPENLLNNTGLTYTFQR

SEQ ID NO: 74360 - protein, 104 aa, Zea mays
  Coding DNA Sequence Number=SeqID_30985
MAGGIELAGAKEKWLAGEEIWSQEIWSVSLPKPEANPRTGWDGTIPQIRLFGSGSKTGTGLSQCCPLLSLKIGGTREDVPVLAVPQQNTPLVDGMEGGVVGHAA

SEQ ID NO: 74361 - protein, 127 aa, Zea mays
  Coding DNA Sequence Number=SeqID_30986
  Subcellular localization annotation: CTP_CleavageSite=55; ConfidenceScore=5.50e-01
MASKLLSARSVAVSTRCHSSSSISSPSTPSRMKGEGPHGMPLEEEATMVGGNRTRSSGVAKGSDASADKSTTTTRPDDENTVGDGVGTTSLQPFVCLNSGILRKRALAAGRRKNQWPAAFPRGAPWA

SEQ ID NO: 74362 - protein, 82 aa, Zea mays
  Coding DNA Sequence Number=SeqID_30987
MGIGLGRRSSPQPTPELGLSLDLGRNRILARPRPRPQEKSPPRPTLGSDRPRHKEYIITLPLASSGYEGTRPASHLARPGNS

SEQ ID NO: 74363 - protein, 253 aa, Zea mays
  Coding DNA Sequence Number=SeqID_30988
  Homolog annotation: Hit_ID=Q6J9V9; Match level="QueryCoverage=26%, HitCoverage=23%, E-value=7e-23, Identity=82%"; Hit description =Putative uncharacterized protein
  Subcellular localization annotation: CTP_CleavageSite=48; ConfidenceScore=5.48e-01
MAKSGSAVIAATDGQKQRSNHLQARILSQNGRGALSRGVKTTRPCSVRARATDAPRIARPVALTPWQGKRYLWQEKRASFHLRHDGRVKKGTWKGDIPKWILPSEGNGPQSLLLIRGSKVAPSGVRQPPQSTRAPSPLLIRGSKAGPSEGFDSRPEHAESGMTLEKGMKNKRIKQNPTKWALHHHFGPLKEIPAQPNLTHARESLDGGALCQPQPSLRSSAQPDGSDIDAWTPTCQLQRPPSDPNRTTTNPPP

SEQ ID NO: 74364 - protein, 332 aa, Zea mays
  Coding DNA Sequence Number=SeqID_30989
MMTVGLVVGRSKPGCGLCPALSFKDVHHPRCGGGRAEPGFHLPHGPASRFFLQHSGERALTGLAEGVNFDNAGPIDRKRRQLQRAWLAGSAGSGAASDAASCRLVRALLSVHRTGGCRAMRTGGPYKTSYVAWAAFVFLDCLVLTPARRLRAEVGAGPSGRTRPRQRSLSLPVERSSASHLEFVIPQTLCFRTFGRSCDELKPEAVVSAWTEAESARKEASSVREQATSQAEEVQQRRLELGQVIREQDQPRSHAAEAMSRAEFLGGQLAEATERAAEASARAETLAESLADLFVGSRTTYLSESYFSRKVMSEDSVIDIVEKARKSFLLER

SEQ ID NO: 74365 - protein, 74 aa, Zea mays
  Coding DNA Sequence Number=SeqID_30990
MGHCSLQGELEMPPRRTLLYQLSHISVVRIIVADREPITILIVTRYTHSTSAESTRSSSRTAKQKLVLVVDQIH

SEQ ID NO: 74366 - protein, 90 aa, Zea mays
  Coding DNA Sequence Number=SeqID_30991
MRKLVKGLARPEPRWLRAMEETLSPTEKFGIVPLSNLDCKIFASSPFSHAVYRQNAIRYINREKITCLVFFAPFRNQNVADTVRGDLPFT

SEQ ID NO: 74367 - protein, 414 aa, Zea mays
  Coding DNA Sequence Number=SeqID_30992
  Gene Ontology: Mol. function=oxidoreductase activity, acting on the CH-OH group of donors, NAD or NADP as acceptor; Cellular component =cytoplasm; Biological process=branched chain family amino acid biosynthetic process
  Homolog annotation: Hit_ID=Q7Y096; Match level="QueryCoverage=89%, HitCoverage=88%, E-value=0.0, Identity=90%"; Hit description=3 -isopropylmalate dehydrogenase
  Pfam annotation: Domain name=Iso_dh; Domain location=44-400; Score =720.1; E_value=1.6e-213; Accession=PF00180.11; Description =Isocitrateisopropylmalate dehydrogen
  Subcellular localization annotation: CTP_CleavageSite=37; ConfidenceScore=5.36e-01
MAAALQATPLKTLSISRRRVGGAGARPRPMAASFRCSAAARSYNITLLPGDGIGPEVVAVAKDVLSLAGALEGVEIRFQEKLVGGSALGATGVPLPDETLDAAKGSDAVLLGAIGGYKWDNNEKHLKPETGLLQLRAGLGVFANLRPAAVLPQLVDASTLKKEVAEGVDIMVVRELTGGIYFGKPRGFGTNDNGDDIGFNTEVYSASEIDRIARVAFEVARKRRGRLCSVDKANVLEASMLWRKRVTALASEFPDIELSHMYVDNAAMQLVRNPKQFDTIVTNNIFGDILSDEASMITGSIGMLPSASVGESGPGLFEPIHGSAPDIAGQDKANPLATILSAAMLLRYGLGEENAANRIEAAVTETLNHGFRTGDIYSPGTAYVPNWQTLVGCKRMGEEVLKTVNSLKEVAAVN

SEQ ID NO: 74368 - protein, 140 aa, Zea mays
  Coding DNA Sequence Number=SeqID_30993
MGKSKKGGNSSHHSSDKRKREPTPPSEDFGDSEYSKEEFSSESEGSPVYTSPPASSDDSDDSEGITAEVWTYIRAIERSGLEGSDESEVSSDEENSSNSSEEGSGGDGDSDSDDGGYSDGGDDGSKGDGKGGNGSFKASG

SEQ ID NO: 74369 - protein, 242 aa, Zea mays
  Coding DNA Sequence Number=SeqID_30994
MTLTSPSTRGNALPPPPPAVEAVEVLRVLLEVSAVPEGVAHVLVVWALGVEDVVQCMFASARCSSSARGGWSGGVDFFVRPLLPTLVGLLVRVTSWCRWCRLRSFDEVLSSFVDGDVEVRWLRQFVGERLEVGDEAPTEVAPVVDVVSGGSGGNGIDSQPASRILLRLVLVDIGDFEVRGPLNGPETWSERRYSTCVLLSMMVMDVVVPIILFSALNLVLVSSFARSVDGAPCVPPTVDGVS

SEQ ID NO: 74370 - protein, 128 aa, Zea mays
  Coding DNA Sequence Number=SeqID_30995
MVEKGHGSCDGTTVTRSAITKRRGGGGADKGRRHLWQAKRATLHLRHNDRIKKGTGKGDTPKGILLCVGSGPRALLLIRGSKAEPSEGFDTRLRARGLRAHYWSEVRRLVPRKGFDSRLRPLGLRAHY

SEQ ID NO: 74371 - protein, 597 aa, Zea mays
  Coding DNA Sequence Number=SeqID_30996
  Gene Ontology: Mol. function=protein binding; Biological process =ubiquitin cycle
  Homolog annotation: Hit_ID=A7QN03; Match level="QueryCoverage=61%, HitCoverage=92%, E-value=2e-64, Identity=37%"; Hit description =Chromosome undetermined scaffold_129, whole genome shotgun sequence
  Pfam annotation: Domain name=F-box; Domain location=187-234; Score =28.6; E_value=2.2e-05; Accession=PF00646.24; Description=F-box domain
  Pfam annotation: Domain name=Kelch_2; Domain location=436-487; Score =28.5; E_value=2.5e-05; Accession=PF07646.6; Description=Kelch motif
  Pfam module annotation: Pfam domain module=F-box::Kelch_2; Domain location=187-234::436-487
  Subcellular localization annotation: CTP_CleavageSite=55; ConfidenceScore=5.08e-01
MDSRPDSQSYSYPLVAAAGSAIVVVLLHALRLNALLLLLCLCAFPAPARSQNTTMATTAQASVEGFNCTANRTYPCQVYALYRTGFAGVPLDLAAIGDLFAVSCFMVAHANNLSTTAALANGQPLLVPLYIVGETDTLSPAFPDLLFFSSPAPAMVSSVCSPPNPTPQSAMPGGSCPDPAAEAQLPPPIHHLPPDALHNVLLRLQLRDAVVCRLVSRLFHETLSPQLLALLPTLRLLLLRHPRPDGGGCLHAFDPARRTWLRLPFAHFLPYQSFSPVASSTSLLYLWVETSSSTSPLALQSTTTSSSAASPAHPLKSLAVCNPFAGTYRLLPQLGSAWARHGTVLAGPGGMVLVLTELAALSYTPSESGKWMKHPLSLPSKPRSPILASAAVFALCDVGTPWRSQWKLFSCPLDRLTGGWAPVERAAWGDVFEVLKRPRLLAGAGGRRVLMVGGLRSSFAMDAPCSTVLILRLDLATMEWDEAGRMPPNMYRCFTGLCEAASQGNAMPATAGGGNNKVKVFGGDGKVWFAGKRVRGKLAMWEEDETGSSGKWDWVDGVPGYDDGQQGQDSAAAAVPVGSVAVASAELTLVIHGTADL

SEQ ID NO: 74372 - protein, 32 aa, Zea mays
  Coding DNA Sequence Number=SeqID_30997
MASCGARRKRRTSLMWLRFFKIFMLTTINIYD

SEQ ID NO: 74373 - protein, 919 aa, Zea mays
  Coding DNA Sequence Number=SeqID_30998
  Gene Ontology: Mol. function=nucleic acid binding; Cellular component= cytoplasm; Biological process=branched chain family amino acid biosynthetic process
  Homolog annotation: Hit_ID=Q10M01; Match level="QueryCoverage=73%, HitCoverage=87%, E-value=1e-127, Identity=56%"; Hit description=Zinc finger C-x8-C-x5-C-x3-H type family protein, expressed
  Pfam annotation: Domain name=RRM_1; Domain location=517-585; Score =18.4; E_value=0.0029; Accession=PF00076.13; Description=RNA recognition motif. (a.k.a. RRM, RBD,
  Pfam annotation: Domain name=zf-CCCH; Domain location=381-406; Score =17.6; E_value=0.0065; Accession=PF00642.15; Description=Zinc finger C-x8-C-x5-C-x3-H type (and similar)
  Pfam module annotation: Pfam domain module=RRM_1::zf-CCCH; Domain location=517-585::381-406
MVSMVALGCGVALLPEVVLENSPEPVRNRVMILERSDEKTPYELGVCAQKKRLHEPLIEAFWKILPNNKRRCRAGRPDKRSAIRHFSLTRQKEPERRVIGFVVAIVAQLIQPGFEIRFMVAKFERRQYAPVVGAMAAIVEQRNVPVRTQRVEEAQQRSLIFRWGVHTHGAVHVLPPTTRPARGRIPPAAAPSTRNGRIQSLPHQQCRSSRNPWSTVHIPVRAIHSPQFSLNPRPHPSSIPRRNPLTPCRIPVPSRQHPRNAPVFSRSNSTSNGTAEEAAGAGEELPSPVNGGAAPFFPRQAGDALLDDLQLQEQLAFLNEGGGNPAHQLQGFDGVECRSPGPGDADGMFAFGLGWHNGGPAHRRSSSVNELCLGGGGGDGFGWKPCLYYASGFCKNGGSCRFVHGGLSDDAVALAGTKMEAAADQQQQCQDFLIRSKGQRLGPAVFPYSPTGSLPGSPSAASKCLSFLLQQRQQHDRAAAAASLMLGGGDEAHKFMARPRLDRADFASLMNPSSRQIYLTFPADSTFREEDVSNYFSIYGPVHDVRIPYQQKRMFGFVTFVYPETVKLILAKGNPHFICDTRVLVKPYKEKGKVPDKYRHALRIHPWLPATAMASVHAHMQLLGLIDLLFSARRNVTPRPIPGPAVLTPGSSLGSYIVPTDQHESFVRTLSSLMGTRENFPPWARTSHPRGQDITRKQQQGDFSGYTTPTGGLDARDPFDLHQLGARMLQHSNSANELLLRRKLEEQQQAAELQHAIELQSRRLMGLQLLDLKARAAATAAAASALPTPVVNAFASIHPLSTMAVESPLESGEQLKLSSGFALEGKLNGGDHNLPDSPFASPTKSDVLVHDSFAATEPENTASLVGSKIDGGSNHLRPPALEIPSPSSYFFPMRRCVGKASTLLFRGADYVREHSVIHE

SEQ ID NO: 74374 - protein, 92 aa, Zea mays
  Coding DNA Sequence Number=SeqID_30999
MAMACPACWCRRRLGRPATCRSTPTSPPLVVEDLAILDLVLVFSRIARIKKKTHHTTKINMSISVSTSPREGRGDHGVPFTERVERATKLEG

SEQ ID NO: 74375 - protein, 350 aa, Zea mays
  Coding DNA Sequence Number=SeqID_31000
  Subcellular localization annotation: CTP_CleavageSite=53; ConfidenceScore=5.24e-01
MAARRAGRAVLSSLARSLGLRKPKGQAGSGAKNRHRTLSGEQRATLRLHRNNRAKKKAPSLLTDQGFEGWPPEGFNSRLRSRGPYTHYWSEVRRPAPRRVPRPPQATRAPCPLLIRGSKAGPRRVHSRLRRRARDDQGYVRYITKARAALPSSPETPCSVPIEGNMALSPHSSLRKGDVGAARTRAKTRKTANSAPPDPGPGLGLGPGRRRTPLRPTQGSDSGSAPEDDELRFARPQGSDSTLASADDLRLAPTQGLGLGLGHGRQTRPRLRRSLHAAQPRAQASHVNRKRHHHPTPSRLGPQRTRPGDVSKDPTAPTAVPPPGSVAPPTATTPHQLGAKISPAATLACT

SEQ ID NO: 74376 - protein, 857 aa, Zea mays
  Coding DNA Sequence Number=SeqID_31001
MCSHYYVAYPQFEVEEDDADEGALRCATRMSSGRDLVEEFVGYGVWPLAHGWALGEVCPREMPSQGGQLVRSPAFALDLRGRDPTAFVREKENGAARIVGHYVPRTEGLQSWEIRGSNDRLNRVFELNRLPYGGYPGEDAADRRGKKLMGGTKEGPSQDAAPAAKRRKLGTMVGGMGVYDNFAVELMGTCAAPGGRMSSPELRESSARMLEVTGGRWPKNLSIPWTEGEDMSTSCIARGLRIFPYGRNIVDVVSAAMNKDRQDAAQKRRAAIRIADPRREAKRARGSAKATAPGSSQPMPAPKPAAPGPGKLSAIAKTAAAGGTKPAPVEAAKGRELPSPGKRVADFGTNISMEEYFVGSGEGQMVVVPPSVATTSPSAVVRARGTVQDPWAAFCASGEILTAATAKDVAGTMSQRLREASQRLSQQLGQHADVVREKSAAESKNHRLAEKVATLEAEKTDLRRQLAAQAEAKVARAEGSLASQRAEEWEARFNALCGRVDKAEASMCSEVERTLAQFVDSYNELGARTADFEVPDREAGLRFLEWLHEELLVLPTIVEGFMSFASLVTCEGAMNALFCEGCRHYEVFDQSDESFEHEIFKAEDPVVKQSAGALFDRMWGAHGREAVRERSDRAREQVKMERAEDVEDLGGLVGAPPEPAEVNPVQPSDAGEGPSAVPMPAMAGEDPMSAPAPTVEGALKVHGFGPAHATATDNANFVAASTVVAEAVSDDSVSKFFESDDSGGSVVWTEESSDEDSDYFAALDVAAAEASPRVIGAEVLPGVSVGRRRRRAVAKRRVSEVEGGRLRVDGASKRELLSSPAGASVGEGELRSIFEGEELRIMLFNYREMGIVPKVEP

SEQ ID NO: 74377 - protein, 87 aa, Zea mays
  Coding DNA Sequence Number=SeqID_31002
DNEDDGFDYDYGFWDNSDVSPNNIIELTWETLLADEQLQFEEHKEQLIQEAKVKFLTNLKVDRNNKVVQQRATDLASLRPTDSRLEG

SEQ ID NO: 74378 - protein, 424 aa, Zea mays
  Coding DNA Sequence Number=SeqID_31003
  Homolog annotation: Hit_ID=Q7XBC6; Match level="QueryCoverage=73%, HitCoverage=21%, E-value=3e-08, Identity=24%"; Hit description =Putative copia-type pol polyprotein
  Pfam annotation: Domain name=zf-CCHC; Domain location=105-122; Score =25.1; E_value=0.00024; Accession=PF00098.14; Description=Zinc knuckle
MEDLSTMTPTIVIGKIVAFEMSRKMCRGEEPTSSRPYAFACDERKGKRKAPTPSFSSDEKEEVKSDDDEDNQPSTSSSEDEETIRRVGKVEDLLFNIDRKKQRKRGCFACGEKGHFRDNCPTMAEPKKGRSKGKALTSVKTWDDFSSEDEPPRTRSHRSSSRSSHKCLMARGKMSIPSSSDDSSSDDEGEGKPSIDELAEAVKNFQDVCTKQKAQLKTLKNKLISSKNDYKGLLEKFEAFANMNCELSTKIEQLESSATSTATDDGLIKRNEKLKAKLASTQEAIENLLGKMEIISIHNNELTTKLENIGSTPGASLIEIPEIIKKDASSSCFDLIDDSNSCNQVLIENIVVDTCSDEVASENEQLRQEVDRLGKALYDKKGKAKQIRPPQDNTNAGVNKPMEGETVICRLCHMEAISLSNARR

SEQ ID NO: 74379 - protein, 92 aa, Zea mays
  Coding DNA Sequence Number=SeqID_31004
MRVQRHSIRSIIENCNLADWEYILVPEQGVAQEVAQEPAPEPAIEDLPAPALEVLCSGGSLEDMVVAVTWPSILPPSWTVEWDPTSTEEHEE

SEQ ID NO: 74380 - protein, 147 aa, Zea mays
  Coding DNA Sequence Number=SeqID_31005
MGKNNKRKREPTPPSEDFGDSEYSEEEVSSESEGSPAPIPLRESSDDSDDSQGLAAEVWTYIRAVERSGLEGSDESEYSSDEEDSSEGGGGDGDDDDGGGGGNDGDGGDDDDGGGRGGGGGSKDGDAGSGKGSSRGGSSRGSNRASG

SEQ ID NO: 74381 - protein, 180 aa, Zea mays
  Coding DNA Sequence Number=SeqID_31006
  Subcellular localization annotation: CTP_CleavageSite=23; ConfidenceScore=5.14e-01
MSSRSLMHRVFPPSEPPDGERPRSFRLVVGGTQLRGSWYLSTIVRLQGFSSVSPAASLRRWSPKTVTTSPWVGRSKPGYDLGPALSFKDVHHPRWGGGRAEPELYLPRGFVGQPLLQHSRERALTGPARGADFDNAGLADGGRRQLQHCARRLGSRCPLLPQGRLSRRAHGRTAQDVARC

SEQ ID NO: 74382 - protein, 42 aa, Zea mays
  Coding DNA Sequence Number=SeqID_31007
MAGGIKLAGAKERWMAGEEIWSQEIWFVSLPKPEANPRFCRV

SEQ ID NO: 74383 - protein, 484 aa, Zea mays
  Coding DNA Sequence Number=SeqID_31008
  Gene Ontology: Mol. function=nucleic acid binding; Cellular component= intracellular
  Homolog annotation: Hit_ID=A1X3G7; Match level="QueryCoverage=27%, HitCoverage=50%, E-value=4e-11, Identity=32%"; Hit description=C2H2 zinc finger 2
  Pfam annotation: Domain name=zf-C2H2; Domain location=318-340; Score =23.2; E_value=0.00095; Accession=PF00096.17; Description=Zinc finger, C2H2 type
  Pfam annotation: Domain name=zf-C2H2; Domain location=417-439; Score =21.2; E_value=0.0038; Accession=PF00096.17; Description=Zinc finger, C2H2 type
  Pfam annotation: Domain name=zf-C2H2; Domain location=57-79; Score =13.0; E_value=0.44; Accession=PF00096.17; Description=Zinc finger, C2H2 type
  Pfam module annotation: Pfam domain module=zf-C2H2::zf-C2H2::zf-C2H2; Domain location=318-340::417-439::57-79
MNSRALQLQLQAAEAAAPVHAGEDGEPEATPKAPLLKIQGQGSGLARSMGTTTGNATKCPECPKWFPSLKAMCGHLRQHPDRDYRGATRPTPATISAAAAVAVAVAGDNEPTNKVPRKESVVVAINMVAAAASAVQKQPWEEAETKWPAKAKRGRTSVAPMQASSISEEEEAAMEEEAAMILLEMSRTSSETQQRQQPVEPVRSPYAVSGHQIQTTSVVEELMQQQTPENALELSAESQTSVAKHVTDLVEAVLIMVPANKAIFPSLNSGAGDKKPKKRWVRNPGRTAASTTSPPPPEGAVRTPPARRIPSPASGKMHTCPTCHKSFSTHQALGGHMASHVKNKTTSARHDDHAAAHAMIKPDVLAHSDQSAGNGDVDIIPASDDGAGKGGALQERQDAQPPPPARAPTPPQTSAPHKCDECTKTFSSGQALGGHKRKHWSLEKQQARAALPAPAPVIEPEPELRDFDLNELPKEEQFQDNNQP

SEQ ID NO: 74384 - protein, 156 aa, Zea mays
  Coding DNA Sequence Number=SeqID_31009
MDNEKTYSQARQFELERDITFDNTKSANSSKSMTKEATSNSLNEEASKQQVKLKEQSTTTFDKTKCATTSKTGAQVFLKSWRCPTKTVALGTVLGRDPNHKVGGVKLGREFWMIEDNKNLYMIISTSRRFNSVQDDIMISMLRMSYISFQATETSS

SEQ ID NO: 74385 - protein, 118 aa, Zea mays
  Coding DNA Sequence Number=SeqID_31010
  Subcellular localization annotation: CTP_CleavageSite=57; ConfidenceScore=5.64e-01
MMVLALVAATSFAILFLFSLPSCLCLRATPFSGSRQRVWEQAPPPRIRPTLAPTPTRAVAIARPRGRFIVFVVSFSDKEQDLEIHAGTTTGCSSLVFLALASIRSFLRPHWCNRLHGV

SEQ ID NO: 74386 - protein, 64 aa, Zea mays
  Coding DNA Sequence Number=SeqID_31011
MGRRETEREGGKLEGDRRKRVEVESEPLGRARRRPSAEAEAESEPWGRARWSSLSSGAEAESEP

SEQ ID NO: 74387 - protein, 80 aa, Zea mays
  Coding DNA Sequence Number=SeqID_31012
  Homolog annotation: Hit_ID=Q6YWB8; Match level="QueryCoverage=70%, HitCoverage=16%, E-value=3e-08, Identity=53%"; Hit description =Putative uncharacterized protein P0501E09.13-1
MCWLNRYVALFGEFSHEMEVTEHNLKTQLENALKELEAAQHKASTTTSGTAENALLEAKSVTDLKSKDLEEKAFANHLKR

SEQ ID NO: 74388 - protein, 127 aa, Zea mays
  Coding DNA Sequence Number=SeqID_31013
MALNAIFHFTILQWGWKEQQTGVVGSDGGPGACSAGNDSGRLWAVMAHEPVGTGESEGGEARQLRMGRKEVMLMPHSRTRTDGRAITDRDRDTGERAQPARKRGTNQSDGRGLPQLRPWGRPDSDKS

SEQ ID NO: 74389 - protein, 1337 aa, Zea mays
  Coding DNA Sequence Number=SeqID_31014
  Gene Ontology: Mol. function=protein binding
  Homolog annotation: Hit_ID=A5ADV0; Match level="QueryCoverage=52%, HitCoverage=46%, E-value=8e-54, Identity=29%"; Hit description =Putative uncharacterized protein
MVNNMEEDSSEWAKYAYVSEYLLGRNRQAIGGILGVFVKEGTKDLVPDEIVDGQGSEVSCSIHLLNLPTCSRRSGGSSEGVHQMLSSEHPSGPSCSSKSGGPGVSADPATSAAEQPACQDPRDLIQSYPKFSIRDYVFASRSKGIKRSWPFHPHSLQLCLEHGVKDPLPPFEPPDLIRSQPLNISTDIKQSAACSEPIISVGLVKTKDAGSSNEYTGDINFQSCQPVDESPGPSPYTSPEDGKSGIDQVGSTNESDHTDEAIPIDLQDNSCTRASRRTEVAVPLRRLRNLDSSCEPSEKKCKFVVKLGASADIRRPEDIASNSSSVSDPMASKTCPVCKVFASTSNTTLNAHIDQCLSVESNTELVETVLVKPKVKPRKKRLMVDIYKTALPYTLEDLDRRNCTNWAVELAMSPVSKEVCTENGSPEVVSFDRRDDEREGDVYVDSNGIKIRILSKCNDVPLVLKDDLGSSKVAKHGTGKGILMSKKMLKSKLLKNKKLKMHGKKYNKTSHLNSQMSSLDYVTFVTCFSVKVQADPHDDINEETSEEERNAWNPSESTSNCGSRTMQQWVCSKRSDINKKLSKNHSGKTFDKVAPGAQKSDRSSMFGFNDSQVPESPVGVFSSESLYMATTSEATGVEQSNGPSKVLRSIPTWSSKTHLQSSVIPKVPRSAAALAKRKIKEIGRREATKLDNYDVVRNPTSVKRFEARTLSFSTAGPSNGPNRSASTSKKIRKHRSPLRTGKRAFSPSSTRLVHGFGDEHEPETRHVNKKFRITSNEAPKKFLKHTEEDTADNDFSFASDMPVSGQQNDQYDVAQETEGTQMDCEGEDAETDVPYDSVSRSDPAECCNQISDVSLSPENYRTADDDVLVEGCSVAVEDPNSSEQLAHGHESNSAANNEMDEWQMDPTSTKESSPCLTSNRDMGPGGHQDNSSITSNGEEDFNEEHGLPLGRGSLDSPISTASTMALPAALKDSRTNEEEPGPSTGRTVEEQTTGCLNQETNSIPMAREGELPSEKPFRCSCQENIARESRQSPVARPMLNSTGKQVPQLHIGSRASSSFSTYQRTSAKPNPCFDPHDHLLAAKVPAESAISFPYSTDCISPSFQTQLPSPSNPVLRLMGKDLMVMNSEESVHPQAPSSDYILRGNYPAPVGFMPPNYQHLSNSAFINMPPTTASHQIPLPSVQASGFVAPPLRGGSVMQSDHHSQQKPYRNIMPAMHRPTYMMKEVIVINDSPERRSEPQGSMLFPPAPPPPLPVVPNNMPPRPFYCFPPQSPVLPRERGAVGSMLVYANVGSMVGVNSSSQGSQTEVASPYMPNPFFVQSRAGYMNPPVYYSQNLG

SEQ ID NO: 74390 - protein, 154 aa, Zea mays
  Coding DNA Sequence Number=SeqID_31015
MMVLASVATTSFDILLLFSLPSCLHLRATPFSAEDVGAGTSSYSSDTNPDIDSRSGYCTSTRMFHIMRAPSFSLSDEPFVFSAFAMFFVPNLLPPPTVAAASRPTLVDAGIGRVSHASGLSLCVPSRRTWWRLPLLGYLGDEDSRSEILDNQGS

SEQ ID NO: 74391 - protein, 114 aa, Zea mays
  Coding DNA Sequence Number=SeqID_31016
MNENGDLQDRIGIQMGQVKTVEIKEAAEKGRNRKTEAVEKERSINHGLMGILNWDSNPMANPLRTEFPRRKNPDGHEVEKFGLRDDGHVNTSAPHHHSAIIKVAHAARYHSAYL

SEQ ID NO: 74392 - protein, 63 aa, Zea mays
  Coding DNA Sequence Number=SeqID_31017
MAPNGPVHPFDPEFPGTPVPGGGDEDDGYDYAYGNGCPHCNHCSGEDEAVEEDCQEFQEYDEF

SEQ ID NO: 74393 - protein, 100 aa, Zea mays
  Coding DNA Sequence Number=SeqID_31018
MDARKEREPRAGCAARIALVRAWWSGVCDVPGSFVRLRGGDLRCCSDSCSADVAAGWERPGVLRNPSPCTQFCRSARAGVLILAAARYCYSQSLGKKTIS

SEQ ID NO: 74394 - protein, 269 aa, Zea mays
  Coding DNA Sequence Number=SeqID_31019
MGERERQGYIGADAVTVNPDHGGGRRAQKFGKGCCANNENRGGLELPAKRSHPSLSEQRGYGGQGTAGGASPTEDSVDGQHGICYDVLSHARANLEKNWRRILGCYTWSPFFLSGLLQLESFNWSKSFMFSDISSALLEPEMDSLSFAIPNTCPKDKFMDKVFLDDNPHKISDSTDEAPSIEINKHLSSPPILVDSDLRRSKRLKDSRAGFKLGSCSKRKCLMCQHKFDGPPTLSSEETEREFFDGAYLKIFCPNCLDTFAYVPSIRNS

SEQ ID NO: 74395 - protein, 31 aa, Zea mays
  Coding DNA Sequence Number=SeqID_31020
MGLGVCGSLCQGKEGVEADLQEFQDFDEFVD

SEQ ID NO: 74396 - protein, 168 aa, Zea mays
  Coding DNA Sequence Number=SeqID_31021
MDGLRVIARRSWNRPELPRAIPRARPKLSRLVIASTFALIFFGSIFILCILHRSKEAYLLKARNRRRPRRARYNGPDRTRASELDEAALWDDFVAGLRLVPNQRRVSLPVLSLSDRRLQRRLRAKGGVFAFAPIFALRGTRSTKSPGAEDVARWRRRCPRSKWFRGGF

SEQ ID NO: 74397 - protein, 292 aa, Zea mays
  Coding DNA Sequence Number=SeqID_31022
  Subcellular localization annotation: CTP_CleavageSite=49; ConfidenceScore=5.32e-01
LHGLAPLPRTGSATAAWGPAVGIVPSPSCSHELNPGIRVDVAGRSNKPSRSHRRNPLGRPLSFGSGLSCPPIKLGGAAPLPNYHGAIADTSWSREPRRMREIEKTDRVPLRLAQSWWLLGLSSDSASRCIKPARDHQISPSHPVPSAMLLDDSFGLAGARGAQGRAKSGGWLVEVDFLAGVTGHRYGPPCVVGGPPVLANLGEDPAASLSLISISCSSSYLKLDYCVDRAESRLWRSAVGRYRRRRCLGGIRAWRHRARTRAAAGGVCASELDCWEVGGDLLAVGSDVIGRD

SEQ ID NO: 74398 - protein, 130 aa, Zea mays
  Coding DNA Sequence Number=SeqID_31023
  Subcellular localization annotation: CTP_CleavageSite=37; ConfidenceScore=5.15e-01
MSTASSPKCGHKHQTEGPRKPKVTSSVRLTTETRSLRAAAKHRPIFTAMDLAALGWKGIEQTYGARNDAKGTAEPQGNPLRSHGGQFDASSTDSEDRARMELARVARAKEGGESDVKGPPASEMGACAEA

SEQ ID NO: 74399 - protein, 78 aa, Zea mays
  Coding DNA Sequence Number=SeqID_31024
MAEKRNSEQAHRGDSGCVGGPTRQPITRVVEEKWAAQRLSSTNYKLGITVRLINEVKDEAEHCFYKLVKILLAVTKCK

SEQ ID NO: 74400 - protein, 153 aa, Zea mays
  Coding DNA Sequence Number=SeqID_31025
  Subcellular localization annotation: CTP_CleavageSite=79; ConfidenceScore=5.37e-01
MPCRPGVPVPPRRAPPLPAPFPGLGPARRAAPVPRAGEPGHALPAPARRAAPSPARARPRRVRSRPPRARPRRATPVPRAGEPSRALPAPRQPRPPRPSPCPGVPRAPRPGRAPAATSRAPCPGCALGRAPVHARAPATRVPRASQFACLRHA

SEQ ID NO: 74401 - protein, 185 aa, Zea mays
  Coding DNA Sequence Number=SeqID_31026
  Homolog annotation: Hit_ID=Q8SA85; Match level="QueryCoverage=14%, HitCoverage=1%, E-value=5e-07, Identity=88%"; Hit description=Prpol
MESVLHYSNVYPELKPTWPLQRWGLDLLGPLPPAQENLRNNEVNLQPAQREVARRITQSGVEPQHNNVKVNRLKDMDGNDIPRSWNANELRRSTRAISPKDVNVKTERAPSSAKRKGKTRRSSKDVPKGMQSTTKLQKAVPKGAQRKFSAQKSFLRECRAYSEKSTLIPPKYKAKREKSTRYRRK

SEQ ID NO: 74402 - protein, 159 aa, Zea mays
  Coding DNA Sequence Number=SeqID_31027
  Subcellular localization annotation: CTP_CleavageSite=48; ConfidenceScore=5.71e-01
AAQLPRRQPRGAPTPLLPGHPAPPSAPSVARLPSPSVGRPCRHEPPPSSAAVLSFRRPAVAKPSSCNHSAVVAKLFPIERYSMSTGVIDSTELRSRGGSSSQGSGVMGHNTPPPVIPAPGGAYAGEGATTGENPNPLHDFVNEFFAYGGSGHNSNNPDM

SEQ ID NO: 74403 - protein, 145 aa, Zea mays
  Coding DNA Sequence Number=SeqID_31028
MQESIAGPPSQQNPPEGLPTLTTPLLPLPLSVLIPSGLGLDFPKRSGGCAHKILDSAHSEGGWRINGPAPFFNPRSGTAAHRVSPRQKSQEFDGTVTPLAPPPIYNEIRNKKKHWDTPEVLTDVEGLRRELAMAERSAVAEQEVW

SEQ ID NO: 74404 - protein, 150 aa, Zea mays
  Coding DNA Sequence Number=SeqID_31029
MRLRAAAGDAPAGAVRAPAGGRAPHRQAGEQGGTLPNPRNRRNQRRRMEELTGEEDHHRRQGEILRLTEIQRFDRRTGLVPAKPSMIRTQRYPQISQTMHGLGVIAHRSWNRFELRRAIPGARDRIWRNRFVLWNGLDEKPDMHIYLGFE

SEQ ID NO: 74405 - protein, 171 aa, Zea mays
  Coding DNA Sequence Number=SeqID_31030
MAMMGSTSKKMYLCQEASSSGSNDPIGDLEAQVEQLRTELRHRNNVWVEDGQRINDLRTDIRYCKTSLPNEIWHSTGPSTRVPLLGTEKPKLVLVWPSLARPSTTYRYTAIHYMRKFMYYIRNYTRTYPPTPLEWEHDLLEQQEKHLVGSYAVQDSWTGWCRNLPWEGDYS

SEQ ID NO: 74406 - protein, 62 aa, Zea mays
  Coding DNA Sequence Number=SeqID_31031
MGQSPEYEVYFRKSYPSKEKTVKDMLALRESSISLPEAKLTHDEACDQLKGPRLAGLHRDGP

SEQ ID NO: 74407 - protein, 152 aa, Zea mays
  Coding DNA Sequence Number=SeqID_31032
MAAATLSWSPMSSTPCLNHANGGSLGLAQDGRGASGDRIYTYGQDLNPKDTKTDSTTKSLDSRVHELALFCCKVDELTRRVHTILGVRVQHRDDGQRRSGVVRAGIRRYMQRHHDGCIEAKQLREQHVAIRCDEYMDINYMVKTQSIIESQV

SEQ ID NO: 74408 - protein, 83 aa, Zea mays
  Coding DNA Sequence Number=SeqID_31033
MCPEEVIYSKASTVGTDPHGKVPDPWIHSSDLQVGLGPPHAACSVHDTWATQLLTRYHIKGNDSPLLVQISQVVRKKKKKNDE

SEQ ID NO: 74409 - protein, 273 aa, Zea mays
  Coding DNA Sequence Number=SeqID_31034
MPHGSVPTDLGEIQNSRAMVDDLRRGVVLYACNKKAEQGGHSIYSEFGMRMFTVGLGFLPRRSGVVANNGAMTRLDIYDHESTNLPGERESWQKIVGAGFKVDQKPLSVYVQCTLERTRKDLKKAKVLRRSSKGVHNRKEIKSESAATPSRVLGPVYTKMDAQDASGLQLRRTGYGWKDNEIMDKPSWRGHSCVTGDNQLSRGVVIARNRSLEALDHQRQDLHSIKLSYLMEDRAASSINWYQISRLPVRTVISTRYLYLLSCALVQLFYYIF

SEQ ID NO: 74410 - protein, 574 aa, Zea mays
  Coding DNA Sequence Number=SeqID_31035
MGKHAKCRSADATADRETVERVTAGSLINTTLLLHPIVHARGTYRLAWNWNGRGTIGTVSFRDENGTDTAGYRVIPYPTLMYFSRIWDRIRVVKIRDGYRTGSGNNLDGKRKNGYPNSGYPYPTRDFREPLDAEVRQEEAEAESVLLRRLQVGLVGAGDALHHGAEGGGVGADARIGLPGTGTDGEQLGRFHWPVRAETTSVFFLYITFHKSSGREPLDAEVRQEEAEAESVLLRRLQVGLVGAGDALHHGAEGGGVGADVHGGRALGRPRPAPLPRVPARRAQPAPRGRGQRRYARRGTVHHCHDALHQHRRCRRGDEARGKARIGLPGTGTDGEQLGRFHWPVRAETTSVFFPYITFHKSSGREPLDAEVRQEEAEAESVLLRRLQVGLVGAGDALHHGAEGGGVGADAGVAASAVRKWHGVSIGWLTFSGRRGCCEALRILVAIKTLDFDVKGVALKLIIESNTIAIAFFVVEAMTLLSLGRLLWASNNTRPHHMGGSGAATCPEKVAYSEASPVSPDPMGRCRTPVYTVRASKFGPGPPRVQTGPLEWDPDPQYGVRAAHSGVPGFQDRT

SEQ ID NO: 74411 - protein, 81 aa, Zea mays
  Coding DNA Sequence Number=SeqID_31036
MAAGRSWSSICNRGGLGHGKKGERAALRGRGTGRAPGRGDESRELGGHHGWAVEQRTRPGGKGGAGCCCAREKTGRKGCGG

SEQ ID NO: 74412 - protein, 129 aa, Zea mays
  Coding DNA Sequence Number=SeqID_31037
MAMMGSASEKMYLCQKIAERDTSIDWAINSRSFTWDCEAKALARVVELSASLENLQEYYNTLHEEVHVLYDRLHTNVPPEVASMGAGPSGIANGEPDGELDLFGAPPSMNLANERSPDAGSGAANDEDN

SEQ ID NO: 74413 - protein, 64 aa, Zea mays
  Coding DNA Sequence Number=SeqID_31038
MSASPEPISGDKDKACLKANGGSRIQCAYLPNPELHVYSGNKTAGLGAFPSPTQLVTPTIGTQV

SEQ ID NO: 74414 - protein, 114 aa, Zea mays
  Coding DNA Sequence Number=SeqID_31039
MAQPLGLALPNASHPHRCLNAGDHQETKRDGARKLAEPQPLQADHPSPSPPSLASTIASLEASEAAQTLRLNTTSLETPNHFVGLPSPRASVVQAPMSSTASAHGQTDSGHLRH

SEQ ID NO: 74415 - protein, 47 aa, Zea mays
  Coding DNA Sequence Number=SeqID_31040
MPRCPAKKRKTLAMAPRVRENQRQCVPREARSPGPPGGAEAHDCELG

SEQ ID NO: 74416 - protein, 67 aa, Zea mays
  Coding DNA Sequence Number=SeqID_31041
MCHWFREFIELAAPPDSVAPARAWDMLTCGPRMSAPPEQKRDQGCAKEMARWAKWSGGRPMRRCNNT

SEQ ID NO: 74417 - protein, 268 aa, Zea mays
  Coding DNA Sequence Number=SeqID_31042
  Gene Ontology: Biological process=protein modification process
  Homolog annotation: Hit_ID=A2Y218; Match level="QueryCoverage=100%, HitCoverage=100%, E-value=5e-51, Identity=44%"; Hit description =Putative uncharacterized protein
  Pfam annotation: Domain name=ubiquitin; Domain location=105-171; Score=8.5; E_value=0.037; Accession=PF00240.14; Description =Ubiquitin family
  Pfam annotation: Domain name=ubiquitin; Domain location=6-79; Score =37.7; E_value=4.2e-08; Accession=PF00240.14; Description=Ubiquitin family
  Pfam module annotation: Pfam domain module=ubiquitin::ubiquitin; Domain location=105-171::6-79
MEVTFATPGGREFTLEVWYFATVREMKEAVHVREGIPVASQRFFLAGQEDDGLELDDARDTAHYGIVQGSRVLLLLRDDAPPSASPAPATAVHVTVSAPEIGLCSVALDDVPTSDTVARLKELLQDRTDGALSIARTVLFLGKTEMEDGKTLAEYDPPADGMDLSAVVRQQPLVASGGGAEARSQQRIEVSVMFGETVVALEVGATDVVRDLRKEVERLHLPVRDSSGNEYFFVYKQNVMDEDRTLRWHEVKNGDTIEIFNGTVTGGA

SEQ ID NO: 74418 - protein, 369 aa, Zea mays
  Coding DNA Sequence Number=SeqID_31043
  Subcellular localization annotation: CTP_CleavageSite=91; ConfidenceScore=5.66e-01
MQAACNHAKWAHFSNFQHAQHGGPGPRVVQPARRMLRASNCTATRAIAAPPRLRNQYRGSRQPYARPSSASLARWGSERRFPFAIMTRVIKGARLRAFLLIRGSKAGPSEGFNGRLRARGLHTHYWSEVRRPAPRKGSTAASGYSGSAPTTDQGGNDLVTESHQREASSPQTPSTGDRVRQITRSSPETPCSAPTEGNMALSPSSLWKGDAGAVNIPARELGTRPYTRATASSHEGTTRPAEALREALRPRRSQTTPPRPRGLHPAGALARTHRNKMQPRKTGPLAKKCDESLQASANTPFEARGLLSGTIIRGTLKAPNSQLSEADRQSGLAADTIANSAPPNLGLGLRLSPGRRRTLLRPTQGSDSG

SEQ ID NO: 74419 - protein, 121 aa, Zea mays
  Coding DNA Sequence Number=SeqID_31044
MQWLFGATSYGKIVEGMLLYNFAADLGWSCYGKSRGNSASTLVVRRLMKPLPWYSSSKLKKIAEREEEIEVTEEQVQPPLDTQAGNHFYFDICGPEPDSPVNEGKPRCICHLPCYFKIFLT

SEQ ID NO: 74420 - protein, 143 aa, Zea mays
  Coding DNA Sequence Number=SeqID_31045
MQWLFGATSYGKIVEGMLLYNFAADLGWSCYGKSRGNSASTLVVRRLMKPLPWYSSSKLKKIAEREEEIEVTEEQVQPPLDTQAGNHFYFDICGPEPDSPVNEGKPRIHFSKHFCKTESLNIEKPYLDSHITSIPLRVFSLVG

SEQ ID NO: 74421 - protein, 184 aa, Zea mays
  Coding DNA Sequence Number=SeqID_31046
MDWSWDGWRRERAGRGDRPGTREQDPSQPWREQRSGRGGYLGVQCRQGEPEPRPSASRAWAMARGERTATERLNRLEGAEGAVTMGRRPEQGKRMAMETREELSELEAARRPGSSSRPWKRKLGDRGAQGLHGAQMPGRAASLREAGERAGAGIEHGQELRHAFHGRSFGWALDSGKRGWEWLM

SEQ ID NO: 74422 - protein, 67 aa, Zea mays
  Coding DNA Sequence Number=SeqID_31047
MCHWFSEFIELAVPPDNVAPARAWDMLTDWPRMSAPPQQKRDQCCAKEMARWAKWSGGRPMRRCNNT

SEQ ID NO: 74423 - protein, 161 aa, Zea mays
  Coding DNA Sequence Number=SeqID_31048
  Gene Ontology: Mol. function=transferase activity
  Homolog annotation: Hit_ID=Q46845; Match level="QueryCoverage=45%, HitCoverage=41%, E-value=6e-30, Identity=58%"; Hit description =Uncharacterized GST-like protein yghU
MTDNTYQPAKVWTWDKSAGGAFAKYQSPEYDAWLIRIGDGDQFSSGFVEVNPNSKIPALRDHTHNPPIRVFESGINDDSYQKLKEENERLKMSLTQLKGKCIAQPSQDNRDHMVKKLETGTTVACTTSLEENVKELRIAKRKKQKMNFSTSYKSLNHASTK

SEQ ID NO: 74424 - protein, 142 aa, Zea mays
  Coding DNA Sequence Number=SeqID_31049
MGKNNKRKREPTPQSEDFGDSEYSEEEFSSESEGSPAPIPLRESSDDSDDSQGLAAEVWTYIRAIERSGLEGSDESEYSSDEEDSSEGGGGDGDDDDDEDDEGSGGNDGDDGGRGGSKDGDDDSSRGSNRGGSGRGSNRASG

SEQ ID NO: 74425 - protein, 253 aa, Zea mays
  Coding DNA Sequence Number=SeqID_31050
MSTFSSPRMIRIKENNGRMIKNGKDCVEAFPELGAKTHPESLPLLFICICMVASILTHIIECLSILQHCVIPLSQGQKLIEFTVHNVCWYMMPSKGRLEFLSGNNMINWLHSEDMIPPCPGRSAKLLCGKSSLGGIGTCPSSSGILDSTTRSHMSASRGSSALVNSGGWVLRNSWWLWPVGADTARHPQSAEVVADAVQAAAESSSVEPLAPASWEAGAVVGESAGSAHDKLFLPSEIKEFLLLLMIYISGKQ

SEQ ID NO: 74426 - protein, 183 aa, Zea mays
  Coding DNA Sequence Number=SeqID_31051
  Gene Ontology: Mol. function=carboxyl- or carbamoyltransferase activity; Cellular component=ornithine carbamoyltransferase complex; Biological process=amino acid metabolic process
  Homolog annotation: Hit_ID=Q8SA97; Match level="QueryCoverage=56%, HitCoverage=19%, E-value=5e-09, Identity=37%"; Hit description =Ornithine carbamoyltransferase
MAPPVDVAGPRPRLGDVEDPPRSRSSLSSEAEVESEPLGRARRRPSAEARAESEPWGRAKQSSSSSRAEPKSEPWVGRSGVRRLLGLSPSPSPGSGGAEFAVFRGLARVRALGRAEQRAEPESEPWVGRSGASYGLLLGEDRASGEPEICSSLEGALGRDRDPPGPLQLYADEGYQLRIRRLE

SEQ ID NO: 74427 - protein, 393 aa, Zea mays
  Coding DNA Sequence Number=SeqID_31052
MNKNTGIQSAIQTELRFHLRSNDNDPRSGWPNCSSEGLGADAAATLPSPTPTLEGRGQGPSALRQIPTQILSDEWGTDLRVEASYRCKGRTAPEHECRPGSTRYIGRSPPRARRGNRLPAGGGTGSQGDEPDALRLTTPAVDQPRIVEVRPARRASERPLPQTPKERPTHEPAREVELRLSPASTPARMMNILEAEGGTKIAARLASPHPGADEKKKPNRHARCMQPPSSYKWPSTFAQTNGRKGGAAMQAACKPRQVGALLRLPTRPAWRPRPTRHATGAPDAACERLHHHPRHYHASSTAEPMPRLEATQQHQPGATVNAAKNGPAVIAVAGGQEQRSRRQPGLRPIQGQRENPLSRREDDAPVFRSSNGPRTRNGRPVNHSPRHINSAAG

SEQ ID NO: 74428 - protein, 196 aa, Zea mays
  Coding DNA Sequence Number=SeqID_31053
MKGYALVAIGSEIHSLKAAMITDIRGPSMADQSTHFNLPKRWRRCSPVGGIQTSKCLEPKTYWCYKMSRTRRMMSKASHLRLKRQEFHPCDTTAPRCIVNTDKQFGWRCCCCKPAGLSQSTPSTYTFFVVGSVALVVGWAGPQDCITTGTQPIDPQAVYASGGKVYGRGEGHQGMLLVALGSPSQMQRKLRDYELN

SEQ ID NO: 74429 - protein, 221 aa, Zea mays
  Coding DNA Sequence Number=SeqID_31054
  Subcellular localization annotation: CTP_CleavageSite=44; ConfidenceScore=5.04e-01
MAQHIIHEMGALENGVPVQSDQMRWAMSGQGRVQAPGRARRRPSSEAKAESEPRGRARRSSSSEAKAESEPRGRARRSSSSSEAEAESEPWGRARRSSSSSGAEAESDPWVRARRSFLWRPRADLATVSLTLSSGTAVGATQAALSSCQAGQWSGEAILALNASAIRSVGVAIWPRLLLGEDWALGEPKLCADGGYQLRLGVLGDYIAKLSDFDLANVGPE

SEQ ID NO: 74430 - protein, 161 aa, Zea mays
  Coding DNA Sequence Number=SeqID_31055
  Subcellular localization annotation: CTP_CleavageSite=53; ConfidenceScore=5.63e-01
MGAIQVKAPSTQGTRSRLARAQPRAKAADPGGFTSRPRVPSSNGRTFGSPEAQASRRSNLGQIATPTDHIENSAACPAPTAVPLDRVRLTAAKSSLGRHRKLRLARPQSSDSASTPDDGLCLARLQGSDSTSTPDDGPHLARPQGSDSTSTPDDGLRLARP

SEQ ID NO: 74431 - protein, 344 aa, Zea mays
  Coding DNA Sequence Number=SeqID_31056
  Homolog annotation: Hit_ID=Q6J9V9; Match level="QueryCoverage=26%, HitCoverage=33%, E-value=3e-13, Identity=52%"; Hit description =Putative uncharacterized protein
MQPGCLMKILEAERWLKDTNFREVAFLQRRQNESNAGAPHPGARKVEGRDAWGECEDMVAIQGGRPPFKGNSPHLRPQPSLTESSPTSSKVFPLRHGSWVPRVMQAGPGQKKPNRRAQSTTCGTFGRRSRRRFTFALMTASKKGSGKGDTPKGILLREGSGPQALLLIRGSKAGPSEGFDSRLRALGPRALLLIRGSKAGPSEGFDSRLRALRLRAHYWSEVRRLAPRRGSTAASDHSGSAPTTDQGFVGWPPKGSTAASEHAERGMTLGQGSVPLKGRDLASPGAQARAKAADPGGFTSRPRVPSSNGRTFGSPEAEASRRSNLGQIATPTDRIAGAFNARID

SEQ ID NO: 74432 - protein, 280 aa, Zea mays
  Coding DNA Sequence Number=SeqID_31057
MPHRRPDQRAILGEATTPMVVLVGTMTSVGSGSQTRNPRRGAVGGQAGAPIDGELCEEKLIADDMESGERHCLLDESLQVAVGGLRSRRRFNTRTKGRVEVEQPSLSVPKELVLKGVSSLASGALLLIVTPIALQRSYPEGGQALLKLDEELIGGRLVEAVGIARWTSASAVRRGELGLPLQTAIPQQFAPLPRTGQEPLPRKDRIFHRFNRFLYGKSLLEISENRKLGAFAPFASNLPWERIKERPFELVGAAPEEAKGDAAAAPSAVGRSWKSVKPVV

SEQ ID NO: 74433 - protein, 226 aa, Zea mays
  Coding DNA Sequence Number=SeqID_31058
MGSARVAFVLSSLEERNFAEVGIFQPSLGFKDFHQAARLHPLASGRAEPELYLPRGFVGHLLPHHSGERVLTGLAEGADFDNVGPNGRKRRQLPRARFAGSASSGAASGATFHRWADHGYLPDVRAAVAPRAPGDRPRCRALLGRRSCSWAILPLLRYDAPAWRSVFARLGGPGWGSAGGQTAAVVGAEVVAAEEVLVADEIAATIHAPGLWLFGFDSLSSPLEWG

SEQ ID NO: 74434 - protein, 80 aa, Zea mays
  Coding DNA Sequence Number=SeqID_31059
MSPSEAGSDSAEGGVDAEGAAAPPLMSDPAGISLSVVIAYPSKSYFSRKVMSEKVMSESSYALVLGDPYSKSVGRIASAP

SEQ ID NO: 74435 - protein, 789 aa, Zea mays
  Coding DNA Sequence Number=SeqID_31060
MEVVELVPCARNKWGNWYEFWFYVAEGTVEDHPGLPVAEMCSHYYSAYPQFEVAKEDADEGALRGAASLSSGRDLVEEFVAYGVWPLAHGWALGEVCPRQMPSRGGMLVRSPAFALDLRNRDPAAFVREAEDRAVRIVGRYVPKTERSWDIRGSNDRLNRVFELNRLPYGGYPGQDDVDHRGKKPAAETGDDPAPAAAPSSKKRKLGTATGGLGVSDGFARELMRTCAAPGGRMSSPELRESSARMLKVTRGWWPKNVPIPRAAGEDFFTSRMVHDWRVFPYGRNIAAVVSAVMDKDRQGAAQKRQAVVRLPEARPKRSWGTAKAAAPGGSQPTLAAKSAAPGSSRVPEAVKAASAGGTKPSPAGAAKARELPPPGKRVADLATEISVDDYLAGSGEGQLVVVPPAVATAAAAVVPRARGSAPSAGGEIPALTAVKDEAGAVSHRLKEVLSQAADFADRVASGALMAVVSAEVERLRAQHADAVREKSAADSKCRKLAEKVAALEGERADLRRQLAEERREANESLAKAQSAHAEANLARVEGSLARQRAEEWEERFNALQTRVERAEGSMRSEAERTRKQLMDSYHKLGARTADFEVPDQEPGLRCLEWLQEELLALPAIVEGFMSYASLVTCEGAMNMLSREGCRHYEVFDQANEDFEREIYKVEDPVVKESAGALFDRMWGPHGREVVRERSDTARVQAARNEKVEDFGALNSAQPDSESNPVAAVSEVAPAPPPETVEGAPDAPAATAGGGGSSPTAAPRAEDRVKMAAEPAAEGPATTGSSQVA

SEQ ID NO: 74436 - protein, 78 aa, Zea mays
  Coding DNA Sequence Number=SeqID_31061
  Homolog annotation: Hit_ID=Q2QTF5; Match level="QueryCoverage=83%, HitCoverage=98%, E-value=3e-08, Identity=45%"; Hit description =Retrotransposon, putative, centromere-specific
METRALLFCLGTREKTEREKDLNMLDSDCRRTPTCDGHHDLDECPSGQGVTLHKIVTAIGGGVSVAKAQRLGKAVVGP

SEQ ID NO: 74437 - protein, 137 aa, Zea mays
  Coding DNA Sequence Number=SeqID_31062
  Pfam annotation: Domain name=zf-NADH-PPase; Domain location=42-73; Score=4.8; E_value=0.1; Accession=PF09297.2; Description=NADH pyrophosphatase zinc ribbon domain
MECCYQVLIRSYQATVVNCNQQVEPVKDWMSDCVEKQKPARRRNMWSSGCKGRMELAEWQYRKYCTSDAKKALVGITENEEEVTVEEEETTPSTENPPAGNCFYFDICGTEPDSPTTQGKPQCICHILAVLNSLSLE

SEQ ID NO: 74438 - protein, 102 aa, Zea mays
  Coding DNA Sequence Number=SeqID_31063
MARVACTLRGKRLNGCVSVLSVGVNPTMEISAILFCLGTREKTEREKDLNMLDSDCRRTPTCDGHHGHMRAPIGMFKHNMENLSSLLSYGSGIIVISVLRPP

SEQ ID NO: 74439 - protein, 60 aa, Zea mays
  Coding DNA Sequence Number=SeqID_31064
MTVGVIEALYAKVVSPFLLPGNRWGQLMYSGGYGCWSDLAIHPATGLDSRVGPYPSRRGA

SEQ ID NO: 74440 - protein, 127 aa, Zea mays
  Coding DNA Sequence Number=SeqID_31065
MEAHQYRRYAEKRFAHDALDHRDAAVRSLVARLRACQGHTLKLLSASDWIEMFLTLSIKGINVASSMPSFNMYLEDVQFIVRGAWPRGRMATRFIDGGKHLVFDHATQFFTASIRTAAGPGYYPMTW

SEQ ID NO: 74441 - protein, 135 aa, Zea mays
  Coding DNA Sequence Number=SeqID_31066
  Subcellular localization annotation: CTP_CleavageSite=83; ConfidenceScore=5.32e-01
MVAGVGSAACAGDRAHRRRVLRPAHGGRAQSKRSGSFTGGQKCCRRKESKGGSPCSSVYVRQRSDEVWRCQSGTSGEVVLGLRAQGASQSSKEACRGVGLFGGGPEWPVHGGRGSGGRWHAVSRENSSDLALGRG

SEQ ID NO: 74442 - protein, 97 aa, Zea mays
  Coding DNA Sequence Number=SeqID_31067
MEPELLGAGHGAGACLEDVRHGRSKELAGRNDDRKGSSAGVQLGGRSSPQGKAGGHGTPARWWLLPWSREEEGRLLLRVGGSSQGEMKVAARGGSEK

SEQ ID NO: 74443 - protein, 19 aa, Zea mays
  Coding DNA Sequence Number=SeqID_31068
MAVSSDSDHENTEHGQDEA

SEQ ID NO: 74444 - protein, 67 aa, Zea mays
  Coding DNA Sequence Number=SeqID_31069
MAVGVSEALYAKATQLVLLANQTRQPNCCMSRGSLEDMVAGVTWSSTLPLGWTVEWDPTSAGEEQEE

SEQ ID NO: 74445 - protein, 280 aa, Zea mays
  Coding DNA Sequence Number=SeqID_31070
MKIFPYGRNVGAIVSEVMEKDCQDAQRKKRRAHIRLADPRQEVKMARPSAKPSAPDAGAEFGQLAVVPAALSAGPVTGTKGDTGASKDRWSKFYAGGEITFAAATKGVAALVAQQLKYVAAFAGRIPSGALTLDFATERRRLEGRIERFRTQHTEAVRDNLALKRATNTEFGLKSLHSYSEKTEASTYAGVERAHTLFVDAYRELGAQTAPFDRSSKEVGLCFLGWLKEELESLPSIATGLMSYTSLVTCEGSANALSCEGCRHFEIFDQATEDFNRGIF

SEQ ID NO: 74446 - protein, 113 aa, Zea mays
  Coding DNA Sequence Number=SeqID_31071
MAQRRELKGTQRLKLALVKTLRRRLLWHRLVAAQVPTSGPAQATPDDVDTDILMAANATPFNGNVAEGSEPGSWSSDGDDFGSPFSWIEEYFEEDLDYFATLDLATLESPPQT

SEQ ID NO: 74447 - protein, 46 aa, Zea mays
  Coding DNA Sequence Number=SeqID_31072
MAVMGSTSEKMYLCQVRKQQFFVAFVPRWCLRKKIKTEASGGSVLL

SEQ ID NO: 74448 - protein, 126 aa, Zea mays
  Coding DNA Sequence Number=SeqID_31073
MAACRSDATCLEASHVAVNRSILLARRRVMWSSNPAIKRGEMFVKDSIWCLPHGSTENEEEIEVEEARTTPPPPEEPQAGNCFYFDICGAEPDSPITQGKPWCISHLLDALGDRSCVLNKLMHFLP

SEQ ID NO: 74449 - protein, 334 aa, Zea mays
  Coding DNA Sequence Number=SeqID_31074
  Homolog annotation: Hit_ID=Q5JM77; Match level="QueryCoverage=96%, HitCoverage=97%, E-value=5e-31, Identity=57%"; Hit description =Putative uncharacterized protein OSJNBb0036G09.7
  Pfam annotation: Domain name=DUF623; Domain location=267-334; Score =48.4; E_value=2.6e-11; Accession=PF04844.4; Description=Protein of unknown function, DUF623
MEDSVSGAGAGAGRKKLKHRLAAMLSVFSRRAGGGSRKRRDGEDEAKPPPPLAFPSYSSLGSGKKPGGGGGVADRRLSLSAPLVHITIDCAGRRSVDAADPSLLLSLDAAGRRADRRSTAAGPGLLPHESGGEWEGRKCPPSSPSVARLPPLPPLARWKQGRGSSRRPSSRRLASSSSSDDEYDEDSRNLFSSRSLSSDSSDFYSCPRRNASASRGRASVSGPCRALALAPAPAPPRRGASQSCRYSFELPRGSSATDGGFAVVKRSADPYEDFRKSMQEMIAEWPAGGAGGGGDDEGEHSAERLLETYLVLNSPRHYPAILAAFADVRETLFP

SEQ ID NO: 74450 - protein, 256 aa, Zea mays
  Coding DNA Sequence Number=SeqID_31075
  Gene Ontology: Mol. function=GTP binding; Cellular component =intracellular; Biological process=barrier septum formation
  Homolog annotation: Hit_ID=A2WUS6; Match level="QueryCoverage=82%, HitCoverage=85%, E-value=1e-87, Identity=62%"; Hit description =Putative uncharacterized protein
  Pfam annotation: Domain name=MMR_HSR1; Domain location=131-195; Score= 22.9; E_value=8.7e-06; Accession=PF01926.14; Description=GTPase of unknown function
MLLHHRLLPRLLLVPSTHTSTLLCPSRLPRRLSLSPRFYALPHLAAPQTVDHSDDEGAPQGEGQIKLPLDHLFVPPGATMDAGDQEAVSARVLKGSNIVLGPYARGDAQVVNADFVKSSVRPDDCPRDGLPEFALVGRSNVGKSSLLNSLVRRKRLALTSKKPDASIPAKKIDLDYASWLGQNKVPMTLVFTKCDKRKKKKNGGRKPEENVETFQGLIREYFEAAPPWIMTSSVTNQGRDEILLHMSQLRNYWLKH

SEQ ID NO: 74451 - protein, 86 aa, Zea mays
  Coding DNA Sequence Number=SeqID_31076
MENGKKKKTMSADDKSCKSHEHSKLEFATLFTYGWVILHVLNIQWRAEVETGSQEIGDESRRCRPRGRRVEKSRSQHTEACHHTDS

SEQ ID NO: 74452 - protein, 48 aa, Zea mays
  Coding DNA Sequence Number=SeqID_31077
MTTGYGGLAFEDGKDHDTIAMGGNWDALLYDDIDWEAAAADKLVISVR

SEQ ID NO: 74453 - protein, 307 aa, Zea mays
  Coding DNA Sequence Number=SeqID_31078
  Subcellular localization annotation: CTP_CleavageSite=65; ConfidenceScore=5.77e-01
AQQEVSASPDPGARPPPRSQKTVSASPDPRARPPPRPGKVDSASLDPRARPRPRPRAESSPRPTPASASGGVSASPDLGARTDHATGGIIITLPLASSGYGEQERRPIWLAPGSSAHPTATTSHAHGSSTSPTATLAWPSYERVVAREDGLTNRLSLSLANACNPLLQVHPPWAQDNTSREALRYNSPDCLVYTGQCLVLQGRVALELASFGNSQRLVRYNSPDMSGVHRTVRCDNEATDTSAPTATCSALNARQHAQKSGTSMLAHRTLYSTCPVRHRTSRRAQKTELQRSEPNDFGDVAGAPDMS

SEQ ID NO: 74454 - protein, 87 aa, Zea mays
  Coding DNA Sequence Number=SeqID_31079
MAGFKYHSDVSPNNIMESTMETLSAKEQQKIEDYMEQLIKESKAKYLANFKVDKNVETKENQQDPSTANGHAQSQPLSGKLMNSYTE

SEQ ID NO: 74455 - protein, 307 aa, Zea mays
  Coding DNA Sequence Number=SeqID_31080
MARLRHTARKLVIPFLPTRLAEHPLRRPVTGQSSHLQRLHHRLHEEQERRRQELEQQDSSFSLQREIESVRSCSPVLPLEAPPAPPLSTPAAGVAAGGDPDDGGGDSSSSHNTDLSEEQELEGWVARPITRDAARGREVYPNRWEATCLVRGPENSLRGAEVCSEHYSISERDSAEAAMRDAARRALSHYFSVLGGVADGLNLKYYPRHPSGSIGGVVVSPVGEDNPRLSSTVNLAVVLNMELDHALDELIRARAEIAQLRAERAEHRHLEDGFPAPIGTQHPYRSPWRGHHAYGNPDCRTKINLEP

SEQ ID NO: 74456 - protein, 66 aa, Zea mays
  Coding DNA Sequence Number=SeqID_31081
MAGIARSTRAGGCSRRRRVYQPNHGDLVQSKGTRVGQGWKGLGWPVYGGSGSGGRGHVAHGQTVVN

SEQ ID NO: 74457 - protein, 89 aa, Zea mays
  Coding DNA Sequence Number=SeqID_31082
  Subcellular localization annotation: CTP_CleavageSite=55; ConfidenceScore=5.00e-01
MLVDYTTVLNGPSVLVEGPTQQGIESIVKVTPASGVTSDGSSDPSLRLRLLRELRAVARTATGVVVVSVSVRVSSSSRDALRWCRGISG

SEQ ID NO: 74458 - protein, 143 aa, Zea mays
  Coding DNA Sequence Number=SeqID_31083
MEQRITRSTLTGGRAKSGDRGLASPAKQTPIPCSGSFTEVCTVFSEGWEGFCWPVYGGRGSGGRGARRAWGKRRWIRAPVKSSVRGRGTAEVPRGFIGAGAGNGTGWALARRGAREVGRGHALARAERVEHVEVFICPCSKAC

SEQ ID NO: 74459 - protein, 421 aa, Zea mays
  Coding DNA Sequence Number=SeqID_31084
  Gene Ontology: Mol. function=kinase activity; Cellular component =protein serine/threonine phosphatase complex; Biological process =protein amino acid dephosphorylation
  Homolog annotation: Hit_ID=A7R084; Match level="QueryCoverage=19%, HitCoverage=18%, E-value=4e-34, Identity=87%"; Hit description =Chromosome undetermined scaffold_298, whole genome shotgun sequence
MATHCNFYRIFGKDCNLADREYVLVPEQGAAQEVAPDPAPEPAPEDLPATALEGKPRAHQALDRVVVEAGRHGVRLILSLANSLSLANNLEAYGGKTQYVRWAWEEGVGMSASNDSFFYDPAIRDYFKVYLKSQLAWKRLVALGSHAPKASPIFSKVACAIGLAVSRSNIAPYLVAFIAGEINIFGIAVHSKYTDGPICRDSWHCTQKHQLTALPMLRKLLRKLLVESYQTFLKRTLLHLEVLLKCIGLFYDSVDLAREAAHLSRFIYNFRRWKDVSFPRPLYPHVHPAILVETYEHGESVSRYVDDLEGHDRIKSALAHIGTHALLKMLLMERVCENTVSVELKQTKSNNFVPFIRSGEWSNIGGRDYMEHAHVCISDLAKNFGSNSAVDEVISFYGVITCSLLNIQSILRQGNHVLWFF

SEQ ID NO: 74460 - protein, 164 aa, Zea mays
  Coding DNA Sequence Number=SeqID_31085
  Homolog annotation: Hit_ID=Q5GAU9; Match level="QueryCoverage=37%, HitCoverage=36%, E-value=8e-20, Identity=78%"; Hit description =Putative uncharacterized protein
MPSLKITVFHLGFDVFAWVIHMLTIESLVSRRGTERGELKADKDKIMREYRAQLDAERAQKLANGRNHSRLNSKSSSSKKERKDKDAKKRSKKRRKHKSSSESSSSSSSESSSSDDEDRGLRKSRSQSRSKRTRKEKKSRSRSKRRGSESEEEGPIRLSKFFGK

SEQ ID NO: 74461 - protein, 44 aa, Zea mays
  Coding DNA Sequence Number=SeqID_31086
MHRHECRGIAAPQQQVSSESGIRLRVYRSMVKTKLGWDSDHDEG

SEQ ID NO: 74462 - protein, 180 aa, Zea mays
  Coding DNA Sequence Number=SeqID_31087
MPELEIERVHREFKKRETQGDGRAPSWVRARDALARNQGEGELDELSAGERETGRGGHGEQGRAGGREGEPQGGARREEACVGSWSIAGHGRERQLGARRAPGRAPRRGGERRGGWARAMGASRPSERREINAVGKSRSAGRAPAEEIEAERLGERKEIRTLRGAETKIPEGGVGFFLLS

SEQ ID NO: 74463 - protein, 100 aa, Zea mays
  Coding DNA Sequence Number=SeqID_31088
  Subcellular localization annotation: CTP_CleavageSite=37; ConfidenceScore=5.17e-01
MARRLTWAADRLFRPTALLAVVRPTCGSHTSAATHSRATLRGKIKSCMHSTVALDRRSEGPECVPGLCFCMKTTSKVNEDPGEQQTEVAEQELIEGKLCP

SEQ ID NO: 74464 - protein, 134 aa, Zea mays
  Coding DNA Sequence Number=SeqID_31089
MNVYEITLAVSHPPPTGQEQVPQGEAHGGCCDEFYPHRSTGRGVIASPVGEGNPRLNSMVNLDVVLNTELDHALDEFGKDRAEVAEFSAECAARHYLDGGSPAPVGIQHPYRSPPRGRFDYGTPDCRTRIDLDP

SEQ ID NO: 74465 - protein, 70 aa, Zea mays
  Coding DNA Sequence Number=SeqID_31090
MHDFLLELALLDSSGWLLGQEDGLPGCSDAGIDFLLAGCSNGTADAEETASGTAAGSDANAGAGKVWFIS

SEQ ID NO: 74466 - protein, 122 aa, Zea mays
  Coding DNA Sequence Number=SeqID_31091
MVKTKLGWDSDHDEVFENKSPTVTELETERAHRVFKKRETQGDGRAPSWVRARDALAWNQGEGELGELSAGERETRRGGHGEQDELEEERASRREERAGKKRAPRWRALGRAARRAGSRARK

SEQ ID NO: 74467 - protein, 122 aa, Zea mays
  Coding DNA Sequence Number=SeqID_31092
MALAARKQGEVPGLQEQRRFAVVELHNIGEKEKLAAGGLLSHGDVVGEGAGLREKGWDSKGAEVVGSHGRAEVPDEDITMSTTTPAAPPHQAPLPSLAGPITRARARDLNFVMLLKNAGPKE

SEQ ID NO: 74468 - protein, 124 aa, Zea mays
  Coding DNA Sequence Number=SeqID_31093
  Homolog annotation: Hit_ID=Q7XBD3; Match level="QueryCoverage=36%, HitCoverage=8%, E-value=6e-08, Identity=64%"; Hit description=Zeon1 gag protein
MTEEANLKGHNTAPNLQGNNKALSGHQSQGAEAAGASEEDTGINPRRLYCLFYGEDKGHTHKNMPSYIQKQKEIAEAEAWQNQPKQSYILLHATLPMYQTSQIRLKQTSEATKLVPKGARTNVT

SEQ ID NO: 74469 - protein, 123 aa, Zea mays
  Coding DNA Sequence Number=SeqID_31094
MAGAHVTVDAQLQEVRGQVDGLAADIRTMHERLDSTVTSTTARFNQLDLAETATRTTLDTILARLDALTTRMEQDYGSYTEQEDADRCGSQSVEEYYQLLQKGMLRCGLVESDDAARRVFVVV

SEQ ID NO: 74470 - protein, 108 aa, Zea mays
  Coding DNA Sequence Number=SeqID_31095
MGKPVPSLLMLLLSRGRYNGSSSLISCEKQTIRIECLSLQVTALVPTITGMGDHVSGRVRGYVCGQVHSGFNNIMLKEEKTKLMSNLGFLGHTWLLVVYEYHSRFRFY

SEQ ID NO: 74471 - protein, 30 aa, Zea mays
  Coding DNA Sequence Number=SeqID_31096
MSKDGAALGLVMMAGGDASGSDPEVHANMQ

SEQ ID NO: 74472 - protein, 372 aa, Zea mays
  Coding DNA Sequence Number=SeqID_31097
MKLMKKLTEPESLSHAICHSTILGLSAGARDDGLLLQGPGDEVGGEKNGVPGCGSAHVRAVNPISVDVDRQLKSRRGPKEAKSRGGAKIEKGPLESGEVGLLHRSDSGGELCLSADKRGAGLAIVHACPLQDVKDVFALVKEKALGAPLHDDLEEMVEQTQVLHRELALKGDDLPREGKGEHGPNNGELDGAEGLVVVHSKEGKERNGMIDRLGGEAVQEVSGVWIMEGLNPVRNRKGGLKLEGANEIGDGANHVFGLAVLRRGVGLGHPQLHVAREEEGIRHGVVELPPVVTLNSSNGATETSQHPSKDVREGGECVRLMRDGKSPEVMREVNQDHKIVLVTGEARYQGGPKVTMDEIKGDSCAGHGRGVR

SEQ ID NO: 74473 - protein, 83 aa, Zea mays
  Coding DNA Sequence Number=SeqID_31098
MCKYMQGRIYNMGHPSRGPKHGSYVETGPELGENGGRKLLGKDVDKLRSDRDEDTDINDSDTLVDEVEVDLHVLGALILHGIG

SEQ ID NO: 74474 - protein, 71 aa, Zea mays
  Coding DNA Sequence Number=SeqID_31099
  Homolog annotation: Hit_ID=A2Y0L2; Match level="QueryCoverage=54%, HitCoverage=4%, E-value=1e-10, Identity=74%"; Hit description =Putative uncharacterized protein
MSKDGAALGLVMMAGGDASGSDPEVHANMQRVKVYRLTNDGQWDDQGTGHITIDYIELPLSFDDVNIASHI

SEQ ID NO: 74475 - protein, 53 aa, Zea mays
  Coding DNA Sequence Number=SeqID_31100
MSPKQQMVESGRRMVESGRRLVVARRCERRRITGIAIPGCQGRRPLGLIQTDS

SEQ ID NO: 74476 - protein, 83 aa, Zea mays
  Coding DNA Sequence Number=SeqID_31101
MKLDDLVLMKKLGYFGKNNDDLIRLPSDKIVPEPKDDEVVKDSAACATPTAVPLDRVRLTGSQVLQKAPQETSLRPTQGSDSV

SEQ ID NO: 74477 - protein, 54 aa, Zea mays
  Coding DNA Sequence Number=SeqID_31102
MPGGARWRCPSLNCRSVSHNTKVTCSSRELSKSHGIFDKSVMVVAAQRVSYLCH

SEQ ID NO: 74478 - protein, 62 aa, Zea mays
  Coding DNA Sequence Number=SeqID_31103
  Gene Ontology: Mol. function=aspartic-type endopeptidase activity; Cellular component=chromatin; Biological process=chromatin assembly or disassembly
  Homolog annotation: Hit_ID=Q7XFZ5; Match level="QueryCoverage=95%, HitCoverage=7%, E-value=1e-10, Identity=39%"; Hit description =Retrotransposon protein, putative, unclassified, expressed
MADHLRAVLTVQQQHLLFAKRSKCVFGYYRKFVHDYVTIAAPLTALLKKDDFTWNDDDAVTF

SEQ ID NO: 74479 - protein, 117 aa, Zea mays
  Coding DNA Sequence Number=SeqID_31104
  Pfam annotation: Domain name=IQ; Domain location=48-68; Score=25.0; E_ value=0.00029; Accession=PF00612.18; Description=IQ calmodulin -binding motif
MGDLWTNIRADLAKMQATLQRVEQGLLQIKAAVQHEQQQLALSVRLQTSAAAGIQAAARGFLARRRVRDMRRQMLEAALVTVDLGTQGHDLALSDGHQQRHRAAISNCEHGVWFWVK

SEQ ID NO: 74480 - protein, 142 aa, Zea mays
  Coding DNA Sequence Number=SeqID_31105
MEQLRVTAAHSVAKQRKLAEHLESEEGQLRSEGEGAQTEADRLWGEETQLRATLCEVSLRVVEVESSLGEANAHLERTNVELLREHGTTEGFAVDRNDEELDVIEDQVRPHARALAERVDVKTLLTGPWSLASPAGGSPHDA

SEQ ID NO: 74481 - protein, 501 aa, Zea mays
  Coding DNA Sequence Number=SeqID_31106
MDGGSGLNIMYIETFDGLGITRSTLRANTPKSRWSRSEDAQQKPDLRQGRRSSVNDRQGDTTKEHRQADLPASSIVQASRSPAREADGSARVCAGQGVRARCRVEGVSVDPAGKATAATDPAGKTRSSQRDGGSSRDGRSNVDPAGKAAAATDPTKAKKGVGGGACPTGQGPAPDLAKGVDGTGDGRSSKGETLLRRQREQGRAAAGRRPPAEKSAPAPWAELGKGDPATAGSAGGGPVEDATVSAHAGSEKPDGVRRMGCCAEIAVVACVEVRPSQVGRLGREVAGAAPRTGEGGIGLVPTPARWRGRKPAERPGREPARATPVICVATAAACGPGRELALTPARGGDGRAACFRVGGRARACGGGGRKGRTHAGDGDEQGRHAGACADGGGGCGPCRGRERLHGGEGGEGRLGRQGGRTGVRRWPAAGRGRGAHVGHHSLGRISPCPPLFGRPGLCAAGGGWEAAPGREGGASRGQRRRRRLLWERAAGGCSGKRGKKP

SEQ ID NO: 74482 - protein, 94 aa, Zea mays
  Coding DNA Sequence Number=SeqID_31107
MWVKLDAVTENRAHGVIEGHEGAPDKLVDMEEDVHNEGSKAGGRGKSHRDEGMESSKGRAEGGAAKELTVVNERPKDVGAGAAKELAVVGRVGQ

SEQ ID NO: 74483 - protein, 170 aa, Zea mays
  Coding DNA Sequence Number=SeqID_31108
MQCRLCRSACGARRRACAWLPLGLRRIVPGPLRRSTVSHADPEAVGHAAADLGATGLATADPVATCHTAIDPEPPGAEGRAAAEIGFVSPSHPLLVDSRVIDINFDNTNFFIFFDRAAGVACGVTRTPACAAPHRLHVHLRRLGVATTDREAPPSTSPLPSSSPPRTPSA

SEQ ID NO: 74484 - protein, 78 aa, Zea mays
  Coding DNA Sequence Number=SeqID_31109
MAARHRSEEARSPAVVDADRGRQAQWRWRDVGKGRDVRRRWCDAGREHGSEGREGGRWGGARGGKSVRDTVPATTANH

SEQ ID NO: 74485 - protein, 140 aa, Zea mays
  Coding DNA Sequence Number=SeqID_31110
MSWFRKPEAVRFMFGGGASADSLRMVKTWGLYWFGSLARRVARRWVGQPELIGGELVIGVGHRGVGQPTWSTELVIGELVSRPASQSWSTELVIGELVSRSASQGWSADLVIGELVSRSASQSWSAELVVGELVGGVGHF

SEQ ID NO: 74486 - protein, 644 aa, Zea mays
  Coding DNA Sequence Number=SeqID_31111
  Gene Ontology: Mol. function=DNA binding; Cellular component=nucleus
  Homolog annotation: Hit_ID=A3BQM8; Match level="QueryCoverage=98%, HitCoverage=66%, E-value=2e-82, Identity=31%"; Hit description =Putative uncharacterized protein
MEPAWSISFLARYYIDPVSGYEFRSLKDVHNYLETGDISQCAVTPKKSTICEDITESQTHTSTSPQHMRPGTANKGIQCEILTSDGIMAPWEDNGNDTEHTMLPEPESLKATQGYGNKLETSEPTRVQPVSPHNGSRQTKSVKRKESNAEVKSKKRKTSSAVTRVRASPRLAALNAHLDVSIEHEDDMVSTNHVDWVQTIEERAIDQAQKSQSGSFDQIHGQNTTIHSQPSQLDTLSPTQKKQENSSKQLQSVVTDSSIPKRTTQKCTIDQPSQPDINHIRTDQEFTGNQFPSSLPVDTVISLGDTEEFTAGHSQPRNSDTAGQIQANEENTADQVQLSLAETVILVPAIQEYAAGYSLLSKADTTDQTQANQEYIADQVQSCLTDALIPVKAIEEYTTDYSHISKADITNQIQVNQESTDDHLYLRQVDCLAEMQIIEQNLSKQPQLSQPDTGDQIRIDLESTTNHLQPNYDENSMLQSGFSWAPEQNRGAPTTDFWKNVESQASSVSMPINGAPLSSFPANVRFQNAAAAAAAAEPALPPQVAPTETGSDQSGLAFQSLFGNIWSDPCIEFAFKTLTGDIPVLDDTTAVTDYFPEQQDLNKDPAPNCAGSVFDSSRNHTQVDVNLPPPAPDGFYDGSWFPPQ

SEQ ID NO: 74487 - protein, 213 aa, Zea mays
  Coding DNA Sequence Number=SeqID_31112
  Pfam annotation: Domain name=PT; Domain location=136-169; Score=12.1; E_value=0.032; Accession=PF04886.3; Description=PT repeat
MDSLMVHDMPPQERVCPLLHQPPSNPRRSLGAEGLHLAHALTCTEPQIWVHARCVTNHHRKGVPKEGPKTSQKWSAYQEVRWEGPKGHMGIAHQVDWPIEQLSAEQPSEARLPTNPPAEPPNEARLPTNLVAEQHSEAMLPTNLPTEQPSEVRLPTNQSSEQPSKMTTDSQKESTWYYQATLTRWDITKPCSNYGSSVDGSLSGTMPDTEDKD

SEQ ID NO: 74488 - protein, 146 aa, Zea mays
  Coding DNA Sequence Number=SeqID_31113
MTVKTSPTPSTTSPETIRTSAISPPVQTQLRHCLKMLSTLVYQISTELSIKHYICPKLRKLGKEIKTNEQRMYIFFLAHLSNEEPRKNTEDPSPEQIQDCNLADGEYVLITEQGAVHEEDQEPAPEPAIEDLPAAPAIEGKPWFYA

SEQ ID NO: 74489 - protein, 58 aa, Zea mays
  Coding DNA Sequence Number=SeqID_31114
MDTVKMNLLPRRLPLRSQGAPITEIEYKLIIKTRNMICTIDAWQKRDAPLYGPKVVPL

SEQ ID NO: 74490 - protein, 58 aa, Zea mays
  Coding DNA Sequence Number=SeqID_31115
MWTIRKVATPQVAVLLLLLIVVAQEAAPLAEARVCRRRSAGFKGVCMSDHNCAQFEGV

SEQ ID NO: 74491 - protein, 638 aa, Zea mays
  Coding DNA Sequence Number=SeqID_31116
  Gene Ontology: Mol. function=phosphoribosylaminoimidazolecarboxamide formyltransferase activity; Cellular component=integral to membrane; Biological process=purine nucleotide biosynthetic process
  Homolog annotation: Hit_ID=Q6ZKK5; Match level="QueryCoverage=100%, HitCoverage=100%, E-value=0.0, Identity=71%"; Hit description =Putative aminoimidazolecarboximide ribonucleotide transformylase
  Pfam annotation: Domain name=AICARFT_IMPCHas; Domain location=227 -571; Score=637.0; E_value=1.7e-188; Accession=PF01808.9; Description= AICARFTIMPCHase bienzyme
  Pfam annotation: Domain name=MGS; Domain location=107-222; Score =172.1; E_value=1.5e-48; Accession=PF02142.13; Description=MGS-like domain
  Pfam module annotation: Pfam domain module=AICARFT_IMPCHas::MGS; Domain location=227-571::107-222
  Subcellular localization annotation: CTP_CleavageSite=37; ConfidenceScore=5.47e-01
MPLYLFSSPAAAKLATGPHASLHRRRQFLFRVPHRPVLSLSPSAIFELLSFYLLIGELSELGFLQSRRAPLLTSAAERPAGRTMATADTGASTVTDSRLRGGRFLVWHCLIVTALDEAQFSIISTGGTASSLEASGVNVTKVEEITQFPEMLDGRVKTLHPSIHGGILARRDQEHHLKALKEHGIGTFDVVVVNLYPFYDKVTSGAISFEDGIENIDIGGPTLIRAAAKNHKDVLVVVDHKDYPALLEYLEGKQDDPDFRRTLAWKAFQHVASYDSAISEWLWKQSNKGVVIFLPIFIDVSSHAADSFPPSFTVPLTMKSTLRYGENPHQKAAFYGDRSLSLVNAGGIATAIQHHGKEMSYNNYLDADAAWNCVSEFESPTCVVVKHTNPCGVASRHDILEAYRLAVRADPVSAFGGIVAFNTTVDEDLAREIREFRRPTDGETRMFYEIVVAPGYTAEGLEVLKGKSKTLRILEAKRRRSGKGTLLSLRQVGGGWLAQEPDDVTPEDVAFTNVSERAPDARELSDAKFACLCVKHVKSNAIVIAKNSCMLGMGSGQPNRLESLRIAFRKAGEEAKGAALASDAFFPFAWNDAVEEACQRGVAVIAEPGGSIRDQDAVECCNKYGVALVFTGVRHFRH

SEQ ID NO: 74492 - protein, 182 aa, Zea mays
  Coding DNA Sequence Number=SeqID_31117
MLEGAICVEDTEGIANQAVKGLRLTSSYMNNEHRYIKQIELERGHNTNLYGRSPRPPARADRPTPTIPGDDPHIGVTVKTSPTPSTTSPEQSRRRKLGKEIKINEQRMYIFFLAHLSNEEPRKNTEDPSPEQIQDCNLADGEYVLIPEQGAVYEEDQEPAPEPAIEDLPAAPAIEGKPWFYA

SEQ ID NO: 74493 - protein, 323 aa, Zea mays
  Coding DNA Sequence Number=SeqID_31118
MRTLLDGCLSEDMPSRTRSGLVRRSPTVKTLSKDKSVIKGLADGCLKEDKPLGTRSGLVSGSLAAKACSIKAEVLTKGQHDRWLKNDKAAAMRSSNPWSSSFTAVAAVSPTTLAPSSSSTVLLLIDIGLDNTGAASGVPTDCTRQHPLVTSIVCREFLNHARGLSLCRLFGQQRCRLSSTLAVASTSSLTPPVRVFCARSASCSTPVSCVGTPVDLRCTCMLHRHPPLLVCTTFVIEFFTVKCRYCAPLALSSLLLCVVALTTAVPGSSMHRHAYLFAFFEHNLVASVVVGTCSPGQVDPTGKWKEYLQSLSWDGKSFVNLPL

SEQ ID NO: 74494 - protein, 108 aa, Zea mays
  Coding DNA Sequence Number=SeqID_31119
MSSSSEGLYAAGAYISMYATDMDQDQRHAATVEVIMPHVTEADVHAKKRNRLEHKRLKIDDIAEDDSDDHDSQDQQGGSDSEIRMDQDGSRPATPGDGGFQLNDDLII

SEQ ID NO: 74495 - protein, 110 aa, Zea mays
  Coding DNA Sequence Number=SeqID_31120
MESGMSAQLYAAVQCAQQRCPALGGWEPVAWKKQLPPPPGNRPKSRRVPTPCALISAVYVALACSESFPGNGSFNAEAAHHLPAEWTGLINTEAAHRPPVEWTGGAPYPH

SEQ ID NO: 74496 - protein, 202 aa, Zea mays
  Coding DNA Sequence Number=SeqID_31121
  Pfam annotation: Domain name=KNOX2; Domain location=146-183; Score =6.3; E_value=0.023; Accession=PF03791.4; Description=KNOX2 domain
MTTSRATGETPSFLVYGAEAYIPPETFMGSSRVQSRACIKGWLISGDGSYGLDTWSLHPRGAKYQGGVDNATHNKNKHHTDKSYLIDSSQKYDLLDISRVTLEARDRHLRDILYDLPGGVFSSRASGHHWRRHRSHQSQRDGAAAQLASQPMELELDQFMAVYHEALVKLTRKMEQQLNSLSTSARLMNILETECWRKKRRP

SEQ ID NO: 74497 - protein, 84 aa, Zea mays
  Coding DNA Sequence Number=SeqID_31122
MWIAPGPSRGQIRRYIPGYQQWVRTPMGKCRTPIHRDSFLSFEESTIKHGDQVIELFEFYEIKDPEHLFGEGKCPLTYYVPFTL

SEQ ID NO: 74498 - protein, 145 aa, Zea mays
  Coding DNA Sequence Number=SeqID_31123
MVGLQMMMRMVMIMLMVMVAFGAIYAQGSFRCMPMLRRPQISGRKELALATSISCSKYYIRYVPGPACHGSGSLYVPPLSYKREGTRRYKADSDTLRLPDSQVHTSSQAQYITQWSRVLRSGGPNHSKSLCVLVFFPFPPSRQNA

SEQ ID NO: 74499 - protein, 259 aa, Zea mays
  Coding DNA Sequence Number=SeqID_31124
  Homolog annotation: Hit_ID=A2YGC2; Match level="QueryCoverage=59%, HitCoverage=69%, E-value=2e-08, Identity=30%"; Hit description =Putative uncharacterized protein
MPPAPPQGIPVAGGDPNRDRDDDDASGSSSHGMELSEEPEMEGWIARPITRDAARGCHFHDALDTLLHRAFDRHTWSIEYRCVVYQHRRGLYPDQWEATCLVRCSDDGLRGAEAFSEHYSITERDTAEVAMLDAARQALSQYCSLFSGVADGLNLKYYPRHSTDSAGGVIVSPVGEGNPRLNIMVNLAAVLNTELDHALDELGKVRVEVAELHAECAAHHYLDGGSPAPAGIQHPYRSPPHGRFDNGTPYCRTRIDLDP

SEQ ID NO: 74500 - protein, 184 aa, Zea mays
  Coding DNA Sequence Number=SeqID_31125
  Gene Ontology: Mol. function=cysteine-type peptidase activity; Biological process=proteolysis
  Homolog annotation: Hit_ID=Q5NKQ2; Match level="QueryCoverage=100%, HitCoverage=31%, E-value=1e-57, Identity=78%"; Hit description =Putative uncharacterized protein 9C20.3a
MVVKQYELADTFAELIDDVLRAESGDPDNVAEAPQTAKLPYISHHMSSEAHIHKGTQNTPDLIMPSSQPTTELTGTQFEEIHEKQQQMCRAFEGCPDDLDVTAPMETNTNSNAEKQGGDIDASHDTPTYTGPLFDQTPSGHTLLNFEEHERYSKSPQIFYQTVLDAYLDKTLPQLDNFVDYKSV

SEQ ID NO: 74501 - protein, 114 aa, Zea mays
  Coding DNA Sequence Number=SeqID_31126
  Homolog annotation: Hit_ID=Q2R2V3; Match level="QueryCoverage=91%, HitCoverage=25%, E-value=4e-07, Identity=36%"; Hit description =Retrotransposon protein, putative, unclassified
MALLDPPERLQSEVALNLVRNLPGWGVPAFARRIRVGASPHSDLAAGEFVLFVSNLPSGLALPISSFFVLLLEELGLQPQHFTPCFILQAAIIAYLYKMFVGAERELGLHLFPK

SEQ ID NO: 74502 - protein, 143 aa, Zea mays
  Coding DNA Sequence Number=SeqID_31127
  Subcellular localization annotation: CTP_CleavageSite=37; ConfidenceScore=5.54e-01
MPAHAPCSLLRAPPVPRACPRLILRSFALSRALPTPPAAAGDPRPRSRPSSSPETAPGLPELCPEVRLLPGLIPSVRSSSHGQDRFAHARLTPWPACQRPSPLALGPLDNEESEVPECVVGDLPEQQPGEGKCPLTHYVLHTL

SEQ ID NO: 74503 - protein, 43 aa, Zea mays
  Coding DNA Sequence Number=SeqID_31128
MPEAGPLLLVEMKRRDGSLLAWRPMPKEDDSWAWAPVPEAGSP

SEQ ID NO: 74504 - protein, 138 aa, Zea mays
  Coding DNA Sequence Number=SeqID_31129
  Subcellular localization annotation: CTP_CleavageSite=32; ConfidenceScore=5.14e-01
MTVGVTEGGLAVITSASAQKQRAYRQSSFGPTCRLISSPEAGPGATVGTLNQGYPLLQYEDTVPARPSLVAWFRATHSKVSRFRDLEYPGLDQGQAEPDVRPLGHMASTLNAGKLPLHANATQTADIRAQGVGTGDEH

SEQ ID NO: 74505 - protein, 334 aa, Zea mays
  Coding DNA Sequence Number=SeqID_31130
  Gene Ontology: Mol. function=nucleic acid binding
  Homolog annotation: Hit_ID=Q5NKQ1; Match level="QueryCoverage=23%, HitCoverage=6%, E-value=3e-12, Identity=57%"; Hit description =Putative uncharacterized protein 9C20.4a
MDELLLLLSWLEPDIEGDDSTSDGEGIQGDRDDVRDMPGENLPTRRAQAGEIELVPTLQEGGVCDTQCAMPLQILEQGKLLAEGVMSTVRRMARAHCLVTDWTGAPSDAVCQRIGLDALNAKRARRPLGPLAYVTGHKPRGSSEERRARPGHVPAPDPYSCQEEGTPDPGYRQWTPGPPQGRMGIYRRGQICCDGPEKAWHWRERRCDLSAPDNWCASCMTCGPGPPCWTASCSEAEGRITAGRLWGAPVSSGEIRIRVVPSGDLTVGDLVAVPRQWSSRRMTTSLVVGRSKPGCGPPPALTFKDVHHPCWGGRRAESGFYFPHGPVTHFFLQH

SEQ ID NO: 74506 - protein, 274 aa, Zea mays
  Coding DNA Sequence Number=SeqID_31131
  Homolog annotation: Hit_ID=Q6J9V9; Match level="QueryCoverage=32%, HitCoverage=32%, E-value=8e-10, Identity=42%"; Hit description =Putative uncharacterized protein
MTTSKKGPGKGDTPKRTLLREGNRLRASLLIRGSKAGPSEGFNSRLRARGLHTHYWSEAGPRRVHSRLRHRARDDHGYVRYITKAQATLPSVACAAPTAEPPDRVRLTTAKAGPGRHKKLRSARPRARTRAQPRKTVNSAPPDPGLGHGLSPRRRRTPLRPTQGSDMGSTPEDDELHLAQPQGSDMGSAPGDDGLRFARPQGSDSALASADGLRLARPRGSDSTTATGDRLDLDLGGASTSPNIGRGPTTSTGGAIITLPRADSGYGEQDRRPI

SEQ ID NO: 74507 - protein, 154 aa, Zea mays
  Coding DNA Sequence Number=SeqID_31132
MEGSAWEACPMAARAAWTPRSRASCAETSQPAWRAAAPAAEAGTVLRAFVGARPVGPCLRLLKGRKKASSSHATKEAKTEAFSDTYPLRTKANRACGEAPQASVPTGAAKGCPTNDFGAAPTLGARGAEGAACPGVTAAAEGSTSCTADTGACP

SEQ ID NO: 74508 - protein, 259 aa, Zea mays
  Coding DNA Sequence Number=SeqID_31133
  Gene Ontology: Mol. function=hydrolase activity; Cellular component =cytoplasm; Biological process=fatty acid metabolic process
  Homolog annotation: Hit_ID=Q84VJ1; Match level="QueryCoverage=83%, HitCoverage=73%, E-value=2e-84, Identity=68%"; Hit description =Biostress-resistance-related protein
  Pfam annotation: Domain name=Abhydrolase_2; Domain location=37-231; Score=22.0; E_value=1.2e-09; Accession=PF02230.7; Description =PhospholipaseCarboxylesterase
LAGLVARRGCGGAATVRGMSFGGSSSLASGAKRPFEYGRTHVVRPKGTHKATIVWLHGLGDNGARYRTRLLNSPVLLNGFDVADLSEDAPDDIEGIDASAAHVANLLSTEPADIKLGVGGFSMGAATALYSATCFAHGKYGNGKPFPVNLSLAVGLSGWLPCARTLKNRIEASPECAQKASSIPLLLCHGKADDVVAYKHGERSAGALKANGFSNETKKEVKHIIRLKKLLVGKMWKKKAAEEKRAPEAREMEAARAKE

SEQ ID NO: 74509 - protein, 29 aa, Zea mays
  Coding DNA Sequence Number=SeqID_31134
MCRFVSVESAQRRRSAPPVVGVYQRTNCG

SEQ ID NO: 74510 - protein, 241 aa, Zea mays
  Coding DNA Sequence Number=SeqID_31135
  Subcellular localization annotation: CTP_CleavageSite=88; ConfidenceScore=5.02e-01
MDVREVEIPRPSCSSRAQVGCACSRGLQASTRVREASGPKRAPVPVLVPARPTFSKKALVLPFIGVGRRGGSSEAGVESVFHGRGRVRAPGSGEVEFVVFRGLSPSPSPGSGGAEFVVFWGLSPSPSPGSGGAEFVVFRGLSPSPSPGSGGVEFVVFRGFSPSPSPGSGGAEFVVFRGLSPSPSPGSGGVEFVVFRGLSPSPSPGSGGAEFVVFRGLSPSPSPRSGEASYGAFGRAWLPLR

SEQ ID NO: 74511 - protein, 80 aa, Zea mays
  Coding DNA Sequence Number=SeqID_31136
MVARLCRLRTVRCRPVVVETLQLSTCPASISLRVFSLVGMQCGVITFLGIQYLMDVYGNTDMGILRSVMYLQRRTYAQVH

SEQ ID NO: 74512 - protein, 118 aa, Zea mays
  Coding DNA Sequence Number=SeqID_31137
  Homolog annotation: Hit_ID=Q5Z943; Match level="QueryCoverage=89%, HitCoverage=36%, E-value=9e-14, Identity=44%"; Hit description =Putative uncharacterized protein P0659D09.34
MALYDACWFRRLVLLASPPPAAAPRPSVPAQQAPVERDELGTTHTPHAQRPASSSPTAGGLRHRRTRSDEATAAAFLGMEPLRLPDRGNRARLQTILSGKDGLVAAPPPERRRPGPGG

SEQ ID NO: 74513 - protein, 160 aa, Zea mays
  Coding DNA Sequence Number=SeqID_31138
MPHRSYFSPPEIFSLPFSPLCPRIHGLFLAIEFAVTFSPSVPNSGDPGATLAHASLNSSDLSAAEKNSAARSRSPLPGLIPSVRSSSHDPDREYRFEHARPVPLARLSAPKSPGVGPTRNLQTWDEVVYDMKSTVQEKDEQMPKLLVEKASAQQWKMKPT

SEQ ID NO: 74514 - protein, 264 aa, Zea mays
  Coding DNA Sequence Number=SeqID_31139
  Homolog annotation: Hit_ID=Q5Z943; Match level="QueryCoverage=98%, HitCoverage=98%, E-value=3e-47, Identity=44%"; Hit description =Putative uncharacterized protein P0659D09.34
  Pfam annotation: Domain name=DUF1685; Domain location=113-196; Score=- 20.8; E_value=0.036; Accession=PF07939.2; Description=Protein of unknown function (DUF1685)
MKRPQPQQAAAEQIMALYDACWFRRLVLLASPPPAAAPRPSVPAQQAPVERDELGTTHTPHAQRPASSSPTAGGLRHRRTRSDEATAAAFLGMEPLRLPDRGNRARLQTILSGKDGLVAAPPPERRRPGPGRRRQRRRGRSMSELEFEEVKGLQDLGFTFADAEVDAELASIVPGLRRKRSEEDNNSRATAASTSSARPEAADDASVAAVVAPRRPYLSEAWDSEEEEEVRRALRSWRIPPAGDGNELKEHLRMWAHTVASAVR

SEQ ID NO: 74515 - protein, 137 aa, Zea mays
  Coding DNA Sequence Number=SeqID_31140
  Homolog annotation: Hit_ID=Q7G4Q2; Match level="QueryCoverage=74%, HitCoverage=61%, E-value=6e-08, Identity=33%"; Hit description =Retrotransposon protein, putative, Ty3-gypsy subclass, expressed
MKGAAEAAMTPSETWKPKWNNFRLSYVTEIGCGHKTMPSRTRAHDGAGTSRGREDTPNQPPVPPTLAKAIAALVNATVDNTRFLREMAGNQFQQHGGRIPPQGLRETSYLEFSETCPPLFVKAEDPLEADEWIRVME

SEQ ID NO: 74516 - protein, 105 aa, Zea mays
  Coding DNA Sequence Number=SeqID_31141
MDPKGKRTMINDKEKENDTLYVDEPKGDKPTVGTCSPGQVDPRGKWKEHSSDHPSLVKDVYAFEYPVYPQNILMRGEDEGDHVGLHPIDAFGLLGRALWMWSSSV

SEQ ID NO: 74517 - protein, 122 aa, Zea mays
  Coding DNA Sequence Number=SeqID_31142
MDEGCTQPLSSDPKIHLNTTESLSLEKKLCLVMGLHDRSTKCLYPALEYSSKKNAKGNKPRKERNIMFEGFRTPREAIEVISWLPNSCQSIIMVTNLATGACQLPELALKKNMPIRISLIFI

SEQ ID NO: 74518 - protein, 97 aa, Zea mays
  Coding DNA Sequence Number=SeqID_31143
MAHSSSLNGENFASGSHIMFDSLDFLATAADELRLTDLDMLVPTGTRPARSTRSKAEMRHLKRRVAVLKWCLNRFVDTIKHQATPTAHPAFSLRRPT

SEQ ID NO: 74519 - protein, 59 aa, Zea mays
  Coding DNA Sequence Number=SeqID_31144
MKRVQQKEQGITEVCPEALRYNSPDCPVHHRTVSGALEESDSELARFGNPLRYNSPDMS

SEQ ID NO: 74520 - protein, 105 aa, Zea mays
  Coding DNA Sequence Number=SeqID_31145
MARLAALAPQPAACPAQEPAWPASGEREEDAIILFNHDSFLSFEDSTINHGDQVIELFEFYKIEGPEHLFGGDEEDGYDYAYGNGKEEGVKADLQEFQDFDEFED

SEQ ID NO: 74521 - protein, 224 aa, Zea mays
  Coding DNA Sequence Number=SeqID_31146
  Gene Ontology: Mol. function=kinase activity; Cellular component =ornithine carbamoyltransferase complex; Biological process=amino acid metabolic process
  Homolog annotation: Hit_ID=Q6QP54; Match level="QueryCoverage=45%, HitCoverage=36%, E-value=7e-21, Identity=53%"; Hit description =Putative kinase
MAPPVDVAGLRPRLGDVEAPPKPRSSLSSVAEVESEPLGRARRRPSAEARAESEPWGWAKRSSSSSGVEPKSEPWVGRSGVRRLLGMSPSPSPGSGGAEFAVFRGLARVRALGRAERSSSSSGAEPKSEPWVGRSGVRRLSGLSPSPSPGSSRAEFAVFRGLARVRALGRAERSFLWCLRPGLTACQPHSIKWHRSRSGTGGAVFLSDRSVERRSDGGHFGSVG

SEQ ID NO: 74522 - protein, 103 aa, Zea mays
  Coding DNA Sequence Number=SeqID_31147
  Gene Ontology: Mol. function=zinc ion binding; Cellular component =COPII vesicle coat; Biological process=ER to Golgi vesicle-mediated transport
  Homolog annotation: Hit_ID=A3BU26; Match level="QueryCoverage=44%, HitCoverage=9%, E-value=9e-17, Identity=93%"; Hit description =Putative uncharacterized protein
MKDLDSLHHFLEITMELALGPLSSPAPVHHRHFGAGWHVRLFSCKNFLIPKPNLNQTARFLLAKLNPSVTYNSDNPSPGGDVIFTDDVSFQVFMDHLQRLAVQ

SEQ ID NO: 74523 - protein, 117 aa, Zea mays
  Coding DNA Sequence Number=SeqID_31148
MDARDRVYEGGDHQAPHQLAKRRWAPDFFGVEGEAWLVADNGNLVRHGAQLMIIVEDHRGLGPTLAALGALDVSELPRMLSKWMRRGSSVAVARKSREPNVMWLPGVKLSPSVNVEV

SEQ ID NO: 74524 - protein, 643 aa, Zea mays
  Coding DNA Sequence Number=SeqID_31149
  Gene Ontology: Mol. function=zinc ion binding; Cellular component =COPII vesicle coat; Biological process=ER to Golgi vesicle-mediated transport
  Homolog annotation: Hit_ID=A2YL58; Match level="QueryCoverage=77%, HitCoverage=51%, E-value=1e-149, Identity=81%"; Hit description =Putative uncharacterized protein
  Pfam annotation: Domain name=Sec23_trunk; Domain location=192-396; Score=198.1; E_value=2.2e-56; Accession=PF04811.6; Description =Sec23Sec24 trunk domain
  Pfam annotation: Domain name=zf-Sec23_Sec24; Domain location=123-162; Score=74.2; E_value=4.4e-19; Accession=PF04810.6; Description =Sec23Sec24 zinc finger
  Pfam module annotation: Pfam domain module=Sec23_trunk::zf-Sec23 _Sec24; Domain location=192-396::123-162
MAMGTRYPKLVGMGNPLGTQNPHEYEFGQNFIPVMDMSFFSGRIFFSRARFLCLTCGSLLQLLYKAAVLKMSEFLDLELQDGIRMPWNVIPGTKQETVNCVIPVSAIYTPLKPISDIPVLPYSPLRCRMCRSILNPFSIVDYVAKIWVCSFCFQRNQFPQHYSSISENNLPAELFPQYTTVEYISSTETGPIVPPVFIFVVDTCMIEEEIGYLKSALAQAVELLPDNSLVGFITFGTYVQVHELGFGLLPKSYVFKGTKEVIEEIQKDPWPVPADQRASRCTGAALSVAANLLGVCVPGSGARIMAFVGGPSTEGPGPIVSKSLSEPIRSHKDLDKDSAPLYDKAVKFYDQIAKQLVHQGHVLDLFACAVDQGGGDAENPNVAGSHTLADEVQIDLHMLGALVLHRISGEVDGADVVAVDEGGTLKGAVDLVEKLAHPGGLGHAVGHNAVLGLCTRAGDDGLPLGGPGDEVGAQEHNIARSGPTRVGAADPVGVGVDHKLRRRGRSKEEAVAEGATEVGVAEMKVAIEKTGGIVVLAESFGHSVFKDSLLRIFQSTDDNLGLSFKYCFEKDSVMTDIVYKRRGKKVEAGEVDTSQSELQQEVQHRESDVHVLCCSSTAMQQYTIAVARQQYIIAVAEQHTLKV

SEQ ID NO: 74525 - protein, 259 aa, Zea mays
  Coding DNA Sequence Number=SeqID_31150
  Gene Ontology: Mol. function=acetylglucosaminyltransferase activity; Cellular component=membrane; Biological process=isopeptide cross -linking via N6-(L-isoglutamyl)-L-lysine
  Homolog annotation: Hit_ID=A5AXT9; Match level="QueryCoverage=53%, HitCoverage=36%, E-value=6e-38, Identity=58%"; Hit description =Putative uncharacterized protein
  Pfam annotation: Domain name=Branch; Domain location=62-245; Score =84.2; E_value=4.1e-22; Accession=PF02485.12; Description=Core-2I -Branching enzyme
MAKASDMATTGEEGRGHPGERTPRRSDSSLEAATADPLFVEAKLRQQMRAEERPTRSAVPRIAYLVSGSAGDGAALRRTLRARYHPANTYVVHLDLEAPAAERAELAAAVRADPFYARFHNVKVVTRANLVTYRGPTMVSNTLHAAAILLREGGDWDWFINLLASDYPLVTQDDKRRCDLPPSPPGSRMEGADAWCEATWQKVVHTVVDAYDEWYADPRQDLGPLLSDVILLGSEIQALLVNSASPAYARTVLSVRQER

SEQ ID NO: 74526 - protein, 127 aa, Zea mays
  Coding DNA Sequence Number=SeqID_31151
RRRFSSESEGVSGSRLSPQRRTDDSERLSGIAAEVWTYIRTVERSGLEGSDESEYSSDEEDSPEEDGEGDDDDDDDGGDSSDNGDGGSRGGNGGSRSDNGGNRGGDGGGNRGSNGGGGSKGSNRASG

SEQ ID NO: 74527 - protein, 158 aa, Zea mays
  Coding DNA Sequence Number=SeqID_31152
  Gene Ontology: Mol. function=heat shock protein binding; Cellular component=cytoplasm; Biological process=response to stress
  Homolog annotation: Hit_ID=Q67J13; Match level="QueryCoverage=89%, HitCoverage=80%, E-value=4e-49, Identity=70%"; Hit description=DNAJ heat shock N-terminal domain-containing protein-like
  Pfam annotation: Domain name=DnaJ; Domain location=12-80; Score=73.7; E_value=6.1e-19; Accession=PF00226.22; Description=DnaJ domain
MGLSSSISVQKTLYEVLSVSEDATYDEIRAAYRSAALNTHPDKARTPLESCVLSGEQQEFSSVQKAWEILRHPTSRADYDKQLQSSRQNIEIIASEVQVGDMIIESTADADTVELSYPCRCGDYFSITSCELSGMGISVSGDGDGEARFNGPICQPFT

SEQ ID NO: 74528 - protein, 324 aa, Zea mays
  Coding DNA Sequence Number=SeqID_31153
  Homolog annotation: Hit_ID=Q5NAA7; Match level="QueryCoverage=93%, HitCoverage=62%, E-value=2e-18, Identity=29%"; Hit description =Putative uncharacterized protein B1008C01.13
  Pfam annotation: Domain name=DUF1618; Domain location=207-322; Score=- 40.4; E_value=0.058; Accession=PF07762.5; Description=Protein of unknown function (DUF1618)
MASSSFNVGESSRAREQTARDVALEFQPRPWVALSSIPIVLDARDERASMLAPGVTDFVFALQHPLLRPSYLVLPGRIVPGPRSLSFPYVVSTCSDRLLFRVTHGGSVWDYSYFLCDIHARTAALLPDVPANLGVSTLPRRSIGLIADRRHVGHYMVAQLQPTSMRTILLCYSTCTDQWTARTLASHPNHEPSGVDGVIAHGGLLWWVDIASGVHVCDPFADNADLHLRFIPLPVCCQMSRLDKLVSPFELVHQRRLIRPSDGKLRYVEIQGVPFVPAANKQPLLNPRVCMFTLVSQENRHYWVHQYTATFADIFADAVLPSGV

SEQ ID NO: 74529 - protein, 738 aa, Zea mays
  Coding DNA Sequence Number=SeqID_31154
  Gene Ontology: Mol. function=transporter activity; Cellular component= membrane; Biological process=transport
  Homolog annotation: Hit_ID=Q2A0M6; Match level="QueryCoverage=22%, HitCoverage=30%, E-value=3e-58, Identity=73%"; Hit description=Root uracil permease 1
  Pfam annotation: Domain name=Glyco_transf_5; Domain location=474-593; Score=-129.1; E_value=0.033; Accession=PF08323.2; Description=Starch synthase catalytic domain
MDPAALKFLLDEINRRFDEADARVNRLFDKLQQPAHLLGSLPSASFDLPATPLSVDHFSDASASVPATPAAAVEAVVIVDNWGGCFDDREQYCTAPSVVADNWGGFFGGEDLDLPGSTSFPCNSESGAVPTKALVTSTDPDAPLGSGADSIPTHVGEGALEPGHGDVAVGGLVELGAVPVPVEATTRRRTPTLSFAGNYSQHALTIWRPSFMQQIRFDAHTPLREAWEIDAHMQSAVRGPGAFNVYGRAGEHPAPWTDPPGPLDRAPAVGTFQIELQQQAQVRSDQSASRTSGRGEALESRADQDVCEDRPHDAQTSAVEEAMAAGAGDPGQLDQLLLLDPYAEDDITNYCVEFHNAVVTTIYSSIIIKPETGSSSSSSFACSTNCPSQALHNIGKPSLVAVVTIAGTPSSTLIDAQVQLLVSVGSPSNALVLKIPIQGVVDALHRKTLQGTGLNEEQMRQASVADNGHRQLNKILVDLDQDNITAKNYAIAFYTEKHIQIPCLGGEHEVTFFHEYRDSVERVFVDHPSYHRPGNLYGAKVVLLGFQHYAVMLGTTVIIPTALVPQMGGKYEDKVVVIQTLMFVVGMNTLRQSFLGTRLPAVTGGSYTFVLYTISIILGGRSANEPSSHIKFLGIMRGTHGALIVASALQIIVAFSGLWCNVARYLSSLSATPLVALVVFGLYELEIPRAGKIKALSVDAVIVFGSQRIPQLRPAGGFLYSTSLIAASGHTLLLAALP

SEQ ID NO: 74530 - protein, 78 aa, Zea mays
  Coding DNA Sequence Number=SeqID_31155
MARAHLGTKDYDHMWKNLRSKDCNLADGEYVLVPEQGAAQEVAPDPAPEPAPEDLPATALEGKPRFMHNLLFILFYFT

SEQ ID NO: 74531 - protein, 59 aa, Zea mays
  Coding DNA Sequence Number=SeqID_31156
MGLGVCGSLCQVWVRPLGRSARHCGTGGYEIDGSGYDYGAGEDEAVEGDFREFQDYDEF

SEQ ID NO: 74532 - protein, 212 aa, Zea mays
  Coding DNA Sequence Number=SeqID_31157
MTKMVRPWWSLSAAEIRLPVWPAASETRGGRGERSPERSARRSREARWRGAARSSLEAGACDFDWDRFGGEAEVRTGPTCKDLGPHGRAFDGRKCRREVISEHSVERRDGDRVDVDPTKTEGDRGKAIGLWWLDVGSEANLKIITFFIYSFERFELIINSCSFTSKCPNSINASSVGWLRGEDNNKTGERLICQKRKREQVMASILSMNIVA

SEQ ID NO: 74533 - protein, 127 aa, Zea mays
  Coding DNA Sequence Number=SeqID_31158
MKGVADYGVKGKLAPLYIGPFLILEQYGPIAYKRQRSEDKRIQVHNTTVAFAGTWSLPFGRRPSRCVWGYGEPPSASNVDLRLRFLAKGEDWRVLRASPSLDAPVKEMPGRSRVRQIEVMFGLRSNN

SEQ ID NO: 74534 - protein, 185 aa, Zea mays
  Coding DNA Sequence Number=SeqID_31159
EDAAAACAIADTACCARQGRCSEQGADEDGHDRASSSHGRASSLAVGVSIWCRFGMEFWCRFGVDVGVELPAAPTPRRARLRLAVPDRAHPRVELARVEVARRSAPRWPRSACLCGPRRPPACAAGMKVDGGGAPAVDGERALGGQQRRRVHRLLLLLVSAQGSRAVEPGACDFDWDRFGGEAGE

SEQ ID NO: 74535 - protein, 165 aa, Zea mays
  Coding DNA Sequence Number=SeqID_31160
MGDVGVDEGEPGHHARRQDSVGEDVGEGRRVLVYPLMSVLLADEREHANPRVQQGLLVGSRNKGDSLDLDVAQLAVAGPDEASLVHELKGADELVEPRHLAADREWDEAQVQVGVVGERVTNMHAAGDVDPPEEAAVGDDAVNARGLVFGWEASVLAVHWSEQVE

SEQ ID NO: 74536 - protein, 92 aa, Zea mays
  Coding DNA Sequence Number=SeqID_31161
MQEGCKAYLLDDSAASLLMRCHTCSKGVLDFFPELPPCVVNMQLRPAGGFLYSTSLIAASGHTLLLAALPELPEKEVEIQEVVPEEESAPVL

SEQ ID NO: 74537 - protein, 128 aa, Zea mays
  Coding DNA Sequence Number=SeqID_31162
MARAHLGTKDYDHMWKNLRSKDCNLADGEYVLVPEQGAAQEVAPDPTPEPALEDLPATALEGKPRLPSSRDLRHGLPFRLWWVQVRSLHDGSRGSLEDMVAGVTWSSILPPGWTIEWDPASAEEEHEE

SEQ ID NO: 74538 - protein, 77 aa, Zea mays
  Coding DNA Sequence Number=SeqID_31163
MYGLQVVMRRMVMIMLMVMVAFGAIYAQFSLGVHDLLVFWDHFLFGCLVLTPSFVVLISLVIMRIYLLSYILVRYHL

SEQ ID NO: 74539 - protein, 278 aa, Zea mays
  Coding DNA Sequence Number=SeqID_31164
  Gene Ontology: Mol. function=histone-lysine N-methyltransferase activity; Cellular component=nucleus; Biological process =multicellular organismal development
  Homolog annotation: Hit_ID=A2Y4Q2; Match level="QueryCoverage=99%, HitCoverage=98%, E-value=1e-51, Identity=44%"; Hit description =Putative uncharacterized protein
  Pfam annotation: Domain name=DUF260; Domain location=44-144; Score =198.7; E_value=1.4e-56; Accession=PF03195.5; Description=Protein of unknown function DUF260
  Subcellular localization annotation: CTP_CleavageSite=33; ConfidenceScore=5.42e-01
MADPSASSVPPVVTMGSVVTVASPPTGGGSTVSAGITGGGKGGPCAGCKYLRRKCQPDCIFAPYFPPDNLDKFAYVHRVFGTSNVIKILNNLQPYQRQYAVNSLVYEAEMRIRDPIYGCVGVVSMLQHRLIRLKKALESASLELSNYQAAEAAAASVAVGPHGVAAAGMADFVGNAVPNCTQNIINAGYSTMASITGAGPFMQQDNFASVQMLAMSFEGENGAAARVGMNGGGGYGFAYSPAMGVGHGVVSGHVQQQQINGGQFLKNSTTGGDYRPTM

SEQ ID NO: 74540 - protein, 96 aa, Zea mays
  Coding DNA Sequence Number=SeqID_31165
MTAWSTLCPPHRKAKAYDEGLRRSLPTPRPHQTWRPSWDSAHRNRPRIKKRVTGPICNSFFVMTVCNPPLWEYSGDNPGKITNPRDLKGILETGSK

SEQ ID NO: 74541 - protein, 601 aa, Zea mays
  Coding DNA Sequence Number=SeqID_31166
  Gene Ontology: Mol. function=serine-type endopeptidase activity; Cellular component=mitochondrial matrix; Biological process =proteolysis
  Homolog annotation: Hit_ID=A2Y4Q3; Match level="QueryCoverage=83%, HitCoverage=80%, E-value=0.0, Identity=90%"; Hit description =Putative uncharacterized protein
  Pfam annotation: Domain name=Trypsin; Domain location=117-318; Score =52.3; E_value=1.7e-12; Accession=PF00089.17; Description=Trypsin
  Subcellular localization annotation: CTP_CleavageSite=85; ConfidenceScore=5.64e-01
MLAAARPLRRLSSSCSSSVGALRRVLLHPPAPPPSLQPPLSPLRTLTRALLPSLAAAHRFSTTSFSTSAPSRLGECVGVLGAPAIAEEEEGEETGALVRHDTDAYAAVELALDSVVKVFTVSSSPNYFLPWQNKAQRESMGSGFVIPGRRIVTNAHVVADHTFVLVRKHGSPTKYKAEVQAVGHECDLALLTVESEEFWDGVNSLELGDIPFLQEAVAVVGYPQEMMSKCGWYMILNFGSGGDNISVTKGVVSRVEPTQYAHGATQLMAIQIDAAINPGNSGGPAIMGDKVAGVAFQNLSGAENIGYIIPVPVIKRFISGVEESGKYSGFCTLGVSCQATENIQLRECFGMRPEMTGVLVSRINPLSDAYKVLKKDDILLEFDGVPIANDGTVPFRNRERITFDHLVSMKKPEETAVLKVLRDGKEQELGVTLRPLQPLVPVHQFDKLPSYYIFAGFVFIPLTQPYLHEFGEDWYNASPRRLCERALRELPKKTGEQLVILSQVLMDDINVGYERLAELQVKKVNGVEVENLKHLCSLVEGCTEENLRFDLDDERVIVLKYQNARLATSRVLKRHRIPSAISSDLVEDQVTDGEVETSCTS

SEQ ID NO: 74542 - protein, 128 aa, Zea mays
  Coding DNA Sequence Number=SeqID_31167
MGRRDHEALYLFSGAQVVADTAAKTPPEHHGPGELAKSVEPRRFCWERIADRRDPQRSEEERGERFTERGQASPGKWVPRRSGSARRGARETDRINDIFKAYIVLGKEWGKKRLHPRFVDLDSVGDST

SEQ ID NO: 74543 - protein, 487 aa, Zea mays
  Coding DNA Sequence Number=SeqID_31168
  Gene Ontology: Mol. function=calmodulin binding; Cellular component =integral to membrane; Biological process=cell death
  Homolog annotation: Hit_ID=A3B438; Match level="QueryCoverage=93%, HitCoverage=83%, E-value=1e-158, Identity=62%"; Hit description =Putative uncharacterized protein
  Pfam annotation: Domain name=Mlo; Domain location=5-487; Score=787.1; E_value=1.1e-233; Accession=PF03094.6; Description=Mlo family
MAEADETAALQYTPTWIVAAVCSIIVLISLAAERGLHHLGKTLKKNHQRPLYEALLKVKEELMLLGFISLLLTVLQGTIQRTCIPPSWTDYMLPCQRPGHDEAPAAAASMAARFVAADILGGISWARVLSEGEGAAAQAGLCEKEGKVPLLSLEALHQLHIFIFVLAVSHVFFCASTMLPGCAKIRKWKKWEEEIQKIAAENGPKKVLPMHQVSFIRERYKGIGTDSKTLCWLHSFRKQFYGSVAKSDYAAMRLGFIMTHCRGNLKFDFHRYMVRVLESDFKKIVGTSWHLWIFVVIFLLLNVNASTLLLAVGTKLEHVIAQLAYDVAEKQTAIEGDLVVTPSDQHFWFGRPRIILHLIHFILFQNAFELAFFFWILMTYGLESCFMDHIGFLVPRLVLGVVIQLLCSYSTLPLYAIVTQMGSYYKKEIFNEHVQQGVLGWAQKAKKRSGVKEGPFGKAPAPASLALDLDHREELILLILLENQNHF

SEQ ID NO: 74544 - protein, 114 aa, Zea mays
  Coding DNA Sequence Number=SeqID_31169
MGKDKKGRGSPRRSGDRRKREPSLPSEDFGDSEYSEEEVSSGLEGSDESEVSSDEENSSDSSEEGNGDDDEGDSSGDDSGGGGGDDDGQDGDEGGGGGSGDGSGSKASGKAPLA

SEQ ID NO: 74545 - protein, 155 aa, Zea mays
  Coding DNA Sequence Number=SeqID_31170
MTDMWLPAKGNWLLGSIGGITTADELEVFLLGAISILPASRVGSGWQRGFGSGKARTRARKAKAAKSATLMGYSRAGYRFKKCPVSTQRATWSPDSYLQNTGTPPHHSTIILKVARAACYHSVLPPKRRFRVQSLGITSKMLISFFNHSALPLKR

SEQ ID NO: 74546 - protein, 204 aa, Zea mays
  Coding DNA Sequence Number=SeqID_31171
MADRGSSVRPGPLVSGTVRVRVRCRSDGWGPPVSDSERRGEGVGAWETDSGPRVSGSSSPSRPCMARGDVAVTDGVRGGKGVERRRFVGGPWHDGATPPWSSTGEDREKEEEADEREEKEGASSFTLGGARPGRSYGRRWRTSGENTTGRACRGFSGCYTLEVKEESTSTPPAPPPSEVTLELQEPVPLGEEYDPVLPSQSPPE

SEQ ID NO: 74547 - protein, 166 aa, Zea mays
  Coding DNA Sequence Number=SeqID_31172
MEGQSYTSFYINEEGFPRLLRDNMLCLGIPGYLEYRGIEFMEHSKKKYMVTVYIGSSNRQPRWCSTATRHRSKDICHLMAREALRTLCSVYRDEVGTTPMRFFPPLIKTHQEWKDRVQVLREQRHSGDPTTAYLALYLLALDEKYDKVVAQLRKQPSERRKQKPFC

SEQ ID NO: 74548 - protein, 140 aa, Zea mays
  Coding DNA Sequence Number=SeqID_31173
  Subcellular localization annotation: CTP_CleavageSite=63; ConfidenceScore=5.05e-01
HPPRVRRNVAKRKRGNRALELLPINGSPPPPFSLPWASSPLLGFPAPSPSLGISPRRPPSPPDAGRRPPLDATHAPWSQDSGLLPALLGHGLPSPALSLAQPRLQAASIAVGPAVPATPMHTAAISYIQAPLPSSFLLFT

SEQ ID NO: 74549 - protein, 230 aa, Zea mays
  Coding DNA Sequence Number=SeqID_31174
MGPTRHTHTLLLLSSSREQQEAGREGRLDVGDGGCVHGGSRYCGADGYRRGLESRLSKRQRRRGEPMAEQRGEEAGVLGPGSVRGIQGWSAPCIWWRGRPPWRDARGGRGSREAEQGAARHGREKGGGGLPFIGRSSRARLPRFLFAAFRRTRGGCYSSDFGRSFLAVSVWNRTLVTVAKLLPAQCSSKLIEDAQPLGSRFRRYLASNLVLSEGKFYLKNGCQTLSNGVG

SEQ ID NO: 74550 - protein, 112 aa, Zea mays
  Coding DNA Sequence Number=SeqID_31175
  Subcellular localization annotation: CTP_CleavageSite=69; ConfidenceScore=5.70e-01
MGWVASSKGWNPQKVVNPCRAIASFVSSARVPRKTLSPRSASLAAGDEAPKSSSPYSGELGASRTVAPRTEGVSAPIPAVAELPELFQLKCPSPASEARPHLNGNNPSIPRT

SEQ ID NO: 74551 - protein, 159 aa, Zea mays
  Coding DNA Sequence Number=SeqID_31176
MDFGLLAEGHRTIRWVPRNGPEENQRSRQHLRKAPDCPVFTGLSGGNYSGGQLNSSPSENLRQRAPDCPVCTGQSDESCNGYLLNVQNGSVCQNGFWRVHCALSGVHRIDTVECPVHHPIDKFGFLSNGHLSGWGAIKYPPTSSFKTEELPPSNILQVQ

SEQ ID NO: 74552 - protein, 363 aa, Zea mays
  Coding DNA Sequence Number=SeqID_31177
  Gene Ontology: Mol. function=protein serine/threonine kinase activity; Cellular component=extracellular region; Biological process=protein amino acid phosphorylation
  Homolog annotation: Hit_ID=A3BKS3; Match level="QueryCoverage=68%, HitCoverage=32%, E-value=1e-46, Identity=44%"; Hit description =Putative uncharacterized protein
  Pfam annotation: Domain name=DUF26; Domain location=217-271; Score =49.3; E_value=1.4e-11; Accession=PF01657.8; Description=Domain of unknown function DUF26
  Pfam annotation: Domain name=DUF26; Domain location=96-150; Score =51.0; E_value=4.3e-12; Accession=PF01657.8; Description=Domain of unknown function DUF26
  Pfam module annotation: Pfam domain module=DUF26::DUF26; Domain location=217-271::96-150
MATRRLTPDCFPSLLAGVLAAFLHAALHAPLAVAQERQPPWLLCSPPPDSGIAGNYTENSPYQGNINLISATLPKNTSSSPVLYAKDRVGSVPDIVYAHALCRGDANASACESCVATAFKGAQQGCPLVKDVLAFYDLCQLRFSNRNFFLDNDNFITAYYLQGSKLAAGTGTGTPMGAFDAAVLLLVNATANYAAGNSSRRFGTGEMGLGDDNRTRIYALAQCTPDTAPDICQTYLQPIVNQLPVSFSSVSGGGIFGTWCSFRYELYPFFSGSPLLQLPTFVGTTPAPAPAPPPPATSQEKRRGIILVAKEARTNYKQQFLSLKPQKSLDKWHEHLHIQAEVCSEILKVHSAIMVMNLGIITL

SEQ ID NO: 74553 - protein, 429 aa, Zea mays
  Coding DNA Sequence Number=SeqID_31178
  Pfam annotation: Domain name=zf-CCHC; Domain location=300-317; Score =19.8; E_value=0.0015; Accession=PF00098.14; Description=Zinc knuckle
MTKMIKPQHHPLRTKKRSDASERWRIFSLTLTGKSKEREDASNVGRRATSRTIAQIWPNPKRGGAKARRSIVSRLGMILQAKINLQGRAATDPHRAHHGHHTNALWQEVKTSIPSSSDESSSDDGEEKFETFANLNCELTTKIEQLESKAPSPATDDSLIKKNEKLKAKLASSENAMVNLLEKMEILSIHNNELTTKLESIGSTPGASLVEIPEVIKKDASTSCLDLIDVNSNPCNQVLVKNVIVETCSDEIAMENEQLKQEVARLGKTLYDKKGKAKQTQPPQDNTTAGVKKPMEGQTMVCWLCHKEGHKSYQCKVKTGGKQKQKPTSKISNTYINKVDKKAATPYFDQEEKEWKGDSDQGQQASQQRKGGQTHLGAKGDYLNHEKHQEGLGPEREVRSPKYFGEFRDLAKLGCISWDASHRIKIIAK

SEQ ID NO: 74554 - protein, 155 aa, Zea mays
  Coding DNA Sequence Number=SeqID_31179
MEVHCQTSYCRNEDGFPKLLRACTACLGIRSQPEYDGREFIEHGTEKFRDTYQVVAHKALRALCQIYEEEVADTLLRLFPSFQRDRPNWMARMRALEGQQLLEDDPTVVYLTAYLLTMDAQYDLLARHHRQIIAQVEDAERRNRQLHVDLTTAQV

SEQ ID NO: 74555 - protein, 74 aa, Zea mays
  Coding DNA Sequence Number=SeqID_31180
MSKPDKTFPLLILPVLPSLHNPGVGPYEFRLSDCPHSLEWLYYKGVQKIYFRKFGLRPFFQGYGFQVCGPCFFY

SEQ ID NO: 74556 - protein, 307 aa, Zea mays
  Coding DNA Sequence Number=SeqID_31181
MDGEWWNREGRCHPQDRHQRWPRAPSPVRLESIRLPAQEKNHASFDFIFMDADKDNYPERLLKLVRPENATSNFAAIDASLGDATGEGVAARGLATRGARAASSAVALGFSGEAEKPREEGKLMLSSADEGPGDDDAVEEPTPRTVQLRILGGIWADRIGGALAWSSLLSSRSRDRSILHHDIRAQEDYVSKLTGHKSEHMLLISLAKFLQDYGASQCMSAIAGSYGYIAPGAERATAYDAEDGADAQRTSQSSCRQGDEVPDGDDFSTTQSDSSAADGSIEASCDEVTKEQQQTRSLLCFLLLANH

SEQ ID NO: 74557 - protein, 343 aa, Zea mays
  Coding DNA Sequence Number=SeqID_31182
  Homolog annotation: Hit_ID=A2YGC2; Match level="QueryCoverage=47%, HitCoverage=71%, E-value=7e-09, Identity=28%"; Hit description =Putative uncharacterized protein
MGSRELRAERESRLMGKMACIRHTAHKSVIPFLPSRLAERPLRRMVSGQSSHLERLHHRLLEERERRCQEREQQDSSSPPQQEVESMRRPSSVPQLEAPPAPPQGAPAAGGAAGGAAGGGPGGHPDRDDDRDSLGHSTKLSEKREPEGWVARPAFERHTWLIEYSCVVYQHSHGRYPDRWKATCLARRPEDDLRGAEAFSEHYAISKRDTAEAAKQDATRRALSQYCSLFGGVTDGLNLRYYPRCPTGNTESMIVSPIGEGNPRLSNTVNLVTVLNTELDHSLDKLSRARTEIAELRAERVERRHQEGGSSAPVGTQHPYRSPPRGHHAYGAPDYRTKIDLDS

SEQ ID NO: 74558 - protein, 74 aa, Zea mays
  Coding DNA Sequence Number=SeqID_31183
MSKPDKTFPLLILPVLPSLHNPGVGPYEFRLSDCPHSLEWLYYKGVQKIYFRKFGLRPFFQGYGFQVRGPRFFY

SEQ ID NO: 74559 - protein, 171 aa, Zea mays
  Coding DNA Sequence Number=SeqID_31184
LPVAPEAELGCCQPYPGGWHNSRSGVSGAVFLSDRSVKGRSDCGHFDLADYGTRVRIRCQAIFALNAPAIWSAGKAIWPRLLHDEACPSWASGELRNLRPLCDELKPEAAMSAWTEAESSRKEASSAQEKVASQAEEVQQRRLGLGQVVRERDQPWSHAAEAVSWADVVGG

SEQ ID NO: 74560 - protein, 443 aa, Zea mays
  Coding DNA Sequence Number=SeqID_31185
MEAQAHTSCNRRAGYYVQETAPPLEPLPCLLDCGTSTATRGNPAHDLTVPTEHIDHGSDSHGRRRDGRYGQKWAGSNGGGRQAEAADRRHLWQAKLATLHLRHNDRVKKGTGKGDTPKGILLHEGNGPRAPLLIRGSKAGPSEGFNNRLRALRLRAHYWSEVRRLAPLKGSMAASGHSGSAPITDQGFVGWPPKGSTATSDTERGMILASGKGSRPRRIHASPEDPLKQRTHLQLARGPVFAKKQPWPAKSGFGRHRKLRLARPQGSDSASAPKDDELRLARPQGSDSASAPEDDELRLARPQGSDSASAPEDDELRLARPQGSDSASAPEDDKLRLARPGARTRPRPWKIDSTSTSEEPPPRPTQGSDRPHHGGGIITLPLASSGYGEQDRRPIWLAPGPPGVETPTNRFQARLANSNVDVGYFETGTSFPLRLFHCDPDFE

SEQ ID NO: 74561 - protein, 71 aa, Zea mays
  Coding DNA Sequence Number=SeqID_31186
MDLIITPIHVGPIFMGRITHGPPTEVRGREPLSAQREDEVVERKGGVFAFAPTFAFRGTSSTKSAGAEDHR

SEQ ID NO: 74562 - protein, 528 aa, Zea mays
  Coding DNA Sequence Number=SeqID_31187
  Subcellular localization annotation: CTP_CleavageSite=18; ConfidenceScore=5.04e-01
MAWASAKPTAPLAPACLRLARPAPACRCLSRPLMSDGLPRHHALLRWRWVAPIAGGGWSGDHGKRGEVVFAGPVVQAAAFAEHITSGVLTLEFSTERQRLEGRIERIRTQHTEAVRDKSATENKGSNLLEKLSATEAKKEDLGRWLAAEKEDAEKAHTEAHAARAEANLALKRATDAESGQRSLRGYVDKAEASTRTGVDRAHALLVDTYCQLGARIAPFDTSGKRGGPPIPRVAAGGARVAPVHRDGHFEVFDRANEDFDRGIFQVEDEMMNDEEFDDFGGLESLATRAEDARTGVEEQPAPQIGPGKDPAAAAAPASEDTAASAAPSQESSDENLDYFAALDVAAAESLPQPEVREVSAPPAAAMPEEHHRRRVVSKHNVGEMSRSGRRRRMGMEWSRLRLDRGGQRDLLSSTSGTCIGKGDLRNLFKGEELKMMMFNFCEAGLILKAEPIVADNPLLCGDPCFNSCGVIASDPYIRQKGVNPVARHSVIFSTHMASDRGKDWLCADGAAEFPEVLAVELFAIVDY

SEQ ID NO: 74563 - protein, 386 aa, Zea mays
  Coding DNA Sequence Number=SeqID_31188
  Subcellular localization annotation: CTP_CleavageSite=67; ConfidenceScore=5.28e-01
MAPRPAPPLGQPGRGGPCPCLFFLAHAASPSSASPSRSSRRHLLPWIPHASNREHGSFPPWPDRPPLAAGEQQLPGSMAPVKLEQSSSQLWRPLPAGMQFPWPTPGRAAMAELPGSTPVPLLSPWPPAAMAASPRRARVLLPGRPAPCPRRPGIPTAASPFPKLLLPWPILPCTQLLLAICPTPLAAQLLHGAAPLFLQPRPLPRLPRCQRCARATCSTKCPSGVLRSEQHAVMRPRCSLFLRNPNIDAVHPGENPVFCVEKASRSTSSDVRSDAQIGIAIILTNTDWVCLWIHDYLESIFIDVMSSLENASCVEDKLLKHECRSLYITGRATLIEVSRVHATIWLYARQGYAHVYVASRIAAIIVKLMCMLFSGDVVALVNRIVR

SEQ ID NO: 74564 - protein, 281 aa, Zea mays
  Coding DNA Sequence Number=SeqID_31189
GVTMVGESEPGCGLCPSLSLKDFHHPGQDGGWGESESAPAWAAARPFTQWSEGRGGCRPWRWQLHRAWLSERVASEPLAAPASATAAGRGSSAGEIAKAGHGLTSNSTAFCPSLPHKFWHGRGGGGAEVVVVAAAGAGDGTPFVGLLLLRMPTPIEWGYSPVDYLNRFTKHESPRVKVTSEARGSSISMNRGGVGSKMKPGWPEPSWVVRQRDRRRSRSAEASGRAGALGRWLAEAPGSGDPQTASPSEARSDLAEGVVDAEGAAAPFQRQDPSLQDQSVL

SEQ ID NO: 74565 - protein, 391 aa, Zea mays
  Coding DNA Sequence Number=SeqID_31190
MHCALPPSEPPDGERTRCFRLAAVGGAQLRGSWYLSAIARLQGFSLGSPAASPRRWSPKTVTTSLMVGRSKPGCGLCPALSFKDLHHPCWGGGRAEPELYLPYGTAGHLLLQHSGERALTGLAGGADFDNAGPIGRKRRQLQRARFAGSAGSGTASGATSHRWAECGYLLAVRAVVAPHAPGDRPRRRALLGRRSSSWAVLPLLRYDASARRSVLARPGGPEWGSAGGQMAAVVGAEVVAAEEVLVAGEIAATICAPGLRLFGSNSLSSPLEWGRGRGPYRSSVCPEVIAAAVWPPGAEVVVAAAGVGGGEPPGILSSRRPSNVGGCSYLRGWNRSSVCNGTLSVGVCSLRLSGPEHLGGDPPTVSPSEVGLDSAEGGVDAEGAAAPPTDV

SEQ ID NO: 74566 - protein, 185 aa, Zea mays
  Coding DNA Sequence Number=SeqID_31191
  Homolog annotation: Hit_ID=O48967; Match level="QueryCoverage=35%, HitCoverage=14%, E-value=2e-13, Identity=60%"; Hit description =Putative uncharacterized protein
  Subcellular localization annotation: CTP_CleavageSite=43; ConfidenceScore=5.19e-01
MKQWRDDVDRLLGMAHSGSARPRPRSSRRQHEASALVRSPSVRATPTEDLWAELNPRRAGEDAPVSHPGFEAPRPGREHNHQSELLMTVSTTRIPVLHSAEVAHLYQQVMLPICQEIATSHTPLLRRRGRVTLRGLYKVPLASENPLQFIGSSNAGTPRMTAIAAKSSQGPPYTDHSPTALAPFG

SEQ ID NO: 74567 - protein, 242 aa, Zea mays
  Coding DNA Sequence Number=SeqID_31192
AAAVPSGVRAGAREQESPGRRGALQPADWRTWRGREEEPQGPRRYSFRRHRSGAAEWAAVVLFMVLAVVVLLASWPSLWWCCCCCPARRTWRCGRRACTRWCTGRRGRWTTCRSRSYPFYVPARGVLPLAYVGRAQGAPLGDADNAAMEAALRDGVPGVPAPLLLAQRHRAPLQMQLQVQALVLLTAVPSVLSSGYSSDLSSMAGRREEPGRPQTIIQQWQCGGDLRIYFLSKPLNIRLAES

SEQ ID NO: 74568 - protein, 64 aa, Zea mays
  Coding DNA Sequence Number=SeqID_31193
MAENRARSSSCRRKNSPLQTPSKFKAQVSFEMQLWTLLHNSSHSIKDPNQISIIRTSIQAHRYL

SEQ ID NO: 74569 - protein, 184 aa, Zea mays
  Coding DNA Sequence Number=SeqID_31194
  Gene Ontology: Mol. function=protein binding; Cellular component =cytoplasm; Biological process=multicellular organismal development
  Homolog annotation: Hit_ID=A9LLY7; Match level="QueryCoverage=100%, HitCoverage=100%, E-value=1e-105, Identity=100%"; Hit description =ZCN13
  Pfam annotation: Domain name=PBP; Domain location=17-162; Score =150.0; E_value=6.5e-42; Accession=PF01161.11; Description =Phosphatidylethanolamine-binding protein
MANDSLVTARVIGDVLDPFYSSIDLMVLFNGLPIVSGVELRPPAVSERPRVEIGGDDYRVACTLVMVDPDAPNPSNPTLREYLHWMVTDIPASTDDTHGREVMCYEAPNPTTGIHRMVLVLFRQLGRETVYAPSRRHNFSTRAFARRYNLGAPVAAMYFNCQRQNGSGGRRFTGPYTGGRRGGA

SEQ ID NO: 74570 - protein, 81 aa, Zea mays
  Coding DNA Sequence Number=SeqID_31195
MEIVSADGQHHFDDLIRREEEVLQQLAERCDKEEEEARTIRKRVVEDPLPRPMPQTIDASAESTTKWFNPMFGVQIGANSF

SEQ ID NO: 74571 - protein, 217 aa, Zea mays
  Coding DNA Sequence Number=SeqID_31196
MEPIHRLFGPINDSRRDRPHLGDSTGVPNDILAAIAVFRAATVELEVNRCREPWRISLVVLYVVWGFPWRLRAWGRSVCPQFVTREVRLRQFYAAPLFSEVTSHLKTKLVPGNPESKASCDLDHSSLHNNVLVNHYDMLRTTRENSATTRVEWDSLGHVIRKARERLPYPKGASGEASLLEYREVLRSNCCDGNSDEGFLCFLCPETVVGTLELLEL

SEQ ID NO: 74572 - protein, 652 aa, Zea mays
  Coding DNA Sequence Number=SeqID_31197
  Gene Ontology: Mol. function=cysteine-type peptidase activity; Biological process=proteolysis
  Homolog annotation: Hit_ID=Q5NKP7; Match level="QueryCoverage=100%, HitCoverage=100%, E-value=0.0, Identity=81%"; Hit description =Putative uncharacterized protein 9C20.3c
MKHVDRPPNNPKRITIQSSQECFSVDIPSAEQSNPCPEDGNPPNVDSQNLTNETVQIDSDEDDFMPALKKRNVSESHTRVLRKVVTKRIKHEELPRQVNVMHTQQTISYLSHLQWLMDKLDPKDMTIRPGPGKELKITKDIVHLILGVPNHGGGKPLGIDEAVAASNLRAELGVAKDEFNVTFLQDRLRKGEDDDLSIRCFFLILFNRLLFPTASWGITYHEVLLTEEMHRFHEIDWCQLIFNDLCEAAKKWHNRITTNVSTTIYGCSIVVLLYYLDHLHTTAAPQNKTGTPRIKFFDKNSIKALTKADKRKVRHGAEPFGHCEMMSSKINDLPHRHRSNFTDILAAYDLEVDKSCIAIKDNIDKIIEKQYDIADKFIELIDEVLRAESDNLENETDEPQHPGNSADSAASQLETQLGGTQFEEIHERQQHIRRVLETCPDESDVVTDQQRGEMATEEMEHNDSGPVFDQTPTPHDDTLKGTTNSGSDPPLIEHECVRSLWDLICSKDIDQSRVVIDYGEYSANCMDIYESFAEGKCLENVFMQCFIECVRDDSKNHRRTMTSNRLILDVNVGALLNFEEQERHSKNPQPFDQNVLQNCLHNTLPPLVNLDKCKSDNSRDLRAHALHQLTFHRMNKALPLPLDIQRFMFARN

SEQ ID NO: 74573 - protein, 127 aa, Zea mays
  Coding DNA Sequence Number=SeqID_31198
MAENVEAVGSAESEEADASAKKGIACSPALEVSPPRGFGDAAACPHKGPAADRGTSATAHRGNGVAATGLGTAAAAQGCCRRSPSGSGAAIAGLGTAATACRGRGATATAVTGRGSPPRALSGNRCR

SEQ ID NO: 74574 - protein, 72 aa, Zea mays
  Coding DNA Sequence Number=SeqID_31199
MAHSASVPLVMNRDGVGQGRHQIYSGKDGDRAVAFDRPKPNSSRFVATPNGFEALGELQKFGETCGPWISFV

SEQ ID NO: 74575 - protein, 260 aa, Zea mays
  Coding DNA Sequence Number=SeqID_31200
  Gene Ontology: Mol. function=metal ion binding
  Homolog annotation: Hit_ID=Q6EUG3; Match level="QueryCoverage=88%, HitCoverage=91%, E-value=6e-97, Identity=63%"; Hit description =Putative bZIP protein
MLAGGIWKGKLYQPPVVIFYVWFHSTALSGADDARKILNNDGTCPICDQVLSKSHMKPMDINPGDDWTNAKFTEKLEEVHTAYQKMAKRCQLLEQENENLNRDKHELQEKFAEKSRQKRKLDEMYDQLRNEYESVKRSALQPANNYLARPQPDLFAGMPNVMDGGDHLRQGSVDLPKTPGQRDEGWGPPPRQRHCTSGPFDLSTGSPAHAVAPPADIRPRQQTRSVFGATLNNPSSTLRNLIISPVKRPQTSRNRQHIFT

SEQ ID NO: 74576 - protein, 137 aa, Zea mays
  Coding DNA Sequence Number=SeqID_31201
MPSITSALSIITSRKKPYSDLKHEHKANELLTAVWRRAIEQQMLAFFLAKVAVDSQVLRRVLAGTGGSESDGVFLTVTVTAGQLGSGNGNGDKAAGRRTDGVLGGGEDGFDFTGLLTGGGGQTSDATLHVQCGQRLL

SEQ ID NO: 74577 - protein, 124 aa, Zea mays
  Coding DNA Sequence Number=SeqID_31202
MASILDPVMESSKVQTPATTPDRKGEMPKKSSEAGATLDIAEARPSARIETRYSVVAEEGIEARPSKAAGAALMLEREGAAEESESPAPGMCGEPPELFQLKCPCPALKARPHLNRNKPSVPRI

SEQ ID NO: 74578 - protein, 195 aa, Zea mays
  Coding DNA Sequence Number=SeqID_31203
MPNIAIIVPRLRVCNRLVLDRQLREVEEEEVLVVEGLAINLESCTAFFVARTRATQQGHARLPFKRRKKLLKLKRARVSRSKSSTLLRATLLMSQTTKSFLRERRVSSEATKSFLRERREIFVNNDIEQQLWHRRRINSLRSMKRREGVFSPKAQKCFIQQPVNSFVNDRIGDLHHIKSFFHGEVSLRIECLRRW

SEQ ID NO: 74579 - protein, 191 aa, Zea mays
  Coding DNA Sequence Number=SeqID_31204
MSSCSLMHRVFSTFQAPGWGIPRRLFASSLEERNSVGVGTFQPSFGFKDFHQPARLYPPAGGHPIRFKDVHHPRWGGGRAEPALYLPRGFVGHPLPRRSRERALTGPAGGPDFDNAGLVNGGRRHLQRVGLVGLAPGGPFCRRAAAAPRAREDRSRCRALLGRRSCSGVVLPLHRRGIFTRRPAPHSSGRI

SEQ ID NO: 74580 - protein, 138 aa, Zea mays
  Coding DNA Sequence Number=SeqID_31205
  Subcellular localization annotation: CTP_CleavageSite=22; ConfidenceScore=5.09e-01
MQAACNRAKWTRFSDSRHANVEAQAHASRNRRAGCCIQATAPPLAPPPKSGRRFAFAVITAPKKGPGKGDTPKRILPREGTRLRASLLIRGSKAGPPKGSTAASDRVGPTRTTGQRFEGRPPEGFHGRLRLPGLRAHY

SEQ ID NO: 74581 - protein, 403 aa, Zea mays
  Coding DNA Sequence Number=SeqID_31206
MGNTRNPSALSLEERNFAEVASRIFIILAGAESEDATFRPPPRFRGEDGSEDLPVRFGAARARRCGVGGKADAAVGADVVAAGGSFPTVEAVSTAYGPTSGSLALMSGSCPLSGDANESLLVAASVLGPWTAAAEVAGEPPELVAPQAPRCGGCSYPRGRNRSSVCNGTLSAGVCSLWLSGPEHESLGSVGLAARGFSCLVKGNPWPLFDEPKLEAAVSARTEAELARKEDFVGRSLAGPSTGGTDAGVELPRPRAGLMSSGDSWLRLRGGRPSCLLEPDSWRRPWRRWPGRGADVVLRSGDPPTALPSEARSDFTEGVVDVEGAAAPPPSRPEPAGSVYLVVIVCPSESYFSRKVMSEDSAIDIVEKARKIVSAEEFFEREDLFGPQNHLSERELLIAEGDE

SEQ ID NO: 74582 - protein, 23 aa, Zea mays
  Coding DNA Sequence Number=SeqID_31207
MAPSWGAIGAAAPVCLSWGGSRS

SEQ ID NO: 74583 - protein, 64 aa, Zea mays
  Coding DNA Sequence Number=SeqID_31208
MALCASTVDYHSERCGQKSEQRSQNAPDMSGVPPDCPVPLEDRRRQCFLANIDLRLLPNVIRII

SEQ ID NO: 74584 - protein, 120 aa, Zea mays
  Coding DNA Sequence Number=SeqID_31209
MMTKEAIFRGHSTLHSLRDSSKAPSGRQLQGAEALGASEEDMGISPGKSIAYSVERTKIYKAQKSFLRECRAKIAEAIKVVPKGAQPMFMMSSASFIFGSARGSYGSGSGDNSAEVGKIN

SEQ ID NO: 74585 - protein, 145 aa, Zea mays
  Coding DNA Sequence Number=SeqID_31210
  Gene Ontology: Mol. function=nucleoside-triphosphatase activity; Cellular component=mitochondrion; Biological process=response to abscisic acid stimulus
  Homolog annotation: Hit_ID=Q5ZDA1; Match level="QueryCoverage=95%, HitCoverage=39%, E-value=6e-50, Identity=59%"; Hit description=BCS1 protein-like
  Pfam annotation: Domain name=AAA; Domain location=33-144; Score= -20.3; E_value=0.0012; Accession=PF00004.20; Description=ATPase family associated with various cellular activities (AAA)
MDHKLKQSIIDDLNRFIKRNDYYKKIGKAWKRGYLLYGPPGTGKSSLIAAMANHLREEGEGHGKSKSTEQNRREEKVTLSGLLNFVDGLWSTSGEERIIVFTTNYKEWLDPALLRPERMDMHIPMGYCTLDLFEILANTTTPLRP

SEQ ID NO: 74586 - protein, 96 aa, Zea mays
  Coding DNA Sequence Number=SeqID_31211
MVNSDDNPIKGLTSVLSVEQVINSKLTGFNTKTTDQAKDGGKKSFEVPSAWEKVKETRNPKPRVKKKTCKVKDDRVNKSYGASRITTKGHDLQPMR

SEQ ID NO: 74587 - protein, 217 aa, Zea mays
  Coding DNA Sequence Number=SeqID_31212
  Subcellular localization annotation: CTP_CleavageSite=46; ConfidenceScore=5.05e-01
MRSESTAAQSLCHRRPVSGAIPNSVQPSEKTVHTSVRLPERGIGVCFAGEASPRSPELSTPPEYVDRVNHSTILRFLVHTVAPLPHEAHHALGLNQFAVVWPVYSPPTRTPACTRGPGDSGHLRRQVVPRRDRQSLPEPTPPFTGPPSPPVSRATLFFPAVTVCIRGRTADCNLADGKYILVPEQGAAQEVAPDPAPEPAPEDLSATALEGKPRSYA

SEQ ID NO: 74588 - protein, 631 aa, Zea mays
  Coding DNA Sequence Number=SeqID_31213
MDKDRQGAAQKRQATVRIHEARPKRPRGTAKAVASGGGKPPLAAKAGASAPSKAPEATAGAGGSKSAKVVPPASGVAEASKAARALPLAGKRVADFGTDITVDDYLGGSDEGQLAIVAPAAAIATAAQAPKARGEILGAGGEVPALALVRDEAGAATRRLKGVTEALSQATEALSQVADFTSRTASGALTAALSAEVERLRTQHADAVREKSASDSKCRNLTDKVAALEREKVDLRRQLAAERREANEAIAKEQAAQADAKLARVEGNLAKELVEQLQGRLTALESHAKEAEAAMRAEAERTRTQLMDTYRELGARTGDFEVPDREPGLRCLQWAQEELLELPTVVGGLMSYASLVTCEGAMNALSREGCRHFEAFDQVDEDFERDIYKVEDPVVKESAGALYDRMWGLYGREVVRERAEAARAQAERGERVDDFGALDSVLPDLGSTLAEAVTGVDLEPIPETAAIATAAPPSAATGEGDPDAPAAAVPSAEGSAAVAAETAAEAAAEPLAEPTAGAPAAPGPSQVQEFGPAHATATTEFLAASTAEGGNEYGGPVSEFFDFTDSGSSVEWTEESSEEDLDYFAALDVAAAEASPHTADASNVPGPSTGRRRRRAVAKRRVSAEEGARLR

SEQ ID NO: 74589 - protein, 81 aa, Zea mays
  Coding DNA Sequence Number=SeqID_31214
MPVMASPSNKVVDGERVVAMENEEEVEVEEAWTTPPPREEPQAGNCFYFDICGIEPDSPITQGKPRCICHLLAILKSFSLT

SEQ ID NO: 74590 - protein, 54 aa, Zea mays
  Coding DNA Sequence Number=SeqID_31215
MARVACTLHGKRLDGGVSVLSVGVRKQQMFVAFVPRWCPKKKIKTEASEGSVLR

SEQ ID NO: 74591 - protein, 661 aa, Zea mays
  Coding DNA Sequence Number=SeqID_31216
MSSGRDLVEEFMDMEYGPWRMAGYLAKNPVAFVREVEPEAARIVGQYMPRTETLRSWDIRGSNVRLNRVFELNRMPYGGYPGDDDAVVVDRQGKRAATAVDGGPSRGTVPAAGTKKRKLGTAAEGLGFSDHFSVDLLGTCAAPGERMSSPKLRKPSARMLKVTRGRWPRNVPIPRAAGKDILTSRLAREMRIFPYGGNVATVVSAVMEKDRQDASRKRRAFARVGDPCHEVKMARGVAKSTAPCTSKPPLGAKSAAPSPSKPLPAVFVQEQRPPSPSRAAEAEVGKVGASMDISVEDYLLGSEAGQLAVAPASMAAGSVVVATGVTGSVQDPWAQFYAGGEIVSAAAAKDVAGLVAQQLKHATAFAERIASGALTSEFAAKRRRLEGRNERLRTQLTKAVQDKSATKSKSHNLMDKLSAAEAEKEELGRRLAAKKEDTDKACAEAQAARAESKLARAEASLALQRAAEVEANHRSLRGHLDKAEASTRTGEELEVLPSIVTSLMHFEVFDRPDEDFGHEIFQVEDAVLKRSTGALYDRMWGPHGRDSVWERSDRAMEQMANVEEVEDLGGLESTGVRAGAEDQSAPPTGVGEDDPVAAATLLEDTLGAATPVPTSGPAQATPTDSINFVVATNAVPANDSLSGSESGSFLSGGGGFESPFF

SEQ ID NO: 74592 - protein, 75 aa, Zea mays
  Coding DNA Sequence Number=SeqID_31217
MTSHTETQAMEAKGRRGTWALVRNTDKMLSLIHIHGFGAQNYVIKRKTNMKSSISSRLLSLRSYCSWLVNEIIVI

SEQ ID NO: 74593 - protein, 233 aa, Zea mays
  Coding DNA Sequence Number=SeqID_31218
  Gene Ontology: Mol. function=aspartic-type endopeptidase activity; Biological process=DNA integration
  Homolog annotation: Hit_ID=Q8H8K3; Match level="QueryCoverage=54%, HitCoverage=9%, E-value=3e-14, Identity=36%"; Hit description =Putative retroelement
  Subcellular localization annotation: CTP_CleavageSite=29; ConfidenceScore=5.06e-01
MAVKRTTVPRSKQPTLSNDFRVGSSIGCRGARLKQVRGKDGLGSDSLPLNAISLRGGLFTLKTANEIWLKLHELHDGTFNVREQKHCLVLNEYNSFAMKDNELVRYMYSRLNLVINELNSIGINKLGEADIVRKIISLLPQQRYGSIITILHNMEELSTMTPTIVIGKIVALEMSRKMGHQEEPTFSRPYAFACDERNGKKKAPTPSSSSEEEEEEETDGDEDNQPSTSSSKD

SEQ ID NO: 74594 - protein, 142 aa, Zea mays
  Coding DNA Sequence Number=SeqID_31219
MQSLECFSVGVCIRHKHHVASYHCIIPHNITSYVISHQQQRWSTKQIFGSSVINENVLRHEANLRQIQTYLDNLHTIALLQKALFFMKHEKKRSKSRVFFENLFSSLIQQFVDDFVDDDIGNTHHIQRLFHNGIGLGVVWLG

SEQ ID NO: 74595 - protein, 209 aa, Zea mays
  Coding DNA Sequence Number=SeqID_31220
  Subcellular localization annotation: CTP_CleavageSite=47; ConfidenceScore=5.29e-01
MTVKLTSSSYMPSTAWASATPTYSRLVLLHDAPARGSRVFCCDFSLNAMGRPVDPGDICPPQAPDLWVNLEVISPKIPEEEFSSKSEGSPAPILLRESSDNSDDSQGLAAEVWTYIRAVEHSGLEGSDESEYSSDEEDSDGGEDEDGDDDDEGGGGGDGDGSGRAAARTVTAAAAGAATGAAAAAAATGAAAAATATGPVARCHWSFRC

SEQ ID NO: 74596 - protein, 156 aa, Zea mays
  Coding DNA Sequence Number=SeqID_31221
MWMTPRYGCSAKSSCFGAWGDYGGVDLGDAKAEVEELALPDSAVLAMKQTVKSAWLLRSSPASPSGAITAALGGIFLTASGFSGWVLIGYVVHLLLTVAVLPGVWLRRPSPDAVTIQDASPKATDGVIDRDVVVDRWNLSRRPFQESMDSGGNLVY

SEQ ID NO: 74597 - protein, 100 aa, Zea mays
  Coding DNA Sequence Number=SeqID_31222
MANPIHLYRGGEAGSIGVKLPVSEKATHHCGGRVPRVRLVTVRGDFDGRWKEASLLLPPGFLTEATDFGGGDRRDFCAVGPHGGQGETERLMKEMTDGAH

SEQ ID NO: 74598 - protein, 75 aa, Zea mays
  Coding DNA Sequence Number=SeqID_31223
  Gene Ontology: Mol. function=nucleic acid binding
  Homolog annotation: Hit_ID=Q10F39; Match level="QueryCoverage=84%, HitCoverage=7%, E-value=1e-12, Identity=58%"; Hit description =Argonaute-like protein At2g27880, putative, expressed
MAVCAMHSISLYRSVTVPPAYYAHLAAFRVRHYMDDDLSDQGSSSVASSRMKDGAVPVKQLPKVMESDKQFMFYC

SEQ ID NO: 74599 - protein, 117 aa, Zea mays
  Coding DNA Sequence Number=SeqID_31224
  Pfam annotation: Domain name=zf-CCHC; Domain location=19-36; Score =24.5; E_value=0.00029; Accession=PF00098.14; Description=Zinc knuckle
MTLSKENDKQQASCQVERRFCYKCGEQGHISKVCDKGGKEKISKKWSNQDLGTSVSQEIGISSHECLSETRVRSSETTDQAKDGGKKSFEVPSAREKVKEAEEPKAKGEEEGLQSQG

SEQ ID NO: 74600 - protein, 359 aa, Zea mays
  Coding DNA Sequence Number=SeqID_31225
  Gene Ontology: Mol. function=zinc ion binding; Cellular component =intracellular; Biological process=regulation of transcription
  Homolog annotation: Hit_ID=Q6ATK0; Match level="QueryCoverage=99%, HitCoverage=90%, E-value=2e-61, Identity=43%"; Hit description =Putative uncharacterized protein OSJNBa0015G13.14
  Pfam annotation: Domain name=zf-B_box; Domain location=1-47; Score =38.1; E_value=3.2e-08; Accession=PF00643.15; Description=B-box zinc finger
  Pfam annotation: Domain name=zf-B_box; Domain location=53-100; Score =50.8; E_value=4.8e-12; Accession=PF00643.15; Description=B-box zinc finger
  Pfam module annotation: Pfam domain module=zf-B_box::zf-B_box; Domain location=1-47::53-100
MKVLCSACEAAEARLLCCADEAALCARCDRDVHAANRLAGKHHRLPLLPPDDVSAPNCDICQEAHAYFFCVEDRALLCRACDMAVHTANAFVSAHRRFLLTGVQVGLQPAAAAQDADPHPPAAAEPLQTPPPPDRKAAAAGDGSSPALLYSDDDIDWAAGADAGGGVSVAVTLPDWSLVHEQFGAPPVVPRHADPALARTPSSKRSPRRSVAAAFTVQGGGGLAGGLPDWPLDEFFGFSEYSAGLAFAENDTSKRSVFHWQADSGKLGSTDGSPAGRPSSDASQDFFGQVPEFHQWSVPELPSPPTASGLHWQGGPRHGAATTTDVAAVFVPDISSPENPFWCYATAAGQAPTKRRRRC

SEQ ID NO: 74601 - protein, 229 aa, Zea mays
  Coding DNA Sequence Number=SeqID_31226
  Gene Ontology: Mol. function=protein serine/threonine kinase activity; Cellular component=beta-catenin destruction complex; Biological process=protein amino acid phosphorylation
  Homolog annotation: Hit_ID=Q1AMT7; Match level="QueryCoverage=37%, HitCoverage=21%, E-value=1e-42, Identity=96%"; Hit description =Glycogen synthase kinase
MAHLSLSPFNTGSLGTALEIAPFPPSPPDPAWRCGSMAPTGDLSLGPSTLDPSEDDVQIDYPTTGRSTYQTEVSSHDLEASLTEELASKPGLHMQLRISFNICVLAELLLGQPLFPGESGVDQLVEIIKVLGTPTREEIKCMNPNYIEFKFPQIKAHPWHKIFHKRMPAEAVDLVSRLLQYSPKLRSTAHYLAQYHINTSSSVLRKFIDKSGTHVIDGVKMGGKDVVCV

SEQ ID NO: 74602 - protein, 273 aa, Zea mays
  Coding DNA Sequence Number=SeqID_31227
HLERLHHRLREEQERRRQEQQGSSFSLHQEIESVRSCSPVLPLEPPPASPLGAPASGVAAGGDPDDGDGDDSSSHNTDFSANPEPEGWVARPITRDAARGTVAGSTRIAGRQLCIKRCPENNLQGAEACSEHYSISERDSAEAAMQDAARRALSHYCSVFGGAADGLDLKYYPRRSSGSTGGVIVSPVGEGNPRLSSTVNLAAVLNTELDHALDELSRARAEIALLRAERAERRYLDGGSPAPVGTQHPYRSPQRGHQSYGNPACKTKINLEP

SEQ ID NO: 74603 - protein, 140 aa, Zea mays
  Coding DNA Sequence Number=SeqID_31228
MGADRFLSVAEGGLGGEALYFAVILWLSVMSWIIFTWVGDGGEDGRRGRKRRGSRGSPVFVGASGICDGTGPECSGGRTKYMSRTVLCETRSFFVREVGNLQWLVGSLKTAFGKQAKAYLASSPQKPLLEQAAQETLSIS

SEQ ID NO: 74604 - protein, 300 aa, Zea mays
  Coding DNA Sequence Number=SeqID_31229
MKKVKYVRESTILSSAGGETEKLGEEQERWHFETGSSIPLQPTQRIFHSTAIWSLSRMARLRHTARKSVIPFLPSRLAERPLRRPVTGQSSHLERLHHRLHEEQERRRQEQQGSSFSLQQEIESVRSCSPVLPLEAPPAPPLGALASRVAAGGDPDDGDGDDSSSHDTDFSADQEPEGWVARPITRDAARGCHFHDALDTLLRRALDRRTWSIEYRCVVYQHSRGVYPNRWEATCLGAVIVTNNVFKKCAMKGIHPHHLVEGSWVIRTSYCSKEEGFPHLLRSCMLRMGIRKKPEYVWKE

SEQ ID NO: 74605 - protein, 62 aa, Zea mays
  Coding DNA Sequence Number=SeqID_31230
MDEDNRISGGDGGWLVTGSHGGRGLIGVGGRAGPEGMQSMRPLRAPKLLVGGGWDILQSGGE

SEQ ID NO: 74606 - protein, 167 aa, Zea mays
  Coding DNA Sequence Number=SeqID_31231
  Gene Ontology: Mol. function=acyltransferase activity; Biological process=biosynthetic process
  Homolog annotation: Hit_ID=Q69QS3; Match level="QueryCoverage=89%, HitCoverage=98%, E-value=3e-34, Identity=53%"; Hit description =Putative uncharacterized protein P0463D04.9
MDQRPPERNAKRAREEEIHAAPAQPDFPFEEEEEEEEEEEEAAAGAGEASRRPPGVFQFPWQKCRGGLGVSAAGSSRELRDVFFRSLVDGGAAAIGVPGDRLVSPPPGRRALLEGVDAWLAAAADGEVDPVWRSALMARSSRMDGRGPSPRMLRPRVASSKRTKEKR

SEQ ID NO: 74607 - protein, 194 aa, Zea mays
  Coding DNA Sequence Number=SeqID_31232
MGGSGAAMCPEKVIHSKASTVSPDPMGEYQTPGYTVRTFKLGPGPPRVQAGPLEWDPDPPRHDPALQEVADHMHGGQTTGCQVLEVEGWPVARQDEAVVGLGAGDHPVAASVFPPHAAEGGDVGYGQIRPRLKVVATKMVPSLPRLDQHEEVAEEGSTEGHPYEHLAEVDEDGRLEDGVGRKVLKLEPKLLQPQ

SEQ ID NO: 74608 - protein, 658 aa, Zea mays
  Coding DNA Sequence Number=SeqID_31233
MSSPELRESSARMLRVTGGWWPKNVPVPRAAGEDFFTSHMVRDWKVFPYGRNIAAVVLAVMDKDRQGAAQKRQAVVRLHEARPKRQRGAAKATAPGGGQPPLVAKSVVPASNRAPEAAKAAAAGGSKSVKAAPVPSGVPEAAKAARELPPPGKRIADFATDISVEDYLVGSDEGQLVVVPPAGAKGGAFSAGGEISALAAVRDEAGAVSRRLKELKEALSQATDFADRTASGALTVVVSAEVERLRTQHADVVREKSAADSKCCKLADKVAALEGEKADLRRQLAEERKEDNEALAKAQAAQAEANLARVEGSLARQRAEQLEERLRALQSRVERAEASTRTEAERTRKQLMDSYHELGARTAEFEVPEREPGLRCLEWVQEELQALPTIVEGFMSYASLANEDFERDIYKVEDPIVKESARALYDRMWGPHGREVVRERAETARGQAAHGERVDDFGALNSTLPDPESNPAAAVSEVALELPPETVEGAPDTPAAAAAGRGPPLETAEGIPDAPAAAAAGGGPPPTAAPRAEDPVTVAAETTAEAPATAGSSQVQDFGPTHATATTNCLAASTVDDGNKSDGSASKFSDFGDSGSSVEWTEESSDEDLDYFAALDVAAAEASPQAAGAEVVPGPSTGRRRRRAVAKRRVGRTLVGFV

SEQ ID NO: 74609 - protein, 145 aa, Zea mays
  Coding DNA Sequence Number=SeqID_31234
MPLQRRSRLCCWFTGPNDIGRIQRGPGTDLSWEELELLVKGITGLRTVVLATLPTLDDSGVAVHQTGGRDPLRGIQIPGVPAGGPQPTGPAPCVDPAATPSPLDKGKGAASSASAPGSSGGSEEERRRRLRRADESLVLEPSRKR

SEQ ID NO: 74610 - protein, 186 aa, Zea mays
  Coding DNA Sequence Number=SeqID_31235
MAKAKWSLSMFMTQLRTTRCTSEHKRVYTDEWWAGMDEFSYQFNDVVVGAPAYPELCRLSSELSPEYLALQQPWRLTTSTAPVPTVIAALVTRGHVPTCDDLEFAWLVDGSGDLVFDTLYMDSDLDPSAPASSEEEPPMGSRMKTAQLMWYQQNGAPHMVGVGGIAERDASSESGSAPHSKSFEHV

SEQ ID NO: 74611 - protein, 116 aa, Zea mays
  Coding DNA Sequence Number=SeqID_31236
MPYYLGTLRDIQLGAYLHCIRVIQRISGGQSRVRTRVRAADPGRLGNLGWDLQVEDGVWPHGFIPWARWWGRCNGLPRATIEAPIHLPLMAYEPLGPQHIYGSHVPSYDALMTYQD

SEQ ID NO: 74612 - protein, 224 aa, Zea mays
  Coding DNA Sequence Number=SeqID_31237
MALIVRGFFLALSLTDDPRTRDIIPDTNSFGIKLMLGGGGGGSSSNSTESGAGLESPSIQALDLGEGAAVLLVRRRGQVAVGAEGAAGATAAVCIVLQVHAGELVEAAGVDAEAEDEADGHQHQHDERADAARLARAAAHLALSSSVVLAADGREENQGAEKARGFCFWLWVVGWVRSGTGRREGPRSGLVCLGVRARPSGDATTIIKEGGGEPNQVRSYRQIG

SEQ ID NO: 74613 - protein, 21 aa, Zea mays
  Coding DNA Sequence Number=SeqID_31238
MAEPSRPKQLSSSVFAPLLCP

SEQ ID NO: 74614 - protein, 265 aa, Zea mays
  Coding DNA Sequence Number=SeqID_31239
  Subcellular localization annotation: CTP_CleavageSite=38; ConfidenceScore=5.05e-01
MEETHLHVFDASCPRQSTLARAPARPAPRPSQASAMIRARAYKTLPDFDCTLPRTLKPHRSLARRRLPVRSVSAAAQSLCHRRPASGAIPNSVHPSEKTVHTSVKLPEQGIGVCFAGEASPRSPELSTPPEYLDRVNHSTILRFLVHTVATLPREAHHALGLNQFTVVWPVYSPPTRTPACTRGPGDSGHPRRQAVPRRDRQSLPEPTPPFAGPPSPPNYGYGARPGRRLSQAKVEGSRSCTQGSFGAIAQGGTDLKIKRLRGPQ

SEQ ID NO: 74615 - protein, 74 aa, Zea mays
  Coding DNA Sequence Number=SeqID_31240
MESTCSSPSKDLSKKRTRSKLLRLLLRISSQPQQLKASPGTIQKMVDGVTWPTTLPPGWTVEWDVAPAGEEHKE

SEQ ID NO: 74616 - protein, 198 aa, Zea mays
  Coding DNA Sequence Number=SeqID_31241
  Subcellular localization annotation: CTP_CleavageSite=37; ConfidenceScore=5.03e-01
MSGAPEHSNANSPPSGISRGTRAIIHRTVRCTPDSVQCAKEERPQELASFGNLQRLVRYNSPDMSGVHRTVRCNSGATAIRRQRLPAMHLLHAQRAQKSESPILAHRTVNSSCPVCTGHPGGPTSQKLQRSESNDSDDVGGGHRDMSGVHRTVRARVRRPRPQPRLGRGSPVLGAGFIPGGRGSGVREFSPGGAAPSS

SEQ ID NO: 74617 - protein, 115 aa, Zea mays
  Coding DNA Sequence Number=SeqID_31242
  Gene Ontology: Mol. function=calcium ion binding
  Homolog annotation: Hit_ID=A3AVC0; Match level="QueryCoverage=46%, HitCoverage=13%, E-value=1e-17, Identity=79%"; Hit description =Putative uncharacterized protein
  Pfam annotation: Domain name=efhand; Domain location=65-93; Score =21.6; E_value=0.0029; Accession=PF00036.23; Description=EF hand
MAAVVYALSIASAVIADWGKEKAFWAGHDLKLAIDDFDEELIDPKLRFSFQLNSKVCGVDLTDKVVDIIFHVFDANCDGNLSSEEFLRSLQRRENDIRQPATSGFLGELENVIDN

SEQ ID NO: 74618 - protein, 154 aa, Zea mays
  Coding DNA Sequence Number=SeqID_31243
MQAVVQPLQVARLTGHGTTKRTLRETGSLPDRKLHVARQLVYVVYGGGGAAAAGEGGVAGVAGGGGVDRLPCSGSASDPSGHAVLRPALSFVGVRYPLLSGPAASNPSSEVVFMPLRSEVPADAAPAPTPAPEPVGRLTLSNQFGFLSVVMDLT

SEQ ID NO: 74619 - protein, 319 aa, Zea mays
  Coding DNA Sequence Number=SeqID_31244
  Subcellular localization annotation: CTP_CleavageSite=87; ConfidenceScore=5.12e-01
MARPEATGGGGGAVAVGLRARARVRGVFAGGGSGGGVGRRVGGRWLVLGTPHGSLSSPSYLPVSRSVRFVVPWPAPPAPPLGAPAPRVAAGGDPDDGGGDDSSSHDTDFSADQEPEGWVARPITRDAARGCHFHDTLDTLLRRALDRRTWSIDYRCVVFQHSRGVYPDRWEATCLVRRPENSLWVLRSARSTILSLSGTQLRRPLLGGVADGLNLKYYPRRPSGSTGGVIVSPVGEDNPRLSSTVNLAAVLNTELDHALDELSRTRAEIAQLRAERVERCHLDDGSPAPVGTQHPYRSPRRGHQSYGNPDYKTKINLEP

SEQ ID NO: 74620 - protein, 17 aa, Zea mays
  Coding DNA Sequence Number=SeqID_31245
LPQMGIELMDNHCLSMI

SEQ ID NO: 74621 - protein, 71 aa, Zea mays
  Coding DNA Sequence Number=SeqID_31246
MVFLQVVSRLMVALMIMVMPNRILAEYVEVYSPLLYTPTPPSPGCQHCNHCSGENEAVEGVFQEFQDYDEF

SEQ ID NO: 74622 - protein, 47 aa, Zea mays
  Coding DNA Sequence Number=SeqID_31247
MVPDCGAKDLLKQQPGDSDHFPEYLFCSGEDAGNMEDFEEFQDYDEF

SEQ ID NO: 74623 - protein, 91 aa, Zea mays
  Coding DNA Sequence Number=SeqID_31248
MANCKGFPEPFLCLALVISYAAAPGGMRSFLQAVSTVTEEAPTPLRVVQMEGLRSEKLCSGDGSVRIDRNQGKAKVKCLSGLLSTRIILQL

SEQ ID NO: 74624 - protein, 105 aa, Zea mays
  Coding DNA Sequence Number=SeqID_31249
MGVAPDLQMDFLRIIHSKVFLLLEKIGMKLFALCFGGQHYVIKILLQRSAYILSLAAEFAIRPYLARYLLRALHGCDRFEKYTDNSWASLQWVWARDGLMGGSAY

SEQ ID NO: 74625 - protein, 296 aa, Zea mays
  Coding DNA Sequence Number=SeqID_31250
  Gene Ontology: Mol. function=translation initiation factor activity; Cellular component=eukaryotic translation initiation factor 3 complex; Biological process=translation
  Homolog annotation: Hit_ID=A7Q9M9; Match level="QueryCoverage=78%, HitCoverage=69%, E-value=1e-99, Identity=76%"; Hit description =Chromosome chr5 scaffold_67, whole genome shotgun sequence
MARECTKSAASYQACSTAPKAIKELSPFPGKPSTTPEICSHQLMKESRPGYGARLSNPKGLRRYQSCLLGSFQTVELIETFMNYQESIRRCVCIVYDPSRSSQGVLALKALKLTDSFMDLYRNNGLTGEKLREKKLSWVDIFEEIPIKVSNSALVSAFMKELEPESPVTQCDLDRLKLSTAPFMERNLEFLIGCMDDLSSEQNKFQYYNRNLSRQQSQQQAWLQKRRQENMARKAAGEEPLPEEDPSNPIFKPIPEPSRLEGYLVTNQISSYCNHINGVAGQNFDRLYLMKALHED

SEQ ID NO: 74626 - protein, 97 aa, Zea mays
  Coding DNA Sequence Number=SeqID_31251
MVKNFGSRTVQIAMNAVVTSHLLVCLYSTAAFENKSPTTDIAPTSKAWDKSEKTNPQLRCRSANGDNLWGRPSSRLSSKIYSKVGGYTHWVHLRCTQ

SEQ ID NO: 74627 - protein, 125 aa, Zea mays
  Coding DNA Sequence Number=SeqID_31252
MVIEIRLDANRVQHTLESLFLSRMNQQEAPTGVGEFLRDFGIPVVLWRLLQEVGYTEAPKYQWSRTVLRGQPWYEARVMESIPIGQDSVESASARVLMARARVATYSGAQSSKVAAVVHWELCSI

SEQ ID NO: 74628 - protein, 133 aa, Zea mays
  Coding DNA Sequence Number=SeqID_31253
MPLEAIHPVDNIGYMADNIGFLKLEALLSTTPSKDFLDCHTYMHLKDFIESRIKVQNFTKEKNEALCKVLELKALNAEKEKKLKLIEAEMNRIKEEHEAEIIKIQQESTEAYASLEVAKSKIEDLNAERDPNR

SEQ ID NO: 74629 - protein, 74 aa, Zea mays
  Coding DNA Sequence Number=SeqID_31254
MSVGLGCRCGVVINGEGIGGGMWHHNEGCIEAKQLHVECVAIRSKPQELVYFSPAKWIGSEWEMTIIIGFDFCA

SEQ ID NO: 74630 - protein, 76 aa, Zea mays
  Coding DNA Sequence Number=SeqID_31255
  Subcellular localization annotation: CTP_CleavageSite=44; ConfidenceScore=5.23e-01
MAPDLSWVTRYRHTMTSGAVVDWNLRNFSPSGERRRGPPVAVVSSSAHTNPSEYPILWIARFSTSRSRPRSEESHS

SEQ ID NO: 74631 - protein, 107 aa, Zea mays
  Coding DNA Sequence Number=SeqID_31256
MARDPLRGLYKIPLASENPLQFMGIALARIPRLAAIAAKSNREPPCMQSPTALAPFGNSKNYPCDSGVNKWIKAQLAFNELLLSYFYLLVTRILSHRLLYSPQYKQA

SEQ ID NO: 74632 - protein, 171 aa, Zea mays
  Coding DNA Sequence Number=SeqID_31257
MPLRACGIGGGEATTWTPRSMARGTQGSVVPTQEAGPRDQPGGPTSQYLRDGATVGLTKGARAVESATARGGEVWPSGYFGFGFGLFKFNYSLRSRNFLGKVRRNCQHRHEVVKKKHHGIKVPSAPFGCNFFWIVVAFSTDLRACKKLGIRKCACFTTVKRSRKEAQMLQT

SEQ ID NO: 74633 - protein, 58 aa, Zea mays
  Coding DNA Sequence Number=SeqID_31258
MEELDERAFLFVIQARTDDGSLALIGEPEVDSLGFFGRSHRGHGLSFIRGYREVLLRL

SEQ ID NO: 74634 - protein, 84 aa, Zea mays
  Coding DNA Sequence Number=SeqID_31259
  Gene Ontology: Mol. function=structural constituent of ribosome; Cellular component=ribonucleoprotein complex; Biological process =translation
  Homolog annotation: Hit_ID=A2Y1G8; Match level="QueryCoverage=91%, HitCoverage=46%, E-value=2e-26, Identity=77%"; Hit description =Putative uncharacterized protein
  Pfam annotation: Domain name=Ribosomal_L5; Domain location=15-61; Score=23.0; E_value=6.7e-05; Accession=PF00281.10; Description =Ribosomal protein L5
MAISGCYASEKKQSNPMREMKVQKLMLNISIGESGDRLTRTAKQPCCDIAARYTVRSFGIRRNEKITCYVTVRGEKAMQLLESG

SEQ ID NO: 74635 - protein, 270 aa, Zea mays
  Coding DNA Sequence Number=SeqID_31260
  Gene Ontology: Mol. function=inositol or phosphatidylinositol phosphatase activity; Biological process=abscisic acid mediated signaling
  Homolog annotation: Hit_ID=A2YPI3; Match level="QueryCoverage=63%, HitCoverage=15%, E-value=7e-56, Identity=65%"; Hit description =Putative uncharacterized protein
MASKVAFDHPERFSEKFEFSADNIKPLVQTCMTTLSSKISACFRRNVWLGDLNYRINLPYEKTHELISKQDWNELFGKDQLKVELKKGICLKDGPKGSSTFLQRVHVHNLVIEQSLVSQSTEFEAVIQNGDKSSLRALSDEERETWGFLRVMFEDGDFARTKLLAHLGFEPPQAPPASSTNELSQILADTLNIDHAAVTDNADAQFLIDNGDDFFNNPQPSEASLAEESVSTNGQQIEQEVSGDAVPSDPSIDKSIQHALVVGDYKGEVN

SEQ ID NO: 74636 - protein, 212 aa, Zea mays
  Coding DNA Sequence Number=SeqID_31261
  Gene Ontology: Mol. function=transferase activity, transferring pentosyl groups; Cellular component=imidazoleglycerol-phosphate synthase complex; Biological process=histidine biosynthetic process
  Homolog annotation: Hit_ID=Q10NW0; Match level="QueryCoverage=34%, HitCoverage=12%, E-value=7e-30, Identity=87%"; Hit description =Imidazole glycerol phosphate synthase hisHF, chloroplast, putative, expressed
MPNADLEDLSLEPEGRIVFKYYHYELLYNAIQFYAFVPAILFCTTQKVVQVSQVFAWPRAIYEEPGKYGSIENELLCYQCIEEVEPMIDLCSHKLGGSYLHAHELLDTANDLLNEDGCGLEGCVLLGFDIRDVQSPEDIVTAERLVFPGVGAFGSAMDVLNRTGMADALHEYIQRDRPFLGICLGLQLLFDSSEENGPGKLFSTPLCLRLAY

SEQ ID NO: 74637 - protein, 88 aa, Zea mays
  Coding DNA Sequence Number=SeqID_31262
MGKRKKRGMDLHPGHRACRARGLDESEFSSDEENSSDSSEEGDGDGDGEGDDGGGGDGDGGEGGGKGDSGDGRDDSKGSSKGSNKASG

SEQ ID NO: 74638 - protein, 51 aa, Zea mays
  Coding DNA Sequence Number=SeqID_31263
  Subcellular localization annotation: CTP_CleavageSite=37; ConfidenceScore=5.00e-01
MKSSFAVNSDTCSFRTTSTGPPPHWPAATAPGHHAARVSTAFTIAHPLTAQ

SEQ ID NO: 74639 - protein, 61 aa, Zea mays
  Coding DNA Sequence Number=SeqID_31264
MTRITYTGWVVLLPGHCSLLAHAGQPDEKGKGLEGRKGGGNVVTVWILVWTVPDWGSATSR

SEQ ID NO: 74640 - protein, 97 aa, Zea mays
  Coding DNA Sequence Number=SeqID_31265
MARGGRVAGDGGEHWPPPAVVRPCRLPSSSEQALRECGLRQLSPAEPWLALRQLSCGPVARGPWATLVAGARSAELSKKAARCTATELRYEGFTWRL

SEQ ID NO: 74641 - protein, 246 aa, Zea mays
  Coding DNA Sequence Number=SeqID_31266
MGDIRRLSASSLEKRNSVGVGIFQPSFGFKDFHQPARLYPPAGGHPRRFKDVHHPRWGGGRAEPELYLPRGFVGHPLLRRSRERALAGPAGGSDFDNAGPVDGRRRQPQRVGLVGLAPGAPSCRKAAAAPCAREDRPRCRALLGRRSCSGAVLPLHRYGASARRSVPCSSGRIRVGICRRADGPCRRCRGGGGSRSPRHRRDHRHHPRFGPPALCTCPRPSSVGMGEGGVAAAFALRPSPLQFGYP

SEQ ID NO: 74642 - protein, 84 aa, Zea mays
  Coding DNA Sequence Number=SeqID_31267
MSDDLVVPVHFEVGQELCFRLLDHPLLVLFELELLGRFDELIYVVPSGVAKKYVDTFLEAPITQENQRRVLSGQARTVRGTGPD

SEQ ID NO: 74643 - protein, 407 aa, Zea mays
  Coding DNA Sequence Number=SeqID_31268
  Gene Ontology: Mol. function=cysteine-type peptidase activity; Biological process=proteolysis
  Homolog annotation: Hit_ID=Q6J9V9; Match level="QueryCoverage=15%, HitCoverage=22%, E-value=8e-21, Identity=75%"; Hit description =Putative uncharacterized protein
LIAIRYHQALRGEQGPPLRLLLRQAAAAEGVGEEGQGCGGGTSSCGLFLLNYIEYWTGDELSDSFTQDDMSHFRKKLADILLSSDMNKRKGCPLYKYEKEVDMGSPSDVQLLDSPINPKKSKLLCASDDTKVLMVDEDGPITQAELERWFVHDWDKRTPIKVSIDECTNDFLMTGLSTKDMPVTKYDLMDVLCDYIMEIQDDTTLEMTWVQSFNPFKIEISVKDLQNILKINLDMTLKCFDVAVRLLDNKESRRPKDEKIKDIKHYIDMRFWYHEDPSPEELAKTLDYWPSMNYYITGCKYVLMPWKFNECYVLFVIDHGKKHITFINFTPTQDWFIQALFYRVNTSYLVLQAMVMWGNNRPMEFVKDAKVLRRNFVIDLLSYEDNSCRYVFPVNIQHRLINISKKD

SEQ ID NO: 74644 - protein, 207 aa, Zea mays
  Coding DNA Sequence Number=SeqID_31269
MVTTSLMVGRSKSGCGLCPALSFKDLHHPCCGEGQAEPELYLSYGPAGHLFLQHSGERALTGLAKGADFDNAGPVGRKRRQLQHAWLARSAGSGAASGATSHRWGGAWLSAHRTGGCCAVRTGGPSKSSHAARAAFVFLDCLVLTPARRLRAENPRLLCDEPEPKAAVSAWTKAESAREEASSAQEQVASQAEEVQQRQPESGQVIR

SEQ ID NO: 74645 - protein, 181 aa, Zea mays
  Coding DNA Sequence Number=SeqID_31270
MGAHPFDFVASSMEAQAHTSCKRHAGYYVRETAPPLAPMSCLLDCGTSAATRGNPARGPTVPIAHIDHGSDSRGRRRDGRYGQKWADINGGSRRAEAVVKSSAGSRPLLEQQGSPLPRREDDAPMFRSSNGSRNDRPANCLSRHINSAEKQATPLAGKGPGKGIFRKGSFSAKEAGPEPSY

SEQ ID NO: 74646 - protein, 170 aa, Zea mays
  Coding DNA Sequence Number=SeqID_31271
  Homolog annotation: Hit_ID=Q2R031; Match level="QueryCoverage=17%, HitCoverage=3%, E-value=6e-07, Identity=83%"; Hit description =Expressed protein
MAGDTFLIQDAIGEKITISIKAIPHFCSRTTNSFFFTLSSTDKQLDPCPFEVTVLAENYLTLSVVNNLFTDSLMGRRIGDTLDFEIKRWSTRKQGNLRALLSTLQYTSFYGHLYSPSYVTIIILETVVFMLQSLLKVTSHADLTKLFELFICDHEIGKAFSELTDPIDQY

SEQ ID NO: 74647 - protein, 122 aa, Zea mays
  Coding DNA Sequence Number=SeqID_31272
MALARRWPLSSVLRWWQPEKNLRPLCDELEPEAAVSAWIEAESARKEASSAQEQVASQVEEVQQRRLELSQVIRKQDQPRSHAAEAVSRTEVLGGQLAEATERPAEVSARAGTLAETLAAMA

SEQ ID NO: 74648 - protein, 105 aa, Zea mays
  Coding DNA Sequence Number=SeqID_31273
  Homolog annotation: Hit_ID=Q6QP51; Match level="QueryCoverage=46%, HitCoverage=22%, E-value=4e-15, Identity=81%"; Hit description =Putative growth-regulating factor 1
MPRLLGYGTGAATRGNPAHGPTVPIKHNDHGDRERGYFERDPSPRRKRAPSPATDQGFEGWTLRRVRQPPQSTQASSSLLIRGSKAGPSEGFDSRPRALGLRTHY

SEQ ID NO: 74649 - protein, 172 aa, Zea mays
  Coding DNA Sequence Number=SeqID_31274
MEERVEGLTGREIAPVRKVWHRPSSPLDRVLAGTAPRREVSSSPLCGIKAGAVHLTGARRALPLPFPRAPIKRLPRAPPSLHRPQPPLSSLARAQFVEASPSSSSPRANGLEYQLHHIAVNSERHSPTPIPRRSSPTVTPAAEVRHLPANSPLPDPYSQIKPAPRFARPFSC

SEQ ID NO: 74650 - protein, 145 aa, Zea mays
  Coding DNA Sequence Number=SeqID_31275
MVMKAGEHREDKEGECFVQFGHGGGLTPSGITIKGALRGSGKLAEARIKWRWPGVVWPRCSIARAARRAVQSSLELSAGSGESGEARREYDRGFPALIGVDTVHGWAWTSVGARARTAWHGCAGWRAPGMSAAVEHVAPLLLPVF

SEQ ID NO: 74651 - protein, 35 aa, Zea mays
  Coding DNA Sequence Number=SeqID_31276
MNSLLSGNGKGDVTIIHRTVWWCTGLSGSPIHPHL

SEQ ID NO: 74652 - protein, 17 aa, Zea mays
  Coding DNA Sequence Number=SeqID_31277
MASWGAGVSSHLGRETD

SEQ ID NO: 74653 - protein, 407 aa, Zea mays
  Coding DNA Sequence Number=SeqID_31278
  Gene Ontology: Mol. function=helicase activity; Biological process =viral genome replication
  Homolog annotation: Hit_ID=Q10GM7; Match level="QueryCoverage=95%, HitCoverage=27%, E-value=3e-86, Identity=40%"; Hit description =Expressed protein
MDEVDAYLATHRASNANDEDAESPSHLCVSIRPGVFNPILHGKRLFQQFAVDTYIKIESSRLDFICKNQDRLRANLYQGLVDSMLDGDIRAEKVGKRTVLWTSFIGGHRDMRRRYMDAMTLRKYKLTCPEQYDLLISAEIPSNKYPELRKMVIKHMMHGSCGSLTLTAHAPRVVNHARIITLGLSVTQPCKGRIRTLFTDVMTMIVKKRSEGANWTIDGVVPYNPYLLRLFNCHINVEACGSIKAIKYLFKYIYKGHDRVSVVMRNASKADEDVDEIKQYRDAWWVTPPEALWRIYGFDLGQIPPPVMQLQLHLPNMHMVAFHERQMAERVLNRPGVDKSMLTSYFEANRLHEEARGIIYHDFPEWYTWQSGKGKVWQWRKRDTSGQVDRIVSAHPVEGEHYCHTRF

SEQ ID NO: 74654 - protein, 333 aa, Zea mays
  Coding DNA Sequence Number=SeqID_31279
MDQTRLDQLLMLRNIRGKEIRKDGCSTIDLTNFATQDVAAMKIILSLLIWLMPRMLSWQANDIVATREVLTPGSLHKTVGHTPKHTRQRIAYFSERYKNITPVEREFRRECLRLYNRTPRRKEAKVDDNRKRRVMKADNLNQASIAREDPTYTPEFVHPIADATEPDGSTVYDLVIPEFVKTPLFPISTQTEDFTSPDMSIIPLKRKHHVPCGERQAILAHRNQQFEAAIARKVATSIEDTSGDACEGDDWTRCHTTMKITNNGDDGVIFEDDDDENEGYLFVGQYEDTDEDIEIDGTQDESTATDVLDSYDKVYNNILEETHMLKTVPNCGY

SEQ ID NO: 74655 - protein, 308 aa, Zea mays
  Coding DNA Sequence Number=SeqID_31280
MAGSKDHTKVSTTNIIKPTMEALSADDQHPFDDLIRRKEGEVLQKFTKQHDKEEEEVRRQLKVRREKATEKYLSYFTVDCHQKINHQGEIDMTSLLPRPQAPNSDPTQARAQITQVAPYTARPFGCTPGSFGSVTDYLAPYAELSRYVTEHLACFTGPSDPARIRAQTTQVTPHMAELYGYNPGQFDQVADRPAPHVEPSRHRTTQAAQYTTEQSGYALGPFGTVMDRRAPYAGRFGYAYIEPGATQYAEFSHPSQLHYGAPPAAHHNHVVPPPIHRVEYSSATREPERYRAGDGAINRTPNAHSEHP

SEQ ID NO: 74656 - protein, 87 aa, Zea mays
  Coding DNA Sequence Number=SeqID_31281
MHVSYSLHSLDCNLADGEYVLIPEQGAVHEEDQEQAPETAIEDLPVAPAFEGKSRYGGYKCGHFTAVAGVSGALYAKAVRFRIWLMV

SEQ ID NO: 74657 - protein, 100 aa, Zea mays
  Coding DNA Sequence Number=SeqID_31282
  Subcellular localization annotation: CTP_CleavageSite=23; ConfidenceScore=5.05e-01
MPLCSLATCVFSSQAAPSTVHVVVAHRGNQLAHAELMSDPTVISSVWPPLQAARASVPGHGDVVASYVTSPTGVRADKRIPRECGETIPKSMPPSARQKA

SEQ ID NO: 74658 - protein, 83 aa, Zea mays
  Coding DNA Sequence Number=SeqID_31283
MGRGGDGREGEVQASSMEETSARHEEDCAVGDKKLCSAVGFFHGLRDGENIRREEKAIEDRDAGYFPFSLSQKRLPKYPGSKI

SEQ ID NO: 74659 - protein, 83 aa, Zea mays
  Coding DNA Sequence Number=SeqID_31284
MGRARDGREGEVQASSIEETSARRGEDCAAGDKKPRSAVGFFHGLRHGENIRREEKAIKDRDAGYFPFSLSQKHLSKYPGSKI

SEQ ID NO: 74660 - protein, 198 aa, Zea mays
  Coding DNA Sequence Number=SeqID_31285
MVSSTSQTEAAARILRVWRNLPLFCGALVEDIVDEPSFHMRAPNLARKLIPHRMKLSPLRVPRSANKLRPPCNGRGSRDCPPATPRPCLIPTLAPGPGVLACSQHGQRRAQLSRLACVAARRGSPVQMPRRRIPARALLLRGGATQPRHRHADHAPPGKVIVIRRRDAMSLRSTFAVRPSLAIVDAFALSLSRREPRH

SEQ ID NO: 74661 - protein, 294 aa, Zea mays
  Coding DNA Sequence Number=SeqID_31286
MARLGRTAKVLRRLIASLLLMTTTLHGGAWSACRWRGCATPPRNDRARAGTRWRGIRTGSPRWAGRGLPRWLHTRTPGPRARVGMRQGYTCCAGGWSWARTSGRSALGEIVVAVSVSCARTNEQEPDRVESVFLKRKHMTGGPSMQSKERCLGQRRGQVRRRLGIALARPPGAERAGHSRLGRGRGTWARVRGRVALGLRKKVEKTESKMVTPEFGGYQKRNFIPPNSGCYKSNPLNRNLAPEIQEKDSEKDKMLPTLILTDLEELEVAKWTGARGKNSEKRENYSKAIERKGE

SEQ ID NO: 74662 - protein, 114 aa, Zea mays
  Coding DNA Sequence Number=SeqID_31287
MALVGVDLAPNTRGVSPVGAPYGGEDGPWHRVGRSATLAQERILLCMLSDGPRLRTDRPWWRRGSSSPRRTLELAPGRDPLEGESSKALLRVVKPSGASLIDVESKRDCCGRLN

SEQ ID NO: 74663 - protein, 94 aa, Zea mays
  Coding DNA Sequence Number=SeqID_31288
MKEAMNHYHTRGSSRGDGGTTTERDLVLQWGNRKRLRCVKVQRRDEAATTAAAEKAAISQCRAVAAHHHPTGHTHQHHRVLRSFDRSPTFGSHL

SEQ ID NO: 74664 - protein, 151 aa, Zea mays
  Coding DNA Sequence Number=SeqID_31289
MKPESSQFARASLAHRTLSGWAPLGRDRAGAAWGHARRAARARVGAPLGGHEGRAGRAGEEATRGRRRGATGERVEGCGRALPGPRGERTEGRGGAPLGPCGTRAKHNDIVRIARNFIIKMNLFMRQITIKASPRNRSNANKSNVDMILIP

SEQ ID NO: 74665 - protein, 347 aa, Zea mays
  Coding DNA Sequence Number=SeqID_31290
  Homolog annotation: Hit_ID=A2X8D7; Match level="QueryCoverage=100%, HitCoverage=67%, E-value=1e-115, Identity=63%"; Hit description =Putative uncharacterized protein
  Subcellular localization annotation: CTP_CleavageSite=64; ConfidenceScore=5.17e-01
MDRAPPRGAPRDAVGQRWLGVFAFQAALSTAASALYLTVFSSGRRHPLLGVPSGLLVALAPFLACAATGPLALAFLLSASPHPRPPPLPRRALATSLLAAAGALSVGAAAAMLPEDAGWAAVAGLGFRGAVLGTIFAAHYFVRRRWLLQFPVVQRPLFYGLKMGLLPSGNRALKLSIHAFLLFHFLVFFLPWQFRKGGSVGSQILTEISILIVTAGVSFCLEINYHFVQVAHTRRCSFAPPQSTAAAETNPTEFILETLEQSDPQSLIQYLAYQDLCVVSECNLEPWRRAAFFEESGETYRRIVTACLKPLEEFTSKIAEALEGFSSDQPELMLHFFRLFSAFDDSQ

SEQ ID NO: 74666 - protein, 66 aa, Zea mays
  Coding DNA Sequence Number=SeqID_31291
MGVRREEAAVAGARYAMAAARVCKTEIARGDWKQQGGGGVWEAVSRVIHGIRVADSWDPLVCLAKI

SEQ ID NO: 74667 - protein, 93 aa, Zea mays
  Coding DNA Sequence Number=SeqID_31292
MALQGRRRLVAGAAALGGRGGGVGGSGGGGAWQRGGGGARPGDVVASVGADLNCRSLETWKTVHAKMIFMLHSTSYDRFQERTENFEHHVHST

SEQ ID NO: 74668 - protein, 378 aa, Zea mays
  Coding DNA Sequence Number=SeqID_31293
  Homolog annotation: Hit_ID=A2Z5J7; Match level="QueryCoverage=88%, HitCoverage=73%, E-value=2e-52, Identity=40%"; Hit description =Putative uncharacterized protein
MPPVRRVRRLHPAASPYPTDRRAEAKSDHASDGAPPAPATLLPDDVLFAIFSHSSGAADVARCDATCHRWGSVVAARTAAIYRALAVPPPPATFLPHLALGVFFPQHKNARAGARLRFVPTAAALSSSYSRRLLAGPITTGSAVVDLELDLDHARPVASRNGRVVLQLRRAGCLTLCVWNPSTGAVSVLPPLSGEDYPGTDYACAILTSEDLATGPLSTSPGFFRVLVVYERRRRSFTTLRCYSSDTGGWGAEAKKPGDKISGRVLRQLRPAVVLGGVAYWSMRRAAFGVRLDGGTSLSSPATMDVCSVPYQLKLLRLNDHMVGVSPEDGRMRFIVMGFFARKLLAIDLFTSRLRQASGDQIDDDGIMMWTSIGIIRL

SEQ ID NO: 74669 - protein, 595 aa, Zea mays
  Coding DNA Sequence Number=SeqID_31294
  Subcellular localization annotation: CTP_CleavageSite=19; ConfidenceScore=5.25e-01
MPSSSSSAAATPPAGSSLPAAASSEETLSSLMAEELRAGDSVDFGVSRMSSARVEDMQRLGYFGGGVVRAPGTEKVPEPEGELVVFEAFFAAGLRLPAHRPKRQRGSAKAAAPSGGRPPPAAKSGVPAASKAPEATAKAVPPSGGVAEVTKAARALPLSGKRVADFATDISVEDYLGGSGEGQLAMVAPAAATTTAAAVPKAKGGALSAGGEVSALAVVMDEAGAATRRLKEATEALSQVADFASRTASGALTAAVAAEVERLRTQHADAVREKSAADSKCRKLADKVAALEGEKADLRRQLAGERRETNEALAKAQASQAEAKLARAEGNIARERAEQLQERLIALESRVERAEAAMRAEAERTRTQLVSTYRELGARTGAFEVPDRESGLRCLEWVQEELQELPAVVGGFMSYASLVTCEGAMNALSREGCRHFEVFDQADEDFDRDVYKVEDLVVKDSAGALYDRMWGPHGREVVRERAETAMAQALRGERVDDFGALNSALPDPEPTPAEAVSGVALEPTPETAEDAPDAPTSAAAGEDLPPKVAEGAPDAPAAAAPSAEDPAAVAAETTAEAAAEPMAEASAAPGPSQVV

SEQ ID NO: 74670 - protein, 376 aa, Zea mays
  Coding DNA Sequence Number=SeqID_31295
  Gene Ontology: Cellular component=integral to membrane
  Homolog annotation: Hit_ID=Q6EU03; Match level="QueryCoverage=15%, HitCoverage=21%, E-value=2e-19, Identity=75%"; Hit description =Tobamovirus multiplication protein 3-like
  Pfam annotation: Domain name=DUF1084; Domain location=1-101; Score= -71.3; E_value=6.4e-06; Accession=PF06454.2; Description=Protein of unknown function (DUF1084)
MAAAPAPLPAPVADWWERVNGSPAWQDGIFWTLAVLYGAIATASFMCFNAFDEEADLDVLDHPVLNLFYYLLVEILPSSLVLYILRRIPAKLRLSQYHPGVSWTVQCDIVQQFMLDAQPQDEDPVPPYPHDGHQLPVEFFGMGQPMPNFHFQFDLNIPPEDGINAEENVVANADDGWDPWPIEQAQPPVPYVVPNNVNAANNEEEQFSYQFSGLEDLPSDDSVGYFNDIIIPQGVQLQQEEAPAPAEAVLALPAFPPDNINLEGNNVEGQDDMQIEDNINVGLMLHLDQAVPDPALKDFLARKRSSSWADLFPDNDGSVSVPKIWAAFFMGLLMRPDSFDWARKFLLSGAISAFVAPSMGHHFNQNPPSTQSGFPC

SEQ ID NO: 74671 - protein, 376 aa, Zea mays
  Coding DNA Sequence Number=SeqID_31296
MGSARVAFVLSLEERNLTEMGTLQPSLGFKDFHQAARLHSLIDASRIFIILAREEGEASRGLPSRGLVSCFFLRHLGVETILQLCGGGVLQPCGGRRTAAAWPGCGIPSSVRATVVGRTGGSHNTSYAARAVAAVVGAEVVAAREGFSADEIVGATSGRTSSPSALVACPRPSCGDVGEGPPAAAFALRPSLRLSCRPRRRSLTLLQWSAASHPEFVVPQALRCGGCSYPREWNRSSICNGTLSVDQRRLELGQVVRWRDQPRSQAAEAMSRADVLGGQLDEATERPVEILPPASPSEAGPDSSEGGDNAEGAAAPSADDLFVGSRIVYPSESYFSRKVMSEDSVIDIVEKARKSFWQKKNEVYERLENILRVKAT

SEQ ID NO: 74672 - protein, 119 aa, Zea mays
  Coding DNA Sequence Number=SeqID_31297
  Subcellular localization annotation: CTP_CleavageSite=94; ConfidenceScore=5.27e-01
MPPARVRLTAGESSLRRHRKLRLARPQGSAPASASEGALRLAQPQGSASTSTSEGGLRLARPQGSASTSTSGGIASSPDPGLGLRRSLRLARPRARTDHAVGGRVAYVLFYLLPLIAKP

SEQ ID NO: 74673 - protein, 316 aa, Zea mays
  Coding DNA Sequence Number=SeqID_31298
  Gene Ontology: Cellular component=integral to membrane
  Homolog annotation: Hit_ID=Q6Z750; Match level="QueryCoverage=15%, HitCoverage=9%, E-value=5e-14, Identity=81%"; Hit description =Ankyrin-like protein
MVANLIASIAFVAIFNLPGQYFQDVNSGEDIGEAQIAKLTGFRVFCLMNDRDHQSFIDPLLTIFAWIRGWGDHSQQNIPNPSGSRRLLLLHQRGEERLHASKRRLGRWIRGGGGEGAKRIVETEDRNGCGMGEGPNDAGTQAGGGIWRREGGVRARVEGSADGVGGGGEISGGDEGEKNSAARPSLTVVPPARVRLTATESSLRRHRKLRLARPQGSAPASASEGGLRLARPQGSASTSTSEGGLRLARPQGSASTSTSGGIASSPDPGLGLRRSLRLARPQARTDHAVGGTSFTLPLASSGYGGTRPASHPGSLR

SEQ ID NO: 74674 - protein, 81 aa, Zea mays
  Coding DNA Sequence Number=SeqID_31299
MELSSGSAGKLKLSKKFIVIEEIFVPLLPKLLPSVGNFTPRYGIRADEKSLMKPSKGTKRNHMMLQKQRKGLKKLSSGLSL

SEQ ID NO: 74675 - protein, 94 aa, Zea mays
  Coding DNA Sequence Number=SeqID_31300
MAHRTLSGAPATSAGRWVLTVGALTGGASGLSGGAPDRSCRLSDELSPPPEPYDPETDPFLKEAFETMKIANEAIDEAVNKLLNEAAEKVLKED

SEQ ID NO: 74676 - protein, 176 aa, Zea mays
  Coding DNA Sequence Number=SeqID_31301
MGNRWRWPILREGCEGSPAPVVNPRHAPEAKRRRIEVSPAEDLSRTRQRWWLDSLGREPGAHIFVPEARPEDEVRGWSLVSQPHRDESQQVPGIVCGSVAVICFTNVMIGRPPLVIGPSRCPRSAMETEEWASVVIGWGVGFWAGVVRLSGPRYEETGTGGFGFEMKVFSHDRVKM

SEQ ID NO: 74677 - protein, 481 aa, Zea mays
  Coding DNA Sequence Number=SeqID_31302
  Gene Ontology: Mol. function=DNA binding; Cellular component=nucleus
  Homolog annotation: Hit_ID=A5AZS6; Match level="QueryCoverage=26%, HitCoverage=6%, E-value=1e-12, Identity=34%"; Hit description =Putative uncharacterized protein
MVNGGGADLVLACCCVTSKRVLSCFDTTPTARKPAHANPAPIPDRCVNDEAIQSVESATAACFGLAAAAACCGCTCMECRCFCDSGCSLDDGEAEENPHLGSRSARSHRSASVAPTGVGGPHIRSDLARCAPHPRAGRALALPDFQLGTLSFNYLMFCACRLELKFSHRGDTYRKSVTFWWDIKGSRSADICDTFDMIKKPGELIVSPKVETAPVRNAKTVPSEESAVSPGVAEGKACAVADLSSLIASKEAGSQNDIDNDRPKTSLCHADSMKIKVSDELPVKQWTYCDHMSDLHSSFTSANNDIAKEMNEVLFKSLPTDTSALDLLASSDLLSQQKIDLIGKERLGVRKTRLRLKEQILTTKFKAYRHLWKEDVRLLSAKKQQLKSNKRIDQNNRTSQIGSQRRHFYNRSRLAMRQRFYNRSRLAMPGRRRSAALDVGEVEDTGESVLLDVRERGVLLHVSLSIGGGEVVLGLEGEVAM

SEQ ID NO: 74678 - protein, 175 aa, Zea mays
  Coding DNA Sequence Number=SeqID_31303
  Gene Ontology: Mol. function=peptidyl-prolyl cis-trans isomerase activity; Cellular component=chloroplast thylakoid membrane; Biological process=protein folding
  Homolog annotation: Hit_ID=A3ALX9; Match level="QueryCoverage=57%, HitCoverage=41%, E-value=2e-29, Identity=68%"; Hit description =Peptidyl-prolyl cis-trans isomerase
  Pfam annotation: Domain name=FKBP_C; Domain location=4-119; Score =17.3; E_value=8.5e-05; Accession=PF00254.19; Description=FKBP-type peptidyl-prolyl cis-trans isome
MRVGGGDVPRLGDLVVTDLQGRVAGSDGEAFVDTLDDSKRLLALVMSSRPYTRGMCEGVEHVVRSMRPGGKRWVVVPPGLAFGDGGADFGEEHVQIPPGASGCHGSQTAATGGFGAEVRVFLGFAIGSVLRPLVAAGLAACGRADGRRACGRAVRGVRGGIAACGLEGGRAGWRA

SEQ ID NO: 74679 - protein, 91 aa, Zea mays
  Coding DNA Sequence Number=SeqID_31304
MSSSDTGSSDERVRRAYVSRTEGEESMNRSSSISIMEESATLLHTRRDNERQQPAWRPDATEEGVRRFDDTGEVNDEPTKPKLHDADQYTG

SEQ ID NO: 74680 - protein, 153 aa, Zea mays
  Coding DNA Sequence Number=SeqID_31305
MQDAAQHALSQYCSLFSGVADGLDLKYYPHLSTGSAGGVIVSPVGEGNPRLNIMVNLVAVLNTEMDHALDKLSKVRVEVLKLRAERVAHHYLDGGSLAPVGIQHPYRSPPCGRFDYESDLICVCFLQMSENRRRGARHAQPEQQAPQEEAAQQ

SEQ ID NO: 74681 - protein, 124 aa, Zea mays
  Coding DNA Sequence Number=SeqID_31306
MTVTDTWVTGVPAIDHLLDGIEAHPEEECHRQGVVGTGGGAEAPHAALSTGKEEGEVDTAKALYGAVHPLPGNQGHMVTVHVKHASDEKSQSASPALSLSGSPNRGGKKGLVSYGDGSPDSAGK

SEQ ID NO: 74682 - protein, 23 aa, Zea mays
  Coding DNA Sequence Number=SeqID_31307
MVSSHTQVVGNNVHEFTKVTRYK

SEQ ID NO: 74683 - protein, 195 aa, Zea mays
  Coding DNA Sequence Number=SeqID_31308
LHGLDGLVLTPVGGRGRGPLLHGAHAEVVATAEEAARRRGGCRRWQVVGAEVVASAGEPLGVEVVASAGEPLGAEVAASAGEPLGAEVAAAVGEPSVQRWSPLLASRSELATHATLLDPPSDTSHPLIHARDLHGPRYGTRLSGYTAPDHPRRQAFGYGTRLSGHTGSGPPHGTGSRSLEPAPRLSDPPAFAERS

SEQ ID NO: 74684 - protein, 142 aa, Zea mays
  Coding DNA Sequence Number=SeqID_31309
  Subcellular localization annotation: CTP_CleavageSite=73; ConfidenceScore=5.54e-01
MSRARAYKARSGVDYTLPRTLKPHRSSVHRSLPVRDVSAATRATAAVDRPAQPFPTLSNPLRRVCTPQGSSPSEESKPASPERPVHGRRSSQPCRNCNLADGEYVLVPEQGAAQEVAPDPAPEPAPEDLPATVLEGKPRFYA

SEQ ID NO: 74685 - protein, 141 aa, Zea mays
  Coding DNA Sequence Number=SeqID_31310
MGKSKKGGSSSHHSGDKRKREPSPPSEDFGDSEYSEEEFSSESEGSPAYASPPGIVAEVWMYIRAVERSRLEGSDESEVSLDEEDSSDLFEEGSGGDGDEEGDGKGNGNGGKGDADTGKGDGGTGKDDDGSGRASGKAPLA

SEQ ID NO: 74686 - protein, 167 aa, Zea mays
  Coding DNA Sequence Number=SeqID_31311
MGKPVPSLLMLLLRRGGVPLDSPTRWQDGRPSHSSNHVLQRTLTALVPTITGMGDHVSGRVRRAICCQVQSVIRTLILIPISSHRPRIPMDSVFHRPASYDMKVDNNHFSDLARVLEKSLDFYRESLLAKHYLDLLISIPSQRIPENLATKGSQHLPTPSGTFFLQF

SEQ ID NO: 74687 - protein, 157 aa, Zea mays
  Coding DNA Sequence Number=SeqID_31312
MQYNGSSSLISCEKQTIRIEFYPCKADPLVQALVLDPGLPPEQLLAPARGQAICALNRKMAQWLTRSTCAGGVLNSGEHDFAIPVVRVLGLSLGKLYGLPGKLSEGLDRAEEGGKGAGHGGCPRAALAGRGEVAGAKGELRGVRGGTEEATGKAAGH

SEQ ID NO: 74688 - protein, 272 aa, Zea mays
  Coding DNA Sequence Number=SeqID_31313
MTSHGSSDDGNALSHTDGLAREGFPRILWEVLQGAGYTTPPQYAVQQFEKHRVPRCRVRMTLEPHPLQLGWRSLDSESFGYWAEDTIEAIALHGLTTFYGFHPLELSTHPIGLFPAEREDDPMWKDRVEHAKDIWAIYPGHTAHLTVRCMNALYRLQVMRGEAMSHLMALLEATKITLNNREELLSNEIQELEELVGTRENTIEVLEDQLINTQQQLAEANEHLDMHHQEIQDMEANEDVDIEGGEEPASSLDTAGSGRPPSPESSVASFAH

SEQ ID NO: 74689 - protein, 169 aa, Zea mays
  Coding DNA Sequence Number=SeqID_31314
  Subcellular localization annotation: CTP_CleavageSite=68; ConfidenceScore=5.03e-01
MNKLTGIRDAITNGTPVPPPQVRTTPLRGGRPVEQRKVDERRAVTCSSSGDDDDFCSGGSNSGSTDPRADAAARRPPPTTKLVRQGRTEGRRVGGTGKGGYPEKDPSLRRNRAPSPPLLIRGSKTGPPKGSTVASDRVGPTPTTGQGFEGEPPEGFHGRLRLLGLRAHY

SEQ ID NO: 74690 - protein, 105 aa, Zea mays
  Coding DNA Sequence Number=SeqID_31315
  Subcellular localization annotation: CTP_CleavageSite=27; ConfidenceScore=5.15e-01
MTGGLGDTAAAGQARAGGWVYAQQRARANARSGVGVGRAGCGWAAQESAAANPLNRSVDMHLMKMLPTLILTDLEKLEVAKRTGARGKNNEKRGNYSKANKRQGK

SEQ ID NO: 74691 - protein, 509 aa, Zea mays
  Coding DNA Sequence Number=SeqID_31316
  Gene Ontology: Mol. function=glutamate decarboxylase activity; Cellular component=cytoplasm; Biological process=carboxylic acid metabolic process
  Homolog annotation: Hit_ID=A7P434; Match level="QueryCoverage=92%, HitCoverage=99%, E-value=0.0, Identity=66%"; Hit description =Chromosome chr1 scaffold_5, whole genome shotgun sequence
  Pfam annotation: Domain name=Pyridoxal_deC; Domain location=37-388; Score=382.2; E_value=8.5e-112; Accession=PF00282.10; Description =Pyridoxal-dependent decarboxylase con
MVLTHVHDLDEASAASAVVFASRYVQDPLPSRYELGEKSVSKDAAYQIIHDELLLDSSPRLNLASFVTTWMEPECDKLILEGINKNYADMDEYPNRCVNIIARLFHAPVGASEKAVGVGTVGSSEAIMLAGLAFKRRWQNRRRAAGQPCDRPNIVTGANVQVCWEKFARYFEVELKEVRLREGCYVMDPDEAVRMVDDNTICVAAILGSTLTGEFEDVRRLNDLLAANNRRTGWDTPIHVDAASGGFIAPFLYPDLEWDFRLPLVKSINVSGHKYGLVYAGVGWVVWRSKEDLPDELIFHINYLGADQPTFTLNFSKGTHARPDHHYPLPSPSCAPVLTSRILRRGYRNVMENCMESARTLREGLERTGRFTIISKEQGVPLVAFTFKAKDETPLAFKLSAELRRFGWIVPAYTMPANLEHMAVLRVVVREDFGRPLAERFLSHVRMALEELDHAAKGGPVPKMRLTIELGPPARGSGEEASARVVKREAVVPVHRSVSLAGGKTKGVC

SEQ ID NO: 74692 - protein, 279 aa, Zea mays
  Coding DNA Sequence Number=SeqID_31317
  Homolog annotation: Hit_ID=A2XTZ6; Match level="QueryCoverage=45%, HitCoverage=93%, E-value=6e-27, Identity=57%"; Hit description =Putative uncharacterized protein
  Pfam annotation: Domain name=DUF623; Domain location=208-271; Score =42.3; E_value=1.7e-09; Accession=PF04844.4; Description=Protein of unknown function, DUF623
  Subcellular localization annotation: CTP_CleavageSite=46; ConfidenceScore=5.34e-01
MAHCPLLAHPARAALQQLISRLLRCHCPSPGPSPTRVPQLQQSLTSGAAARGQSAMQLFSGRSKDHKIGGGGGKCHAVEGTTTRHSKGGKCRALCCGASSRLSVSSSSASCSSAADAALEPPTQPRGLSRLAHGMVQARLQSMIDAAAEAGRPPVARRPDELAERERRRRGFPRAAWARGGCYEKSVREQAPTRRTSCVVLLAEDRRTHDPLEEFRRSIAEVIAAKRMAEPAELRALLNCYVSVNAREHRAAILQAFHEINKRKLANFYEQTIKDNIID

SEQ ID NO: 74693 - protein, 141 aa, Zea mays
  Coding DNA Sequence Number=SeqID_31318
  Homolog annotation: Hit_ID=A2YX85; Match level="QueryCoverage=19%, HitCoverage=10%, E-value=8e-08, Identity=82%"; Hit description =Putative uncharacterized protein
MDEWIRQAEVWVRQSESWIRQQPPEQIYVAATVVAVTILLLIVGAKGSHLANKRPSIGFDKRAKGQPKAPLVWCTGLSGVPPDMFGAPEDSDFKLVTFGKFQRQLRYNSPDCPVYTGHVRCSKEEWPPELASLGNSLQLLR

SEQ ID NO: 74694 - protein, 169 aa, Zea mays
  Coding DNA Sequence Number=SeqID_31319
MGAREQRSKRQSDSGPTRRLASSPKAGPGATVDTQNHGYPLLQHEDTAPMRCPLATRRTAPDPTGWAGQKTPRGREKHHTLVRPDPHRRTPDPYIQVRSLREASPARQGYTYLERHGTRRLPRQQPLEDPSSIFVMSLGPHAGAQSFCACPPSAIKGEAYDVTRRGSQT

SEQ ID NO: 74695 - protein, 209 aa, Zea mays
  Coding DNA Sequence Number=SeqID_31320
MERCAEASKKLCELEQKRVREGAEGTAMASAQFVEADQGAPTRGSAMGTSRGGPWTSTAGRTGKLEGARRPGEKCRAERDWGEQAPGRTTMNEGERGPIELRKYHAQGNAPCRGGLSRQRETVVQRKKMASRRTLARAGRSHGEGRRELGQPGRNAGHGNGGRRELRAGVLEKNSGGRRWALAAWRRGAGARVARENDDEICRNPGVAA

SEQ ID NO: 74696 - protein, 159 aa, Zea mays
  Coding DNA Sequence Number=SeqID_31321
MRERSWARGLQLRGCATWTPKGAVGRVVPMRKKNSGLGATDRCLRPINAILEDFLDLWIRTYTRFRCATLILLVDVNRIVFIGERLENANLTGARGKIIDRKGKHRWIKERKGRAPNYLTLWHTASEQMPLQTKGHNTSTLIPKKQISHSRRTNIMSTQ

SEQ ID NO: 74697 - protein, 128 aa, Zea mays
  Coding DNA Sequence Number=SeqID_31322
MGKPVPSLLMLLLSRGRVPLDSPTRWQDGRPSHSSNHVLQRTCKNYATSKAEYTNTQLDLPVTALVPTITGMGDLVSGRVRGYVHCRVHSGFNDIMLKETKSRSNLGFLSHAGLSVGYAYYFLGLGFH

SEQ ID NO: 74698 - protein, 248 aa, Zea mays
  Coding DNA Sequence Number=SeqID_31323
MGRGAGRLTCAYTRLELFWSQIEGVVAGAEPHGCRSLASRQGMWRMRIWSRSVMAPEHNAEAEEAGGGVAAPMMGSGEALRTRGWAATAFVVAASVVGMAKLAGLHAPPRPPPPGRGARGFGYREQTSKQPPASRKQPIQQRSRVEASASTSERAIRRLGKQQASKAATARQQASKQLRRCASAQTARTDTPEAATGFGGYPAAIGFVDLEPRRAGGRPAGQGKQHRFFKAARQAMQSTNRAATQRRK

SEQ ID NO: 74699 - protein, 454 aa, Zea mays
  Coding DNA Sequence Number=SeqID_31324
  Gene Ontology: Mol. function=actin binding; Cellular component =endoplasmic reticulum; Biological process=cytoskeleton organization and biogenesis
  Homolog annotation: Hit_ID=Q10MF7; Match level="QueryCoverage=40%, HitCoverage=20%, E-value=2e-53, Identity=62%"; Hit description =Expressed protein
MRGLSEREEALIMRGSSQKENKSFENPLGMRGLIIRQFALPSIAQRHILAGLASAVGGLSAPYERASRIHERHVVNWLWAVGYHLFGPFSNSSQISQILQDVALRTTIYAQVDAALRKNKRHIRGPTCNSAYFYSLISSNAQKFVQSFASEHLKTPLGELVKGNKNKFTTELWVEKFYKKVTNLPEPFPHDLVEKLEEYLDGKASKKVKVVEKGPKKGTMKAQLAKRDSCLDIIQNPLLDPDGRSIYAPVVLSHVLAQIHCDPRSSESYTPAPVLPQLTKPGCRPIRLDIRPNAPPHQRRNLSSRRRNQRSTAICSTPVLPMIPTRFVYRPQVMTDVMLGSSSLWETGAPPHDMLAESAVMYATMLSSQQQQMTRSDRQAMYDAPVLPEIPTRFVYRPQTATEVMSGSSSLWETTVVGDRYPPSSLEGERASRGALGQLPRKAIPSWAGQKLLA

SEQ ID NO: 74700 - protein, 152 aa, Zea mays
  Coding DNA Sequence Number=SeqID_31325
  Gene Ontology: Mol. function=acyltransferase activity; Cellular component=integral to membrane; Biological process=metabolic process
  Homolog annotation: Hit_ID=A2YEP6; Match level="QueryCoverage=49%, HitCoverage=14%, E-value=5e-33, Identity=86%"; Hit description =Putative uncharacterized protein
MYDRKERGTAIQSYGNTNLSEKKGAQPYKPDGGGGRRAQDEHKDAGPAGAAAVGAAAVHGELATLVAKKLLKMKKVKPYILDFKLAFEHFCIHASGRAVLDELESNLALTDWHMEPSRMMLHRFGNTSSSSLWYELAYNEAKGRIRRRHRVW

SEQ ID NO: 74701 - protein, 73 aa, Zea mays
  Coding DNA Sequence Number=SeqID_31326
  Pfam annotation: Domain name=KOW; Domain location=8-40; Score=31.0; E_ value=4.3e-06; Accession=PF00467.20; Description=KOW motif
MDFIKFDVGNVVMVTGGRNTGRVGVIKNREKHKGSFETIHEQWVLLGCLLEEEQFVSVESVARNRHEQVYFEW

SEQ ID NO: 74702 - protein, 169 aa, Zea mays
  Coding DNA Sequence Number=SeqID_31327
MRRGRRVMLVLTSEDMAPTSRNGWSGFAQGLSEGGTRLLLCRMPTLRATGCSDRGRTFGDGDSATVATTDQATGARGTRGAHAGVAGPHPLPGRKGRGVAGLARPSPGHGKRSLDRAQMRGEEEGTERGRGGAHHGRMETNSMGDAASGRRRDKRDKAPMARGGRGGEA

SEQ ID NO: 74703 - protein, 129 aa, Zea mays
  Coding DNA Sequence Number=SeqID_31328
MARVACTILGKRLDGGVSVLSVRKQQTFVAFALRWCQRKKLKIEASRGCCPPFKNTLLLSGRGFCLPGGVHHFQKQFAHLEEHHSEKEKEVLHCKESMLLYQVCLNKDHLNACSPWPWLLSVLAGSKIL

SEQ ID NO: 74704 - protein, 70 aa, Zea mays
  Coding DNA Sequence Number=SeqID_31329
MAGKRPQIHRQRGENDENEEEVVVEEEEVAPPPPEDPPAGNCFYFDICGAEPDSPITQGKPGAFATSLLF

SEQ ID NO: 74705 - protein, 124 aa, Zea mays
  Coding DNA Sequence Number=SeqID_31330
  Subcellular localization annotation: CTP_CleavageSite=26; ConfidenceScore=5.01e-01
MSSVDGSYQVHFTTVADGLDLKYYPRRSTDSAGGVIVSPVGEGNPRLSSMVNLVAVLNTELDHALDELGKMSENRCRSARRAQPEQQAPQEEAAPQQQLPPPLLMTIEQMFLMQTQAVQAIVRP

SEQ ID NO: 74706 - protein, 157 aa, Zea mays
  Coding DNA Sequence Number=SeqID_31331
MDKDKKGRGSPRRSGDKRKREPSPPLEDFGDSKYSEEEFSSESEGSPVYASPPALSDDSDDSQGIAAEVWMYIRSVERVGLKGSDESEVSSDEENSSDSSEEGSGGDDEGDNSGGGGGGDDDNDDGDGGSGGGRGDDDGKGGSGSSSSKASGKAPLA

SEQ ID NO: 74707 - protein, 70 aa, Zea mays
  Coding DNA Sequence Number=SeqID_31332
MANVLQRIPRLLITVSTADIPFPNTLQRSHTLPTSRDSHFAWGSSLPIDHYQGDLAGFHCVAFTKFSQRT

SEQ ID NO: 74708 - protein, 34 aa, Zea mays
  Coding DNA Sequence Number=SeqID_31333
MSLMGLSLCGSLCQGKEGVEADLQEFQYFDEFED

SEQ ID NO: 74709 - protein, 45 aa, Zea mays
  Coding DNA Sequence Number=SeqID_31334
MGKTLSTQVLSKTYLTNEKTLKDMLNINARGVTEGVSEDKKFMDI

SEQ ID NO: 74710 - protein, 397 aa, Zea mays
  Coding DNA Sequence Number=SeqID_31335
  Homolog annotation: Hit_ID=Q6QP51; Match level="QueryCoverage=10%, HitCoverage=31%, E-value=2e-09, Identity=52%"; Hit description =Putative growth-regulating factor 1
  Subcellular localization annotation: CTP_CleavageSite=28; ConfidenceScore=5.22e-01
MQAACNCTTGMHPFDFNAPSMEAQAHTSCERKRRSNRLQAHVPSWGSRRALSHGVKMTRPCSVPRTAHATAAPRTTRPITLTSRQGRRHLWQAKRATLHLRHDDRIKKGTRKGDTPKGILLCEGSEPRALLLIRGSKAGPSEGFDSRLRALGLRAHYWSEVRRLAPQKGSTAASGHSGSAPTTDQGFEGWPPEGFDSRLRTCRARDDSGYVRYMAEARATLPRGSGAALANPAPAKPLTVSTYQPENLEPDHAPGLRPVKAPSTQGTRSRLARAQPQTGTADPGFAEKQPWPDRLASRLYRRSIQCKDRLTPYPDACSSVDKAEENSAACTAPTAVPPARVRLTAAKSSLRCHRKLRLARPQGSDSTSTPKDGLCLARPQGSDSTLTSEDGLRLARP

SEQ ID NO: 74711 - protein, 341 aa, Zea mays
  Coding DNA Sequence Number=SeqID_31336
MHRALPPSEPPDGRRPCCLRLVVGGAQPRGGWYLLAIARLQGFSSGSPAASPHQWSPKTVTTSLMVGRSKPGCGLCLALSFKDLHHPCWGGGRAKPELYLPYGPADHLLLQHSGERVLTGLAEGVDFGNVGPIGRKRRQLQHAWFAGSAGSGTTSGATSHRWAERGYLPAVRAVVASRAPGDRPRRCALLGRRSCSWVVLPLLRHDASVRRSVLACPGGFERGSAGGRVDTTVGAEVVVAREGLIADEIVGAICAPGLQLFGFDSLSLPLERGRGRGPCRSSICPEVIAAAVWPPGAKVVAAAAGVGGGEPPGSCCPAGPPMWGVVRTRGSGTGVPFVMAP

SEQ ID NO: 74712 - protein, 82 aa, Zea mays
  Coding DNA Sequence Number=SeqID_31337
MSCAFDDYYIENYGVILALEVTQRRIDNSDQFVILATVRSLPLMILMFQMFDHFQHLRNEDSREKPRSETLTIHLGSEYGSS

SEQ ID NO: 74713 - protein, 52 aa, Zea mays
  Coding DNA Sequence Number=SeqID_31338
MAEARAVMAGGGELAGAKGGMLASEGERGVRLMGFTDWIKRYGGVKLGLSHC

SEQ ID NO: 74714 - protein, 86 aa, Zea mays
  Coding DNA Sequence Number=SeqID_31339
MRKVLENNEEWMQIFFLVHLSNKEPRKNKRNPSPEQIQDCNLADEEYVLIPEQGAIHEEDQEQAPETAIEDLPTAPAIEGKPRLYA

SEQ ID NO: 74715 - protein, 118 aa, Zea mays
  Coding DNA Sequence Number=SeqID_31340
  Subcellular localization annotation: CTP_CleavageSite=52; ConfidenceScore=5.57e-01
MVSASSPIDGDTTQSTRMPQARPKTTPTVTTLCRSAHSSIAPTQLRFFDQIRAHRLGVQCLTDPDCRRAVTALVPTITGMGDHVSGRVKGYVHYQADPLVQARVLDPGLSPEQLLAPA

SEQ ID NO: 74716 - protein, 136 aa, Zea mays
  Coding DNA Sequence Number=SeqID_31341
  Subcellular localization annotation: CTP_CleavageSite=51; ConfidenceScore=5.43e-01
MVSASSPIDGDTTQSTRDARRHGRRRRPPSPPSAGPPTPQSLQLSCDSSTRFAEVDGWAACDPVTPYRDGTVDRGATDSAGAGASPPFAARLFIPRLTAWARSTARHSTHGPSGSDGVGWLTSGAHPSAGSGVLNM

SEQ ID NO: 74717 - protein, 130 aa, Zea mays
  Coding DNA Sequence Number=SeqID_31342
MLVDYTTLLDGPSVLVEGPTQQGVKSVMEVTPASGVTSDGSSDPPLRFWLLRKLHVVARTASSVVIVSVMVSSSSRDALWWCRGHLWLRCRGRRPPKLHLPLRQGGRVLLLLLLLLLLSSALLFLVQATM

SEQ ID NO: 74718 - protein, 141 aa, Zea mays
  Coding DNA Sequence Number=SeqID_31343
MGKNNKRKREEEFGDSEYSEEEFSSESEGSPAPIPLRESSDDSDDSQGLAAEVWTYIRAVERSGLEGSDESEYSSDEEDSDGGGEDEDNDDDDDDGEGGGGGDGDGSGRGGSGGSKDGDGGGSRGGSGGGGSSRGSTRASG

SEQ ID NO: 74719 - protein, 410 aa, Zea mays
  Coding DNA Sequence Number=SeqID_31344
  Gene Ontology: Mol. function=helicase activity
  Homolog annotation: Hit_ID=A3BET3; Match level="QueryCoverage=62%, HitCoverage=62%, E-value=3e-35, Identity=50%"; Hit description =Putative uncharacterized protein
  Pfam annotation: Domain name=DUF292; Domain location=44-155; Score= -23.6; E_value=0.002; Accession=PF03398.5; Description=Eukaryotic protein of unknown function, DUF292
MTVNKAQGQTIPNVGVYLLEPVFSHGQLYVALSRATARSKVKILAIPVIDEKKKKNWVEKNSTINGATYTKNIVYKEQQAGPSMIEVFHSHLDLIYQAHQVHNGSAWIAPLEFREAVSNLIFVVARYPDLPELCDLRHIFTERYGNFVEHFVSQEFIRKLDSTEFTNEERFQVMQNSGLRAQRLENQGRPVSPLSGNTSKKAPYTRLNVVNIKNPTEKQANNGFLHDKPQHLADLGYPVQKGQGDPERALTMLPPYVEPKSNIQPVNDDPEKQTPSGYRKPNIPGQTDHLENKNVLRPVSVRRRTAKLPAPVDAYVEVPNNAKVTTQTPKSHRSHSSRRNGSKDDQNRKCNGTDDVAAQKRQQTDSTSHFSTSQISLWTIAKEPLLFNITILLNTIMGKAYNTTNNDIKM

SEQ ID NO: 74720 - protein, 37 aa, Zea mays
  Coding DNA Sequence Number=SeqID_31345
MAVEENFSSIICSAVQVQPPSSVDREKGFGSRSGPQD

SEQ ID NO: 74721 - protein, 201 aa, Zea mays
  Coding DNA Sequence Number=SeqID_31346
  Subcellular localization annotation: CTP_CleavageSite=15; ConfidenceScore=5.24e-01
MRDPRSRMRMSRFVSAACKQPCPHPPPPDPRLPYNISARSCLTPSKYTPSCMRIKSLRAAQKPFSKPSSITIGNPTVFDILATLNRLFDDYRDEDFYGLPRKYNIVARVEVKFPIEPRYRDNQHFILSDINGSKIKAMTSSYETVKHFDSLINEKHVYKMHNVEFSINLDIDINIFELQMYLQLEGDDSTSVTQKANAKSA

SEQ ID NO: 74722 - protein, 196 aa, Zea mays
  Coding DNA Sequence Number=SeqID_31347
MEHRPGLERLLETTHLELDGKLFVNTQQAPTWRANCRSSEAEAPPRSRLSPSSEVEAESEPWGRVRRRLSSEAEAVFDPWGRARRIPSSEAEAVSEPWGRVRRSPSSEAEAVSEPWGRARRSPSSSVEVESEPWGRARRSFLWRPRLDLVAVSLTLSSGTAVGAMQAALFSCQVGQWSGEVTAVTSALSTEERASG

SEQ ID NO: 74723 - protein, 48 aa, Zea mays
  Coding DNA Sequence Number=SeqID_31348
MERSTLHLFYLRFKSPTPLKGHDLASPEPSLELRQPTPEDSRLARGPP

SEQ ID NO: 74724 - protein, 200 aa, Zea mays
  Coding DNA Sequence Number=SeqID_31349
  Homolog annotation: Hit_ID=Q6BTJ4; Match level="QueryCoverage=68%, HitCoverage=13%, E-value=1e-06, Identity=29%"; Hit description =Similar to CA1621|CaIFF6 Candida albicans CaIFF6 unknown function
  Subcellular localization annotation: CTP_CleavageSite=24; ConfidenceScore=5.47e-01
MGAIKVKAQSTQGTRSRLARAQPRAKAADPGGFTSRLRAPLSNGHTFGLPEAQSSQRSNLGQIATPTDPTKSNLGRHRKLRLARPQGSDSTSTLDDGLRLARPQGSDTASASEDGLRLTRPQGSDTASASEDGLRLARPQGSNIASASEDSLRLTRPQGSDSASTSEDGLNLDLGGASASLDLGLGPTASQGGHHYPTPS

SEQ ID NO: 74725 - protein, 189 aa, Zea mays
  Coding DNA Sequence Number=SeqID_31350
MTDESLVLNLLRGLSPRFDRVAPILTRMKPFPTFAEAKNDLLLEELRLSTTATTAPATALYGAPRATPSDSGRFLFTALQPHRPLELCDRLLALGGLAATITRANAVAVDCRAAVVAFQPQQGLLPLSGSPTQPMWGPWTNGWDTQSLTSSFSMMTLAPPTSVSNWVADSGASNHTNPDAATPGVIEST

SEQ ID NO: 74726 - protein, 142 aa, Zea mays
  Coding DNA Sequence Number=SeqID_31351
  Subcellular localization annotation: CTP_CleavageSite=14; ConfidenceScore=5.37e-01
MGVPDFCARWRAFNASAGSRWRRSSRCPAVTPDSPVYTGQSGVHRTCPVNYSGAAVANSRGCQVPEPRPLGAPDTVWCTPDSPVNYSAPALKIPEAEEFELESSGAPDTVRWHTGQSGAPDQRCLRLPLCSFAEPNTWSFIG

SEQ ID NO: 74727 - protein, 780 aa, Zea mays
  Coding DNA Sequence Number=SeqID_31352
MTTVGTGRAGQSSGRDLVEEFVAYGVWPLAYGWALGEVCPRQMPFHGGRVVRSPAFTLNLRNRDPAAFVRDAEGLAVRLVGRYVPRTEGQRSFDIRGSNERLNRVFELNQLPYDGYPGQDEADRRGKKPAVETGGDPALVAAASSKKRKLVMDKDRQGAARKRQATVRVHEARPKRQRGTAKAEASGGGKPPLPTKVGASAPGKAPETTVGAGGPKLSKVVPSVSGVAEAAKAARSLPPPGKRVADFGTEIDVEDYLGGSDEGPLALVVPGAAIATAAPAPKAGGETLGAGGEVSALALVRDEAGVATRRLKGATEALSRATEALSQVADFTSRTASGALTAALSAEVERLRTQHADAVREKSASDSKCRKLAEKVAALEKEKADLRRQLAGERREANEAIAKEQAAQAEARLARAEGNIAKELAGELQRRLTAQESRVEGAEAAMRAEAERTRTQLMTSYRELGVRTGDFEVPEREAGLRCLEWVQEELQELPTVLAGLMAFTSLVTCEAAMNALSREGCRHFEALDQVDEDFGRDIFEVEDPVVKESAGALYDRMWGSYGREVVRARAEAARAQAERGERVDDFGALNSALPEPETTPAEAATGVAPGPTPETAEDAPGAPASAAAGEDLPPKVAEGAPDAPAAAVPSAEDPAEAAAEAPAAAGPSQVQDFGPAHATATTEFLAASTAEDGNECGGSVSEFFDVTDSGSSVEWTEESSEEDLDYFAALDVAAAEAAPHAADAPGVPGPSTGHRRRRAVAKRRISAEDGARLRVSRAGR

SEQ ID NO: 74728 - protein, 150 aa, Zea mays
  Coding DNA Sequence Number=SeqID_31353
MVGRPPLLSSDELFPLLPLYYRATLATPPTPARGATPGLALMAGDPTPPPNSAGSSPAGALPASPVPPPLVPLLSLVAPATLALVPRPPTPPAPTSPVPPPGPVSAGLADVRPTLVSLPLDASQTVVLSPDDALPLPPVFPSGAIGTTVY

SEQ ID NO: 74729 - protein, 95 aa, Zea mays
  Coding DNA Sequence Number=SeqID_31354
MKRREGVFSSKTQKRLVQEPIDDFVHNIFSHLFNFVVSFRLRACWGSSASEGTFGLISKRENLKRYEGWQCRSCEAGKLRHVRRKGNRLKDEKAI

SEQ ID NO: 74730 - protein, 121 aa, Zea mays
  Coding DNA Sequence Number=SeqID_31355
MEAWNGGPACPKDYPLAGNEDDGKRGLGGDQVHQCWFEARTQVYAAAAPKGLVVALVPRLCAPPGMMSSLDLYGKGITEQHAVEKLMCVVPRQYKHVVIAISTLLGTADLNFRGDRQSEGG

SEQ ID NO: 74731 - protein, 119 aa, Zea mays
  Coding DNA Sequence Number=SeqID_31356
  Homolog annotation: Hit_ID=A2X7I4; Match level="QueryCoverage=26%, HitCoverage=4%, E-value=8e-07, Identity=80%"; Hit description =Putative uncharacterized protein
MAHRTVWCTPDMSGAPATSPVPLESDRWSSDFWARLDVRWRTGHELFSVRMNDSNGAILFIEKPKPSDAFSIKERYIQTKWSCEQHEQKSHHNHTHVPVVNHGKQNEPYNARKNHQSRS

SEQ ID NO: 74732 - protein, 438 aa, Zea mays
  Coding DNA Sequence Number=SeqID_31357
  Gene Ontology: Mol. function=ARF GTPase activator activity; Cellular component=cytoplasm; Biological process=regulation of ARF GTPase activity
  Homolog annotation: Hit_ID=Q6H462; Match level="QueryCoverage=40%, HitCoverage=23%, E-value=7e-75, Identity=77%"; Hit description =Putative ADP-ribosylation factor-directed GTPase activating protein
  Pfam annotation: Domain name=Ank; Domain location=180-212; Score =35.9; E_value=1.4e-07; Accession=PF00023.21; Description=Ankyrin repeat
  Pfam annotation: Domain name=Ank; Domain location=213-245; Score =27.7; E_value=4.3e-05; Accession=PF00023.21; Description=Ankyrin repeat
  Pfam module annotation: Pfam domain module=Ank::Ank; Domain location =180-212::213-245
MDRKDKRINQRCRGNIRRRPMIERTSLIKENIPRNPHPMNHCIPTMIALMLNAVPKEDALSGLCSQLSAQKECHPEEKKADISQLGGSRDSLSPKVRYVDKLLFARDPDQNTINILEAIRKNDVRAAYRILAIAEVSANMTYDALSKDVHHVQPVTDKMLLDPISCEIIQDSGKPEGCLQGCSLLHFACEYGYPIMVELLLLFGADINMQDFHGRTPLHHCVQKKNDELTKHLLKRGARTTIKDGGGLTALERRMELGAITDEDLFILFVSSRLPFFYEFKVDSISQGYHVQAITVFDSLSMVIETQCQWSDGREKCGVRRDEYTIHQEGLIVSKTVLIICSVCSYEVKQLTNVTFIGVVIHLLALRCFSLRSHLNLAVLFLLIVILGVTDEAKELDKELRQITMKKNQVVRIQDFNFIFTEDVNKQNRQAVALLAMC

SEQ ID NO: 74733 - protein, 207 aa, Zea mays
  Coding DNA Sequence Number=SeqID_31358
  Gene Ontology: Mol. function=ARF GTPase activator activity; Cellular component=cytoplasm; Biological process=regulation of ARF GTPase activity
  Homolog annotation: Hit_ID=Q6H462; Match level="QueryCoverage=59%, HitCoverage=16%, E-value=6e-60, Identity=87%"; Hit description =Putative ADP-ribosylation factor-directed GTPase activating protein
  Pfam annotation: Domain name=ArfGap; Domain location=33-169; Score =133.8; E_value=5.1e-37; Accession=PF01412.9; Description=Putative GTPase activating protein for Arf
MLSYGNVAAESNRSTSSVDSLSIEDNKSSEGHDDIFNLLRNIPGNDSCAECRSPDPDWASLNLGILICIECSGAHRNLGVHISKVRSLRLDVKVWEPVIMDLFHALGNDYANSIWEALLPKEDQGRGSWVSCHPSLFHGSTCKENEFHGLSIIDKYNSVGATFPEIPIAEIPMAATQIHHIAPSEVMAELLLASRPEDEAGPSRSAV

SEQ ID NO: 74734 - protein, 134 aa, Zea mays
  Coding DNA Sequence Number=SeqID_31359
MNEIYPAYSRFPVARRLHVSSSACASTDEMACTMAEQVSSKPCLKQPGPTPKGQEILMSPQREGQCDREALEGIPYNSNNTSSQQFVNQTNFNLKYGALHLDLTADMAYRFIALGLNPDRRIWIVRPTIEPLEF

SEQ ID NO: 74735 - protein, 70 aa, Zea mays
  Coding DNA Sequence Number=SeqID_31360
  Subcellular localization annotation: CTP_CleavageSite=42; ConfidenceScore=5.09e-01
MALHKLYDDGGPPALLRKQDDVSRDSTAPTAVPPPGSAAPPTATTSRQQGAQISPAATLAFFPPVAEPRP

SEQ ID NO: 74736 - protein, 206 aa, Zea mays
  Coding DNA Sequence Number=SeqID_31361
  Gene Ontology: Mol. function=binding; Cellular component=integral to membrane; Biological process=carbohydrate transport
  Homolog annotation: Hit_ID=A4GXC8; Match level="QueryCoverage=22%, HitCoverage=9%, E-value=4e-16, Identity=87%"; Hit description=Sugar transporter protein
MDVVVITPSRELSKLQPARATHGMLDHIMVENASVKVALNRIAVVSILDAHTLRPHPHGARYVAPPHPPAVARRPASRRQQPSLLTDGCKYFFTLSVTLGIMFAYLLGLFVPWRLLAVIGTLLCIVLISGLFFIPESPRWLHGLLPDRQQPRPHPGISKTTQQLDGIYALFAVLRLAVVDTKADGAILKEKLWTLIAQNEPSLISL

SEQ ID NO: 74737 - protein, 95 aa, Zea mays
  Coding DNA Sequence Number=SeqID_31362
  Gene Ontology: Mol. function=nucleic acid binding; Cellular component= nucleus; Biological process=mRNA processing
  Homolog annotation: Hit_ID=Q5ZBG2; Match level="QueryCoverage=49%, HitCoverage=8%, E-value=2e-15, Identity=85%"; Hit description =Polypyrimidine tract-binding protein 1-like
MAALSMEDMIDWMHGGGRVGNYFICARLNILKTSISSRSSDIMAKKDEKKQKAESNILLESIENMEYVVTIDVLHEVFSTFGFVQKIAIFEKNDF

SEQ ID NO: 74738 - protein, 169 aa, Zea mays
  Coding DNA Sequence Number=SeqID_31363
MDVSGTTIRGTPKTPKLGWSKLRPLKGHDLALPEPNLGQEQQTQENNAACPAPTAVPPARVRLTAAKSSLRRHRKLRLARPQGSDSTSTSEDGLRLARPQGSNSTSTPKDGLRLARPQGSDSTSTSEDGLRLARPQGSDSASTSEGVTASPDLGLGPTTSQGDTSLPYP

SEQ ID NO: 74739 - protein, 147 aa, Zea mays
  Coding DNA Sequence Number=SeqID_31364
  Gene Ontology: Mol. function=ARF GTPase activator activity; Cellular component=cytoplasm; Biological process=regulation of ARF GTPase activity
  Homolog annotation: Hit_ID=A2X7I4; Match level="QueryCoverage=62%, HitCoverage=10%, E-value=1e-28, Identity=71%"; Hit description =Putative uncharacterized protein
MDLGRPIDVGSREGINPVKLSQSTERLLKPVTWGSLDEAYAGDLSFADSLQAFGAGLDDPISVAIGGPVMSKFTTAFRELGTYKELLRSQSEFSFLNSTQGLAPLEHMLSDRLSQFINVDLNGVKVGLLRAGQYSSPYNIVGIIAVL

SEQ ID NO: 74740 - protein, 53 aa, Zea mays
  Coding DNA Sequence Number=SeqID_31365
MTHFLSGLINLLLKIGKMKHLLLLPLDLLMNGFEVTRNLKNRACKNDIEREIG

SEQ ID NO: 74741 - protein, 152 aa, Zea mays
  Coding DNA Sequence Number=SeqID_31366
MDLTLAGDKISFNVPGCLLISIYGDCALGASDFHAHVEPVYCCLKIIDGSSPHDGIVGIDNVDYVEETMQENDVCLTAIVDKYFVQIPSCYPAVENHDVGMGHATEVDVSCIEGVGDNSLVVSQLVPGHSVFCGLGLGQSLVGCVESSQWKR

SEQ ID NO: 74742 - protein, 246 aa, Zea mays
  Coding DNA Sequence Number=SeqID_31367
MEETHLHVFDAFCPRQSTLARAPACPAPRPSQASAMARARAYKTLPDLDCTLPRTLKPHRSLARRRLPVRSVSAAAQSLCHRRPASGAIPNPVQPSEKTVHTSVKLPERGIGVCFAGEVSPRSPELSTPPEYVDRVIHSTILRFLVHMVAMLPREAHHALGLNQFAVVWPVYSPPMRTPACTRGPGDSGHPRRQVVPRRDRESLPEPTPPFTGPPSPPEVAPDPAPEPAREDLPATALEGKPRFYA

SEQ ID NO: 74743 - protein, 293 aa, Zea mays
  Coding DNA Sequence Number=SeqID_31368
  Gene Ontology: Mol. function=nucleic acid binding; Biological process= RNA splicing
  Homolog annotation: Hit_ID=A2XH96; Match level="QueryCoverage=33%, HitCoverage=49%, E-value=2e-26, Identity=62%"; Hit description =Putative uncharacterized protein
  Pfam annotation: Domain name=RRM_1; Domain location=31-96; Score =10.7; E_value=0.015; Accession=PF00076.13; Description=RNA recognition motif. (a.k.a. RRM, RBD,
MGQITPAAAKASSEGWRLCLRPNTDIGIKDATTKAVGLAASVRALVSTMIGLGVSPATLFMEPRGFGFIQYFDPEDASDAKYHMDGKMLLGREIAVVFAEENRKKPSDMRAREKISGRGRSYDGRLRSRSPGLNDYPRGRSRSQRRSYSPALKRKHYSRQGAEGPHAGGAGEPAAQGAEGAMGRGTGESAARRGAMETRHRGRGAARRAKEAGRGHAPRGEAGAGLRRRAREARRDAREGGLGDHAAGRPGSRAQGLQGHAHTGKRKGARAGKGRGGRERERGGELTSGIQIR

SEQ ID NO: 74744 - protein, 171 aa, Zea mays
  Coding DNA Sequence Number=SeqID_31369
MALLSTMETCSASALNWGCLTALIIPDRRSFLEKQAKRGPSGPLQRTVRDRRMTLGQNQCKNTSFHYRLSGGKAKTVRALERTVRPQARTVRSPLIYRGGPSAPGGRTVRAQQNGPTARKWLVAINTTPTTSIDNIQAFQPSTFNTRASNPFQDTFKAIISPSFTIEKRDH

SEQ ID NO: 74745 - protein, 441 aa, Zea mays
  Coding DNA Sequence Number=SeqID_31370
RNWGVVRFAVVPSMGLGVYGSLCQGGDEDDGYDYAYVMAAGPLFSVVSLFADHAVRRSPELRRATTLCSAVVRCQAPCLLAFPARLDAVSRTSIHLHATSNSKVNTIESGFGKLGALRAAVRLLSGVVSSRAASSSRSPASKQPGAQRPRQRSRQPSRSSARPSSKQERHAGKQAAAARAPEQRAAERASCKQQAADWLGKQATKEAIRQAIKQSKSGQQAAIRVAQQASRPAQAQQAASSHLESLHHRLHEEQERRRQELEQSSSSSSLQREVESVRSYSLMPPLEAPPAPPLGVLATGVAVGGDPDDGGDDSRSSHSTNLSEEQEPEGWVARPITRDAARGCHFHDALDTLLRQALDRHTCTRTAHLSVDTMLMMSDNRRRGGRRAQQEQATPQDEAPQQQLPPLPPMTIEQMFLMQTQAVQAIGQTLAAMQQQHQPPR

SEQ ID NO: 74746 - protein, 160 aa, Zea mays
  Coding DNA Sequence Number=SeqID_31371
MGKSNKRKREPTPPSEDFGDSEYSEEEFSSESEGSPAPVSPPASSDDSDDSQGIATEVWTYIRAVERSGLEGSDESEYSSDEEDSDGGEDEDDDDGDDDGGGDGDGDGSGNGGGSGGDDESKGSTRGSSSKGSTRVGGGGSSSKGSTRVGGGGSISNASG

SEQ ID NO: 74747 - protein, 239 aa, Zea mays
  Coding DNA Sequence Number=SeqID_31372
  Homolog annotation: Hit_ID=Q6ZHL1; Match level="QueryCoverage=75%, HitCoverage=87%, E-value=5e-13, Identity=32%"; Hit description =Putative uncharacterized protein OJ1218_C12.13
MDLFNEVSVQQLLDLLTDEVLPLNGLCPRLLTHRFGIRVDLQMVLDHLPRDPRHLRRFPCEYVGICLEEGDERDFLFLLQITHDASGLGGIRAELEGLDGDAVCPRWLHLRHLGRRLGTGNRGVPPPVIRASSFCHQGVQLLDSCKCSGAVAPHGEDPNRGRHLEDQIPIMGNGHESVQGHPANDSIEREVKLRNIELDVLSAEVFLSPECNRECDAPKGIHRLWAHCGERAKGSQSGS

SEQ ID NO: 74748 - protein, 159 aa, Zea mays
  Coding DNA Sequence Number=SeqID_31373
MQAACNRAKWARPLDSNTPSTEIQAHASCNRHAGCYVRATAPPLAPLPRLLDCGVNTATRGNPAVPAKRDNQMRTGGASGGRSKRRFAFAIITASKKRLRASLLIRGSKAGPSEGFNDRLRSIVFYAHYWLTLKGHSRLRHRARMTWYIDTYSSGYAPE

SEQ ID NO: 74749 - protein, 155 aa, Zea mays
  Coding DNA Sequence Number=SeqID_31374
  Homolog annotation: Hit_ID=O48967; Match level="QueryCoverage=99%, HitCoverage=33%, E-value=3e-32, Identity=52%"; Hit description =Putative uncharacterized protein
MVQIVEHHDFDPKDFLMEEEAASSTPRASTCPAPSAADVRSARQHTPAQASKASRATPGALSAARELLCHPPSSTASPGAMKQWRDDVDRLLGMARSGSARPRPRSSRRQHEASASVRSPSVRAAPTEDLRAELNRRRAGEDAPVSLERPDDLRA

SEQ ID NO: 74750 - protein, 154 aa, Zea mays
  Coding DNA Sequence Number=SeqID_31375
  Homolog annotation: Hit_ID=O48967; Match level="QueryCoverage=65%, HitCoverage=25%, E-value=2e-17, Identity=45%"; Hit description =Putative uncharacterized protein
METVTTLFALVNKCAKTAEGHAWHSAPLTGAAQMGGSGAVTKDGKKKKKNHGHEKPLSAVLVVAVAAGGRSERNKRPRPRHSAAECHEIIKLMKRVSERREQTSRDGSPPRRRPGKERVDSGEVAAGEPDLGYQSPEGVLKDVFTGDSDSGDNN

SEQ ID NO: 74751 - protein, 427 aa, Zea mays
  Coding DNA Sequence Number=SeqID_31376
  Gene Ontology: Mol. function=sequence-specific DNA binding; Cellular component=nucleus; Biological process=regulation of transcription, DNA-dependent
  Homolog annotation: Hit_ID=Q7X640; Match level="QueryCoverage=59%, HitCoverage=83%, E-value=3e-68, Identity=52%"; Hit description =Putative uncharacterized protein P0560B08.119
  Pfam annotation: Domain name=Homeobox; Domain location=21-72; Score =40.1; E_value=7.9e-09; Accession=PF00046.20; Description=Homeobox domain
MPRDQMVTNGFGAKRDNAGAKKSPQQIQRLEKFYSDVQYPKPEEMGEYATCVGLTYSQVRIWFKERRRKERRMEMGAIGSQMERQFSARSSGPRCSSSSSFCNQAPIYDISRSESDTWGMSTAGEESKILSQVLFPKDYILSKIFRKDGPPLGSEFDPLPQSAHGCIRDTTCHHSSENQRTVKKRKIIESTNQRSDVYENTAPVRKHGIGKGLMTVWHAMYSHNVKCQSGRNFIDETGCLRSLRPFDDFDGLEDRDNGRKTQVKSHLFDKFESRYDTEKYSQRSKVLVPCKRVTGPKVHPPMACHLSVDESESLELQTELVTLVDDEELELSELQTDLLAKFPPQSLKMKKLFSTKPWESSPEMVKKLFQQTRMNSALALAWPGLLNAMCPNVPWRSSGLLLKHLDEVDNKNDLPWVHLIWNPYYTN

SEQ ID NO: 74752 - protein, 43 aa, Zea mays
  Coding DNA Sequence Number=SeqID_31377
MGVAALWGHVHRPDPMLYDKSEWLPTRSGDKESGVHRTMRTQT

SEQ ID NO: 74753 - protein, 290 aa, Zea mays
  Coding DNA Sequence Number=SeqID_31378
  Homolog annotation: Hit_ID=Q5Z644; Match level="QueryCoverage=41%, HitCoverage=12%, E-value=2e-08, Identity=34%"; Hit description =Membrane-associated protein-like
MAAPDPPMWWSRALLWTQRVRAPASAPYAPLHPSSGHLHPLPWGGPCTSLFRHFFVLVKSGKAKDHLGAYYFQTRSNSADAYISSLGGARWENLRADLVIVSTEANDRLALPSDGPTLDRKQWRAKPSLALEFLPMLDRIKALAAGGLTSMHVVGDFLKLRGIPALCDDPGLRTTILATLPTLDESGVEVRQTSGRDPLRGIQIPSVPVGGPQPAGAGSRAPTVAPSPLDKGKGAASSSSAPGGTGGSEEERRCRLRRADGSLVSDPPCFGPIQKRQRTAGGAEEAGSQA

SEQ ID NO: 74754 - protein, 215 aa, Zea mays
  Coding DNA Sequence Number=SeqID_31379
  Homolog annotation: Hit_ID=O40947; Match level="QueryCoverage=64%, HitCoverage=16%, E-value=1e-09, Identity=25%"; Hit description=ORF 73
  Subcellular localization annotation: CTP_CleavageSite=53; ConfidenceScore=5.68e-01
MPAGGSGSQQQASAGSGVGEPPTTTAASTTATPSSTPSAAAEEVPSAPTPTVAGDMGGASSSISPPISEEMEKFTFERSELMRDRKDYKKDLQRVYAWELEASRKEKRLAKREEALNQREDVITELSAKLKAMNKILEEQRTQQTAAVESLQKLQQELNDKASTAALVEEKLKAKEQFLERRETDLARREKDLAFREEMLTRRGEMLAEHELEAE

SEQ ID NO: 74755 - protein, 371 aa, Zea mays
  Coding DNA Sequence Number=SeqID_31380
  Gene Ontology: Mol. function=sequence-specific DNA binding; Cellular component=nucleus; Biological process=regulation of transcription, DNA-dependent
  Homolog annotation: Hit_ID=Q7X5W7; Match level="QueryCoverage=64%, HitCoverage=33%, E-value=8e-81, Identity=66%"; Hit description =Homeobox transcription factor Hox7-like protein
MASPHILIGELILTDYPDSSLLGEVHVGLLKLLLLKAEIGSDGVFVPRSSKDCRFLSFLNFVREQEFDANVWIRSLNALTWVEILRQVLVASGFGPKQHLLNQEFFNKEKNQMAKYGLRPRTLKGELFALLSKAGSCGLKVSVLAKSSEIIDLNVSSPLELEQLISLALSSDITLFEKIAPSAYRLRVDPQIKGEEDSMSDSDDSGSVDEDEDASRSDDGSDGSQKLKFLENESRLARRKEKNAHGSPNKCSEIDESYSGEKWLLALMEGEYSDLSIDEKLDCLVALIDVVSGAGSVPRLESNTLVVETLATIDVQTGPKLREHQGQKIFGEAVRKLRARRDVENTDVPDNNALTDEVKIELNMLSVLVLD

SEQ ID NO: 74756 - protein, 107 aa, Zea mays
  Coding DNA Sequence Number=SeqID_31381
MGMPDLCVHWRAFNVLQVAVGALQRSSRCEFPRLPSSEPRLLGAPDTVRCTPDSPVNYSAPAVRIPEGEKFSLEFPGAPDTVRWHTGQSGAPDQSVVPRLLCLNPFS

SEQ ID NO: 74757 - protein, 185 aa, Zea mays
  Coding DNA Sequence Number=SeqID_31382
  Subcellular localization annotation: CTP_CleavageSite=41; ConfidenceScore=5.17e-01
MDPKGAKGSTQTNQKNKLGLKRKEQEGNRRLPWSGAPDSVRCTRVLQLELFTFGFPRRRSAIIHRTCPVHTGLSGVPAKQRLSAHNGRLCKVNSANQMSEQTVRGAPDCLVPHEDKASNGRPAPRPNGRMTWRRTEQCPVAHRTVRCALRQQTSPTARFWLVAINTTPTGHFKVWESKQHSKSSS

SEQ ID NO: 74758 - protein, 142 aa, Zea mays
  Coding DNA Sequence Number=SeqID_31383
MTKFTGCEENWTKAMRMQHLKRRHKKMHRSPILKNKRSPKKSAKKSKKWAVSQAPGGAPDIDVRCAPDCPVKKNRKCDLNNEPEGTLIFVRILIQDCNLADGEYILVPEQGAAQEVAPDPAPEPAPEDLPATALEGKPRFYA

SEQ ID NO: 74759 - protein, 215 aa, Zea mays
  Coding DNA Sequence Number=SeqID_31384
  Gene Ontology: Mol. function=heat shock protein binding; Cellular component=cellular_component; Biological process=protein folding
  Homolog annotation: Hit_ID=A3A049; Match level="QueryCoverage=61%, HitCoverage=30%, E-value=3e-56, Identity=75%"; Hit description =Putative uncharacterized protein
  Pfam annotation: Domain name=DnaJ_C; Domain location=88-211; Score =42.4; E_value=6.7e-10; Accession=PF01556.9; Description=DnaJ C terminal region
MARALVLCFYSGGGGGGGGVGSLLLYHHLAFASGIFSYLCNVIVGRRREAFLHQWALVRDSFSPPCRSTVKKEVTQTVVVKPGWRKGKQVVLEGMGDERPGCLPGDAILTVSEKRHPAFKRVGDDLVLKAEVPLVGALTGWSFSFRLLGGRKVSCSFQDEVVRPGYEKVIAGEGMPVPGQKGARGDLRVKLDVVFPKELTPEQRAGLAEILRGSC

SEQ ID NO: 74760 - protein, 550 aa, Zea mays
  Coding DNA Sequence Number=SeqID_31385
  Gene Ontology: Mol. function=protein binding
  Homolog annotation: Hit_ID=A2YQJ2; Match level="QueryCoverage=65%, HitCoverage=87%, E-value=1e-115, Identity=57%"; Hit description =Putative uncharacterized protein
  Pfam annotation: Domain name=DUF266; Domain location=129-421; Score =621.0; E_value=1.1e-183; Accession=PF03267.5; Description =Arabidopsis protein of unknown function, DUF266
MSPPRPSCMQLQPCLPFSNCNSSSYNYGQTYALVAFVHDKGMKGALDDFKVMLTRNEPITGLAKVVAVLVIFALGVVAGLWVSAGVRRSQQESVDPRSTGFHGGGGGGICCRPEPNPDFEEFVAPTRLMHDMTDRELFWRATLVPTAAARYPFERVPKVAFMFLAGRGVLPLAPLWERFFRGAGHEERFSVYVHAPPGVAINVSADSPFYGRQIPSQKTSWGSVTLVDAERRLLANALLDFSNERFVLLSESCIPVHNFTTVYDYLVGSRHSFVEAYYRDDRGCRSRYSRRMAPDITLREWRKGSQWLELSRDLAASVLADTRYYPLFRRHCTPSCYPDEHYVQTYVSLRHGARNSNRTVTRVEWPAGTSHPVTYGAGDATPELVRSIRTSAEPCAYNSRLTSTCYLFARKFSPDALAPLLNMQAEAAEPTRTKLLCSLVPNATNWHGTNHQRNRVDFGCASSSTNSGGPNTNYFQLLRFADPTTERSLHSIPALCTRTQAAVVGAVLLRWTSTRAGNPPPAEPLEAGDPSDNLASALHQLPAKLLPASR

SEQ ID NO: 74761 - protein, 91 aa, Zea mays
  Coding DNA Sequence Number=SeqID_31386
  Homolog annotation: Hit_ID=O48967; Match level="QueryCoverage=91%, HitCoverage=18%, E-value=4e-26, Identity=70%"; Hit description =Putative uncharacterized protein
  Subcellular localization annotation: CTP_CleavageSite=84; ConfidenceScore=5.47e-01
MALGTTDQGLPQTGGSGTVARDGKKKKKNCGLERPPSAASVVATVTRGQSERNKRPRPQRGNSGSCPVHPNSRHNDVECREIIELAKRVSE

SEQ ID NO: 74762 - protein, 253 aa, Zea mays
  Coding DNA Sequence Number=SeqID_31387
  Subcellular localization annotation: CTP_CleavageSite=52; ConfidenceScore=5.08e-01
MAMAGGRKQRSSCQQAHVPSWDSEETLSHGGKTTRPCPVPRTARARTTVAPRATRPVALTPRQDRQHLWQAKQATLHLRHNDRVKKKAGPSEGFNSRLRALGLRAHYWSEVRRPAPRKGSTAASGHSGSAPTTDQGFVGWPPKGSTAASDVERGMTQAKSGLGCHRKLRLARPQGSDSASAPEDDELRLARPQGSDSASAPEDNELRLARPEARTRPRPRKTDSTSTSKEPPPRPTQGSADHVTGGHHYPTPS

SEQ ID NO: 74763 - protein, 349 aa, Zea mays
  Coding DNA Sequence Number=SeqID_31388
MQPSYIPSPAVTQDGDLQLDGGEKRTGLRPLPLPQLQGCSSSVLGRGVCRVGVGPCVGGGPLLPSVMGGKGVRRSWRRQLPRARLSEPSGFGATPGAAFRHGSRKRFLRRRASRCRPRTDLQSYGLLPVLASRVGGMGEGLMAAASALSSSLLLFGPPEQKSSSSPLLGQATTSRSSVFWCSAGPPIVWGCSYLQRWNQSSVCNGTLNAGTPRPPFDEPKPEVAVSARAEAELARKEDLVGQSLAGSSTGRTDAGVELSRPQAGLVSSGNSWPRPRGGRPSRLLEPDSWRRPWRRWPGCGADVVLQSGDPPTVSPSEARSDPAEGVADAEGAAAPFNCRRPSLQDRVVL

SEQ ID NO: 74764 - protein, 69 aa, Zea mays
  Coding DNA Sequence Number=SeqID_31389
  Gene Ontology: Mol. function=nucleic acid binding
  Homolog annotation: Hit_ID=Q5NKQ1; Match level="QueryCoverage=100%, HitCoverage=7%, E-value=5e-28, Identity=85%"; Hit description =Putative uncharacterized protein 9C20.4a
MNKLVKSAHMDANTPLHQFAKQMMKLLHSRKMKEAKESLGCMGQKDTTTLFMFEIRVARAYTRVVMTRF

SEQ ID NO: 74765 - protein, 72 aa, Zea mays
  Coding DNA Sequence Number=SeqID_31390
  Homolog annotation: Hit_ID=Q8W0Y1; Match level="QueryCoverage=54%, HitCoverage=5%, E-value=1e-08, Identity=74%"; Hit description =Putative transposase
MGRVYNNISTGYPIPGGYPMGMGTGTVSRPIGLDFFICEAGYKARADVVATTSFKKLVVDMYYETHIHAIVT

SEQ ID NO: 74766 - protein, 58 aa, Zea mays
  Coding DNA Sequence Number=SeqID_31391
MNEDEAESFGIMIDKASNELRHMMLQGEQPEDQYHQRNLHSEGGLAAKKRGKKGATTK

SEQ ID NO: 74767 - protein, 100 aa, Zea mays
  Coding DNA Sequence Number=SeqID_31392
MLFFGGRSGWGREDEAGGGGCEEAPEGGRHCGGRGGGGATREVHKEGGCHGGGRRRCWRGDLSTTVSKKLNSSPNVCHPYFLDWVSCSHLIGAEMKLYMV

SEQ ID NO: 74768 - protein, 447 aa, Zea mays
  Coding DNA Sequence Number=SeqID_31393
  Homolog annotation: Hit_ID=Q6J9V9; Match level="QueryCoverage=29%, HitCoverage=42%, E-value=2e-35, Identity=62%"; Hit description =Putative uncharacterized protein
MTKILEAERWLKSANLHEAALLQRQQEQGDARAPHPGARKISSLAPLSITGKVSTDVLQGSPPYDTGDGPHMSCLLTRDAREANRRTQGVKPPCGYKRSLILAGTSGRKGEPPHKGACNRTTVVHPFGFVTSGGPARRPGPTYHAIGTTVTTCEGTAPPPAPIPHLLDCGTSAVTRDGPAHDPTVLTGRSGHGASDTVGRRSRQRFTSAIKVASKKGLGRGIFRKGSFPAKETGPRALLLIRGSKAGPSEGLAPQKGSTTAPEHPGFAPITDQGFEGWPLGRAGPSKGFDSRPRTRRVRDDPGYVRYMVEAWATLPRYPRTFPRPAGTTRNGIPLEGGIEPSDPIKKGPGPANHLQENSVAHPCSGYCANHPGETDNGRVQPRAQQEAPPRPTPGFGLGLGLGRKSSPRPTLGLGLGPGPEKNHILARPWVSAPASASEAVAEDEKN

SEQ ID NO: 74769 - protein, 57 aa, Zea mays
  Coding DNA Sequence Number=SeqID_31394
MSARIEAFLARERAASQAEKGRSRSQAVEAVSRAEILGGRLARASEQLAEVLARIVV

SEQ ID NO: 74770 - protein, 178 aa, Zea mays
  Coding DNA Sequence Number=SeqID_31395
MIALAEDAEKRNRKLHVDLTTSQAQATALESREVIAVEALKQARDEHIQKLMEAYLILEGHPVSIRGEKKAWELSEGAIVLEGIPVFPQAMDKQEHPKSSQDPPLELFEPLTMKKIPAPSLEIKEEATSTPPAPPPSKELQEPVPLEEEFDPVLPSQSPLEEVINISSLLTHPGDVSD

SEQ ID NO: 74771 - protein, 294 aa, Zea mays
  Coding DNA Sequence Number=SeqID_31396
  Subcellular localization annotation: CTP_CleavageSite=38; ConfidenceScore=5.54e-01
MARASATPCGPSPPAQAAQPRPPPFLGGSHMPRPDPARAFPAGVPLVGNRPPYPLLRYAAPVVALSTSSLIASTPSSASYLHASLAAGAPTRLDPPCHAPPSFVAFVGFVAAAAFPAGSTLLRPSRPDPPSLWLDRRLHGWIRRCRGFSDRIRRYPFFSAAGATTLTGVDACAVVGLPGEAPRRPIAERSKKALRLLLLFCYVALPTVDARTSTPPEEQASAACLPTATISTSATSASRGYRLLGAHTSLYSSRNIRTITTLRLRQDFNPSAPTFGLYSSLIVCGAPVATAGGC

SEQ ID NO: 74772 - protein, 128 aa, Zea mays
  Coding DNA Sequence Number=SeqID_31397
  Gene Ontology: Mol. function=binding
  Homolog annotation: Hit_ID=Q5N8Y4; Match level="QueryCoverage=58%, HitCoverage=6%, E-value=2e-32, Identity=93%"; Hit description=SF21 -like protein
MEIFNDIAQLKALRTLFNVAHRLHNVLGPSWVLVLETLSALDRAIHSPHASTQEVSASVSKLSRDTSGQYSDFHILSSLNSQELNRYGIKLLLIILRMVTDASEKDLISLGFQHDMISLWEFSPGIAP

SEQ ID NO: 74773 - protein, 120 aa, Zea mays
  Coding DNA Sequence Number=SeqID_31398
MGKNKKGGSSSHHSSDKWKHEPSPPRMTLGIAAEVWTYIRAIERSRLEGSDESEISSDEENSSDSSEEESGGDGDDSDDDDGGDDGDGDGKGDGGNSDKGDDSGKGSGGSSKASGKAPLV

SEQ ID NO: 74774 - protein, 200 aa, Zea mays
  Coding DNA Sequence Number=SeqID_31399
MAGMAHRSYSGPPETFSPPFYPLCPWIHGLFPAIEFVGAFSPSLPNSSDPGATPACASLNSGDPTAAKRNSAACSRPSPWSDPLRPIQIARLRSRITLRTRAPDALACLSAPKPSGAGPALSARSPPSVADTPWPTCQRSPARVRAPSAADLIAAVGFRSDDNEQSEVPECVVGDLPEQQPGGDAGNMDDFEEFQEYDEF

SEQ ID NO: 74775 - protein, 139 aa, Zea mays
  Coding DNA Sequence Number=SeqID_31400
MGKNKKGESSSHHSGDKRNREPSPPSEDFSDSEYSEEGFSSESKGSPVYASPPIQAVERSELEGSDESEISSNEENSSDSSEEESGGNGDDEDDDDDGGDDGGDGDGDGKGDGDGGKGDGGSSKGNSGSSKASGKAPLV

SEQ ID NO: 74776 - protein, 88 aa, Zea mays
  Coding DNA Sequence Number=SeqID_31401
MAWASAASRWQQLGGELHARLRPGSQRRRGGVAVPDQPWPGEGAAWMARRGEKRAQPRGGAQGEGSGAARGLRARAAEGGYELELVIP

SEQ ID NO: 74777 - protein, 62 aa, Zea mays
  Coding DNA Sequence Number=SeqID_31402
MTEATIHATAVFVAPYATINAKNHIPEAYPTDPAWGIADACVHSWLLGFAGPDVVGLVAAPN

SEQ ID NO: 74778 - protein, 257 aa, Zea mays
  Coding DNA Sequence Number=SeqID_31403
  Subcellular localization annotation: CTP_CleavageSite=21; ConfidenceScore=5.01e-01
MSGAAPDMSGAAPDSPVRQTRALYGVSSVSQPRDSKVVVIAMDIIGLAVEAGEIVELENTRHEEEIKDMSNIALVTITDGTVTAKQIENEFKQDPSSTWRCEKLSKKASQIQLDGGSKKQVDATQDLYQHDYDSLKFGSIDEVKIRKISSIEANRDIVMAGQAGVHKEGKSGQLGQGKEESSKTKELTTILEAKEKGNSVQELFHSTLCMVLKILQRLKKSGRDLMSDFCIIIILDRVVEGRRSCAAPWGTNAEGGG

SEQ ID NO: 74779 - protein, 167 aa, Zea mays
  Coding DNA Sequence Number=SeqID_31404
MNTKLPQSYLLVNEVDVDFDVLRAAVMDWVSRHGVKLVQPLVVVEVQQPQEPPRRWPVLLEAGHVERRRCRSADLLQEEPSATPLEALERPAVARPQGSAWGSSSLLAVRDGGVLAGDAEEVRSRIRKSSDNGMEPADGAVENGNTDSSKMTWHEIMMQRVDMSRQR

SEQ ID NO: 74780 - protein, 93 aa, Zea mays
  Coding DNA Sequence Number=SeqID_31405
MDSVVLSWILGTLSVELQDNVKDLSVSEYCRRMKGMEDSLRDIGELVPDRMLVLNLLRGLGRRYDHQRPSSSGMRCSPPSTMSAMSYFSRSSP

SEQ ID NO: 74781 - protein, 319 aa, Zea mays
  Coding DNA Sequence Number=SeqID_31406
MPRVFFPSVAVADRVIGEGQSLHVPPLRLHIRRWSRQAFAPGGGQPLVPVDVELRGIPAHLWGIEAAEAVLGAFCLIHGFLPGLVKEEDMSVLRLKVWCRSPVLLPAVVDLLAEEPMVCGEDGSWVPSTLVFSVSVVVLHSDGSSDFGVDPPAPPPSGFVDEDSDHEHHVERPGRPASYVRVPIHLRLGQRSRSGQVDDMGGGSVDAPALPIVSVEEREAPGHPPVLGSVDALALPEVSVAELEAPGHPPMSALDLAEDLGVSCQEDWSSHVVISPAGPCLDNPLVGALMTGLAEAVFAGQHGPGSSYLLTDSRLEGGG

SEQ ID NO: 74782 - protein, 505 aa, Zea mays
  Coding DNA Sequence Number=SeqID_31407
  Homolog annotation: Hit_ID=A3BQI5; Match level="QueryCoverage=33%, HitCoverage=15%, E-value=4e-16, Identity=34%"; Hit description =Putative uncharacterized protein
  Pfam annotation: Domain name=zf-CCHC; Domain location=145-162; Score =16.2; E_value=0.0054; Accession=PF00098.14; Description=Zinc knuckle
  Pfam annotation: Domain name=zf-CCHC; Domain location=164-181; Score =14.2; E_value=0.011; Accession=PF00098.14; Description=Zinc knuckle
  Pfam module annotation: Pfam domain module=zf-CCHC::zf-CCHC; Domain location=145-162::164-181
  Subcellular localization annotation: CTP_CleavageSite=51; ConfidenceScore=5.60e-01
MTVTLPLAPSGLPPPDASFPPPTGPSPAPIPRPATIPLPSPTSQDPSPGVQSGGRPEELRYAPCPPSSGLSPALTPRPATTQLPSPTSEDYPLGVGDVGKKSYREALFSPRPAASRDVGGWVTVVRRRSNTLKSLPRPVPVDLRGRCFNCFSSEHRAAVCRNRVRCFFCRLPGHRVGECPRRRTDPPFPGRSLVWRPVAMKPSEKNVCGRDLAVAGGSGPVSMIGEGAKKRTRRGQRKRKSGAGGQLPHPPAFGLDKPVSFVGRCGRIDRAEEELRRALIVSVVGREDSGCAVEVRDAIASRFCLEAGSLRIRRVAPNSFLVFFPSVAVADRVIGEGQSLHVPPLRLHIRRWSRQAFAPGGGQPLVPVDVELRGIPAHLWGIEAAEAVLGAFCLIHGFLPGLVKEEDMSVLRLKVWCRSPVLLPAVVDLLAEEPMVCGEDGSWVPSTLVFPVSVVVLHSDGSSDSGVDPPAPPPSGFVDEDSDHEHHVERPGRPASYGQVPIHCV

SEQ ID NO: 74783 - protein, 463 aa, Zea mays
  Coding DNA Sequence Number=SeqID_31408
  Gene Ontology: Mol. function=binding; Cellular component=cellular _component; Biological process=biological_process
  Homolog annotation: Hit_ID=A2WVJ5; Match level="QueryCoverage=88%, HitCoverage=28%, E-value=1e-179, Identity=76%"; Hit description =Putative uncharacterized protein
MAMRHNNGGMGLVSKPIEQASHMNDDVQSCEMTEEANSKQVPPKLVDYSILFFSVFSVLQKLGSDDRPEVRNSAVRTLFQTLSIHGQKLSKSMWEDCLWLYVFPMLEHVSHLASTSSRDEWQGKELGTRAGKAVHMLIHHSRNTAQKQWDETIVLVLGGIARLLRSFFSYLQQLRKFSSGWVLLLSFIKNSILNGSKEVAIAAINCLQTFVGANCPKGNLESSYVKSVLDIYELVLQTSSNFKNDSTDKVKQEVLRGLGDLYVQAQSLFTGDMYLRLMAIMHLMIKTTLNPTDYDSELGSIPAVQRGILEIIPMLRPTVVLSPMWTHLLLELLCYLNGHEGPLQKNNEQTPDHNSQALVDGAKHALVERSNLNGGGTKLDMVGSGWGILFVEKLVPIIANLFLEAPPNERFSVSPEVIQGLGSASTLTGLRFDPGCGHSHMGYDVVYGWSRGLGVFSTCLRSS

SEQ ID NO: 74784 - protein, 147 aa, Zea mays
  Coding DNA Sequence Number=SeqID_31409
MTALYQDDYDSLKLEALMSPTMINEYGLNLCNSKCDPLAAIEANRDIVMAGQAGVHKEGKSGQLGQGKEESSKTKELTTILEAKEKGNSVQELFHSTLCMVLKILQRLKKSGRDLMSDFCIIIILDRVVEGRRSCAAPWGTNAEGGG

SEQ ID NO: 74785 - protein, 89 aa, Zea mays
  Coding DNA Sequence Number=SeqID_31410
MDSVVLSWILGTLYVELQDNINAESPAFSTALYGVSSVSQPRDSKVVVIAMDIIGLAVEAVHFVGARIWKQRMGKRKEQQHECRGHEEA

SEQ ID NO: 74786 - protein, 175 aa, Zea mays
  Coding DNA Sequence Number=SeqID_31411
MAEACRPFIVGNNRHASKFGEAGRTGVAKAEVAHKVSCNQNIVKVINRGGGGECGCATTCDGYGSAIANRDAGRRGEMGQEYTSRRRYVGCGASVEDIRRPLEGHLIQGGYEASLIPAAMLWRGWNGVVGELGGGSVGLGLSEGAEDVRVARTVPGWVCPRRAPRLLMHPDSQGG

SEQ ID NO: 74787 - protein, 62 aa, Zea mays
  Coding DNA Sequence Number=SeqID_31412
MTEATIHATAVFVAPYATINAKNHIPEAYPTDPAWGIADAYVHSWLLGSAGPDVVGLVAAPN

SEQ ID NO: 74788 - protein, 153 aa, Zea mays
  Coding DNA Sequence Number=SeqID_31413
  Gene Ontology: Mol. function=binding
  Homolog annotation: Hit_ID=A2WVJ5; Match level="QueryCoverage=29%, HitCoverage=3%, E-value=4e-16, Identity=91%"; Hit description =Putative uncharacterized protein
MVIWRPRNVCTTCGEGRRRYAVHTVCRLEPHESEARGLWFVGQVEHDNADCQMERMTVGAILSVITVEMIPNPMKGHWLAGSKQRHDNKGISKSPQLAAMRDVALVVFLNMLVKVTRQDLPLWHQILVLEILRGFCVEACTLRLLFQTFDLVC

SEQ ID NO: 74789 - protein, 514 aa, Zea mays
  Coding DNA Sequence Number=SeqID_31414
MEAVLPGGLKKRTRRGQRRRKVVGVVSGQEVSVHSPGGPARVVKFLRRSREVDHAEADIRRVLIVSVLGPGSSDCAAVVLEQLASRVSLEADTLHLRRAVSNSFLVFFPSEELASRAISVEQSLFVPPVRLHLRRWSRQALASGGAACLCLWISSWKGSLLTSGGLELLSSCWMEPLVVGEDGSIVPRTLVYPISVRVITPGDWSAGDMSEVLPPVVEDEDDRDQFQQRRRIIGHDLLARPSVHSRLGPRTSSSSAAEPVEDALPPVVLADELAVSGSVAPVDAEFFPCASVEELLAPGPVGPVDATILPNDLDGSVVPFIPGDAVVELTAPGSADPVDAEILPSALAAVDSNLCAADIQVASSPFFNLLGRPGPSLNCWLSTKPRCFKVYSRRKKTLVVEESVISPQLLEFRNDLVLPTTQLLPTPLIAKRRKTIPSNFKPRRSRRVAKFPPELGSESAAKVCRFLGFCDEQENISFQDARKYASLFDAALSNDHIAALAALFGWEVPQVVQA

SEQ ID NO: 74790 - protein, 426 aa, Zea mays
  Coding DNA Sequence Number=SeqID_31415
  Gene Ontology: Mol. function=binding; Cellular component=extrinsic to membrane; Biological process=protein transport
  Homolog annotation: Hit_ID=Q5N8Y4; Match level="QueryCoverage=29%, HitCoverage=12%, E-value=1e-51, Identity=80%"; Hit description=SF21 -like protein
MAALEADLRALSAEARRRHPAVKDAAEHAILKLRSLSAPSEIAQNEDILRMFLMACNVKSVKLSVIGLSCLQKLISHAAVASSALKDILATLKDHAEMTDEIVQLKTLQTMLILFQSHLHPESERNHFSHKLLDKKLSCLEVCLLFQLFYEDPEMNKVATGALISREKSHGLSLAYFLRQHNCWHWVIMLHVRLPISLCRNGEVVCHHSAWQEHWNGDEGKGAHARIRCQRAPWLTTEQGARCGGVVQPLVTDTEDDTVKESHSSRHDGRGAEGVLLPEKASTIAAWCGREKQYSAIAEKQEQVMHERKVSDQQSAHLRASHARLRACHKLLEYAFTYLKAIDLLTVSAIRQQLRLDKQWHWSSIMLFVLNHFPPIQIALHGRSLPSNSGDPTIMQNLSDVGKLGLRLLEDLTAIAAGGSVCANNF

SEQ ID NO: 74791 - protein, 103 aa, Zea mays
  Coding DNA Sequence Number=SeqID_31416
MAADNLPAGGGIDDVFPTWWKNNIRACPIPSPADGGGGGATKAKQKAAPRRLSNESTASAPVTPGFKEQSQDEEEERLRLSSHLTGEGGRVRADRRNPVGRPP

SEQ ID NO: 74792 - protein, 186 aa, Zea mays
  Coding DNA Sequence Number=SeqID_31417
  Subcellular localization annotation: CTP_CleavageSite=20; ConfidenceScore=5.12e-01
MGAGSHASCKLAQGRRSQTAARAVRATTQRLQAFLHIRPDQRVKGQTAMQAACNRAKWAHPFDSNAPSMEAQAHTSCNRRAGCYVRATAPPLAPLPRLLDCGTSTATRGNPADRERGYPERDPSPRRKRAPSPPTDQRFEGWPLGGVQQPPQSARAPRPLLVRGSRAGPSEGFNDRLRPLGLRAHY

SEQ ID NO: 74793 - protein, 102 aa, Zea mays
  Coding DNA Sequence Number=SeqID_31418
  Subcellular localization annotation: CTP_CleavageSite=55; ConfidenceScore=5.89e-01
MASSSSLAVPSIPLPLPGAYKRNRPSPVLTTPALANSSSFPRVNQASTAVLPPSLCSINQCAKLRNTLTVTRHPSPPPIAPGILTGDLTAVDTRHHATDQPP

SEQ ID NO: 74794 - protein, 214 aa, Zea mays
  Coding DNA Sequence Number=SeqID_31419
  Subcellular localization annotation: CTP_CleavageSite=2; ConfidenceScore=5.09e-01
MEAQAHASRNRRTRCCMQTTAPPLAPPPRLFGCGTNNATRGGPAHDQQRQPGAAVNAAESGPAVMTVAGGREQRSRRRPDSRPIQGQQENPLSRREDRAPVIRSSNGSRTRNGRPANHSPRRINSAAGQAALLAGEAGDASPSPDRERGIPRKGSFPVKEPGSEPPLLIRGSKTGPPRGSTVASDRMGPTPTTGQRLAPEGFTVASDAERGMTR

SEQ ID NO: 74795 - protein, 150 aa, Zea mays
  Coding DNA Sequence Number=SeqID_31420
  Subcellular localization annotation: CTP_CleavageSite=56; ConfidenceScore=5.41e-01
MQAACNRAKWTRFSDSQRASMKAQAHASRNRRAGCCMQATAPPLAPPPRLFGCGTNAATRGDPAAPAWRDGQYGRKDRERGIPRKGSFPVKEPGSEPPLLIRGSKTGPPRGSTVASDRVGPTPTTGQRFEGRPPEGLHGRLRLLGLRAHY

SEQ ID NO: 74796 - protein, 168 aa, Zea mays
  Coding DNA Sequence Number=SeqID_31421
  Subcellular localization annotation: CTP_CleavageSite=63; ConfidenceScore=5.41e-01
MQGHSVPTHINRPHRFPVSRSGLTALAYNAPLTPTGRRAVTALVPTITGMGDLVSGRVRGYVHCQVLWCRLGCWIWGYLLSSSLLRHEDAGVLVGGEYTGPNHGELVQSEGTVSITGSRSDCVRKESKGGGVVYPVHDGVGDGSAGWSKVVEGLGGRGLAAHGQTATS

SEQ ID NO: 74797 - protein, 106 aa, Zea mays
  Coding DNA Sequence Number=SeqID_31422
MEAKSHHQPKSRSDRTCTHHNRNGRPRLRSREGICPLPGSLRIQLLARSKSAITAALSRFGQILTCNLKNSQLKIQASKQGDPRLSGKITKNSDPRLFGKLRKSPT

SEQ ID NO: 74798 - protein, 106 aa, Zea mays
  Coding DNA Sequence Number=SeqID_31423
MAKTQQQLAPPLKAENSPLPWRAAVDAVEHSLHALRLGFLPALNSTPSTLVECLLFLRSPNSIVVHPGEKPRVCVEEASRSTLVDVRSYAQIGITVVLANAVWVCL

SEQ ID NO: 74799 - protein, 56 aa, Zea mays
  Coding DNA Sequence Number=SeqID_31424
MWLALPRVVCPLERSGDEDDGFDYAYGNGCPRCNHCSGEDEVVEEDFQEFQEYDEF

SEQ ID NO: 74800 - protein, 113 aa, Zea mays
  Coding DNA Sequence Number=SeqID_31425
MAQPPSLAHFGQPTRAPLPLSFSPLGPPEREMCLWAISKNREKKKEEELAVYSQKTASVWGTRLSGGAPDSVRSFLTPYFFVNLKCKGERLQVVEIPRKRDIEKKSITLWYSS

SEQ ID NO: 74801 - protein, 88 aa, Zea mays
  Coding DNA Sequence Number=SeqID_31426
MAGESKPGYGLCPSLSLKDFHHQCWGGPPIGWGCSYLQRWNRGSVCNGILNAVKVVHCGCRGLNVYVFLARSRVFSSFLSTKTRLLVV

SEQ ID NO: 74802 - protein, 301 aa, Zea mays
  Coding DNA Sequence Number=SeqID_31427
MAERYQLPRSRIPPTTRRKDCGCPPSGGSEGGKTRCIREREDMVAFQGGHPPFKGDSPDLRPQPSWTESSPTRSKVLPLRHGGWAPRVMQAGPEQKKPNRRARCMQPPSGYEHSSAFAQTSGRKGGQPCRRHATAPSGRTPPTSNALSMGAHTHASCNRLRASLLIKGSKAGPSEGFNSRLRARGLHIHYWLALEGFTAASDTERGMTMEGQRRLRRSDCCAARQSEADRQSGPASGTIGNSASPDPGLGLGLSPGRRRTPLRPTQGSDLGSAPEDGELRSARPRGTWAQPRKTANVTEPP

SEQ ID NO: 74803 - protein, 65 aa, Zea mays
  Coding DNA Sequence Number=SeqID_31428
MSSSVTVKTSPTPSATSPEQSRRREYVLIPEQGAVHEEDQEPAPEPAIKDLPTFPEIEGKPRFYA

SEQ ID NO: 74804 - protein, 115 aa, Zea mays
  Coding DNA Sequence Number=SeqID_31429
MAQRLTRSTFAGGRKKSSEGDSGSPVRLCRVRGLGELHGSLAKLTKQLAQTGSDWSELAAVAEARVAWRAVARRAQGKVRRTLAWAGLRACGGVQPRPWGCFIGMARARACDGLD

SEQ ID NO: 74805 - protein, 78 aa, Zea mays
  Coding DNA Sequence Number=SeqID_31430
MSGEHGKKELATREKLDSLGKKHEAKTSLKEAKISADKHKEDKEESVSSINSHKKKGDKKKKKMKKANHHFLMVKTIL

SEQ ID NO: 74806 - protein, 56 aa, Zea mays
  Coding DNA Sequence Number=SeqID_31431
MAVRHGIPALRFLEAVAGFLMLVELEVYGARRTPWQMGNMTCGYRVQPLQSVKLVY

SEQ ID NO: 74807 - protein, 52 aa, Zea mays
  Coding DNA Sequence Number=SeqID_31432
MGKPVPSLLMLLLCRVTTLVPTITGMGDHVSGRVRSKVCGQVHSGFRNHYAK

SEQ ID NO: 74808 - protein, 181 aa, Zea mays
  Coding DNA Sequence Number=SeqID_31433
MQDAARCALSHYCSVLGGVADGLNLKYYPRRPSGSTGGVIVSPVGEDNPRLSSTVILAAVLNTELDHALDELSRARAEIALLRAERAERRHLDDGSPAPVGTQHPVVENSILFSYAARFARSVLMCDCILQMSENRRKGGRRAQQEQAAQQEETQAVQAIGQTLAAIQQQQQQAPPQPQMP

SEQ ID NO: 74809 - protein, 170 aa, Zea mays
  Coding DNA Sequence Number=SeqID_31434
MTEEVSCRGHSILHNLRGSNKALFDRQLQEAQAPGALEEDMGISPGRSTAYFVVRTRAILQECAKSPSKSRRRSQKPKPGKVNRSRSCTLLRVTHPTYQNMWVIILQLLLLRLVSHRLLGHNFHLRHHYNLPIHKTYEAQKIAEAQKTFLRECRATNRNASFTKATKSRS

SEQ ID NO: 74810 - protein, 47 aa, Zea mays
  Coding DNA Sequence Number=SeqID_31435
MEVENLLENDVGCPTTTTKMVWRLERQVQGCSWHDKSSNNRSRCNYR

SEQ ID NO: 74811 - protein, 95 aa, Zea mays
  Coding DNA Sequence Number=SeqID_31436
MESHDLRAERGSRLVGGNEIVGSGYDYDAGRWYSFRLERVVSIATTTQEKMKSWKATSRSFKTTTSSRRGLAATPSRLPVKAAFIYVSFPHFDLL

SEQ ID NO: 74812 - protein, 203 aa, Zea mays
  Coding DNA Sequence Number=SeqID_31437
MDLHERVFPASCGRCCKEPVIRCLPSTRCSYSRSTGAEDTIEAIALHGLTTFCGFHPLELSNHPIGLFPAEKEDDPMWKDRVEHAKDATKITLDNREELVVDLSTEMVEKDLQVEQMATQIQELEELVGATENTIEVLEDQLINTQQQLEEANQHMDMLHQEIQDMEADEDVDIEGGVDPEPASSLDTAGSGRPPSPESSVAH

SEQ ID NO: 74813 - protein, 268 aa, Zea mays
  Coding DNA Sequence Number=SeqID_31438
  Homolog annotation: Hit_ID=Q9XHY7; Match level="QueryCoverage=94%, HitCoverage=29%, E-value=2e-20, Identity=36%"; Hit description =Probable histone acetyltransferase HAC-like 3
MAVANVSLAETPESFMSTIVAPSVSVLPNRISGLCGIDSAGLQNGYLKDHFPGDAYPNTENISKASGQKLFTGEGQLFQQYREYEKELDGAWSHPAEKAVHSNRTTQSNEIYLNGECGPDTFMEMTENYWCISDSRNSCREIYSNLSTSNQCFVSDCDPCDPEREIVERSEHTPNSTVSKPTSPISDESSAKRPAKRLKAVMEEKLYFAKGDIEMREAKTVAWDQTPRGVSLSSRRERGASILYGLTAEELGDHMSSLTNQNTCLVSR

SEQ ID NO: 74814 - protein, 89 aa, Zea mays
  Coding DNA Sequence Number=SeqID_31439
MPGAHPANRWVRALGARAQSGIPRSGPCDREQTVEINAGGLRLRTVPLLLLSGEVTGAGAGVGYRGSEVTGLARIGDKNPANTLVGFRP

SEQ ID NO: 74815 - protein, 266 aa, Zea mays
  Coding DNA Sequence Number=SeqID_31440
MARKGRVGRKGKGGPQGEREAARERGRRGKRTLGRGAAAREGREELHVRREKTKNSMATMDVTPNDETASPQGSFSHIALHASANHDDMKNEIEEVEEEEIHKFYIHLNKDNKVILMKLLRRNGEQGETLLKTEKVLINTEDGLEKMTKEPKELVSSHDDLVERWSMGRTEPARPEPIMGRASIVGPWHSTIIYRAGSGQHVGLNIGLSTTLTLLIGPCRAVLLGRTGPGPVSYQHTDTQPWAHGPRSQTDMRIQNIHAYRCKVKI

SEQ ID NO: 74816 - protein, 161 aa, Zea mays
  Coding DNA Sequence Number=SeqID_31441
MGDSCMMASGPQWAGRENHRCYLRAIVVFLDENICQGHTNCSLEWMLLRLGSTQRSTLIITFGKPYTSHEPHRSVHGFIFILHISPQQLLTSRFNGLKPFVIWLAKLTPIAISIFQGSYFEGYVLLNQVCGTNVAAHSVEGHQTCLSSFSIYNGRSRNADA

SEQ ID NO: 74817 - protein, 58 aa, Zea mays
  Coding DNA Sequence Number=SeqID_31442
MALHISGSFFARELEKSCREKHDDLDALDVRCCDDPYAFCGITTNLRYHFGPHQFLRI

SEQ ID NO: 74818 - protein, 387 aa, Zea mays
  Coding DNA Sequence Number=SeqID_31443
  Gene Ontology: Mol. function=translation initiation factor activity; Cellular component=cellular_component; Biological process=regulation of translational initiation
  Homolog annotation: Hit_ID=Q2R678; Match level="QueryCoverage=94%, HitCoverage=89%, E-value=0.0, Identity=93%"; Hit description =Expressed protein
  Pfam annotation: Domain name=W2; Domain location=311-387; Score=55.3; E_value=2.1e-13; Accession=PF02020.9; Description=eIF4-gammaeIF5eIF2 -epsilon
MNRLKICTCTHDLSLCESLKLELVAKSIESSDLNFSRYGDTFFEVVFVGGRTQPGTVKPEEGDRHPYSVLDCASQREAILPFVLYIQKTLRRRPFLIKNLENVMRKFLQSLEFFEENERKKLAIFTALAFSQKLSGLPPETVFQPLLKDNLVAKGIVLSFITEFFKEYLEENSLDDLIALLKKGKMEDNLLDFFPSAKRSSEALSEHFTKEGLTSLVEYNEKKMFEVKLKEIKSTLTAMINDEAAISEVIETVKQQVKDAKFPDLEVIRMLWDVLMEAVQWSGKNQQQNSNAALRQVKAWTELLNAFCTSGRLELELIHKVQTQCYEDAKLMKLFPEIIRTLYDQDVLAEDTIVLWFRKGSNPKGRQSFVKALEPFVKWLEEAEEEE

SEQ ID NO: 74819 - protein, 122 aa, Zea mays
  Coding DNA Sequence Number=SeqID_31444
  Gene Ontology: Mol. function=translation initiation factor activity; Biological process=regulation of translational initiation
  Homolog annotation: Hit_ID=Q2R678; Match level="QueryCoverage=62%, HitCoverage=11%, E-value=9e-12, Identity=56%"; Hit description =Expressed protein
MGSWSLGSGFWVVGSSKEKPTLGSNCSILLSVDCPFYIETLSQLFQLNLPRGTRIKTRKRNIAAPLDPASFSDAIVQIYLDNGGDLDPTAHLAPLEVSIVHVQTKVFKSISRVESTRYRLGD

SEQ ID NO: 74820 - protein, 93 aa, Zea mays
  Coding DNA Sequence Number=SeqID_31445
MAQRVFFFAANLDLASREGPRRRGEIIRIYQEPPSVPWAITHTNQIHRHVLHCVGTQVLETSPCGGEVFLAIAGLPSPHHIGTALTRLTSPPP

SEQ ID NO: 74821 - protein, 140 aa, Zea mays
  Coding DNA Sequence Number=SeqID_31446
  Homolog annotation: Hit_ID=Q8W0Y1; Match level="QueryCoverage=34%, HitCoverage=6%, E-value=3e-07, Identity=56%"; Hit description =Putative transposase
MAFNSRYSLSQEAIDGLLTVIGSLLPEDHVLPKSILDIKNFTKGNVVTNSAPAMMTGAEVHQHIDGLVVSPEGDFMGYERSANQREAEVQLGLAHRSVRRCTGQCPGERLQVVEIPRKREKTKKGKTVVFKLIIGSLERG

SEQ ID NO: 74822 - protein, 277 aa, Zea mays
  Coding DNA Sequence Number=SeqID_31447
  Subcellular localization annotation: CTP_CleavageSite=2; ConfidenceScore=5.28e-01
MSSSSLMRRVFPSSKPPDGGYPPSFRLLAGGTQLRGSWYLSAIVRLQGFSSCGPGASPHWWSPETVTASSWVGRSKPGCDLGPTLSFKDVHHPRWGGGRAEPALYLPRGFAGHPFPRCSREKALTGPAGGANLDNVGLIDGGRRHLQRVGVVGLAPGGPSCRRAAAAPAPSRRGRCPTRLGGFEWGSAGGLVAPAISAEAEAAREVPVADGITATICAPGLRGNRPSRLLGPDSRRSPWTASPSEAGSDLAKGVVDAEGAIASFQREDPSLQDQIAL

SEQ ID NO: 74823 - protein, 19 aa, Zea mays
  Coding DNA Sequence Number=SeqID_31448
MATPRSEGTVTYRKERRFL

SEQ ID NO: 74824 - protein, 108 aa, Zea mays
  Coding DNA Sequence Number=SeqID_31449
MAGAGGRGRGEAGRRGRAGAGGIWRATRGERGGPHRTSALRRGRMPGCADERAAPGQGSASGRAGERAGCGTRERAGRCRDVAPWGGRRVERDRGRAIRERAMARWEW

SEQ ID NO: 74825 - protein, 137 aa, Zea mays
  Coding DNA Sequence Number=SeqID_31450
MVCADRVGNPAATAMPGDLGSQTTSHNMLSNPRNMFRWHAEIICSFEKTHNHGIRWKGFSPEGTLDEVDLSVPSEERPRALHQEVNYMLAHSHHRHYESDECIRTHGHSLRPRDHQTSVLSNRPSSGKSQRGIPFLD

SEQ ID NO: 74826 - protein, 109 aa, Zea mays
  Coding DNA Sequence Number=SeqID_31451
  Subcellular localization annotation: CTP_CleavageSite=80; ConfidenceScore=5.52e-01
MGKPVPSLLMLLLSRAINNFCQVITFPLVTQCSSMDQGVSLAARSRRFESSFNLASDRTCTHHNRNGKPRLWSREEGNLRAVSLRFEVLLRGNCSGLRFGLPLKVLVDS

SEQ ID NO: 74827 - protein, 104 aa, Zea mays
  Coding DNA Sequence Number=SeqID_31452
MGVPDFCARWRTFNALQGQLEEGKQGTNEFESRMTQNQEMENDEYMDVNYMVKAQSIIDSHAQGEFNSSLFANQFTGCEVDWTEALRMQHLKEDTIRLIEDITK

SEQ ID NO: 74828 - protein, 84 aa, Zea mays
  Coding DNA Sequence Number=SeqID_31453
MAHEIIKKSEKDTHDARAEARRAEEAAERENCIAELSPPPEPFDPLADPKMKEALDIINMAESIVDEVVNKLLNEVAEKVLKEE

SEQ ID NO: 74829 - protein, 158 aa, Zea mays
  Coding DNA Sequence Number=SeqID_31454
  Gene Ontology: Mol. function=translation elongation factor activity
  Homolog annotation: Hit_ID=Q69S66; Match level="QueryCoverage=42%, HitCoverage=5%, E-value=8e-21, Identity=74%"; Hit description =Putative translation elongation factor EF-1 alpha
MVAAEHDGIAIEKLSRLFKSVLGFEVDNSTFMEAQIRATFYPKFENDKSDQETRTRMIEMVSHGLANLESVIFFIPAVAHCRGAWDQHQLAEEEDVDTLPEHQLAEEEDVDRLPEDILHPNKCPYADCYEIEREILHALDQTDGDRSTEDSATPSGEA

SEQ ID NO: 74830 - protein, 217 aa, Zea mays
  Coding DNA Sequence Number=SeqID_31455
  Subcellular localization annotation: CTP_CleavageSite=38; ConfidenceScore=5.38e-01
MARPCVPSAAPSPLRGVLAPPGALPSPGHGALAVAPVSVSLDMTPTPRRVISAPPDVLPCPAPGALPCPGATRSSAQPGVQPRLGADARRGPPLSPRVARPIPPAPTRPRCPASPRPRPPARAMAARPRRPWRGPGSPPAPACPVPPASACPAPPGAAVACRPRRGLELGPACLWRTALSSASAWPRAVGLGMAPLPLAAHNTARARLGPGVVTRWN

SEQ ID NO: 74831 - protein, 543 aa, Zea mays
  Coding DNA Sequence Number=SeqID_31456
MAQECSDPPRGWRRLLYVPHGTRLEVMNKDHQDAAQKRRAVVRMVDPAREAKRARGSAKAAASGSSKPLPAAKPAAPGPSEASTGAKTAAAGGTKPPPGGPSKGREPSSPAKLPSPGRRVADFGTNISVEDYVVGKVFFDRRYVAGSGEGQLVVVPPSVATTSPSTVVRAKGAAQDPWAAFCASGEILTAAAAKDVAGTMSQRLREVSQQLKQAADFVDRVASGVLTADVAAEVERLRTQHADAVREKSAAESKNRRLAEKVAALEAEKTDLRRRLAEERREANQAVAEAQAAQAEAKVARAESSLANQHAEEWEARFNALRDRVDKAEASARSEVERTHAQFVDAYRDLGARTADFKVPDQEAGLRFLEWLQEELLVLPTIVQGFMSFASLVICEGTLNALSREGCRHYEVFDQSDENFEREIFKAEDPVVKQSAGALFDRMWGPHGREAVKERSNRAIEQMARVEDVEDLGDLVGAPPKAEVNPVPPSSAGEGSSAAPVPTVAGEGPLPAPAPTAEDPPKVVAEPTAEDPTTAAGPSQVAK

SEQ ID NO: 74832 - protein, 166 aa, Zea mays
  Coding DNA Sequence Number=SeqID_31457
  Gene Ontology: Mol. function=kinase activity; Cellular component =ornithine carbamoyltransferase complex; Biological process=amino acid metabolic process
  Homolog annotation: Hit_ID=Q6QP54; Match level="QueryCoverage=39%, HitCoverage=22%, E-value=1e-10, Identity=58%"; Hit description =Putative kinase
MAPPVDVVGLLCPRLGDVEAPPRSRSSLSSEAEVESEPLGRARQRPSAEARAESEPWGRAKRSDAGGAQARALIYCVSSFPSRISPVASRSHLRSSAHWPVTLRACLSLSSRLRWILNGARPRRLCRAQPEAAGASSRCSTKAVALLWDRLCPKAKRYRPLSASAH

SEQ ID NO: 74833 - protein, 245 aa, Zea mays
  Coding DNA Sequence Number=SeqID_31458
  Homolog annotation: Hit_ID=Q6QP54; Match level="QueryCoverage=16%, HitCoverage=13%, E-value=1e-07, Identity=80%"; Hit description =Putative kinase
MAPPVDVVGPWCPRLGDVEAPPRSRSSLSSEAEVEFEPLGRARRRPSAEARAESEPWGRAKRSSSSSGAEPESEPWGLANRDSRSGAGGAVLLSDRSVERRSDYGHFGSVDRRACVRIKLCADGGYQLRFRSLEGDQPFSVAFCSGGCARAHPPGVAPEASEECPGARLGPKFSGWYVDVVNGLARAGAPNMVSPVSCWRVIRVDARAPFVRGRQEAWRHAQKYLRVICRTQSPFDGVRGLDASL

SEQ ID NO: 74834 - protein, 134 aa, Zea mays
  Coding DNA Sequence Number=SeqID_31459
  Subcellular localization annotation: CTP_CleavageSite=97; ConfidenceScore=5.25e-01
MVPPPVYLPSMPVLERARCRHHAAATDVCRRRGRGLCIQRATTTNSSSLSSLTRGPRSGPSPPSPSRCSRSSCISPSIPVLECVVAYVIPPPESPISSVAKANAYADGGGDHHQLQPVEPNQRAEEWSLTAFSV

SEQ ID NO: 74835 - protein, 84 aa, Zea mays
  Coding DNA Sequence Number=SeqID_31460
  Gene Ontology: Mol. function=protein serine/threonine kinase activity; Biological process=protein amino acid phosphorylation
  Homolog annotation: Hit_ID=A3BBW1; Match level="QueryCoverage=69%, HitCoverage=9%, E-value=1e-11, Identity=63%"; Hit description =Putative uncharacterized protein
MAEPLPRLQLRHESAVQPSHLGPPRQSSGGPAREKELHLYVLQLQRSVTELAEEVQRLKLQNNKLEHQINILSRKDERSSTQDN

SEQ ID NO: 74836 - protein, 115 aa, Zea mays
  Coding DNA Sequence Number=SeqID_31461
MEVVFGRRLRSGAEQEAAPVPLPRMLSHAHQVLSDTRAAILREWEALEAEYQRLSDWRTQLEERTKTASQQFISEWSQLKRDRKEYKRDLQRVCARELEASRREKKVTRREEVVT

SEQ ID NO: 74837 - protein, 846 aa, Zea mays
  Coding DNA Sequence Number=SeqID_31462
RTVRQQTQQARRLLDYLDAACQRMGRDTLNAKRARRPGSPPEREVKGKAWTHVSTGPLLTQGSSSFRDLAEVRTLLGGSGLIRIGVWCPSMEVRTPRYILGCVAFSCHVAPFGLPMRWGQAPSSACPGDVAWVQRLHAVEEGTPDLGYRQWPPGPPQERIQSCWWGQSLIGGWPAALVRLLMQLLPARLCEAEGRITTVQLYASRVAVRLFDAGFGEDEGAFKHGAVACSFVRWFTFLTTGCTENEGAHNCGAVARSLCGGSPSSCFGWGAPVFSGEVCVRAAPSGDLTAGELALVVLQGFSSCSPAAVPRQWSSRRMTTSLVVGRSKPGCGLPPALSFKDVHHPCWGGRRAESGSYLLHGPGTRFFLQHSWEKAFTDLEEKANFGYAGLAGYKCCQLPRAWLPGSDGPEAASDAASCRLVGAWLSVHRTGDGRAVHGSATSTASPAPLAVLGAVQDAVRHGGGGGVLGWSCPHSLGGRERGPLHARRGSHRPPVRRWPLSSVLRWSQPLVRLLLAERWSPPLVGLSGASFQRDSCWCSVVHSCRMELGSLLAVEYAGSRYGTRLSGYTVSGPPSPAAVPRQWSSRRMTTSLVVGRSKPGCGLPPALSFKDHSEEKAFTDLEEKANFGYAGLAGCKRCQLPHAWLLGSDGPGAASDAASCRLVGAWLSVHRTGDGRAVRGSATSTTSPAPLAVLGGRTRRRTQQGWRRRSWMVLSSVRGRTGARTSSRAPRQQLSTGAEVAVVVGAEVVTAAEVVAAVGGAVRSQLPTLTVRDQAEQLHGFRTPQETSAHSSEPNLQVIGHQPQSGGACRPTVRDQAERLHGFGPLQEISVSSLVPDPRSSDPHDL

SEQ ID NO: 74838 - protein, 132 aa, Zea mays
  Coding DNA Sequence Number=SeqID_31463
MGKSNKRKRKPTPPSEDFGDSEYSEEEFSESEGSPAPVSPPASSDDPDDSQGLAVEVWTYIRAVEHSGLEGSDESEYSSDEEDSSEEDGGGDGEDNDGGDGGDDGDGGGRGGNIGSKGGNGGSSKGSNKASG

SEQ ID NO: 74839 - protein, 383 aa, Zea mays
  Coding DNA Sequence Number=SeqID_31464
  Gene Ontology: Mol. function=catalytic activity; Cellular component =integral to membrane; Biological process=metabolic process
  Homolog annotation: Hit_ID=A2X1L0; Match level="QueryCoverage=28%, HitCoverage=16%, E-value=2e-20, Identity=52%"; Hit description =Putative uncharacterized protein
MDRYLTVERPRNESTIEENGIRITAQGLICNYVSYATSLLQVPGLVLTIAVVSAIALYLCRKKIRVLMFTVSSERFLKIQREAPPEYQQYLVQVTKYQAAQNCKGELLPWWLFLAGVSSARRRSWTPWLGSYHPSLHPGLHAATATRQYAYTLLPPLALDGWRPLPQRLRPCPAPALAGSPMEMNEERKVSLLGLADILSASIGGFSWAPLISKICKNKVEAEAWFTGLSALICRRQHGSQVQHIDGIRIAGLPIDNLKSSKDALLDGIDGGDASAAEAEGGSEKSTIEKELEQLTSILPDLEKKLEDLSEANPSADMDEMVKAIVSRRQLEALEALGVKRASIKPISAKPVAKKPALDSPSLQGDNSINSEVVPATQTDESS

SEQ ID NO: 74840 - protein, 132 aa, Zea mays
  Coding DNA Sequence Number=SeqID_31465
MASACGALRKSTSLASKVSGGGGCDVEDLDGVEAVGVGPAPLDGDDLHDWVDVGFARYGSVGGGVAGGVLAMKQAVKSSRLLGPSSAPSSCDVATTLRGRDNSANASMLGRKPATVSTKSNAGIPRLTAIAA

SEQ ID NO: 74841 - protein, 64 aa, Zea mays
  Coding DNA Sequence Number=SeqID_31466
  Homolog annotation: Hit_ID=Q8SAY0; Match level="QueryCoverage=65%, HitCoverage=24%, E-value=3e-07, Identity=66%"; Hit description=50S ribosomal protein L18, chloroplast precursor
MRTSRLILYFSGISVLDYYGMQISRKRHKIGEVIAKSCLEKGISKVVLDRGRFLYHGINDRTRC

SEQ ID NO: 74842 - protein, 260 aa, Zea mays
  Coding DNA Sequence Number=SeqID_31467
  Gene Ontology: Mol. function=metal ion binding
  Homolog annotation: Hit_ID=Q10Q54; Match level="QueryCoverage=88%, HitCoverage=39%, E-value=2e-77, Identity=66%"; Hit description=Zinc finger family protein, putative, expressed
MQHALSFFHLLQLILIVWSSLSQFDAIPPEIGISRNSGSKKTKEEEGARRKAGAVKISPWTLARLNAEEVSKAAAEARKKSKILKPVGKHGAPENSSKPDHLPTDKRRLDRRGFPAELSLDPLATLSASGTESNYSDAATEICGSLAPLQLEARSAFQPSTAASTRNVASSPESSFDSPNLHPFRTSSATADEMQGAMMHTAHRGIEFKRSSSDGYEASRGEDSDRIPSRIVHRPSNWASVFLNSSQGDPPADLLSASAE

SEQ ID NO: 74843 - protein, 594 aa, Zea mays
  Coding DNA Sequence Number=SeqID_31468
  Gene Ontology: Mol. function=sequence-specific DNA binding; Cellular component=nucleus; Biological process=regulation of transcription, DNA-dependent
  Homolog annotation: Hit_ID=Q9LEE9; Match level="QueryCoverage=36%, HitCoverage=30%, E-value=1e-54, Identity=56%"; Hit description=OCL2 protein
  Pfam annotation: Domain name=Chromo; Domain location=530-584; Score =38.7; E_value=2e-08; Accession=PF00385.15; Description='chromo' (CHRromatin Organisation MOd
  Pfam annotation: Domain name=START; Domain location=330-546; Score= -16.4; E_value=0.0019; Accession=PF01852.10; Description=START domain
  Pfam module annotation: Pfam domain module=Chromo::START; Domain location=530-584::330-546
MEELLPTSASSVIEEKCGNEDASKSQTSNSDREVGSNEKAIEEDGFVTTVEADPTSKEILLTTAGENEEWASDDDKNSEEIGCIDEIDEDADETKEQSYTSNEVQTLRHTGTVEEVNEDASVKTKSGIYLLVPGEHQVVDAFATKTAKSLDDAINIGQEEEGREVADATKNAMKDIDNDMKYRDGEGELKERLAQNRDHCDALNQDSDTTLLRLDLDHWEETSVSSSSLAMSEDLLSVFGAQDSLLQQEAWEPIPHMDLLIAKELRPMADSTLDLAVDVGARSGGPTDKMTVSTIFESASSTSSRSGTGTTPMLTTLLQMVRIDKFQIAQFALSAMNELVQMAQRNRPLWVSTVPSLGSLIMETLNYKEHLVAFSPCVGVKPTGFMSEVSRELGIVTIGSSAALVKTFMDQRRWLDIFCCRVATTAAVEKILPVAGSRNGALLLMHAELQVFSPLVKLLTDFFWRELKHTEAYHSMCQWDPRVDQFHWNDDGSKETQSLLWIIRPWDPALYYVQRSLVHRPCSKLTFKDVLPEEIVDRRLVKKGGRTVPHVLVRRSRVPHDSATWEEFSIFRQLFPRTLAWGTSKFSGGGKCHN

SEQ ID NO: 74844 - protein, 33 aa, Zea mays
  Coding DNA Sequence Number=SeqID_31469
MTVRAEENSSPDFTNRYLPWVALTGTLILGLSG

SEQ ID NO: 74845 - protein, 85 aa, Zea mays
  Coding DNA Sequence Number=SeqID_31470
  Subcellular localization annotation: CTP_CleavageSite=39; ConfidenceScore=5.12e-01
MADTVPGSRAGRNRDWVSWASAHQFPWARSVLGVGGRISAVQRRQRKAPRNPSLGKEEGVATVDPFADGWICKLGTASAGRVLGR

SEQ ID NO: 74846 - protein, 130 aa, Zea mays
  Coding DNA Sequence Number=SeqID_31471
MEASAAGNNVRSRSGEFYGVDCIAARTAAVTCTTSPCHNTTTTREQEERPSGARSCAQGRPGERAAWAGASSAGACTMKVEQGGSTAMRKLGRKNRDAQGSSAERERAEGRGRGVAAWELGRAPELEQAS

SEQ ID NO: 74847 - protein, 95 aa, Zea mays
  Coding DNA Sequence Number=SeqID_31472
MDGQVTPATMSSREPVKNYATSKAEYTNTQLDLPVQWIKQGLISCEKQTIRIEFLSLQVTALVPTITGMGDHVSGHVRRAICGQVHSGFGKHYAK

SEQ ID NO: 74848 - protein, 109 aa, Zea mays
  Coding DNA Sequence Number=SeqID_31473
MGKSNKRKSEPTPPSKDFDDSEYSEEEACLVRHRTSRWAQKLELQRSISNGTDDVAGAPDMSGVHRIVRCAIEQTTSTNGQVGGWGYKYPNHPTIHCIQVFTFQPPYKS

SEQ ID NO: 74849 - protein, 146 aa, Zea mays
  Coding DNA Sequence Number=SeqID_31474
MGRSKGATWQGKEVHSMYSTLGPDLHRRTPDPYAYKSGAPKKARWAPWEDPSPPSSEVRALARSRDKKDPGMSKGPTTSRSPNRRRIRPVCRQKVRMCRAAHRTHRPFYKKLPLHAEDMEISGVRAPEDRLSSKNWRFQELSLLCP

SEQ ID NO: 74850 - protein, 359 aa, Zea mays
  Coding DNA Sequence Number=SeqID_31475
  Gene Ontology: Mol. function=microtubule motor activity; Cellular component=microtubule associated complex; Biological process =microtubule-based movement
  Homolog annotation: Hit_ID=A2ZM87; Match level="QueryCoverage=34%, HitCoverage=6%, E-value=6e-34, Identity=49%"; Hit description =Putative uncharacterized protein
  Pfam annotation: Domain name=DnaJ; Domain location=241-298; Score =18.1; E_value=7.1e-05; Accession=PF00226.22; Description=DnaJ domain
MQREELEVDLQKVREQMLAVQPSGKARRYMEDGMVDLADSSRHPIDMHNELLCAQETIRILRREVSEKESEIAQCNAHISELNVHVEAVAQEYKHKMNSKKDEELSATKQRIVELEGITARRQRECAVNAVKSVYEATEGNNKDSSDTQVKLKFQQVLHLMASHSPFMFHLYIKARSVPILSAVKNRYYKVTDGALRACGETTSVVFRPYNSMWSITTCFGIDFKKTKNKCINMRKKLKKRILGVEESASQQEIEKAYHKLALRLHPDTNPGNETLDPVFNHCRAPEGAPDVLVDVGDEGEMHAQPSCSATVGQRNCVTPQKIQAVALADSPSFLFSRNTTQVYPNGGRPVEMETALIQ

SEQ ID NO: 74851 - protein, 168 aa, Zea mays
  Coding DNA Sequence Number=SeqID_31476
  Gene Ontology: Mol. function=kinase activity; Cellular component =intracellular; Biological process=intracellular protein transport
  Homolog annotation: Hit_ID=A2Y5P8; Match level="QueryCoverage=100%, HitCoverage=23%, E-value=3e-72, Identity=77%"; Hit description =Putative uncharacterized protein
  Pfam annotation: Domain name=VHS; Domain location=13-168; Score=55.0; E_value=2.6e-13; Accession=PF00790.10; Description=VHS domain
MYPVVTGTPPARLPAASRVDKATSHLLQGPDWAVNLEICDTLNADRWQTKDIVKAVKKRLQHKDPKVKFFTLTVRTIINLMINDVSVIFGVGLQLLETMMKNCGEYVHFEVVDQHILQEIVKIVQKRHDMQVRDKALLLLDSWQEAFGGPGGKYPQYYWSYIELKPYG

SEQ ID NO: 74852 - protein, 148 aa, Zea mays
  Coding DNA Sequence Number=SeqID_31477
MDESGVKKEIGSQMEVRCQTNFCQNEDGFPKLLRACTVRLGIRSQPEYDGREFVEHGTQKETLQFGWPGCVHWKGQQLIEDDPSVVYLTAYLLTLDTQYDFLARHHRQMIARAEMQRSATVNFHVDLTTAQAPYSCLGKVVKSLLWKP

SEQ ID NO: 74853 - protein, 158 aa, Zea mays
  Coding DNA Sequence Number=SeqID_31478
  Subcellular localization annotation: CTP_CleavageSite=31; ConfidenceScore=5.20e-01
MALAPPPALPPAAPAGAWLSIHRTGDGRAVRGSATSTASPARQSHWGLYKTSYAVGGGAAFLDGLVLAPEDGGEDLLATAHTLRWTLLLANHSEWWSLSLLVQRWLPPLVRLLGANFQRNSCWCSAVHSCKNGARAPLCFGWGNQVVRLDPLDGGSRY

SEQ ID NO: 74854 - protein, 57 aa, Zea mays
  Coding DNA Sequence Number=SeqID_31479
  Subcellular localization annotation: CTP_CleavageSite=49; ConfidenceScore=5.13e-01
MAVGALQKGAWGGSALQRGRGAVVVRMDVGTRARGTRALTKVKKNFTTQCMQRTGHN

SEQ ID NO: 74855 - protein, 533 aa, Zea mays
  Coding DNA Sequence Number=SeqID_31480
  Gene Ontology: Mol. function=signal transducer activity; Cellular component=plasma membrane; Biological process=response to light stimulus
  Homolog annotation: Hit_ID=Q6AT13; Match level="QueryCoverage=69%, HitCoverage=58%, E-value=7e-31, Identity=55%"; Hit description =Putative uncharacterized protein OSJNBa0029B02.16
  Subcellular localization annotation: CTP_CleavageSite=80; ConfidenceScore=5.51e-01
MTLPPLPHPARQPNLCSRTPVKPPLPERPHASNPRSRTPARVDDLAPATDSRTPRRPPLPKRRISREIRPGRGASHIVVRVGALPAAGEPHDHVAEEAAPPKSLVAALPPDPPAGGSGCCAAAVADDGITCDFLLKLLRAGSMVGADTTLLRDLEARVARRLDQATLGAVVIPAFGHGGEHAPALLWTCPSCCASCAGSSRTAAAAARPPAWPGSWTCTWPRPRWRPAYAPPSSRSSRAPCPPTRAPPTTRCTAPSTPTSRKLDVPDGTVGVPANIRPRCGWWKCADGIPQASYNSACNLLRDLAGANRNPRCPGCAFAAHPSTAKEERKSLAQLIDARKLTVEAAAHAVQNERMPVRAVVQVLFSEHGKLNRLAELSASFSGQRSPSPNPALELPGRCPSKCEVLAQHQEVRRLHDDVARLQVRQSACLEFSSPHMYTNFGGAPTDAETYVCSMVQVQCNALQAQVDRLGSERRRRGGGGFFKWSVFWFGGGMGADVGRRLGERHGAPDAAQGEEERHGDAQCQVVQVHVLR

SEQ ID NO: 74856 - protein, 95 aa, Zea mays
  Coding DNA Sequence Number=SeqID_31481
MGLLMGSNGNPTVGMRNPLGIRNPHEYEFGQNFIPVMDMRFLTDIFFFHEYEFEQTLSSAITLMTEYRAFKVELAVGLLVPGAEAGSDSHANWES

SEQ ID NO: 74857 - protein, 529 aa, Zea mays
  Coding DNA Sequence Number=SeqID_31482
  Homolog annotation: Hit_ID=Q6J9V9; Match level="QueryCoverage=29%, HitCoverage=45%, E-value=9e-13, Identity=36%"; Hit description =Putative uncharacterized protein
MQAACNRTKGAHPFDFDASSMEAQAHTSCNRRAGYYVRETTSPLTPVPRLLDCRTGATTRGNPVHGPTVPTEHIGHGSVRRGRRRDGRYGQKWAGSDGGDRRAEAAVKSSAGSRPLLGQRENPLPRRHLWQAKRATLHLRHDDRVKKGTGKGDTPKRILLHEGSGPRAPLLIRGSKAGPSEGFDSRLRALGLRAHYWSGVRRLAPQKGSTVASGHSGSAPTTDQGFVGWPSKGSTAASEHVEREMTLGTSDTWPRLRLRSRGTLGHFRDQQERFCNGIPSEGGIEPPNPIKRDRVRQITYRSSGAALANPAPAKPLTASTYQPENSEPDYAPEQQPPPSFEWIFEDNPLEGLRFKPFSENHPSFMPDALECLFSLRLFHISCCCLFLLFFPPLPPWARVRKVAVLSPRSGDKRKREPTPPSEDFGNSEYSEEEFSSESEGSPAPVSPPTSSDDSDDSQGIAAEVWTYIQAVERSGLEGSGSDGDGGDDDDDGGDGDGGGDNGRGGDGGSKGGNGGGNKDSNKGSNKDSD

SEQ ID NO: 74858 - protein, 163 aa, Zea mays
  Coding DNA Sequence Number=SeqID_31483
  Gene Ontology: Mol. function=NADH dehydrogenase (ubiquinone) activity; Cellular component=membrane; Biological process=electron transport
  Homolog annotation: Hit_ID=A2Z2S0; Match level="QueryCoverage=100%, HitCoverage=100%, E-value=6e-41, Identity=46%"; Hit description =Putative uncharacterized protein
  Pfam annotation: Domain name=NDUFA12; Domain location=16-89; Score= -22.5; E_value=0.035; Accession=PF05071.7; Description=NADH ubiquinone oxidoreductase subunit
MSKRLLSRLLGMFQSRTQVGVDKAGNRYFTRVEEVDGTIEWICWLNGQRKKAPTPEELAELEARRERVKQNIQLLKKKEEEERKTGIQPVKKIGKAESPNLQSFVKQQFSGTPPDQQKVNTLGPEDRPKDTTHTEDATTDNERYTEPTGTGATFKPGTWQPPT

SEQ ID NO: 74859 - protein, 120 aa, Zea mays
  Coding DNA Sequence Number=SeqID_31484
MSERNWAETHWIAWSTRGGGRPKSGEVDLGPPVKSGRVRGLGKLHGLLAELAEALACPEDGWGGLATVAEALAAMAGGIKLAGAKGKWLAGEAVVEHVFPLPLPLFKRRLGANLRELTNL

SEQ ID NO: 74860 - protein, 83 aa, Zea mays
  Coding DNA Sequence Number=SeqID_31485
MASLLSGVKQRNICRIGLTWGKTFSLCSKLDERAFLFVIQAGANDGGFAFISEPEVNSFRFLSRPHRGHNLSFVCRYCEVLLR

SEQ ID NO: 74861 - protein, 208 aa, Zea mays
  Coding DNA Sequence Number=SeqID_31486
  Subcellular localization annotation: CTP_CleavageSite=26; ConfidenceScore=5.31e-01
MQLVPRARGADAAAHSPHVLSLPRVVCSSRDLRTRAFDAVVTAPAETLLFFPKNPQLPTPREQFGNFSIPSPSNARTARLSLLACAAFPLPSPFVVVRLRLAAQPPSSYLRPSLAGHGGRRMSPSMLFSPARSSFVPASSVVVGKCRMAYAPLTFVSPCCAPCQCGCAEPPGVSSLSASFVPAAASAQSVQHPRCRMIRAARSTSVCA

SEQ ID NO: 74862 - protein, 64 aa, Zea mays
  Coding DNA Sequence Number=SeqID_31487
MAGRFGLARGGTAVAASLQRECALRAGWGAGRAGPGGWAELPRDPGKREEKQKKGRVTPEFGGY

SEQ ID NO: 74863 - protein, 204 aa, Zea mays
  Coding DNA Sequence Number=SeqID_31488
  Subcellular localization annotation: CTP_CleavageSite=26; ConfidenceScore=5.31e-01
MQLVPRARGADAAAHSPHVLSLPRVVCSSRDLRTRAFDAVVTAPAETLLFFPKNPQLPTPREQFGNFSIPSPSNARTARLSLLACAAFPLPSPFVVVRLRLAAQPPSSYLRPSLAGHGGRRMSPSTLFSSPARSSFVPASSVVVGKCRMAYAPLTFVSPCCAPCQCGCAEPPGVSSLSASFVPAAASAQSVQHPRCRMIRAARS

SEQ ID NO: 74864 - protein, 136 aa, Zea mays
  Coding DNA Sequence Number=SeqID_31489
MTVAGEREQRSRRQPGSRPIQGQQESLLSRREDGAPVIRPSNGSRTRSGRPANHSPRRINSAGPGKGDTLKRILPYEGTGLRAPLLIRGSKTGPPRGSIFASDRVGPTPTTGQRFEGRPPEGLHGRLRLLGLRAHY

SEQ ID NO: 74865 - protein, 53 aa, Zea mays
  Coding DNA Sequence Number=SeqID_31490
MKPNLFRMRGNRRIAMTNNDAEKKNNRSSKRRCARNTCMHYGSLARRRWGQTI

SEQ ID NO: 74866 - protein, 136 aa, Zea mays
  Coding DNA Sequence Number=SeqID_31491
MAHPPGQVGDGGEASMGGETANKTSDISRAELAAVFHRALGERRGYGFGTGMMLQQEGKEETSGLVAWMLEQGAHDAEMHRRHASDAGSGGRHGGEQGRDGGRRWQLDDDGAARRALVSEDNELGKELIYLDNGKG

SEQ ID NO: 74867 - protein, 109 aa, Zea mays
  Coding DNA Sequence Number=SeqID_31492
MGTAAHSVLGLGGARARGRGRRRLASGTGTEALGLGDGDGDAQARRWRRRRSGSEMGTGTAELGSGTARRGGRPARRRWRLGSGSATAWRALTARRRGRERRHSISLAA

SEQ ID NO: 74868 - protein, 67 aa, Zea mays
  Coding DNA Sequence Number=SeqID_31493
MENAEVHILHLHTAFRDLMHQWDCSGLPNGERFQHRIINNMKNFAHTTYAHGNVLSGKWRKTRERDK

SEQ ID NO: 74869 - protein, 449 aa, Zea mays
  Coding DNA Sequence Number=SeqID_31494
  Gene Ontology: Mol. function=glutamate decarboxylase activity; Cellular component=cytoplasm; Biological process=carboxylic acid metabolic process
  Homolog annotation: Hit_ID=Q9AQU4; Match level="QueryCoverage=100%, HitCoverage=100%, E-value=0.0, Identity=77%"; Hit description =Glutamate decarboxylase
  Pfam annotation: Domain name=Pyridoxal_deC; Domain location=37-335; Score=379.5; E_value=5.2e-111; Accession=PF00282.10; Description =Pyridoxal-dependent decarboxylase con
MVVSVAATGPGTDAEPVSSTFFASRYVRDPLPRYRMPERSIPREAAQQIISDELMLDGNPRLNLASFVTTWMEPECDKLIMDSINKNYVDMDEYPVTTELQNRCVNMIAHLFNAPIKEDETAIGVGTVGSSEAIMLAGLAFKRKWQNKRKEQGKPCDRPNIVTGANVQVCWEKFARYFEVELKEVKLSEGWDVPIHVDAASGGFIAPFLYPELEWDFRLPLVKSINVSGHKYGLVYPGVGWVIWRSKDDLPEELIFHINYLGTDQPTFTLNFSKGSCQIIAQYYQLIRLGFEGYRNIMENCQENAAILREGIAATGRFDVLSKDAGVPLVAFSLRDSSRFSVFDVSENLRRFGWIVPAYTMPADAEHVAVLRVVVREDFSRSLAERLVSDVRKILRELDARATHAVRVATATAEQSGDGVVAKKSVLEIEREVAARWMNAVNKKKTGVC

SEQ ID NO: 74870 - protein, 397 aa, Zea mays
  Coding DNA Sequence Number=SeqID_31495
  Gene Ontology: Mol. function=translation initiation factor activity; Cellular component=cytoplasm; Biological process=mature ribosome assembly
  Homolog annotation: Hit_ID=A2YP54; Match level="QueryCoverage=60%, HitCoverage=98%, E-value=1e-129, Identity=94%"; Hit description =Putative uncharacterized protein
  Pfam annotation: Domain name=eIF-6; Domain location=157-356; Score =425.2; E_value=9.4e-125; Accession=PF01912.9; Description=eIF-6 family
MEIPSLGGWTAILKVFSRVPNDRGAPLFNLSQREAEGERSPSRYAISRPALAESRHESAAEGEGVRRLGSWEVGVSRGFVVACTGVCPHPRLAAKVKPRSLPPWPYTCPTASSHLGAAAAAAHLFLWNHRGTVEFFLLGLCAFRRGAAAAKTNRPWLPFENNCEIGVFSKLTNAYCLVAIGGSENFYSAFEAELADAIPVVKTSIGGTRIIGRLCVGNKNGLLLPHTTTDQELQHLRNCLPDQVVVQRIDERLSALGNCIACNDHVALTHPDLDKETEEFIADVLGVEVFRQTIAGNILVGSYCAFSNRGGLVHPHTSVEDLDELSTLLQVPLVAGTVNRGSEVIAAGMTVNDWTAFCGSDTTATELSVIESVFKLREGQPTAIVEDMRKSLIDSYV

SEQ ID NO: 74871 - protein, 124 aa, Zea mays
  Coding DNA Sequence Number=SeqID_31496
  Subcellular localization annotation: CTP_CleavageSite=68; ConfidenceScore=5.10e-01
MAPRKPCDDGGSQLSYGSRGMAFLEKVGRAGTRTGQALSWGRSLPSPAWTLVTPYCKRTRPGRGTNTKAAGFPPLSRPSPATSLPPFALAHALDPSGLGHAAHSLVGLGTPRSQNADTYHTVEH

SEQ ID NO: 74872 - protein, 80 aa, Zea mays
  Coding DNA Sequence Number=SeqID_31497
MGETFLVRRGHPLRLRTTGERTKQTIGNKGLQIVRRDGGERPRVARRNNGHPVSHHQAEEVAAERTRDWERGYSERDPSP

SEQ ID NO: 74873 - protein, 140 aa, Zea mays
  Coding DNA Sequence Number=SeqID_31498
  Subcellular localization annotation: CTP_CleavageSite=35; ConfidenceScore=5.54e-01
MTVSLAWGGNGSRSKCFFTKWGRRGQSGLRVRTVRARLKRSSCWRWTQVQPQAQQEAPPRPTLGLSLGRRSPPRPTPGLDLNLNLGRWSPPRPTTGLGLNPSGGIASSPDPGLGLRRRLRLARPWARTDRATGDTSLPYP

SEQ ID NO: 74874 - protein, 317 aa, Zea mays
  Coding DNA Sequence Number=SeqID_31499
  Homolog annotation: Hit_ID=Q6QP51; Match level="QueryCoverage=26%, HitCoverage=37%, E-value=3e-35, Identity=87%"; Hit description =Putative growth-regulating factor 1
MTISEGMQPGCVMKILEAERWLKGANPHEVALLQQQQDEGNAGATHPGAQKRAKGRTAIQEACNRTTVVHPFGFIASGGLAPRKGSIAAPEHSGSAPTTDQGFEGWPLGRVRQPPQSTRAPRPLLIRGSKAGPSEGFDSRPRACRVRDDSGYVRYMAEARATLSRGRTIGSPEAQLGQASSRSNLGQIASPTDRIAGAFNENSAAHPAPTAVPATRARLTTASSPSSATGSSASPDPRPRPREEVSASPDPRARPQRRPRKVVSASPDPRARPQPRPREESRPRPTPASASAEVSASPDLGLGPTAPRGIHHYPTPS

SEQ ID NO: 74875 - protein, 400 aa, Zea mays
  Coding DNA Sequence Number=SeqID_31500
  Homolog annotation: Hit_ID=Q8H6I5; Match level="QueryCoverage=16%, HitCoverage=6%, E-value=1e-07, Identity=55%"; Hit description =Putative RIRE2 orf3
MMTTSSMVGRSKPGCSLSPALSFNDLHHPCWGGGRGKSGPASAWAGDPLLPPAFGGERHPPALQRRHPPATRGKANCCCLYRVQLSVLHPGDGRRLHQGVAQHVVRREGGTRVPGRSRSRSCGESGSEDMLVRFGAAAARWCGVGGQVAAVVGAEVVVAIGEAASAEAVAPADETVSATCAPGLRLFGFNGWFSSPVRGPVTGEPPGVCCPTGPLNLQPLYDELKLEAAVSAWIEAESAQKEASSAREHVASQAEEVQQRRMELGQVVRERDQSRSHAVEAGSRAEVLGGQPAKATERLAGVSARAGTLAENLVVRAQARCWRPPPRWRSFRSSHRSRLGQDLPRVEMSLRVLLLPLPMSEPARTVCLKTPLSKQSKSAKGVLAKDFFEENFDAEGVPPF

SEQ ID NO: 74876 - protein, 59 aa, Zea mays
  Coding DNA Sequence Number=SeqID_31501
MGIAGTEGKWLFGIKGDNSDLLLNTLIFTASYSARLNGMEARILWMKFLLGYNNWKKQQ

SEQ ID NO: 74877 - protein, 572 aa, Zea mays
  Coding DNA Sequence Number=SeqID_31502
MGGLGVSDGFARELMRTCAAPGERMSSPELRESSARMLKVTGGCWPRNVPIPRAASGDVFTSRMVRKWRVFPYGRNIAAVVSAVMDKDRQGAAQKRQAAVRLVEARPKRQRGSAKAAAPGGGKPPLAAKSGVPASSKAPETAAGAGGSKPAKAVPPPSRVAEATKAARALPSAGKRVADFATDICVEDYLGAPKAKGGALSAGGEVTALAAVRDEAGAASRRLKEVVESLSQVADFANRTASGALTAVVSAEVERLRTQHADAVREKSAADSKYRKLADKADAKLARAEGNIARERAEQLQERLIALESRVERAEAAMRAEAERTRTQLVSTYRELGARTGDFEVPDREFGLRCLEWVQEELQELPAVVGGYVVRLPDVYKVEDLVVKDSTGALYDRMWGPHGREVVRERAETAMAQVQDFGPAHATATTEFSAASTAEGGNEYGGSASEFFDFTDSGSSVEWTEESSEEDLDYFAALDVAAAEASPHAADAQDVPGPSTGRRRRRAVAKRRVSTEERARLRVSRAGRQELLSLPAAASTGEGELQSLFAGLYDEVVCPRLPVLAKALCTLS

SEQ ID NO: 74878 - protein, 517 aa, Zea mays
  Coding DNA Sequence Number=SeqID_31503
MVRSPAFALNLRNRDPAAFVREAEDEAVRLVGRYVLRTEGQRSWEIRGSNDRLNRVFELNQLPYDGYPGQDDADRRGKKPVVETKYDPAPAAAPSSKKRKLGTAMGGLGVSDGFARELMRTCAAPGEWMSSPELRESSARMLKVIGGCWPRNVPIPRAASGDVFTSRMVRKWRVFPYGRNIAAVVSAVMDKDRQGAAQKRQAAIRIVEARPKRQKRGSAKAAAPGGGKPPLAAKSGVPASSKAPEAAAGAGGSKPAKAVPPLSRVVEAAKAARALPSAGKRVAGFATDICVEDYLGGSDEGQLATVAPVAAIATAAIVPKARGEALGSGGEVSALAVVRDEADAATRRLKEVTEALSQVADFASRTASGALTAAVSAEVERLRTQHADAVREKSASDSKCRKLTDKVAALEREKADFRRQLAAERREANEAIAKEQAAQAEAKLARAEGNLAKELAEHLQERLTALESRAKGAEATMRAEAERTRTQLMDTYRELGARTGDFEVPDREPGFRCLQWV

SEQ ID NO: 74879 - protein, 164 aa, Zea mays
  Coding DNA Sequence Number=SeqID_31504
MARRSTGRRSRLCLKSLRGGQTSQALPPLAERKRDDKFKTHSEKTKTEVSSDTYPLRGKANRACGEAPRPPVSVGAAEGCPAAGFGTVFRLGRPRRRGSGLPRCRHDGRGTCLLCSQRGHPLMGDRRIGLTPWSHNNYLGQGVKYPLGLPPLLGPGPWCPSPRH

SEQ ID NO: 74880 - protein, 26 aa, Zea mays
  Coding DNA Sequence Number=SeqID_31505
MAGDREREYFEKGSFSVKEMGPEPSY

SEQ ID NO: 74881 - protein, 262 aa, Zea mays
  Coding DNA Sequence Number=SeqID_31506
MDSGLSHGPILRGPQLFGAGSEPCCGSISLALMALVPPPMLPPAAKRGVAARPPHGRWSRRAQVRRIRSVPCIAGRTAPTLSGGSYKMSYAMGVAVAFLDEVVASAGEPLGVEVVAAVGADVVASAGEPLAALLTSIPKKELAMAPKRVVERAGPRYGTRLSGYTGFGPPQETNRCPKLQAWLFNSDVIMSDGKGTVRVDQQAGLMRADLTGLAYTDVLEVRKRYSFSHSEIVTPGHFCMYSEAWTRGESRRVFGGRQASAP

SEQ ID NO: 74882 - protein, 202 aa, Zea mays
  Coding DNA Sequence Number=SeqID_31507
MSGWSPDLNTFTDLLQSDGSPTTLPLDESSSLHRRSDVSASLPRALFPAARPPPYPYPYHLYQYPQSSYGQPPTSQAGIQASFPVRPYAPPPPAADGSQASFQIPPYAPPPYAPPPYGVPPYAPYAPPPYGAHHPYAPPTYGAPPPVAPLSVGSENQAEENPVPKEKYPKRLEWTKEDEKKLVNAWFMHSNDPISGNNNLVC

SEQ ID NO: 74883 - protein, 193 aa, Zea mays
  Coding DNA Sequence Number=SeqID_31508
MAYDILYDPPDSVGAVRPAMQGTLRMRRTCARRDHRPCGGRAATPRLAAGGSIGGGTKAIKAKEMEPQHGSLPAPKSWGPRRMGPWLSPLSISTSDSRHPAHGPTMTLSADVTGQSTVGTCVAVGVTIGGLVVIASTGAQEQQANRQSEFGPTCRLVSSPKAGSGATVSTLNQGYPLLQYKDDVHVRRLLAAR

SEQ ID NO: 74884 - protein, 384 aa, Zea mays
  Coding DNA Sequence Number=SeqID_31509
  Gene Ontology: Mol. function=zinc ion binding; Cellular component =intracellular
  Homolog annotation: Hit_ID=A3A852; Match level="QueryCoverage=89%, HitCoverage=86%, E-value=1e-124, Identity=65%"; Hit description =Putative uncharacterized protein
  Pfam annotation: Domain name=DUF1644; Domain location=77-242; Score =393.5; E_value=3.3e-115; Accession=PF07800.3; Description=Protein of unknown function (DUF1644)
  Subcellular localization annotation: CTP_CleavageSite=56; ConfidenceScore=5.04e-01
MQCHENNDFKSADLLVDPPGKLTWTARTLEMARSPKGRNLQARQRRSASSDVPLSSCETKGTSKGNDVSVTSEKNEWKGATCPVCLEHPHDAVLLLCTSHHKGCRPYMCGTNYRHSNCLEHFKGAYAKEKMALGVSAESASGLPLSSNTLPSSNQPCVMELACPLCRGEVKGWTVVEPARQYLNRKRRNCMHDGCSFHGSYKELCKHVKSKHPTAKPREVDPATADEWKRFECERERQDAISTIRSMNPGSVIMGDYVLELNGGGNNHLLSDGDNFDLGERLNFFTSLDRTLNERIDLYDSSDGLDEGFDFLASLFTHGRRISTGGSLSRAYRRHRDRPRRSTNSADASDIQHESASTQRGQRAVRATGRTSRRHHHLREAAER

SEQ ID NO: 74885 - protein, 168 aa, Zea mays
  Coding DNA Sequence Number=SeqID_31510
MDRLEHEHLSAPCTVFAGRAWQITKYEIVWGKWSLGPEFGVRCSENLVVALLGRSTCSPESLQREEEIEVTEEETPPPSESQAGNHFYFDICGSEPDSPVNEGKPRRADRGPFNWSHASSWHTLESLFLSRVRKRQTFVAFAPRWYQTRKNKTEVWEDSVLHLGSFVY

SEQ ID NO: 74886 - protein, 112 aa, Zea mays
  Coding DNA Sequence Number=SeqID_31511
MLRRYFAMTRLDDVARAVRSGDQQFTNGNPHHDSILDPLSLHPRFLWVFGDRAARLHSARGINGIRRGGHDSGFIGAKGRSSSNARIPDGTVLLQHAVRRKRKTQRRVKGAR

SEQ ID NO: 74887 - protein, 172 aa, Zea mays
  Coding DNA Sequence Number=SeqID_31512
MGYTTCGYRVQPLESVKLPYTSDELPPLVSSCHIIPHNLLSDEHVELAHVNQTTHHRRREVEAEVVKIVGKYSTKTELTRSWDIRGSYVRLKRVFELNVLRYGPFLEGGYADARDDRGKKAKTWAHEGEGYNCGDPEKENGCESMMRVLGVQRPRGVLLRSWRRRALGLRRS

SEQ ID NO: 74888 - protein, 257 aa, Zea mays
  Coding DNA Sequence Number=SeqID_31513
  Gene Ontology: Mol. function=diacylglycerol kinase activity; Biological process=activation of protein kinase C
  Homolog annotation: Hit_ID=A7R6E5; Match level="QueryCoverage=72%, HitCoverage=39%, E-value=8e-54, Identity=58%"; Hit description =Chromosome undetermined scaffold_1258, whole genome shotgun sequence
MSLGDVDTSGSTVASTEPSDYVHGLDQKAKHLSLGRNNIVSEPEEVLHPQPCHGSFWPRTKSKARADRNSVGITSTNDTRSSWAAPSMHDKEHISSTISYPGPIWDCEPKWDTGPKWDSELTWEPDHPIELPRPQEDMGIGALMELVPNWDDKWVVRKGHFLGVLVCSHSCMTVQSLIVHYGKPESDSGTEVGNVPDGSIPISQSAPPPTLSPFTYKPLLADTVQAEDIKEICKLLVVVSGEATKAYASTAIVFTLI

SEQ ID NO: 74889 - protein, 90 aa, Zea mays
  Coding DNA Sequence Number=SeqID_31514
MVEDLASSAGHPRDADDSVEEGKSDRMGPHDSEESASASERPPGGSHATVRVARGAELGWPREGKVKWAKFTYLLELVGGVTWPPSLPPG

SEQ ID NO: 74890 - protein, 99 aa, Zea mays
  Coding DNA Sequence Number=SeqID_31515
MGVMEPCDMRCNRKHCGRLGRGTCIGAREPDCTSTGVESQDLIVVCRTLFKVPSHTSLGASIGFISSLDSLPCDLNYLFALKIKNKNPRTLRSCTAQCY

SEQ ID NO: 74891 - protein, 147 aa, Zea mays
  Coding DNA Sequence Number=SeqID_31516
  Gene Ontology: Mol. function=structural constituent of ribosome; Cellular component=ribonucleoprotein complex; Biological process =translation
  Homolog annotation: Hit_ID=Q9XEK6; Match level="QueryCoverage=26%, HitCoverage=29%, E-value=9e-14, Identity=94%"; Hit description=40S ribosomal protein S14
  Pfam annotation: Domain name=Ribosomal_S11; Domain location=61-147; Score=-30.2; E_value=0.007; Accession=PF00411.10; Description =Ribosomal protein S11
  Subcellular localization annotation: CTP_CleavageSite=97; ConfidenceScore=5.52e-01
MAESSWCLHDSLFPASSDTVGKLCFNGSRMQGNVAPTNLVSKISTIMSSVAAPASSRRQHQAAPSNVQRAGRSPCFVSPNFNGGMKVKADRDESSPYAAMLASQDVAQRCKELGITALHINSVFGLMVWLIHRGLAPDGVVLHFLAE

SEQ ID NO: 74892 - protein, 213 aa, Zea mays
  Coding DNA Sequence Number=SeqID_31517
  Subcellular localization annotation: CTP_CleavageSite=99; ConfidenceScore=5.72e-01
MARTPSAAAAFLWCLVSSPSGRLKPHRGTPARPVSAPRHSLWSALPSARPGGTSFPAALALGAGRVLLVRLGRDLTIVPQLVQTPGLALPSAPARSRCVAESLAASAWLCSFMETLRACLRPCTKLARPALLAQPQLGPGENMFVTLTDSWAKRPTAQLPNWEYVWQLAVVGLAHRQEIEMDIANIKKRWTLLTENRGLEQHMSIEQYKHQLS

SEQ ID NO: 74893 - protein, 222 aa, Zea mays
  Coding DNA Sequence Number=SeqID_31518
  Gene Ontology: Mol. function=cysteine-type peptidase activity; Biological process=proteolysis
  Homolog annotation: Hit_ID=Q6J9V9; Match level="QueryCoverage=28%, HitCoverage=22%, E-value=3e-18, Identity=68%"; Hit description =Putative uncharacterized protein
MTDDVRGNLFRMIWVRSFNPFKIEISVKDLQNILSINLDMTLKCFDMAVRLLANKESRRPKGEIIKNRKHYMDMRFWRMIGFGKLPKYHEDPTAEELTKILDCWPSMNYYITACKYVLMPWKFNGCYALFVIDHGKKHVTFIDFAPNQDWCKHMPYKRLNNSYLILQAMAMWENDNPMKFVRDTKILRRNFIIELLSYEENSCRHAIPANIQQRVNNIVKKY

SEQ ID NO: 74894 - protein, 278 aa, Zea mays
  Coding DNA Sequence Number=SeqID_31519
MTSHGSSDDGNALTHTDGLAREGFPRILWEVLQGAGYTTPPQYAVQQFEKHRVPRCRVRMTLEPHPLQPGWRSLDSESFGYRAEDTIEAIALHGLTTFCGFHPLELATHPIGLFPAEREDDPMWKDRVEHAKDIWAIYPGQTAHLTVMHGEAMSHLMALLEATKITLDNREELVVDLSQEMVEKDLQVEQLSTDIQELEELVGTRENTIEVLEDQLINTQQQLAEANEHLDMHHQEIQDQEANEDVDIEGGDDPASSVDSAGSGRPPSPESSVASFAH

SEQ ID NO: 74895 - protein, 293 aa, Zea mays
  Coding DNA Sequence Number=SeqID_31520
  Gene Ontology: Mol. function=protein kinase activity; Cellular component=COPII vesicle coat; Biological process=protein amino acid phosphorylation
  Homolog annotation: Hit_ID=A2Y7N5; Match level="QueryCoverage=38%, HitCoverage=10%, E-value=1e-27, Identity=58%"; Hit description =Putative uncharacterized protein
MTGWPKGYGFVRFGDLNEHARAMTEMNGMFLMFSFFTSLGGFGGSSDGARGLTSVDLSNSESRPDSVAQRGLDHDTEERVEELTLKNCINTGIQPEVSAGGSTSSRDRPTRIKGLWGNFTRRTSNLVSRENAALSSGDIANLRARDVSAKVRFLLSQGWYLHLSNIKARYLFYLDTIKAIRPTRVFAYSRVHGHPRLPAMESARYLQLATYFCHYGICKVWLHIDTIDGLSAYLASVQEDVASVIIGKKTILHVRTASDAIDMRISVDERVKDKLSNLVTRLQNESFTASRKN

SEQ ID NO: 74896 - protein, 105 aa, Zea mays
  Coding DNA Sequence Number=SeqID_31521
MGAPAICACRARIKCAAESRWRGDDRCSGVAPDSPVHTGQSGNTINKQEHNSTYSRGHIKTKLAKAIIQGRSLSDFQCFGQTINYLKSAMHNTTAYPIKDQTKAC

SEQ ID NO: 74897 - protein, 160 aa, Zea mays
  Coding DNA Sequence Number=SeqID_31522
MEGSGPHSRGPICTCGGLGPYPEARSVYTGRLGAQAGESALKRDSPCVQQLRFRILSQSLRPFAFELSVPLCIHALPLYTRAAADAMTSLGHSEHFQSEGALNLVRHLLEWSAPLHVGRIRAGATPLGNLAAEEFVLFVSYVSCGLALPISPLRAPRGGG

SEQ ID NO: 74898 - protein, 287 aa, Zea mays
  Coding DNA Sequence Number=SeqID_31523
  Subcellular localization annotation: CTP_CleavageSite=28; ConfidenceScore=5.00e-01
MQAACNRTKGAHPFDFDAPSMGAQAHTSCNRRAGCYVQGTAPPLAPLPCLLDCGTSTATRGNPAYDPTVPARHIDHGTVDTFGRRSKRRFAFAIMTASKKAGPSEGFNSRLRALGLRARYWSEVQRPAPRKGSTAASGHSGSTPTTDQGVRLTAAKSGLRRHKKLRLARPRARTQARPRKTTNSASPDPGLGLGLGPGRRQTPPRPTQGSDSASAPEDDELRLARPRARTRPRPQPTVSVSPDLRARTRPRPRKTDPTSTSEEPPPRPTQGSDRPRHRKGHHYPTLS

SEQ ID NO: 74899 - protein, 107 aa, Zea mays
  Coding DNA Sequence Number=SeqID_31524
MVRQCGAAHVVQWDTHLEPGTRWILRCDRSKVVVEIATLDVLPALTRPLQRDSGILARAPTVEFCPQVIRPLQRDWSVLSRTPAVELRPQVLSRCCPHRGWFVFRAS

SEQ ID NO: 74900 - protein, 817 aa, Zea mays
  Coding DNA Sequence Number=SeqID_31525
  Gene Ontology: Cellular component=integral to membrane; Biological process=response to tellurium ion
  Homolog annotation: Hit_ID=Q8L4G8; Match level="QueryCoverage=74%, HitCoverage=96%, E-value=0.0, Identity=69%"; Hit description=C4 -dicarboxylate transporter-like protein
  Pfam annotation: Domain name=C4dic_mal_tran; Domain location=282-548; Score=309.7; E_value=5.6e-90; Accession=PF03595.8; Description=C4 -dicarboxylate transportermalic acid transport protein
MAEANRRTTPRPRAVPPLLAEVEVSNLPGFDVTPTPSPHGQDATTPSPRPPTKPSSRPGVPPLDRVPCRSEVVFPPLDSPFQAPGYRSVQPVSISLPASPIGFGFGVPVIPAPANAAAADSDDDGLRRQALQANAAAGDPQQAPAPTPPPARENGGGGVRFMHQPDKLVFRSQPIPGGQPQRAGSRAARACRAISRDRRYDTFKTFSGKLERQLTHLAGAPEVQEVRGDDAVDAATSRTTSMPKVDRFFAALEGPELDKLKTSEELVLPSDKTWPFLLRFPVSAFGICLGVSSQAILWKTIASSSPTTFLHVSHKVNLVLWCISVLLMCAITAVYALKLAFFFEAVRREYYHPIRVNFFFAPWIACLFLAIGVPPSVATEPLPRWLWYALMAPVLFMELKIYGQWMSGGQRRLSKVANPSNHLSVVGNFVGALLGANMGLREGPVFFFSVGLAHYSVLFVTLYQRLPTNETLPKELHPVFFLFVAAPSVASMAWAKITGEFGYGPRVAYFIAMFLYASLAVRINFFRGFRFSLAWWAYTFPMTGAAIASIRYSTEVDNTFTKALCVALSVIAVLTVTALFVTTLVHAFVLRKLFPNDICIAITDHKMKPIMELHESHGEDSSTNSNDIETGAGGKQLQLEDAVFGILGKTALNCALASATAYYQQASDSTRPLHVDGPGAATWPEKMIYSKVSKVSPDPYGKVSDPCIYRSGLRVRSRTPTGANRTPGMGSGPLHVEFGPLTAGSRDSRTENAQALIKVRRGSGADTCPDLIVYTSAPRPGGASMLPRGMVHVMRCTASAFIEPCPFHWQAMCRLRI

SEQ ID NO: 74901 - protein, 344 aa, Zea mays
  Coding DNA Sequence Number=SeqID_31526
MTKILEAEVEAEAAARLAFPHHQARGNSPYVRPQQSRAESSPTRSKALPCGAGAGSRMSCRPAPSRRSQTAARGARNRPAVTSDPPLLPRPTGKRGGQPCRRHATAPSGRASPTPDTPAWRPRPTRRATGAPDAACKQLYRLCHHGASSIAELIPRLETTQRTTQQCQPDAAANAAKSGPAVMTVAGAREQRSRRQPSSRPIRGQQENPLSRREDNAPVIRSSNGSRTRNGCPANYSPRRINSAAGQAALLAGAAGDASPSPKQPRQKKGPGKGDTPKGILPREGTRLRASLLIRGSKAGPPKGSTVASDRVGPTPTTGQRFEGGPPKGSTAASGYSGSAPITD

SEQ ID NO: 74902 - protein, 655 aa, Zea mays
  Coding DNA Sequence Number=SeqID_31527
  Gene Ontology: Mol. function=hydrolase activity, acting on acid anhydrides, in phosphorus-containing anhydrides; Cellular component =nucleus; Biological process=nucleobase, nucleoside, nucleotide and nucleic acid metabolic process
  Homolog annotation: Hit_ID=A7P7B3; Match level="QueryCoverage=97%, HitCoverage=87%, E-value=1e-121, Identity=39%"; Hit description =Chromosome chr9 scaffold_7, whole genome shotgun sequence
  Pfam annotation: Domain name=DEAD_2; Domain location=149-335; Score =229.4; E_value=8e-66; Accession=PF06733.6; Description=DEAD_2
  Pfam annotation: Domain name=TCP; Domain location=12-174; Score= -64.5; E_value=0.056; Accession=PF03634.4; Description=TCP family transcription factor
  Pfam module annotation: Pfam domain module=DEAD_2::TCP; Domain location=149-335::12-174
PGALALLESPTGTGKTLSIICSALQWLLDHREAAVVAATALAHPSGASGSGGDDDEPDWLRDFKPAAAVKESTKKKAKPPAMRKTLVSRKPDGFGEEDGGDDEGEFLLEEYESDSEDVARRGVGKRAHCGSSSSSSSEDDDEMTPKVFFTSRTHSQLSQFVGELKRTEFAGRIRTVCLGSRKNLCINKDVLKMGSGNRINERCLELQKNKKSTKIKLEDDKRKVRPAKRSCGCPMLRSRSLLKEFSSEVSNQGALDIEDLAQIGKKIGTCPYYGSRDMVRSADLVVLPYQSLLLKSARESLGLNLKNSVVIIDEAHNLADSLSNMYNSKITSSQALVDFLRSLLNSNDDGRIIVAKQKLGGQPDEAYLKFVMLCAEKIFSEDAYAVILAGGTLQPIEETRLRLCPSLPPTDIKFFTCNHIVPPESILPIAVTRGPSGKAFDFSYNSRSSPSMIEELGRFICNIITVVPEGVVMFFSSYDYERRVYDAWMTTGTISRISKKKHVFREPRNSADVEAVLNKYKEAIESCSNFSQDTGVNGALLLAVVGGKISEGINFSNGMGRCVIMVGLPYPSPSDVELIETIKHIESISSSFSVGDDKALSRKYDDECELQPGYDILRKCTRGGREYYENLCMKAVNQSIGKLLLLSICHAYSTV

SEQ ID NO: 74903 - protein, 921 aa, Zea mays
  Coding DNA Sequence Number=SeqID_31528
  Gene Ontology: Mol. function=phosphoprotein phosphatase activity; Cellular component=protein serine/threonine phosphatase complex; Biological process=protein amino acid dephosphorylation
  Homolog annotation: Hit_ID=Q53Q11; Match level="QueryCoverage=78%, HitCoverage=77%, E-value=3e-83, Identity=54%"; Hit description =Avr9/Cf-9 rapidly elicited protein 284
  Pfam annotation: Domain name=PP2C; Domain location=196-444; Score =235.9; E_value=8.8e-68; Accession=PF00481.12; Description=Protein phosphatase 2C
  Pfam annotation: Domain name=PP2C; Domain location=657-913; Score =226.3; E_value=7.1e-65; Accession=PF00481.12; Description=Protein phosphatase 2C
  Pfam annotation: Domain name=SpoIIE; Domain location=696-921; Score= -32.6; E_value=0.054; Accession=PF07228.3; Description=Stage II sporulation protein E (SpoII
  Pfam module annotation: Pfam domain module=PP2C::PP2C::SpoIIE; Domain location=196-444::657-913::696-921
  Subcellular localization annotation: CTP_CleavageSite=32; ConfidenceScore=5.39e-01
QSSSRASSSFVQLPRPAGDPRRDMLLHTVRFLCSVVAAFARLVRELRKASDVMASACSLSPVAVLTAPAMAAAPSPIGLIASTPLPKRKKMLAHQVAIPEDLQLVAPPPPPPPVPALPLADAVVSDCISGSGSGSGIGMVVEQQQARSLAKKAAWAARRRPSTLVIPVADDAGEVAAGWAAAAAPVKEADVEVVGDGFWLASRAGPRHAMEDAYAVLTDKNHADSQLAFYGVFDGHGGRAAVDFVSERLSKNVVSAVLAAAGTQTSEDDGVSAAIRAAYLATDSELLTQHQGSSGGACAATALVKGGDLYVAHLGDCRAVLSRGGVATALTADHTCAREEERERIEQEGGYVSRSGSGVWRVQGSLAVSRAFGDGALKRWVVAEPAVTRLPLAAGCDFLVIASDGLWDKVSNQEAVDAVSRSRAASSCRDLVDMARRRGSRDDVTVMVVDLQSELRKVLIRASAFSPFIASLPTSAAASSPPAGVISAMTLALRMRKTPAAASDVVSIHEQLLLVVAPPAAVAGADSSNDVVGSCGHDVAEPEQQAESKKKKKKTAWAARRRPSRLVIPVADVDAGEVAAGWGAAAAAPAKEADVEVEGEGFRLASRAGPRHAMEDAYAVVTDKHDGTSDLLVRAEGKFRSTKDIRKQIGFVFLSDLKSGMYGTSDLNSELYGSRFVVPENFHISLLAFYGVFDGHGGRTAVDFVSERLGRNVVSAVLAAAGTTEMHGGAWSSSAETKDVVSAAIRAAYLDTDNQLLAQHQGESGGACATTAVVKGGHLYVAHVGDCRAVLSRNGTADALTADHTCAREDERARIERLGGYVRCGGSGVWRVQGSLAVSRAFGDGALKRWVVAEPAVATVALAADCEFLVIASDGLWDKVSNQEAVDAVSRSRATACRELVDMARRRGSRDDVTVMVVDLE

SEQ ID NO: 74904 - protein, 65 aa, Zea mays
  Coding DNA Sequence Number=SeqID_31529
MVRVKSQSMRGDISKDVLLSKSCMGMTLPFDAAPLIPVNIETDVAQLLAERPAFTNILKEQLAGA

SEQ ID NO: 74905 - protein, 53 aa, Zea mays
  Coding DNA Sequence Number=SeqID_31530
MGIGCPRDKIGIRIKVWYRSLEEMVAGITWPTTLPPGWTVEWEPASAEEEHEE

SEQ ID NO: 74906 - protein, 49 aa, Zea mays
  Coding DNA Sequence Number=SeqID_31531
MGTNGHLDLDTGGKSIDQKVHKFIYNYSKSTVRNTVDYSGQEKLFWKNT

SEQ ID NO: 74907 - protein, 63 aa, Zea mays
  Coding DNA Sequence Number=SeqID_31532
MNVCELTLAVSHPPQVKNRYLRTRIRKGEAQKIRRLAQRRSCEAGKLRHVRRKGNRLKDEKAI

SEQ ID NO: 74908 - protein, 81 aa, Zea mays
  Coding DNA Sequence Number=SeqID_31533
  Subcellular localization annotation: CTP_CleavageSite=60; ConfidenceScore=5.71e-01
MATTLSLSSPLFLGAPARARDVVPYGVTSASVSLMTLNMPGKGYTSRVRCREQQRRTTIVSMVGQQTSQCSLHFSVPPLQF

SEQ ID NO: 74909 - protein, 148 aa, Zea mays
  Coding DNA Sequence Number=SeqID_31534
MAQQQREGLRGGGQWPVWGGGGGQAPRALPKATCHQRLPKSPLGGYTILHYTTLQEQVRLRPHCLKHSTKPRKDSATLQRKLDELYIGNGFFAEYFYRALDKDFIECHLILGKGKSPPRLLVTATKPVPSALRVTLGKELAFAECPLY

SEQ ID NO: 74910 - protein, 338 aa, Zea mays
  Coding DNA Sequence Number=SeqID_31535
  Homolog annotation: Hit_ID=A2Y5A8; Match level="QueryCoverage=99%, HitCoverage=90%, E-value=3e-70, Identity=50%"; Hit description =Putative uncharacterized protein
MSTECSDLGDEFWLPEEFLDDDFFSEEEKAAVAARSESDEEDSLAGLSRRLAGLLGDDGERKPPTAKAEVAVIGSPQSTLCGLPKSGQESPNGGASKGTSPPSSPPLEQKPADPWDVLYEAAGQVARIRAASSVPVQVPANAYAFSKPSPPPPPPPQIAPPSAKVPAGAGGHYHPLAHLVSQRQMQAAQFHLLKQHQLLKLQRQRHLAAWSARQSACAKPVGCGGGDAPLGLNPAAWPPLQKPPPPPPPQQHQAPAHPASGMRAVFLTPPGAKRERNGTGVFLPRPAGAPAAEPKRKTAGACSTVLVPARVVQALNLRLEDLGAQPRYYPGGFVLDHG

SEQ ID NO: 74911 - protein, 267 aa, Zea mays
  Coding DNA Sequence Number=SeqID_31536
  Gene Ontology: Mol. function=phosphotransferase activity, alcohol group as acceptor; Cellular component=mitochondrion; Biological process=metabolic process
  Homolog annotation: Hit_ID=Q9SI32; Match level="QueryCoverage=61%, HitCoverage=36%, E-value=1e-49, Identity=60%"; Hit description =Expressed protein
  Pfam annotation: Domain name=Scramblase; Domain location=58-254; Score=40.2; E_value=1.7e-14; Accession=PF03803.6; Description =Scramblase
  Subcellular localization annotation: CTP_CleavageSite=11; ConfidenceScore=5.09e-01
MASGTPPAPSRSAAAPSARLRLACLVPALCTHNSIAPLRFSEFLILVRGVQYHQTTVVPGESILKTEAEWLNSIKADLVVSDVVPVACRAAADAGIRSVCVTNFSSIYAEVDGKEIGIAHMRWHLWRRIYDLYLGNRQFAVVENPGFWNWTFSLVDEDDKLLAQIDRNWRGTGFELFTDAGQYAIRFGDDVQSDKFAHLPFIISGYVGAHFSQLVNVSQKLQTKELHVVRQLTLPERAVDLALAISLDSDYFSRRGGWGLPFLIATE

SEQ ID NO: 74912 - protein, 259 aa, Zea mays
  Coding DNA Sequence Number=SeqID_31537
  Homolog annotation: Hit_ID=A2XFR6; Match level="QueryCoverage=67%, HitCoverage=49%, E-value=4e-10, Identity=29%"; Hit description =Putative uncharacterized protein
MPPTPSQGTPTAGGDPDGDGDDDDAGGSSSHDTERSEEPEPEGWIARPITRDAARGCHFHDALDTLLHWAFDRHTWSIEYRCVVYQHHRGLYPDQWEATCLVRRLDDDLRGAEAFSEHHSITERETVEAVMQDVAQRALSQYCSLFSGVANGLDLKYYPCRSIGRARGVIVSPVGEGNPRLSSMVNLAAVLNTELDHALDKLGKVWAEVAELRAECAARHYLNGGSPTPVGIQHPYRSPPRGRFDYGTPDCRTRIDLDP

SEQ ID NO: 74913 - protein, 41 aa, Zea mays
  Coding DNA Sequence Number=SeqID_31538
MGKSPATPAPAPGVGAPAPRAGDDAVSPGDAPPVEKAKRGS

SEQ ID NO: 74914 - protein, 118 aa, Zea mays
  Coding DNA Sequence Number=SeqID_31539
MEARRASRYRVHRRKSRRPRNPKPRVEKRICKVKVDRVEKSYVANYVRLSVREPLERSREEVKEFGSKEFAVSHAETFEHEWILSTNTKVFVMLEDISCSFSSTVTGCGVQEVQSQEA

SEQ ID NO: 74915 - protein, 551 aa, Zea mays
  Coding DNA Sequence Number=SeqID_31540
  Gene Ontology: Mol. function=cysteine-type peptidase activity; Biological process=proteolysis
  Homolog annotation: Hit_ID=A3C831; Match level="QueryCoverage=43%, HitCoverage=52%, E-value=2e-21, Identity=30%"; Hit description =Putative uncharacterized protein
MQHPTAQDHITYSRRSDRSIQVANTQKAEAEKKKAEIEMKNAEAEEAEKRKAEAEQADKKKAEEAENKRKAEAEVAEIKRKAAAEEAEKKKEEEAEDKRKAEAEEAEIKRKAEAEEAEIKRKAEAEEAEIKRKAEAEEAEIKRKAAAEEAVKKKADAEKKVEAEEKRIQVAIQKQLKDNIKALKKPVPAAKVKKMFQLQMSKEYAEQRQQYEDRLNMLHQEAKAEIDSLEKSIDGQAGPSSSFDDIQFPAESDDDINNLTQPIRLSQDEVSVGQADFSEFQRMIFKRLGDRVLKKPREYISPFKIPRNRPEIPLAKAVALRRKIASDPELKRRILLEFGLLVGLTGEEILTSFSNDTLGESGIIDFFVHCMRHDDIVHKVDSCGYRVFLTTGFYVFVPIKDGAHYFVYCFNFIHKRIDVLDSNDYFLNCSNQEERHKAVFAKIPIIDAAFQKVSNLKLPRVSKWRRPFIDVPKQAGQSDCLFFVWKYMEYYDGDKMTKEINPFKGPIYRCELLHYEIFHPLNQAEIPGSLDKFRIGGRPLPIEWDSSQSNN

SEQ ID NO: 74916 - protein, 303 aa, Zea mays
  Coding DNA Sequence Number=SeqID_31541
  Homolog annotation: Hit_ID=Q6ATD2; Match level="QueryCoverage=57%, HitCoverage=84%, E-value=5e-65, Identity=75%"; Hit description =Putative uncharacterized protein OSJNBa0018H09.14
MAEDSGAILRHISSVKDMVDKVNEEIEQNIQKTREIESEIVQHSETEKHYLNKESELTKEVSVTEFELNGLIQVAASESDLLKVAEGNLEFQKVAHDVIRKRVSDKMEKFINESMGFQANMLKSSNEDLVLLLNEKSSLEDESAKLKVKINSIHSSSKEYIAEILEEVNTENSDQRAVSKQGWAPSKATSFLCFQIDQAPKVTSDFTPFLIGFVRCLGALHHPAKDFSDRLGVLIANPKPEKIMYQKFLANTKLLLVTHRKKYEDSYMSSEEGRYWYASMVKLALARSFSHGFMELSQYSEKW

SEQ ID NO: 74917 - protein, 59 aa, Zea mays
  Coding DNA Sequence Number=SeqID_31542
  Subcellular localization annotation: CTP_CleavageSite=34; ConfidenceScore=5.02e-01
MAQRLSGQPGTFWASLGRAWTHVLARDPNRYGPSQQRAGPGTTLFVPCLTGLGPGTVQS

SEQ ID NO: 74918 - protein, 129 aa, Zea mays
  Coding DNA Sequence Number=SeqID_31543
MVRGLSPYSRGVIPSWRSTGCPRTPPRFAASGAKDREEDKSQRRSSGVCYGVRAEEEISGQVVRTDSEIRAIQAAGIAAVLRTKRAIEKEELTMRPHMAAEEKTDHWGPRAEKNSKARAAGMLGCVGKN

SEQ ID NO: 74919 - protein, 130 aa, Zea mays
  Coding DNA Sequence Number=SeqID_31544
  Homolog annotation: Hit_ID=A5AJ46; Match level="QueryCoverage=55%, HitCoverage=34%, E-value=7e-20, Identity=58%"; Hit description =Putative uncharacterized protein
  Pfam annotation: Domain name=DUF567; Domain location=5-119; Score =31.6; E_value=5.3e-07; Accession=PF04525.3; Description=Protein of unknown function (DUF567)
MDKSVPVVSKIFCSGAPTMLMIRRRPAVVNGGGFVVTDLSHSIVFIVDGCGTLGSKGELMVKDGEGEPILSISKKIKGIHKLIQQVMMGKKGLMGGKDFYHVEVQSGYDQAFIIGVMAILDSIHGESTRC

SEQ ID NO: 74920 - protein, 290 aa, Zea mays
  Coding DNA Sequence Number=SeqID_31545
  Subcellular localization annotation: CTP_CleavageSite=37; ConfidenceScore=5.26e-01
MGGTGASSRRRWARRSFRTAGGGGGRGTGGVVRRTVAASTTMAPRGTQGFAHVDKQQRHVHGVLSDFRCNSGSTDHLSLYVEEFKHKSSHRSSVRCLPSAQGNVTEISRMQPVARKVQVDMTFNDKGLCRASRTVSGMRIQPKYYISSPNNNLKNSPTVKSYSGMSDFNYQLVRSAKSDSIDDLQVSSSSDTSDSFNLSSLGVIDGDEWNTTFKRVYYPHAACLDSISVIYAKEIGQISNSDLSLAHLHQGRLLQRQCSQAMRNPYNWLKTSLKNLKMMRKGTSLTCWIY

SEQ ID NO: 74921 - protein, 148 aa, Zea mays
  Coding DNA Sequence Number=SeqID_31546
  Gene Ontology: Mol. function=actin binding; Cellular component =intracellular; Biological process=response to stress
  Homolog annotation: Hit_ID=Q41764; Match level="QueryCoverage=93%, HitCoverage=99%, E-value=3e-73, Identity=100%"; Hit description =Actin-depolymerizing factor 3
  Pfam annotation: Domain name=Cofilin_ADF; Domain location=21-148; Score=180.5; E_value=4.4e-51; Accession=PF00241.11; Description =Cofilintropomyosin-type actin-binding pr
MAEHQLLPNQANARSGVAVNDECMLKFGELQSKRLHRFITFKMDDKFKEIVVDQVGDRATSYDDFTNSLPENDCRYAIYDFDFVTAEDVQKSRIFYILWSPSSAKVKSKMLYASSNQKFKSGLNGIQVELQATDASEISLDEIKDRAR

SEQ ID NO: 74922 - protein, 145 aa, Zea mays
  Coding DNA Sequence Number=SeqID_31547
  Homolog annotation: Hit_ID=A9LRT1; Match level="QueryCoverage=61%, HitCoverage=60%, E-value=7e-19, Identity=56%"; Hit description=C2H2 zinc finger protein
MAQQARPDFWPGFTGPGPGRTARLAISKWKCGMRWIRQNGKRAADYVRPFSVRHVAALGGHRTSHLRDRHGLALGMHAAAPAKEEDTATKPAAAKPAPAPASHLCHVCGLGFDMGQALGGHMRRHREEAAAAAAQAPPVLLQLFV

SEQ ID NO: 74923 - protein, 509 aa, Zea mays
  Coding DNA Sequence Number=SeqID_31548
  Gene Ontology: Mol. function=catalytic activity; Cellular component =nucleus; Biological process=metabolic process
  Homolog annotation: Hit_ID=A7PX26; Match level="QueryCoverage=98%, HitCoverage=100%, E-value=0.0, Identity=65%"; Hit description =Chromosome chr12 scaffold_36, whole genome shotgun sequence
  Pfam annotation: Domain name=ThiF; Domain location=30-146; Score= -32.3; E_value=0.001; Accession=PF00899.12; Description=ThiF family
MAATGVVAEPKTKYDRQLRIWGDQGQAALEKASICLLNCGPTGTEALKNLVLGGIGMDEGCLGQPRAKSICSFLQELNDAVKAKFVEESPAHLIDTNPSFFSQFTVVIATQLPESFLLKLDYICRKADIVLVAARSYGLTGLVRVSVKEHCVIESKPDHFLDDLRLHNPWTELKQFAKSIDINDKDPVVHKNTPYIVILVRLAEKWADAHDGNLPSTRQEKKEFKDLIRAHMLNVDEENYKEAVDSSYKVSVTPGINNEIRQIIDDDSAEVNSSSSDFWILVAALKEFIAKEGNGELPLEGTIPDMTSLTEYYVSLQKIYQAKAEFDCLALEHHVKEILKRIGRDPDSISRAYIKTFCKNSRKLRVSRYRSFEEEFSSPFVPEIQRYFTDEDYSYATNFYILLRAVDRLAANYSRLPGIFDSEIDEDIPRLKTVAASVASEMGLNGASLSEDLITEMCRFGGAEIHPVAAFVGGVASQEVIKLVTKQFVPLPGTFIFNGIDLKSQVLML

SEQ ID NO: 74924 - protein, 150 aa, Zea mays
  Coding DNA Sequence Number=SeqID_31549
  Gene Ontology: Mol. function=nucleic acid binding; Cellular component= intracellular; Biological process=regulation of transcription
  Homolog annotation: Hit_ID=A2XNF3; Match level="QueryCoverage=86%, HitCoverage=85%, E-value=8e-31, Identity=51%"; Hit description =Putative uncharacterized protein
  Pfam annotation: Domain name=zf-C2H2; Domain location=46-68; Score =16.6; E_value=0.096; Accession=PF00096.17; Description=Zinc finger, C2H2 type
  Pfam annotation: Domain name=zf-C2H2; Domain location=81-103; Score =12.0; E_value=0.57; Accession=PF00096.17; Description=Zinc finger, C2H2 type
  Pfam module annotation: Pfam domain module=zf-C2H2::zf-C2H2; Domain location=46-68::81-103
MKRLTQDEDQEQEQEPGVILSVAQGVTLLLARSGGGGEPRASPRVFECKTCSRRFPSFQALGGHRASHKRPRAAPAKGRPHGCGVCGVEFALGQALGGHMRRHHRAVAEECEARDGAAASAHGMDVDDAEAKPEEEATGLLRFDLNIAPS

SEQ ID NO: 74925 - protein, 196 aa, Zea mays
  Coding DNA Sequence Number=SeqID_31550
MARAGISRVDDVEAAKSAGSTRQKITSSRVKTLPKNLIRPLPVQDLEDEGFRRPALLIADARLRPLAFATSVWEQRKGKRKEKEQLVLPCMPAKAKARRETCSAWLCLILPSDAISHPIRSQPTRWFMGLYNPEFKDGYYAEFIRILITDPAANRASGLVVIARDSRLFSTVTAELVRRLLQQRDGADRMAPPADG

SEQ ID NO: 74926 - protein, 230 aa, Zea mays
  Coding DNA Sequence Number=SeqID_31551
  Gene Ontology: Mol. function=hydrolase activity
  Homolog annotation: Hit_ID=Q6ZIF9; Match level="QueryCoverage=38%, HitCoverage=32%, E-value=2e-26, Identity=65%"; Hit description=Metal- dependent hydrolase-like protein
MSPMGAPSSQSGHYLSSLLRPQAVEVEVVDWDRAARRRESKAVRGCAEMPELDEEQESTGFPAVQTESSAPYTTSSWTPPRSSLSSSRPCPSPRRRRATARTRATPTRAPARWNAAGAGVGSGPELRRLEERRPGRIIDITHAYVPDLLAFAPGAVTGPLVHLKESMANGSEYNLSELRLECHMGTHVDAPGHMNQGHFAAGLDVDTLDLDVLNGELHHLNNPRSLASML

SEQ ID NO: 74927 - protein, 982 aa, Zea mays
  Coding DNA Sequence Number=SeqID_31552
  Gene Ontology: Mol. function=nucleic acid binding; Cellular component= Golgi apparatus; Biological process=protein amino acid phosphorylation
  Homolog annotation: Hit_ID=A2Y5F5; Match level="QueryCoverage=10%, HitCoverage=21%, E-value=7e-49, Identity=89%"; Hit description =Putative uncharacterized protein
  Pfam annotation: Domain name=DUF246; Domain location=229-471; Score= -37.7; E_value=2e-12; Accession=PF03138.5; Description=Plant protein family
  Pfam annotation: Domain name=Mov34; Domain location=656-783; Score =16.5; E_value=0.00051; Accession=PF01398.12; Description=Mov34MPNPAD- 1 family
  Pfam annotation: Domain name=SNF2_N; Domain location=392-880; Score= -112.5; E_value=0.025; Accession=PF00176.14; Description=SNF2 family N-terminal domain
  Pfam module annotation: Pfam domain module=DUF246::Mov34::SNF2_N; Domain location=229-471::656-783::392-880
  Subcellular localization annotation: CTP_CleavageSite=32; ConfidenceScore=5.08e-01
MKINSDQTDSKALPWVTWRFPLDDTSRFWSTAAASARGRGERQQASPDEASTSLGSLCSSCPAVDQVGTLPPPPTTPRVASSAGESTVGPSPLARSPTGASNPNWLHLTTGGANDLSFSFPHPELLGECETSGRRTGKASRRHGWVAQRVVPQDLPPPGSPVPRLFSPRKWRVLTSDDELWRKLFNDRWGADAAAFYTPEGSKSWKDVFAMQDRCDRYGLIIREGKDYYLIYQGEIQRQPEICHDLVPDQEKLSSTESQLIYWDSKVSEADMDAMWKHPDVYKEWIKSGERRGNVRFSHDAKNRPYLSRVEVKDMIAFSCCVYDGGDEEKEMDAAREIGWRRKFTKRGRVIRPGIIRMNGKCPLTPLEVGLMLRGMGFSNKTAIFLASGKIYKAEKNMASLLEMFPLLQTKETLASEEELAPFKASFAPSSATALAFPHHRPPPPHRRRSHCGGLVGRRAPALGASSSSSVSFSPPSPSFSSSPSSSPPSRRFHGPDLNAWRLPATSARGAQTVLAPLMLMSQRLTTTWPRRYWRWGALVLSTADPLTKARRTHAAFSRWAVGLPVGQATTPYHPKRKDCLVEHAPYARPSSPAEEPEKKTVKPASALASWLGLGSTEADRLTIATWSAPPSSPRSCETWVYPVPLARSPPKPPSPGNLRLTLSSSASSTARKYTPERRQKFIRGQRSNHEKIHTATMKILMYQLCNSVAFVHDPKVLHRELKLHILLKDHKTMVLKIANLSLSHAIRPEMVVGWYHSHPGFGCWLSGVDINTQQELWSLLEFMMPDIFATGDVDLKKLLNAEDRELISQIKSILGPFILRRLKSNVKFVVMGTEQSEAYKNAINEYRAACQARSAKSSDGISNNIAGLIPKRQISNYFTQFRKLLLSYGDVGTKGALKDEHVFASAKCQHLLAGMVGKNSMKVARDLAMQEGTLVDGIKEVVLSPAHALSLIAAGEASPCPRSRPPVCRHSASRRSAGVPR

SEQ ID NO: 74928 - protein, 240 aa, Zea mays
  Coding DNA Sequence Number=SeqID_31553
MVTTSFWVGKSKPGCDLGPTLSFKDVHHPRWGGGHAEPALYLPRGSAGHPFPRRSGVEALAGPTGGADLDNVGLIDGGRRHLQRVGVVGRAPGGPSCRRAAAVPGRCPTRLGGFEWGSAGGLASPAIGAEAEAAREVLVADGIAATIRAPGHCAGVLVLAPRASAWARARLQQRPPTVAVVRTGGGEPLVSLLSLRRPSPWSGVESLSSIGLVVWGSSSLVKETPRSLFDEPRPGVATSV

SEQ ID NO: 74929 - protein, 283 aa, Zea mays
  Coding DNA Sequence Number=SeqID_31554
MARLRHTARKSVIPFLPSRLAERPLHRTVSGQSSHLERLHHRLREEQERRHQHGEQQGSSSPPQREVESVRPRSSVAQLEAPPAPPRDVPAVGGATGGDPDDDDSDHIYQHSRGRYPDRWEATCLVRRPEDDLRGAEAVSEHYSISERDTAEAAMQDAARRALSLYCSLFGGMADGLNLRYYPRRPTGSTESVVVSPVGEGNPRLSSTVNLVAVLNTELDHSLNELSRARTEIAGLRAELAERHHQESGSPAPVGTQHPYRSPPRGHHTYGSPVCKTRIDLDP

SEQ ID NO: 74930 - protein, 138 aa, Zea mays
  Coding DNA Sequence Number=SeqID_31555
MTLEGKANEIVTVHTMNRCLVDGGHGGTRRPHGGAPSFAPSFQGVGVERIGARRSGFIPRAESEQVGASSKICGENPGRGFGFRRGDLEYGRRGTQQRKKDPANGAHRSATRVRARARDDQILAEGARTAGKERNAGM

SEQ ID NO: 74931 - protein, 341 aa, Zea mays
  Coding DNA Sequence Number=SeqID_31556
MSRLRLGDGEACRLRDGCYGMRLTGARRVMESERERRWARDTAGCGACDASSTEARASALGAAAAWASARIGREEWALGEKEENWGACSSNRDHVGRLTRTSRRGRPEREDGWRRPPGTRDGEWIVGAAGSAPGGRARGVAEPGGAGRGAYGRAAQRASAATAQARRRLGKGAAAGLRWAARARVGGAAGPWSAEWAAGAMGCQVEQAGAQGWPGEGAGPRGWGAEVLHRSSFPSLLREGVRTSKNTAAAPAMYDAMRDPPLHLDPAAEGSVGGSTEAIHAKASGTQRLVTPAVSQPGVSKAHLLRMNSERPSPPITEGRSGPLPTRRWGPNSACPPPQHG

SEQ ID NO: 74932 - protein, 72 aa, Zea mays
  Coding DNA Sequence Number=SeqID_31557
MGLGVAMRLMVLGFDSGNGFWPGKPSCVSEPPRWWLQVLRHLPQGGGVCRLTGLVRVAKLRVRTPLGRGSRY

SEQ ID NO: 74933 - protein, 66 aa, Zea mays
  Coding DNA Sequence Number=SeqID_31558
MVPRSGDPLLVKFPAAHQDSVDPRGGLTLGEPLDSVVLAAQVPSALACSTGCPVDLCSHGAMSLTL

SEQ ID NO: 74934 - protein, 148 aa, Zea mays
  Coding DNA Sequence Number=SeqID_31559
MEKFYAFGFSYAFQHGLTWVDLSPFCRDILGVSYGWCADYGIKYIGWQGLRIAARYCINMSSLADVSACVTPCLIRVDGPDGDVVTGEFRHPFGYFGGRLRIPEQLSETPIRSDSYFVCLKVVSQLAQSHDDHPESSFVHVGECFYEV

SEQ ID NO: 74935 - protein, 317 aa, Zea mays
  Coding DNA Sequence Number=SeqID_31560
MGVGALPPSLGFKDFHHAARPVVIHKDDYQPCGGEKRAGLRPPPALSFKDVHHPRWGGRRAELGSCPPHGLATRFFLQHSREKGVHQPCGGGELRLRGAGRLQAPSAAACLAPRPGWLWCRLRRCLLLLGRGVAVRPPHGRRSRRAQVGHIHDFSRVAGRTGGSYKTSYAAGAASSFLDGLVLTPAARTGARTSLRALGRQPFAGTTLVCRWPLSSVQRWSPPLVRLPTAEVVASAGETVSATCRWTSGSFGFNGLVVAPRRKTGARTFSQWRTRGGDRHCWRVVGVEVAVAVGADVVASAGEPLGASYPAALLVWR

SEQ ID NO: 74936 - protein, 301 aa, Zea mays
  Coding DNA Sequence Number=SeqID_31561
  Homolog annotation: Hit_ID=A2XFR6; Match level="QueryCoverage=48%, HitCoverage=41%, E-value=6e-28, Identity=45%"; Hit description =Putative uncharacterized protein
MKMVRTIQTTRINTNYIPPPRQVPVYPVVVEEIPVDLPRIRVENRVILDDSPEEFLPTPTPLAESLAFVAGSSASASPALAVQAPPPGGDDPDDSGDNDEDDEEEEEDDEENINDEANKEQQDHYVGLWPVTEHYTSMFETWHFPNLLVMDAGDRGFRTLSAHESLKPLSTYAASVNDAVRRTLWSLSHTYWEQLHNTKYMHLPLRIRGESQTSIVLGGANDDRLNTVAGVVAGLNTDLDSATLDLSRVHLELEDAHARIATLEAQLDGRNPPEVQVPTMTLSPPRKRIRYGEPGSITRLL

SEQ ID NO: 74937 - protein, 106 aa, Zea mays
  Coding DNA Sequence Number=SeqID_31562
  Subcellular localization annotation: CTP_CleavageSite=59; ConfidenceScore=5.07e-01
MAGTQERALTAPAHATSSDRLDRSPNNASVPEPLPIRSLSPTSLPFCTPHTFCRRLDVDCNLADGEYVLILEQGAHQEEAQELATEAATEDLPAAPAIEGKPQFYA

SEQ ID NO: 74938 - protein, 122 aa, Zea mays
  Coding DNA Sequence Number=SeqID_31563
MVGWRGDLAKVASLRRLGLGRAEACLGILVNLFGVLSFVVNGSSHNSVIQIVFLAGFTLMLSFAQGEHAKRETVTGEKPEASGKKNGERTPLKEVDDKNKEHKEESAGSIKSHRKGDRKKRK

SEQ ID NO: 74939 - protein, 111 aa, Zea mays
  Coding DNA Sequence Number=SeqID_31564
MVGWRGDLAKVASLRRLGLGRAEAGLVVPSCELAVARMHSRVPSSRAGMLTLSTVWPEPGLREQPPSLRTEREDGQGQTRLFTYAPASPFRKEEGGKRHVALGGCRTWCLQ

SEQ ID NO: 74940 - protein, 73 aa, Zea mays
  Coding DNA Sequence Number=SeqID_31565
MAFSPSLPNSGDPRATLARASLNSGDPTAAERNNAARSHHEQSEVPECVVGDLPEQQPGEGKCPLTYYVLHTL

SEQ ID NO: 74941 - protein, 399 aa, Zea mays
  Coding DNA Sequence Number=SeqID_31566
  Subcellular localization annotation: CTP_CleavageSite=41; ConfidenceScore=5.60e-01
MSSHSLHASRPSTFRAPGWGAPAVLPPCRRWRNATSQKLVPFSHRSASRIFIRQPGCIPSPVVTQDSDHQFQGGEKQAGLRPLPLPQLQGCSSSVLGRGVHRVGACLRAGSGPLLPSVIGGRGVRRSWRWQLPRVWLSGLGGFGAASGATSHRGSRKRFLHRRDSWSHPRTDLQLHGPGGLSSPLEWGRGRGSCRSSIYPEVIAAAVWPPRAEVVVAAAGAGGGEPPGVASPRGPSNVGGCSYLWGRNQSSVCNGTLSVGVCPLWLSGLEHARSDFAEGGVDAEGAAAPPPLTSEPAGLDLFVGNRIVCPSESYFSRKVMSEDSAIDIVEKARKIVLAEKFPSIKTCSVSGIAYPSVSYLSQKVMSEDPTFEVVKKHERYSGRKTFSEENFDAEGVPPF

SEQ ID NO: 74942 - protein, 188 aa, Zea mays
  Coding DNA Sequence Number=SeqID_31567
MEPGTVVFFGGMTKFLRLFDEGEIQRYFEERITQSCSLWLLKKVFSTEAPEILKDMLIINASLAQGTKIKEATALKALEVTALEPFSDREQKDEEHIAPLMSSLFDDDEDDSKDKDTASTTLVRKDVMSLAAEVAMSESLKVHPMPLVVTPLAIIMAEEKTGSTKIVKAEDKGRGPPFSLRGQESYRG

SEQ ID NO: 74943 - protein, 469 aa, Zea mays
  Coding DNA Sequence Number=SeqID_31568
  Gene Ontology: Mol. function=carboxyl- or carbamoyltransferase activity; Cellular component=ornithine carbamoyltransferase complex; Biological process=amino acid metabolic process
  Homolog annotation: Hit_ID=Q8SA97; Match level="QueryCoverage=24%, HitCoverage=19%, E-value=4e-19, Identity=53%"; Hit description =Ornithine carbamoyltransferase
MAPPVDVAGPRPRLGDVEAPPRLRSSLQWPWSSPGPWVGRGGDRRLKPGLSPSPWGRAKRSSTSSGAEPKSEPWVGRSGPESEPWVGRSGVRRLPGLSPSPSPGSGGAEFAVFRGLARVRALGRAERSFLWRLRPGLTACQPPSVKWHRSRSGAGGAVFLSGRVASWRRHGLGRAGDMFAAGGGPRARQRSSGPLQLYADGGYQLRIRSLEGDQPFSVAFCSGGCARAHPPSVALEASEEWFDSSEGERAIRGRLGFFTYAPVSPFRKEEGGKRHVVLGGRRTWCLRGAACPAAELMRRGEWFAGRPLRVRGPFEERNTGASSSRRERGLALLGRALGRLESRYRFRSRGGTVVAQVAVQLLARSIRRAGCMTRGPGPPRWACWKSEKCAHLARLHAAYTAAHPFARWSGQKWRVACNPLGDGTHRARRFGFFCSGPACMTRGTQPPRRRGRTLERVGEDSAPDGWGRK

SEQ ID NO: 74944 - protein, 420 aa, Zea mays
  Coding DNA Sequence Number=SeqID_31569
  Gene Ontology: Mol. function=metal ion binding; Cellular component =cytoplasm; Biological process=protein amino acid methylation
  Homolog annotation: Hit_ID=Q6L4V6; Match level="QueryCoverage=77%, HitCoverage=38%, E-value=1e-71, Identity=48%"; Hit description =Putative zinc finger protein
  Subcellular localization annotation: CTP_CleavageSite=48; ConfidenceScore=5.51e-01
MPTQKRPPPPPPPSPSPSAAPGAGSPPPSSPPLPTAEPAEKKPKLEVNGSAGAEANGNANDFGAKEGTEVEASESESEDADAAKQENNECPACRTHCASRRSLRDDPNYDALIAALYPDIDKYEEEELAFNEEENDRNKQIQASIAEAFRKQSEVIGRKSTAKATAAAFVRRSRRNIRPNGQNTYFRGRGKASSDDVALACSEDEEDGNGESCSKEASSAEESSPEKKQKRLPKWPTPRSSPARACNDEVASDEKDDVGISRENFSTSPLRAWGKNGTRSQTRHSSFSGSNGRMVKGGRMIKLVECLRNSDDNEGERDVHLCLLPLDGQTAPNLEKSYLCCGPTLSIKQLCQFVASQTSHKDEEVEMYALKPSCSKPVSTNTCGPDKARLAGEERLSDLRSSFTFPNGVLELVYAIKVAN

SEQ ID NO: 74945 - protein, 157 aa, Zea mays
  Coding DNA Sequence Number=SeqID_31570
  Gene Ontology: Mol. function=polyribonucleotide nucleotidyltransferase activity; Cellular component=cytoplasm; Biological process=mRNA catabolic process
  Homolog annotation: Hit_ID=A2YIJ3; Match level="QueryCoverage=54%, HitCoverage=11%, E-value=2e-33, Identity=75%"; Hit description =Putative uncharacterized protein
  Pfam annotation: Domain name=RNase_PH_C; Domain location=20-80; Score= 32.0; E_value=2.2e-06; Accession=PF03725.6; Description=3' exoribonuclease family, domain 2
MASVCGGCLALQDDGVPIKFPVARIAMGLVLDTQEFGGDGSPLILSDITGAEDASGDMDLKVVGITLPVMEKALLQAREGRQHILRHENSEAALLIKHRRRDGRTAKGLHICGILKYGEQPSPNVMGRGTGAQRRVTTSTGDLQRRNGLANGDFRKS

SEQ ID NO: 74946 - protein, 296 aa, Zea mays
  Coding DNA Sequence Number=SeqID_31571
  Gene Ontology: Mol. function=bile acid:sodium symporter activity; Cellular component=membrane; Biological process=sodium ion transport
  Homolog annotation: Hit_ID=A3AT44; Match level="QueryCoverage=84%, HitCoverage=74%, E-value=7e-77, Identity=62%"; Hit description =Putative uncharacterized protein
  Pfam annotation: Domain name=SBF; Domain location=39-196; Score=64.3; E_value=4.1e-16; Accession=PF01758.7; Description=Sodium Bile acid symporter family
MVRIGEALSLGFPVWVASACALALWRPPAFLWVGPTAQMLGLSFTMLGMGMTLTLDDLKTTLLMPKELAAGFILQYTVRVWLASHLRAEPASPAREMGEPSRARANVALSVLMTAASTFAAAFMTPLLTSKLAGQYVAVDPMGLFVSTSQVVLAPVLLGALLNQYCNGLVQLVSPLMPFIAVAAVAVLCGNAIAQNASAVLASGSQVVLSVGCLHASGFFFGYVLSRVLGIDTSSARTISIEVGMQNSVLGLVLANKHLGNPLTAVPCAVSSICHSVYGSILAGIWRSMPNKDKGE

SEQ ID NO: 74947 - protein, 105 aa, Zea mays
  Coding DNA Sequence Number=SeqID_31572
  Subcellular localization annotation: CTP_CleavageSite=68; ConfidenceScore=5.18e-01
MHRQQRASVTASTEKLRDALPLPLASTPSIPPPCPHLAAHRLSSRPLRFLRRCLRVRPLGRPEIRQVTAMETTEQFLGYECSYQFKHCIRSAQDRTVDYFDMVHV

SEQ ID NO: 74948 - protein, 71 aa, Zea mays
  Coding DNA Sequence Number=SeqID_31573
  Subcellular localization annotation: CTP_CleavageSite=46; ConfidenceScore=5.74e-01
MNGSRATVSSTAGTRAASSWASLKSRRGRLSGNRRGERTTAKGAVRGMRSAGGLEFQLGRAVSGPPLQLYC

SEQ ID NO: 74949 - protein, 442 aa, Zea mays
  Coding DNA Sequence Number=SeqID_31574
MAGIYSDARDCLSRRVQPPARTAARTFLSPVGEAKSSAKKRWVHKSQWGIARMKRLVGTPNPRSWKETKLTMYPGGGDGAAPPTGGIHSGRCSSVRGRSKPSPTRSSRSLAVTMEKGHGSRGEMMVTRGTGGASGRRSGRRFAFAIMTASKKGPGKGDTPKRILPREGTRLRAPLLIRGSKAGPPEEFDSRLRSRGPYTHYWSEVRRPAPRKGSTAASGYSGSAPITDQGFEGWPPKGSQPPQTPSEGRPWVRSIHNQGSGCAPELTGDTMFGAHRGQHGAFPPSSLRKGDAGAVNIPARELGTRPYTRATASSHEGTTRPAEALREALRPRRSETTPSRPRGLHPAGALGRSHRNKTQPRKAGPLATKCDESLQASANTPFEARGLLSGTIIRGTLKAPNSQLAKSGKTANSAPPDPGLGLGLSPGRRRTPLRPTQGSDSG

SEQ ID NO: 74950 - protein, 298 aa, Zea mays
  Coding DNA Sequence Number=SeqID_31575
  Gene Ontology: Mol. function=kinase activity; Cellular component =ornithine carbamoyltransferase complex; Biological process=amino acid metabolic process
  Homolog annotation: Hit_ID=Q6QP54; Match level="QueryCoverage=94%, HitCoverage=25%, E-value=4e-13, Identity=67%"; Hit description =Putative kinase
  Subcellular localization annotation: CTP_CleavageSite=28; ConfidenceScore=5.20e-01
MAPPVDVAGPRPRLGDVEAPPRSRSSLSSMAVVESGPLGRARRRPSAEARPESEPWGLSPSPRPGSGGAEFAVFRGLARVRALGRAERIEAAQAALSFYQAGQWSVEVTAGCFLAKTWPRASRRYVRRWRGASGEAEILRLYADGGYQLRIRSLEDLLMATVPIPESPLGIPSLEDGMGNVLPHGDTGWSLSRRVNVAACPQPRWVEREGEREGGRARRPETGVREVGIPRPSCSSRTQVGVMMAPPVDMAGLRPRLGDVEAPPKPRSSLSSMAEVEPKPLGRARRRPPAEARAESEP

SEQ ID NO: 74951 - protein, 75 aa, Zea mays
  Coding DNA Sequence Number=SeqID_31576
MTSALDVAGGRLMLVAAAAWRAAIELMIVETFDTRLILRRLLGRTASSNPVLNLAYNSSYDRATTKLKIHQCLWF

SEQ ID NO: 74952 - protein, 92 aa, Zea mays
  Coding DNA Sequence Number=SeqID_31577
  Homolog annotation: Hit_ID=Q2QYD3; Match level="QueryCoverage=82%, HitCoverage=24%, E-value=7e-25, Identity=71%"; Hit description =Expressed protein
SDDAKEVVHYQTISPKSLAKSVLEEGGWSNFMCSREDTQNNVDVAIVFIGSKLQSSDISKDKQVDPALADTLKKSFGMTAEKGNRLKDEKAN

SEQ ID NO: 74953 - protein, 675 aa, Zea mays
  Coding DNA Sequence Number=SeqID_31578
  Gene Ontology: Mol. function=cysteine-type peptidase activity; Biological process=proteolysis
  Homolog annotation: Hit_ID=A2X4U2; Match level="QueryCoverage=63%, HitCoverage=51%, E-value=5e-40, Identity=29%"; Hit description =Putative uncharacterized protein
  Pfam annotation: Domain name=Peptidase_C48; Domain location=149-339; Score=19.5; E_value=5.1e-06; Accession=PF02902.10; Description=Ulp1 protease family, C-terminal catalytic domain
MPPSKDEITRLCAELSKKAQKANNIWWRLSGLLGDRNRQVMYILLPAPGAVHSGNNGPDGPYIPVLPDARGVPDTQDTCQYGGLPACWDTEEHLIKSAKQCGDLTLMHGDLALIDWIKEISCEPRVEAVLIDDAFVERKWMECLFQPDAYLGDEVIDCYINLIKAQEHLKCRSGGRVHIENAFQFNFLKRDGDAETKTDELYPSKDMAQISSAERRVLLYLDHDMVFIPINIREMHWYLAVINARNMEIQIKGLQRQIDMVSQRKELKDHRWPDLRVASWPLKEIEMEYAKQTDSSSCGLFLLNYIEYWTGDELSDNFTQDDMSHFRKKLAAILLSSDINKRKGCPLYKYDKEVDAGCSSDVQILDSPTNPKKRKLPCVSEENEVLMEDGDGPITQADLERWFVHDWDKRTPIKIPTDECTNEFLLSGLSTKDMPVTKADLIDVLCDYIMTIQDDTTLEMTWVRSFNPFKIEISVKDLQNVLRVNVDMTLKCFDMAVRLLAIKESHMSKDEMIKDKKHYMDMRFWVLMPWKFNGCYALFIIDHGKKHVTFMDFTPTEDWCKHMPYKRFAEAIIMASKKYKIAYNKKRSGWAHDIFKWEHTIRSGLPLDLKGVNTSYFVLQAMVMWGSGRRMKFNRDTKILRRNFVIDLLSYEGNSCRYAIPPNIQQRLISIAKKD

SEQ ID NO: 74954 - protein, 119 aa, Zea mays
  Coding DNA Sequence Number=SeqID_31579
  Homolog annotation: Hit_ID=A3AMH7; Match level="QueryCoverage=74%, HitCoverage=11%, E-value=8e-24, Identity=66%"; Hit description =Putative uncharacterized protein
MESWELLLLHNLQFQFGNRQDALVRTHSTSNEKLEESQLQTAMGASKIKVSQGCIDLLQEFHHLIDGNIEFLVKLRDLVIDGYKKVFKIFSRNLMGIFMCFLGEAKKFPGVNYSGFCAN

SEQ ID NO: 74955 - protein, 174 aa, Zea mays
  Coding DNA Sequence Number=SeqID_31580
  Homolog annotation: Hit_ID=A2X0G7; Match level="QueryCoverage=44%, HitCoverage=24%, E-value=2e-18, Identity=64%"; Hit description =Putative uncharacterized protein
MAPGSSIVTVVPESDCGDDDGLPESIGGIRLDVDSASKPWSTSASLANVALSSLCGLNDLLECPVCTNSMRPPILQCIAVNPAMESWELAALTNFQRRFCSTLGMTNQAVNAAKEAVQRSEDLDIRRRLFPQISNRSQENSLDSDCEQFNWDDFEVLEIKSALNEVLELNQTEK

SEQ ID NO: 74956 - protein, 693 aa, Zea mays
  Coding DNA Sequence Number=SeqID_31581
  Gene Ontology: Mol. function=helicase activity; Biological process =viral genome replication
  Homolog annotation: Hit_ID=Q1EPC6; Match level="QueryCoverage=92%, HitCoverage=41%, E-value=0.0, Identity=64%"; Hit description=DNA helicase homolog, putative
  Pfam annotation: Domain name=DUF889; Domain location=441-668; Score =338.0; E_value=1.6e-98; Accession=PF05970.5; Description=Eukaryotic protein of unknown function (DUF889)
MGACGSIKAVKYLFKYIYKGHDRASVVMRDASKENGDVDEIQQYRDARWVTPPEALWRIYGFELSQNSPSVMQLQLHLPNMHMVTFHERQMVERVVNRPGADRSMITAYFEANKLYEEARGILYRDFPEWYTWQQGKVWQRRKRNTGGQVGRIVFALPSEGERFYLRLLLNHVTGATSYVDLRTVDGDTLPSFREAAQRRGLLEADNTIDECLNEAALYQMPSALRRLFATILVFCEPNDVAELWQRHLDTMSEDYHRITQSKRHLQQMVLIDIRNMLQSMGKDIKTFPLPAIIDRYDDSQGIDREIYEEEIIEATAEDVALQETLNEEQKSAYEKILSVVDTSNGGQDCSCNSYIWGCGFHNAWWENCPIHASRYHFTIDDGAICTFTKQSGTSKLLQKASLIIWDEASMAKRQSIEALDNSMRDIMGRPDLPFGGKTIVFGGDFRQVLPVVRKGSRAQIVAASLRSSYLWESMCHLKLVRNMRAKSDPWFAEYLLRVGGGTEEVNNDGDVRLLDEVCVPYTGDDRDLDRLIDDTYPSLNENMSNTSYITSRAILTTRNDWVDMINMRMIDRFQREQMMYHSFDTAVDDPNNYYPSEFLNTLTPNGLPPHVLKLKIGCPVMLLRNIDPANGLCNGTRLVLYVALSRATTRLNVKVLVIPVTDDKMNKGVEKKSTINGVTYTKNIVYKEVLTP

SEQ ID NO: 74957 - protein, 218 aa, Zea mays
  Coding DNA Sequence Number=SeqID_31582
MSCLQLDEIEDEHHMKDEHHMGEEHQTREGTKEEHHMEERHMIHMEEHHMDIHTGTLERTSKDLGKAKVLRRSSKGVHNRKEIKSESAATLSRVPGPVCTKMDAQDASGLRLRRTGYGISLRGKGEDNKERASRDQAKVKAKRRLVDRGTMAKVQIYLDDSNADRMASPSVEVADRRVGAPADDGVVGTTTWLGTTAFGWGGGVAVGAAGWGDGWGRR

SEQ ID NO: 74958 - protein, 71 aa, Zea mays
  Coding DNA Sequence Number=SeqID_31583
  Subcellular localization annotation: CTP_CleavageSite=22; ConfidenceScore=5.23e-01
MAAVWQKPVNGSPRTAAAPSPAASPISSLVGRRSREDPERLRPHAILEMAAQLGLDIEPARLGSFELELAR

SEQ ID NO: 74959 - protein, 138 aa, Zea mays
  Coding DNA Sequence Number=SeqID_31584
MVGEGVPLEGEQNEIAPAIVVGRKWIQNHGHKGTHVLDIRRLRLKIDDEGGLIVGVFDNISVVVRDAALGWWEDGADALWVIAAMRSRSEAGLASCLLRSADIGDGWRLCGGHGAAAQASYSGKSLAKAIGHMIVTIL

SEQ ID NO: 74960 - protein, 242 aa, Zea mays
  Coding DNA Sequence Number=SeqID_31585
  Gene Ontology: Cellular component=endoplasmic reticulum; Biological process=signal transduction
  Homolog annotation: Hit_ID=A2X3Z8; Match level="QueryCoverage=97%, HitCoverage=33%, E-value=1e-116, Identity=83%"; Hit description =Putative uncharacterized protein
MRLWRRIQYEERKCANQRKLLSDAETVRWLNYAVEKIWPVCMERVASQQFLLPIFPWFLEKFKPWTARKAVIQSLYLGRNPPMFTDIRVVNQSTDDDHLTVKQLKFTCQVLEIGMNFLSADDMDARMAVQLRKRLGFGITTNMHITGMHVEGKVLVGVRFLRQWPFIGRVRVCFVEPPYFQMTVKPLFGHGLDVTELPGISGWLDRMLDVAFGQTLVEPNMLVIDLEKFASESTVSCSLHFN

SEQ ID NO: 74961 - protein, 71 aa, Zea mays
  Coding DNA Sequence Number=SeqID_31586
MELTAGSRGGAPTAGFKGRDETFCIRPLEGNDWIWRRFGGPKSEYIHISACLSTRHYRNTMKAKVVGFFGV

SEQ ID NO: 74962 - protein, 28 aa, Zea mays
  Coding DNA Sequence Number=SeqID_31587
MARGSHRAEALYSGTGLRFVGVGKEDLH

SEQ ID NO: 74963 - protein, 138 aa, Zea mays
  Coding DNA Sequence Number=SeqID_31588
  Homolog annotation: Hit_ID=Q8H6I4; Match level="QueryCoverage=38%, HitCoverage=2%, E-value=2e-08, Identity=56%"; Hit description =Putative gag-pol polyprotein
MSGGLRNESASKLEKAEVASTSSFGTDVDPRAIDLAIRIAERMFLKMKEDDAKNKIEEEENDRWRPNDESTSSQAAVELFQLQLNFTSTTVELHFNRGPGKVQPSDLTGRLTISLPETVEPALGAVQPVLHSQNQPNG

SEQ ID NO: 74964 - protein, 143 aa, Zea mays
  Coding DNA Sequence Number=SeqID_31589
  Gene Ontology: Mol. function=arginine N-succinyltransferase activity; Cellular component=membrane; Biological process=arginine catabolic process to glutamate
  Homolog annotation: Hit_ID=A7ZML5; Match level="QueryCoverage=50%, HitCoverage=20%, E-value=3e-35, Identity=98%"; Hit description =Arginine N-succinyltransferase
  Pfam annotation: Domain name=AstA; Domain location=1-120; Score= -167.9; E_value=0.00019; Accession=PF04958.3; Description=Arginine N -succinyltransferase beta subunit
KPRTSSVRYIRKFSPARAVLEKEGFRYRNYIDIFDGGPTLECDIDRVRAIRKSRLVEVAEGQPAQGDFPACLVANENYHHFRVVLPSCRQWGSVYAARSAKVDLSLGEECGGYEIDGFGYDYDAGEDEAVEGDSQEFQDYDEF

SEQ ID NO: 74965 - protein, 367 aa, Zea mays
  Coding DNA Sequence Number=SeqID_31590
  Gene Ontology: Mol. function=nucleic acid binding
  Homolog annotation: Hit_ID=Q2QUK2; Match level="QueryCoverage=71%, HitCoverage=53%, E-value=2e-47, Identity=39%"; Hit description =Putative uncharacterized protein
MAPGIRFSKRVRAGAQPEEQSSKRLHSTETDGQNVQEPTDGNDHIPNSPTTPGLADHFSRAAEEAMASAAHDSTGDAEGNSRTTPGLADHFSRAEEEDMASAAHDSTAPTQRAPRRSRAATKGKQLDRMTKVMQRRLPIDVEEGKKRPHEPVQAAKFASEAGIIIRETMPILTRWKDYKDDQKYYNSFVSQLNGRLSVNTEDKETKEACTDMLRSAWRALVAKWSDPKNMEISEKNKQNRSQVKFHQATGSRCYVAHLHAYSHMEALRAEPVAEDEMPASSVHLVSKASSSNHSELREQLAAEATAAVQGELDQLRKKCEEAEEQQARTQRELEEYKKITEKNSKEMEETNVLIKKLLSLHGNSSST

SEQ ID NO: 74966 - protein, 239 aa, Zea mays
  Coding DNA Sequence Number=SeqID_31591
  Gene Ontology: Mol. function=binding; Cellular component=spliceosome; Biological process=anti-apoptosis
  Homolog annotation: Hit_ID=A7P1V9; Match level="QueryCoverage=100%, HitCoverage=45%, E-value=1e-90, Identity=67%"; Hit description =Chromosome chr19 scaffold_4, whole genome shotgun sequence
  Pfam annotation: Domain name=API5; Domain location=1-239; Score= -45.2; E_value=6.2e-09; Accession=PF05918.2; Description=Apoptosis inhibitory protein 5 (API5)
SLQPLFKHVEQGSEIREKIICFLRDKVFPLKAELLKPQAEMERFITDLIKKNSNYSWGSCESLSIFGDSAPRESFQELIEIIQAQADLNSQFNVSDIDHIERWISCMYMALPIFMRGASASKFLNYFVKQIVPAFEKIPEEKKLDLLKTIASSSPYAAAQDSRQLLPSVVQLLKKYMPGKKVEDINHNYVECLLYTFHHLAHKTPNTTNSLCGYKIVTGQPSDRLGEDFSEHYKDFTER

SEQ ID NO: 74967 - protein, 121 aa, Zea mays
  Coding DNA Sequence Number=SeqID_31592
MGEIDGGCGEGHDEAGGDTSLAQHRSGPVYPLDTSLIDMPHVVCCGKEPTQGSLHAEKQTRLTRGCHRVKIMKKFQLVKGGSCGLGGSRAGEICLDEETMSGEVKTTVFFVVREVPEEDNE

SEQ ID NO: 74968 - protein, 299 aa, Zea mays
  Coding DNA Sequence Number=SeqID_31593
  Gene Ontology: Mol. function=binding
  Homolog annotation: Hit_ID=A7QPN4; Match level="QueryCoverage=21%, HitCoverage=11%, E-value=4e-10, Identity=54%"; Hit description =Chromosome chr10 scaffold_138, whole genome shotgun sequence
MSVPLATPPPRPLGHPTTTTALPLMATARPDLAPGPRQEVEDERVIRDGFPEATEGGCHVLHLIAILGDNESPQKNLNGVYLEDPREDHTIHSPPRWDSEGGGVGEYMVVQGAALEGEEDEIAPTGLVEARPRMMRTRVSMFWTPAACTWRLAMTVALAEQVMRNFGQLLGEGICRNVFVLSSSGNNRFGSGEVTTKVELTGTEETVRAASKRLTQGMADFNKAISSAKTDEEKTKIKGDQQTSTRTMRSYNNILAMTQTASSSYDIGGSADIVWCFVDMKNKYFNSLLTAQYEEILSI

SEQ ID NO: 74969 - protein, 178 aa, Zea mays
  Coding DNA Sequence Number=SeqID_31594
MYQLDRTSAREHRTPVRTTRTLDYGPGLPSKRDGSLGWGPDPSERRPDAATWLVARDISQRAEPNHDGANRGAPCRDFNEFPGGGRSCFFHATGSQPPSAGHCCCARCTTAYNCADIPDSVEGGSGSIVSSQGVAPSPSKLHGLTRGHEAVAGRRRPNARHGTFYLDQVEATVIPAPT

SEQ ID NO: 74970 - protein, 185 aa, Zea mays
  Coding DNA Sequence Number=SeqID_31595
MEFFGEDKASTPLHRIIHPSPSLRTALQFGINFTHILFAKGGEKVPKVQHKPIKSPRKGSNKKKQRKPKAAMVWRTGLSGVPPDYVRCTREINSKLATFGNSRSHSAIIHRTVQCSTGLSCVPSGATATCANGHLQRYRNSEQCAVARAESEQASDGAPDSEHDMSGAPPDCSVAYMSETPTVEP

SEQ ID NO: 74971 - protein, 416 aa, Zea mays
  Coding DNA Sequence Number=SeqID_31596
  Gene Ontology: Mol. function=sequence-specific DNA binding; Cellular component=nucleus; Biological process=regulation of transcription, DNA-dependent
  Homolog annotation: Hit_ID=Q6IEP9; Match level="QueryCoverage=93%, HitCoverage=63%, E-value=1e-90, Identity=52%"; Hit description=WRKY transcription factor 32
  Pfam annotation: Domain name=FAR1; Domain location=153-225; Score= -29.3; E_value=0.08; Accession=PF03101.6; Description=FAR1 family
  Pfam annotation: Domain name=WRKY; Domain location=163-223; Score =142.3; E_value=1.3e-39; Accession=PF03106.6; Description=WRKY DNA -binding domain
  Pfam module annotation: Pfam domain module=FAR1::WRKY; Domain location=153-225::163-223
MRDYDELKKKVEACYQQQQADEPKEPEVFLSLGATAAGTGGGFAEPKRKERQTVRRPSAGSDDTDDDTKEDRLGLSLSLAASSYEEEKLGAGPAGHDLEEASVAGADRKAKGYALLESSKLEAPAPPAAAGDLAAAGITSQSVNPANRKTRVSVRVRCQGPTMNDGCQWRKYGQKVAKGNPCPRAYYRCTVAPGCPVRKQVQRCLEDMSILVTTYEGTHNHPLPIGATAMASTTSAAATFMLLSSTSSSSATSEVRGGSAAPSYLSPPYLLNSTSHHPAASPLLGAQPSSSMPSAPAGVANGVQHLNMFGHSSMLAQQAPHFSSKYPWSSDPSQSQGIGGGLPAGSKRPFWSTGGDEKTATLPDNVGAVMADPSKFSVAIAAALNSYIGKDGQVVGGKDGESSSNKWGVVESLPPP

SEQ ID NO: 74972 - protein, 75 aa, Zea mays
  Coding DNA Sequence Number=SeqID_31597
MAHRTVRCTLPRHQCRWIQTVGASDLWARPGVRCTPDRYCWLSGVPAWAILTPARAVRALNAAAGHVVEDALSRL

SEQ ID NO: 74973 - protein, 29 aa, Zea mays
  Coding DNA Sequence Number=SeqID_31598
MAGVAVHGISTLNSNANRFDALREGKFSN

SEQ ID NO: 74974 - protein, 140 aa, Zea mays
  Coding DNA Sequence Number=SeqID_31599
MGEGDGTDEWALAASERKLREREGCMHMRRGSKGRVKGESRPLAFWSRWRTRHYSVHTRQPGAPFRPLPRPTVGSPDSPMNFSLNKNIAYVRLDVHILETTNQAKDGGKKIFEVPSAHEKVKEAKEPKARGEEEDFLSQG

SEQ ID NO: 74975 - protein, 38 aa, Zea mays
  Coding DNA Sequence Number=SeqID_31600
MAASSSILSSNISERALRGFGALPQLDSYGNRCEWSTT

SEQ ID NO: 74976 - protein, 233 aa, Zea mays
  Coding DNA Sequence Number=SeqID_31601
  Homolog annotation: Hit_ID=A2WKF1; Match level="QueryCoverage=39%, HitCoverage=25%, E-value=4e-09, Identity=32%"; Hit description =Putative uncharacterized protein
MKNVVYYETDPSVPSTSDNTINIFKAHRVRDSREERLYVLSNQPVPLGEFYAEFYVELSSMVTLAGHKQYLWVAHLLDVAAVARLSYMVTFEYIYTCLLVSELSTNEFVDASNLTGKGKTVDKGTPGDSIDTKPMSNLGKRKRYMTDEDVAVFNGMKEAVSDVAAAVRESIHAEAAPRIYNAVINCPGFSREALMYALNHMMEHKATSLVFLDMTPDDRDLWLRTFLAKHYHN

SEQ ID NO: 74977 - protein, 82 aa, Zea mays
  Coding DNA Sequence Number=SeqID_31602
MADRCRQDLCYNCDKPFVRGHHCQRHFYLEVTADDDGVAAAEATFPPTSSANPRTMAPKRRVLVLDLPPTTCTTSVTLLLTI

SEQ ID NO: 74978 - protein, 97 aa, Zea mays
  Coding DNA Sequence Number=SeqID_31603
MAYCKSAWLHNSTSTRRRPGHSRVMVCRKSILGKAGDRGWGVWEGDVVDGYERQGMVDASGTKAAIGDGRGVVADGKGTMVVVVDGAAMVGRGGMPP

SEQ ID NO: 74979 - protein, 226 aa, Zea mays
  Coding DNA Sequence Number=SeqID_31604
  Gene Ontology: Mol. function=metal ion binding; Cellular component =cytoplasm; Biological process=red or far red light signaling pathway
  Homolog annotation: Hit_ID=Q6ZHH4; Match level="QueryCoverage=65%, HitCoverage=20%, E-value=6e-55, Identity=75%"; Hit description=COP1, constitutive photomorphogenesis 1
  Pfam annotation: Domain name=U-box; Domain location=66-133; Score= -17.6; E_value=0.041; Accession=PF04564.6; Description=U-box domain
  Pfam annotation: Domain name=zf-C3HC4; Domain location=68-105; Score =37.6; E_value=4.5e-08; Accession=PF00097.16; Description=Zinc finger, C3HC4 type (RING finger)
  Pfam module annotation: Pfam domain module=U-box::zf-C3HC4; Domain location=66-133::68-105
  Subcellular localization annotation: CTP_CleavageSite=45; ConfidenceScore=5.05e-01
MGDSSVAGALVPSVPKPEPAPSGDTSAAAAATTAALAMPEEAGMRAASASPQGPAEEGEGPADRDLLCPICMAVIKDAFLTACGHSFCYMCIVTHLSNKSDCPCCGHYLTKAQLYPNFLLDKVLKKISAQQIAKTASPIDQFRCALQQYHVPPASSLNPRTITPKSWDPGSRPLTHHLYYLCNPSSNNLVSEMSGSDDVPPKSAPPTNSTVATTIDARAAATSSIF

SEQ ID NO: 74980 - protein, 104 aa, Zea mays
  Coding DNA Sequence Number=SeqID_31605
  Gene Ontology: Mol. function=pectinesterase activity; Cellular component=cell wall; Biological process=cell wall modification
  Homolog annotation: Hit_ID=Q2R2C9; Match level="QueryCoverage=55%, HitCoverage=15%, E-value=1e-11, Identity=50%"; Hit description =Pectinesterase family protein
  Pfam annotation: Domain name=Pectinesterase; Domain location=1-99; Score=-188.5; E_value=2.4e-07; Accession=PF01095.10; Description =Pectinesterase
MVMTATVNVVADGFLPQNLTIRNEAGPKGRQAVALRKYSHVIFIECQLSDVVSAAGWVAWDRAHVINNTTKSVRYMEFANTGPGADTTHRVDWGASMFSTTPPR

SEQ ID NO: 74981 - protein, 203 aa, Zea mays
  Coding DNA Sequence Number=SeqID_31606
  Gene Ontology: Mol. function=nucleoside-triphosphatase activity; Cellular component=endoplasmic reticulum; Biological process =response to abscisic acid stimulus
  Homolog annotation: Hit_ID=A3ADF6; Match level="QueryCoverage=86%, HitCoverage=32%, E-value=2e-73, Identity=81%"; Hit description =Putative uncharacterized protein
MEQRRRELRLFANTGVDAATGTPRWVSAPFTHPATLDTVAMDPDLKVCDRADLESFLKGRAYYHRLSRVWRHNYLLYGPTGIGKSTFAVAMARFLGYDIYNVYLSRADAAGDDPRALLLHTTPRSLVLVEDLDRYLQGGSGDAKARVARVLSFMDGVTSCCGEERVMLVCQTMTGWFELFAIGCLRAVASSCWEKCLSGIDRL

SEQ ID NO: 74982 - protein, 903 aa, Zea mays
  Coding DNA Sequence Number=SeqID_31607
  Gene Ontology: Mol. function=oxidoreductase activity, acting on other nitrogenous compounds as donors, with NAD or NADP as acceptor; Cellular component=mitochondrial intermembrane space; Biological process=nitrate assimilation
  Homolog annotation: Hit_ID=P27968; Match level="QueryCoverage=100%, HitCoverage=100%, E-value=0.0, Identity=82%"; Hit description =Nitrate reductase [NAD(P)H]
  Pfam annotation: Domain name=Cyt-b5; Domain location=530-603; Score =91.2; E_value=3.2e-24; Accession=PF00173.19; Description=Cytochrome b5-like HemeSteroid bindin
  Pfam annotation: Domain name=FAD_binding_6; Domain location=647-754; Score=214.9; E_value=1.9e-61; Accession=PF00970.15; Description =Oxidoreductase FAD-binding domain
  Pfam annotation: Domain name=Mo-co_dimer; Domain location=328-474; Score=269.5; E_value=6.7e-78; Accession=PF03404.7; Description=Mo-co oxidoreductase dimerisation domain
  Pfam annotation: Domain name=NAD_binding_1; Domain location=773-886; Score=180.0; E_value=6.1e-51; Accession=PF00175.12; Description =Oxidoreductase NAD-binding domain
  Pfam annotation: Domain name=Oxidored_molyb; Domain location=117-303; Score=290.8; E_value=2.7e-84; Accession=PF00174.10; Description =Oxidoreductase molybdopterin binding d
  Pfam module annotation: Pfam domain module=Cyt-b5::FAD_binding_6::Mo -co_dimer::NAD_binding_1::Oxidored_molyb; Domain location=530 -603::647-754::328-474::773-886::117-303
MAASVERHLAPHPWPANAPPKSFDMFRSGGPGGKRRTGPDSDSEDEDSIPPDWRSLYSPRLEVEPPAHDPRDEATSDAWVRRHPALVRLTGKHPFNSEPPVPRLMAHGFITPAPLHYVRNHGAVPRADWSTWTVEVAGLVRRPARLTMEQLVTEFEAVELPVTLVCAGNRRKEQNMVRQTVGFNWGPGAISTSVWRGARLRDVLRRCGVMGAADGAANVCFEGAEDLPGGGGGGKYGTSLRRGVAMDPARDVILAYMQNGEPLAPDHGFPVRVIVPGFIGGRMVKWLKRIIVASSESESYYHYRDNRVLPSHVDADLANAEAWWYKPECMINELNINSVITTPGHDEVLPINALTTQRPYTIKGYAYSGGGRKVTRVEVTLDGGETWHVCSLDHPERPTKYGKYWCWCFWSVDVEVLDVLGAKEIAVRAWDEAMNTQPEKLVWNLMLKYTHVRLFLYAQGMMNNCWFRVKINACRPHKGEIGMVFEHPAQPGNQPGGWMARQKHLETSESAQSTLKKSTSTPFMNTATAQYTMSEVRRHTSPDSAWIIVHGHIYDCTGFLKDHPGGADSILINAGTDCTEEFDAIHSDKARGLLEMYRVGELVVTGSDYSPQNSHADLKAIVEAPAAAAPLSVTSTVALSNPREKVRCRLVDKKSLSYNVRLFRFALPSPDQKLGLPVGRHVYVCASIGGKLCMRAYTPTSPVDEVGHVDLLIKIYFKDEDPKYPNGGLMSQYLDSLPLGATIDIKGPIGHIEYAGRGGFVVNGERRLARRLAMIAGGTGITPVYQVIQAVLRDQPDDDTEMHLVYANRTEDDMLLREEIDRLAAAHPARLKVWYVVSKVARPEDGWEYGVGRVDEHVMREHLPLGDSETIALVCGPPAMIECTVRPGLEKMGYDLDKACLVF

SEQ ID NO: 74983 - protein, 78 aa, Zea mays
  Coding DNA Sequence Number=SeqID_31608
MGAQAHESCNRRAECFVHATAPPLAPLPRLLDCGTNTATRGDPARDPAAPAWRDGTGKGGYPEKGSFPVKEPGFEPPY

SEQ ID NO: 74984 - protein, 53 aa, Zea mays
  Coding DNA Sequence Number=SeqID_31609
  Gene Ontology: Mol. function=nucleotide binding; Cellular component =protein complex; Biological process=protein polymerization
  Homolog annotation: Hit_ID=Q95DV5; Match level="QueryCoverage=100%, HitCoverage=11%, E-value=1e-11, Identity=67%"; Hit description=FtsZ -like protein
MKGVEFWIMNTDFQAMWMSPIEPEYRLQIGQELTRGLGAGSDMVFVMITANTS

SEQ ID NO: 74985 - protein, 126 aa, Zea mays
  Coding DNA Sequence Number=SeqID_31610
  Homolog annotation: Hit_ID=Q10DL9; Match level="QueryCoverage=34%, HitCoverage=14%, E-value=2e-11, Identity=72%"; Hit description =Dehydrogenase, putative, expressed
MSHNPSFRDLRRNQEPPLSKTILPRRYCRLLAHPFSAEQRVLNPLLRQARSPTVYLLRCHLAAALVMLVFAEVSGFQDSKSETDVDVDYNSLYSRQDFLKGKDSELSWFNAGVPIIPCSFIFSVVP

SEQ ID NO: 74986 - protein, 242 aa, Zea mays
  Coding DNA Sequence Number=SeqID_31611
  Gene Ontology: Mol. function=pyridoxal phosphate binding; Cellular component=cytosol; Biological process=amino acid metabolic process
  Homolog annotation: Hit_ID=Q9M835; Match level="QueryCoverage=69%, HitCoverage=44%, E-value=2e-44, Identity=57%"; Hit description=L -allo-threonine aldolase, putative
  Pfam annotation: Domain name=Beta_elim_lyase; Domain location=2-175; Score=16.8; E_value=9.2e-12; Accession=PF01212.12; Description=Beta -eliminating lyase
MDLITNHKCDKLAKLQVDQAIVWLFLHIECKNYCIYIFQVDFHYTQIRDCIVKFNRARIFNASVALGVPVHRLVKAADSVSVCLSKGLGAPIRSVVVGSEAFIDKARILRKTLGGGMRQVGFLCAAAYVAVRDTVGKLADDHRKAKALAEGLTKIKQFTVDSSSVETNMVSVKDEARYIFLIFHNVNRKGPAYDIPLLFISVRFVIHYQILDSDVQYALTCVESLFRKIVVALLGTEMLLMK

SEQ ID NO: 74987 - protein, 114 aa, Zea mays
  Coding DNA Sequence Number=SeqID_31612
MASLGSVEPWKPCRCGRSLVSISRNHVESNRLRRSAHADVVPDNARDTDLESSHRHLDVEARYSQRRRIGGPRLREPVVEVYDLEEFLGGRPMLMASAKLKRCSAAPLMALAKR

SEQ ID NO: 74988 - protein, 311 aa, Zea mays
  Coding DNA Sequence Number=SeqID_31613
MSSIPPPAGGLSAAIVVVARRWKEYHVVAAVEGHELKTPETEHRPGLERLLETAHLELDGKLLVNTQRAPTWRANCRRLETGGSLRPTSECTACPSPDGSSAWASAKGGSEVAGVGRERGGNPAAFVFVPRPGRRPGRSPSPGVGRSGVRRLLGLSPSPSPGSGGAEFAVFRGLSLSPSPGSGGAEFAVFRGLSPCPSPGSGGAEFAVFRGLSPSPSPGSGGAKFAVFRGFSPSLSPGSGGAEFAVFRGLSPSPSPGSGGAEFAVFRGLSPSPSPGSGGAEFAVFRGFSPSPSPGSGGAEFPMAPLPRPPC

SEQ ID NO: 74989 - protein, 117 aa, Zea mays
  Coding DNA Sequence Number=SeqID_31614
MVTSSLMVGESEPGCGLCPSLSLKDFHHQGWGGECAELSWKKIRRRRVCRRHPRTDFQLYGVLPVLASRVLGMGGGLLAAASALRSSLLLFGPPGQKSSSSPLLGRATTSRSSVFCC

SEQ ID NO: 74990 - protein, 243 aa, Zea mays
  Coding DNA Sequence Number=SeqID_31615
MRDPAPESQGRALERVGEDSARGAWGRTNATPWELVPLSHRSASRIFITQPGRTPSPAVTRDGDLQLDGGGKRAGLRPLPLPQPQGFSSPRLGRGECRVGVGPCVGGGPLLHSVMGGEAGIARGVRQLQRAWSSAASGFGATCGAGVCHGSWKRFFRRRGGRDRPRADLQLLRPSARPCLTSFGMGGGLLAAASTLRSALPLFGPPEQKSSSSPLLEQGSSSLVEETPRPPFGGPRPGVAISV

SEQ ID NO: 74991 - protein, 340 aa, Zea mays
  Coding DNA Sequence Number=SeqID_31616
  Gene Ontology: Mol. function=binding; Cellular component=cytoplasm; Biological process=embryonic development via the syncytial blastoderm
  Homolog annotation: Hit_ID=Q10L40; Match level="QueryCoverage=94%, HitCoverage=93%, E-value=1e-153, Identity=83%"; Hit description=HEAT repeat family protein, expressed
  Pfam annotation: Domain name=Mo25; Domain location=1-340; Score =484.7; E_value=1.1e-142; Accession=PF08569.2; Description=Mo25 protein family
MSFFFRMASRLRPSTPEEVVRSIKDSFLALHTRTHAKALEEVEKNMSSLRLLIFGDGEVEPNEEQVLQITLEICKEDVISLIVQDLPSLGWGVRKDLAICWCILLRQKVDETYCCVQYLENHLELLDFLVGCYKNLDIALNCGNMLRECIKYPTLAKYILESGSFELFFEYVELPNFDIASDALNTFKDLLTKHEVVVAEFLSSHYEQFFELYSRLLSSTNYVTRRQAIKFLSEFLLETHNSQIMKRYIVEVRFLNIMINLLKVIVHASSQDSSKNIRICAFHVFKVFVANPNKPRCIVVALLDNRREVLKLLHNLPSSKGDDELDEEKDLIIQEIQKLA

SEQ ID NO: 74992 - protein, 76 aa, Zea mays
  Coding DNA Sequence Number=SeqID_31617
  Subcellular localization annotation: CTP_CleavageSite=40; ConfidenceScore=5.09e-01
MLYGAKWLNRSPWAIQPVLAKNLFGKKRSNWPPGVVQPVLAMNLSGKKLECLDVGMEVVGVVLIATNHFLAVTPFC

SEQ ID NO: 74993 - protein, 182 aa, Zea mays
  Coding DNA Sequence Number=SeqID_31618
MRAGGTGGGWEEDFLKCQRFIYNYTKSTVRNTVDYSGQEKLFGKTGQARTVRALAADRPRHKDDPRTEPMQKSESALWTVRRISADRLRPRSDRPTSGADRPPLIYRGGPSGPGGRTVRAQQNGVTARKWLVAINTTPTTSIQTSKHSNLQHSIQELAIHSKTHSKPPSLQVSQLRKEIISD

SEQ ID NO: 74994 - protein, 252 aa, Zea mays
  Coding DNA Sequence Number=SeqID_31619
  Gene Ontology: Mol. function=glucose-1-phosphate adenylyltransferase activity; Cellular component=chloroplast; Biological process =glycogen biosynthetic process
  Homolog annotation: Hit_ID=P55234; Match level="QueryCoverage=74%, HitCoverage=43%, E-value=6e-99, Identity=81%"; Hit description =Glucose-1-phosphate adenylyltransferase large subunit 2, chloroplast precursor
  Pfam annotation: Domain name=NTP_transferase; Domain location=123 -252; Score=-59.5; E_value=0.00077; Accession=PF00483.14; Description= Nucleotidyl transferase
MSSPFFPHDPSQHPPTLPDVDAPVSPPLQPSDTLDDDKDDEDDEFDPLFSETTSGARCASAMQFSSVLPLDGKACMSPVRRGSGGYGSERMRINCCSIRRNKALRRMCFSARGAVSSTQCVLTSDAGPDTLVPIGGCYRLIDIPMNNCFNSGINKIFVMTQFNSASLNRHIHRTYLGGGINFTDGSVEVLAATQMPGEAAGWFQGTADAVRKFIWVLEDYYKHKAIEHILILSGDQLYRMDYMELVQKQSMG

SEQ ID NO: 74995 - protein, 560 aa, Zea mays
  Coding DNA Sequence Number=SeqID_31620
  Gene Ontology: Mol. function=transaminase activity; Biological process=metabolic process
  Homolog annotation: Hit_ID=A2XGW7; Match level="QueryCoverage=91%, HitCoverage=93%, E-value=1e-165, Identity=57%"; Hit description =Putative uncharacterized protein
MEVLDEPLYANFLRATGVDRPYRQELLSKMDPDGNKVVKEVIFGPGDKKYRYCKHISKQHLPNLSSDLMKKGKHFILIRNPLDILPSFDKVVPPSFMELGIGELVSIYSELCGLGSPPPVIDADDLQQDPEAVLSGLCEDLGIPFQPQMLKWEAGPKEFDGIWAPWWYGSVHKSSGFSKPRQYPLTFPFVFYDLLEQSLPFYNMLKRQIRKIRGPQQPPLSDPPLPVPANKNILVWVGDELLPRNSAKLYKEEMLFGKVYVYMMEKLFDSAKAMAFSNVPTRDWIKDAIFKTLIANGMFNNAHIRLTLTRGKKRVQAPSITRELVPSLINPSASIDSKIHHNNLINNILAKIEGNLAQAEDAIMLDKDGFVSETNATNIARTRMAKVCVAAAAAQMPLQHMSLLPQKLPWTLPLQAQSAWAWVLSPHSCRNPFLLVSSGTMAPCQCRCGPLSPNDSFTAYFTLVTTIATQVVMIDGREIGDGKIGPVTRQIQKAYKILTAGQGVPIPGVAEDTAGDYKRNKPLRWHALPYRKARAFSFLRVFNLEQSLQGAQCSVVIRSY

SEQ ID NO: 74996 - protein, 107 aa, Zea mays
  Coding DNA Sequence Number=SeqID_31621
MEVDIEMVVDDEDDEVQNENDLEILEGNANDEIAPSDGVDYEMVVGQRWWAVGRGRGGGGGGGAPVGRRRRRSRTTPYSSRWSSKPLSMRHSEREMCPWAISKYFGD

SEQ ID NO: 74997 - protein, 57 aa, Zea mays
  Coding DNA Sequence Number=SeqID_31622
MGKKRAFVACIEDEQANAESGTAAAIPGGCVSVLSRAEQCLNDQVEECWLDSKNKNQ

SEQ ID NO: 74998 - protein, 70 aa, Zea mays
  Coding DNA Sequence Number=SeqID_31623
MAAGLGGGRPDRAGREAAEPAMGKGERGWGREERGRGELTGEGRDGEGRPAAGAAEGGGWAGGGGGLGQG

SEQ ID NO: 74999 - protein, 179 aa, Zea mays
  Coding DNA Sequence Number=SeqID_31624
  Subcellular localization annotation: CTP_CleavageSite=69; ConfidenceScore=5.24e-01
MAHMYSKEYDFLLLDFFYKVGITPTRTPVVHRRARSRRRRRRRAPRRPRKRGATGTGAQGERAQAWRVRQRARRAGEPGARPAAPGVVHVQFHAAVLPAPGRACRPGRGRVPVHGAAGQRAGLRAAELRAVELSVLVNYCGKKLPLGWLYLELIISSKFYFIKFNDRIGLELDSIFTYF

SEQ ID NO: 75000 - protein, 75 aa, Zea mays
  Coding DNA Sequence Number=SeqID_31625
  Subcellular localization annotation: CTP_CleavageSite=50; ConfidenceScore=5.07e-01
MEVLELHVSETDDCVLVMNVTCNKAMTPWPGSIAPSRSFNSESSPPTSPPSSVASCTPSSSSLLKTKVDVFKSSD

SEQ ID NO: 75001 - protein, 296 aa, Zea mays
  Coding DNA Sequence Number=SeqID_31626
  Pfam annotation: Domain name=zf-CCHC; Domain location=217-234; Score =7.9; E_value=0.097; Accession=PF00098.14; Description=Zinc knuckle
  Pfam annotation: Domain name=zf-CCHC; Domain location=87-104; Score =24.3; E_value=0.00032; Accession=PF00098.14; Description=Zinc knuckle
  Pfam module annotation: Pfam domain module=zf-CCHC::zf-CCHC; Domain location=217-234::87-104
MEDLSQMTPTIVIGKIVVFEMSRKMGRKGKKKAPTPSYSNEEEKEESDDDEDNQPSTLSSEDEETIRRAGKVKDLLFNIDRKKQRKRGCFACGEKGHLRDICPNMAEPTKGRSNGKALTSVKIWDDSSSKDEPPRTHSHRSSSCSSLRKCLMARVLIKNVVIETYLDEIAMENEQLKQEVARLGKALYEKKVKAKQIQRPQDNTTVGVNKPVEGETLICRLCHKESHKSYQCKAKTEDNQRQKLKKKPTSKISNTYINKVDKKDATPYLIKKKKNGKVIVIKANKQANKEKGGKRI

SEQ ID NO: 75002 - protein, 124 aa, Zea mays
  Coding DNA Sequence Number=SeqID_31627
  Subcellular localization annotation: CTP_CleavageSite=48; ConfidenceScore=5.13e-01
MAICANGRLQKATVNVNSARLRAQKSEQRQKAHRTVNRTCPVHHRTVRWPHLSELQRSNPNGFTTAAFPNDHFGGFGYKYPQPPHFKASKFFSHCIQYKSSRLHSKTQTKRSNPLPSPKIIPIK

SEQ ID NO: 75003 - protein, 116 aa, Zea mays
  Coding DNA Sequence Number=SeqID_31628
  Subcellular localization annotation: CTP_CleavageSite=62; ConfidenceScore=5.10e-01
MARRSFFGPPETFSPTFSLLCSWIHGLFPAIEFTVVLSSPLPNSGDPRATLACASLNFGKLTAAERSGAARSRLFSSDNEQSEVPECVVGDLPEQQPGGEVGNMDDFEEFQEYDEF

SEQ ID NO: 75004 - protein, 66 aa, Zea mays
  Coding DNA Sequence Number=SeqID_31629
  Subcellular localization annotation: CTP_CleavageSite=9; ConfidenceScore=5.20e-01
MTGRGKDGSAAMGPNPCCCSEHNLDPGSFTTPPSLCSGSSRAKRCKVIADGSSAVVQAPPPLAVVR

SEQ ID NO: 75005 - protein, 111 aa, Zea mays
  Coding DNA Sequence Number=SeqID_31630
QQARLSVATKAVVCPEDNVRAIASCRNLWEFLFQFIRMLNGDFNSGIFLEFLTRELQRLVVLDQRYFGTGGHEIDGSGCDYGAGCQHCNHCSGEDEAVEGDFQEFQDYDEF

SEQ ID NO: 75006 - protein, 161 aa, Zea mays
  Coding DNA Sequence Number=SeqID_31631
MPRAIDDCSLGQPTTFYLSLIRRATCGTPSIVDRTREAPSMLHANDDTKTRSVAEKSMTGITTSLREVKPPELSRQQLRLVAPPGGGQGTTTTTPLPRTNIIIDDRKTPVEYQCSLHASGPFSGPLTSRSPTSTKMNLSRIWEAGWPFTPPPPEPLEQLKT

SEQ ID NO: 75007 - protein, 56 aa, Zea mays
  Coding DNA Sequence Number=SeqID_31632
MKMLILGVARNNLVIVISYFKAFFGLNACAPVSSKVSEKEKMECNSNFGGRTSVET

SEQ ID NO: 75008 - protein, 221 aa, Zea mays
  Coding DNA Sequence Number=SeqID_31633
MAIGSIVLADNQLKEVIGPPAPARSVAPPHKRKELTRWPQRQWDATRGRKSSWATRLTDWSRLEEACWNEMLANGPRGAVTGVRQVTSEVSVSRRRRSPSARSALPLKASLAQLRNPRLLCDEPEPEAAVSAWIEVESAREEALSARGHVASLAEEAQQRWLEPGQVIRERDQLRSRAAEAVSRADVLEGQLAEATERSVEMFARAETLEETLAAMAQARC

SEQ ID NO: 75009 - protein, 282 aa, Zea mays
  Coding DNA Sequence Number=SeqID_31634
MNVCELTLAVSHPPTAHLVIMFAPGFWTLKSGCDTRGEDKPLRPKSRRSDRRWRRRSRRRRNLLWLPPPQHRRRQPPAHQHRTSEHRPPQSAPAGPHSRPRRKNENGTVSEHEYRPRGVRRVVRPPSAAGHSRSDGGRNAAPWPGSSSLPFPAWLEDASSAELENGFHPQMLKEEVARRPMREVELRLSSPPATPRMMKILEAEGRGRDHNPACFSPPSNWWSPPWVTIGEGMQPGCLMKILEAERWLKGANLYEVALLQQQDEGNVGTPHPGARKVEGCDA

SEQ ID NO: 75010 - protein, 321 aa, Zea mays
  Coding DNA Sequence Number=SeqID_31635
  Homolog annotation: Hit_ID=Q6QP51; Match level="QueryCoverage=49%, HitCoverage=78%, E-value=4e-15, Identity=38%"; Hit description =Putative growth-regulating factor 1
MQVACNRTTGTHPFDFDASNMEAQAHTSCNRDRERGYFERDPSPRRKRAPSPPTDQGFEGWPLGRVRQPPQSTRASGSLLIRGSKAGPLEGFDSRLRALELRAHYRSGVRRLAPRKGSTVAPEHAERGMTLGQGFVYSRDAISPRPSPASGEKNSPRRIHASPEGLLKRRAHPRLARSPARAGFVVKQPWPNRLTNRQYRRRIQCKDHLASYPETRASVGKERSAARPSPTAVPLARVRLTAAESRLRRNRKLRLARPWASASEGVLRLARPQGSASTSASESGLRLARPQGLASTSTSGGIASSPDPGLGLRRSLRLARP

SEQ ID NO: 75011 - protein, 212 aa, Zea mays
  Coding DNA Sequence Number=SeqID_31636
  Subcellular localization annotation: CTP_CleavageSite=56; ConfidenceScore=5.24e-01
MALPVTWSVRALGWARRRLLRGRGGVCLPRPRSSPSPWVGRGGDRRLRPGLSPSPRVGRGGIRRLPGLSPSPSPGVGRGGVHRLPGLSPSPSPRSGEAEARVRIRCQATFALNAPAIRSVGVATWPRLLLGEDWASGEPKLCANGGYQLRLGVLRGERTVKDRLDFFTYAPASPFRKEEGGKSAMLPLEGAEHGVSSELLMGNPSGRSCPIC

SEQ ID NO: 75012 - protein, 107 aa, Zea mays
  Coding DNA Sequence Number=SeqID_31637
  Subcellular localization annotation: CTP_CleavageSite=28; ConfidenceScore=5.10e-01
MQAACNRAKWAHPFDSNAPSMEAQSHTSCNRRAGCYVRATAPPLAPLPRLLDYGTSTATRGNPAYDPTVPARHVSHGIGGTFGRRSGRRFAFAIMTASKKGSGKGIP

SEQ ID NO: 75013 - protein, 100 aa, Zea mays
  Coding DNA Sequence Number=SeqID_31638
MGEHEERGHGWRSSREQERRAEQQARSELESGVGADAGLGATSHGAWSRRCLIWGELGEPREGEMGSDGAPRLGRTPAGEAPRGRREERARVEKKPARGR

SEQ ID NO: 75014 - protein, 321 aa, Zea mays
  Coding DNA Sequence Number=SeqID_31639
  Subcellular localization annotation: CTP_CleavageSite=57; ConfidenceScore=5.27e-01
MSRDPFCLRMYGPLNPSKASSPRALSPLLSLVVLRWPVFFPAVELHRYPSLLLAVPRARPKSDSVWTKPQGWSCPAPASAPTPDSSSDRACCSARRSCSLELLQPRPLSSCSLAATSHVEAQPSRSLPPAPYYRGSQLLPGHLRPYSLLPLLARGALCSSSPCAQAPPAAQPSCFFLLPAFFLCRAFCSPRALAFVVATAPSSTLFSSAALGSPWYSSSSFTVDLAKSPLLDAGDGHRGVPLRTPSTLALLQEIPSLEQPSFCCDVCVRYSPHVVVFVFLASPGVRSCSPSPVRSRRHTRQMFVRGLQLKVVVDPCVIKKS

SEQ ID NO: 75015 - protein, 126 aa, Zea mays
  Coding DNA Sequence Number=SeqID_31640
  Subcellular localization annotation: CTP_CleavageSite=13; ConfidenceScore=5.36e-01
MSRLKSGSTGRLAARAKRNNSCRPRRSPMESSSPDRAQDPSPTDHLWSPRPPGSAQAPAAAAARQVSGGGCCETGLRRWLRDRPPALCDVKRRPTWRRNPSRGDHDAELVQIMAKSNEWRLFGGCK

SEQ ID NO: 75016 - protein, 49 aa, Zea mays
  Coding DNA Sequence Number=SeqID_31641
MASTIYKKLGFWMEDLSYDRTKGNKEWATKLGAKGLRLDMLTKLKNDDD

SEQ ID NO: 75017 - protein, 146 aa, Zea mays
  Coding DNA Sequence Number=SeqID_31642
MKVRPSRPSSEDHYIPREIMLRRTKPRWVGARPSAKGGSEVAGDGRERGGNPAAFVFVPRPGRPESAWGRVMMAPPVDVVGPRPRLVDVEAPPRSRSSLSSVAVVESEPLGRARRRPSAEARAESEPWGLVKRSSSSSGAEPKSES

SEQ ID NO: 75018 - protein, 65 aa, Zea mays
  Coding DNA Sequence Number=SeqID_31643
MARARAYKAPRDFDRTPPHALDLTGAQNHRRSLEDMVAGVTWSSILPPGWTVEWDPASAEEEHEE

SEQ ID NO: 75019 - protein, 191 aa, Zea mays
  Coding DNA Sequence Number=SeqID_31644
  Homolog annotation: Hit_ID=Q6UUN3; Match level="QueryCoverage=74%, HitCoverage=17%, E-value=2e-08, Identity=30%"; Hit description =Putative gag-pol polyprotein
MAQQNEILRQLAQRQPPPQHYGGGDHQRHPAAATYQEFLSTQPPLFTRAEDPLDADVWLRVVESKFPLLHGVCSEVTKVSQMTERWNGESSRQLPGAPYTSRHYGPKAQRVSGTHSGKHDSVTYAGYHADTDEKKRDRFRRGLSTMIRDRLNIVRANSYNELVNMAISQEDCITARQAEKKRKTPVAGPSA

SEQ ID NO: 75020 - protein, 95 aa, Zea mays
  Coding DNA Sequence Number=SeqID_31645
MADLSVPVASPARVPLVSLPRGLGDPETSLAHACLHSGDLTAAERSSTTRSCSSLPDNEQSEVLECVVVDLPEQQPGGDAGNMEDFEEFQEYDEF

SEQ ID NO: 75021 - protein, 222 aa, Zea mays
  Coding DNA Sequence Number=SeqID_31646
MPPAPPQGIPAARGDPDGDGDDDDDGGSLSHDMELSEELEPEGWIARPITRDAAHGCHFHDALDTLLCQAFDRHTWSNEYHCVVYQHRRGLYPDQWEATCLVCRRDDDLRGVADGLDLKYYPRRSTGSAGGVIASPVGEGNPRLNSMVNLAVVLNTELDHALDKLGKVRAEVAELRVECATCHYLDGGSPAPVGIQHPYCSPPHGRFDYGTPDCRTRIDLDP

SEQ ID NO: 75022 - protein, 115 aa, Zea mays
  Coding DNA Sequence Number=SeqID_31647
MQSQKNVLLQYQIRHLQNGHWELAAAELLSLGNDSPNGPVLHSGNTHDFLLVLVGCSGWLLGQEDGLPGCSDAGIDFLLAGCSNGTAAAAAKETAFGTAAGGSDADASASAGDLA

SEQ ID NO: 75023 - protein, 157 aa, Zea mays
  Coding DNA Sequence Number=SeqID_31648
  Gene Ontology: Mol. function=calcium-dependent phospholipid binding; Cellular component=integral to membrane
  Homolog annotation: Hit_ID=Q33BF6; Match level="QueryCoverage=96%, HitCoverage=73%, E-value=2e-21, Identity=37%"; Hit description =Putative uncharacterized protein
  Pfam annotation: Domain name=PLAC8; Domain location=11-127; Score =75.9; E_value=1.4e-19; Accession=PF04749.8; Description=PLAC8 family
MSTYPPPTGEWTTGLCGCFSDCKSCDTWKAHRHLQPMFPGRAHVHKSSWLQQLATSHQLQLACGLAGLLYCLLLHAGVAVVPCHCIYTCTYRRKLRAAYDLPPEPCADCCVHMWCGPCAISQMYRELKNRGADPAMGWEVLSKKTTMAPVPMQDMTR

SEQ ID NO: 75024 - protein, 47 aa, Zea mays
  Coding DNA Sequence Number=SeqID_31649
MVNLAAVLNTELDHTLDESGKHPYRSPPRGRFDYGTPYCRTQIDLDP

SEQ ID NO: 75025 - protein, 26 aa, Zea mays
  Coding DNA Sequence Number=SeqID_31650
MCHVTIQKQKEIAEAAAQQSQPKQNM

SEQ ID NO: 75026 - protein, 259 aa, Zea mays
  Coding DNA Sequence Number=SeqID_31651
  Homolog annotation: Hit_ID=Q6J9V9; Match level="QueryCoverage=30%, HitCoverage=30%, E-value=1e-11, Identity=46%"; Hit description =Putative uncharacterized protein
MAVAGGRKQRSSRTRKGDTPKGILLREGNGPRAPLLIRGSKAGPSEGFNSRLRALGLRAHYWLALEGFDSRLRRRAKDDPGYVRYITKARATLPRLGGCSRKPGSGQTVDSVNIPARELGTRLRTRATASSHEGTTRPAEASRNALRPRRSQTTPPRPRGLHPADSASAPEDDELRLARPQGSDSASAPEDDELRLARPQGSDSALASADGLRLARPRGSDSTSTSEDRLDLDLGGASASPDPGLGPTTSQEGPSLPYP

SEQ ID NO: 75027 - protein, 261 aa, Zea mays
  Coding DNA Sequence Number=SeqID_31652
MKSPSNGDKTSKSFKWKLFDIIFDSNILFNLLQKSNFSGVLPNVLNIGAHETKPQLSGSTTSTNPSPSHLGFPPPFILGPHPMSRCGAQERWSMAEVNVMWARADGAGAVPKVHNRPIKRPRKGSNKKSLRNPKGTLVWRTRLSSVPPDSVRCTRELDAELLTFGKIRGRSAIIHRTVQCASGAMATSSATVDCNAFNARLHAEVRTRAVGAPDSLKDMSGAPPDSPEAPQVRAPTVEPQRLADVAGAPDCLVRHATANFQ

SEQ ID NO: 75028 - protein, 411 aa, Zea mays
  Coding DNA Sequence Number=SeqID_31653
MAGERGQEDVTMPVGLAVVATVARGDVGSSQDPWSKFCAGGEIALSAAAKDVAASVAQQLKYSAAFVERIALGVLTSEFSAERRRLEGRIERLRMQHTEAIRDKSVAENRSHNLLEKLMAVEAEKEDLCRRLAEEREGAEKAQAARAEASLALKRTMDVESGQKSLRDYVEKTEASTRVGVNRAHALLVDAYRQLTARTAPFDKSGEEVGLRFLRWLQEELESLPSIVTGLMSYASLVTCEEATNALSHEGCRHFEVFDRVTEDFDCGIFQIGDEMLNDEEVEDFGGLQSSLTWTEGTGTGAEEQSAPQAGPGKDPAAAAALAGEDSAAAAAPSQVPTSGPPQSTPDDVDTNFLAAANAMHINGNVSGSETETLSLDGDDFGSPFSWIDEYSDEYLDYFAVLDLAATESSL

SEQ ID NO: 75029 - protein, 80 aa, Zea mays
  Coding DNA Sequence Number=SeqID_31654
  Subcellular localization annotation: CTP_CleavageSite=42; ConfidenceScore=5.73e-01
MSSASPSATRDTPRFAPSPSGLPDPNSSKCFSCSRSPPPSTRDFRLPAVLQALLGLRLWGLRLFPEYLSIRTCLWSDNPG

SEQ ID NO: 75030 - protein, 68 aa, Zea mays
  Coding DNA Sequence Number=SeqID_31655
MGNVCNLWRVLENGISAELTVKSSLGILFDYKNFGYFYVDGCPHCTQCSGGDAGNMEDFEEFQEYDEF

SEQ ID NO: 75031 - protein, 117 aa, Zea mays
  Coding DNA Sequence Number=SeqID_31656
MTRERSTPELDLAPTSKTPETRVAMSIVAVKAAAPQAKGVVANLDEGSEDDSEDIGIEEDNTIIRPTKLSHVDFKKSKIKGGHIGGIHNLRPNTVRDTTQNLFIYITEEHGPRLIAT

SEQ ID NO: 75032 - protein, 356 aa, Zea mays
  Coding DNA Sequence Number=SeqID_31657
MVHTSIVVLFLPLCVEVHGGSPSDHDLVGAEAVVVEPAPLDGAGKHDWVGAGFARYGRVVGGGNLHRETSNRIFAAAGSVLGLFLLRRCRGFEGGILDDGWAFWLGADWLWCAPIDDCDCPYRSLTALAGSKFYWTSEGPWASSEFQLCIDGAPQTCHTSQTVGIAPVEGSLGQCVYVGSVPLEIEQKFVVKPFPGLNGQWRWLFLMRKARSFSWSSAEMPMTSPSSIVSSPSGGAKLGGGACGAPSELQVRIVPSRVGVVLALSLAIDSVIFEGLLGGGAREGFAFLLRQECCLRCIINGRDSLRGCSLGGHCRLFFSRMNGGSQILELGVQDRLIQWEIGEGVCNANTGCQKPR

SEQ ID NO: 75033 - protein, 196 aa, Zea mays
  Coding DNA Sequence Number=SeqID_31658
  Gene Ontology: Mol. function=ATP-dependent DNA helicase activity; Cellular component=cytoplasm; Biological process=DNA unwinding during replication
  Homolog annotation: Hit_ID=Q9L6S1; Match level="QueryCoverage=84%, HitCoverage=24%, E-value=1e-80, Identity=88%"; Hit description=ATP -dependent DNA helicase rep
TAAIARADYDDDRHSAYRTREREMTATLKSWTLSGRGYEALTRFTHWLAEIQRLAEREPIAAVRDLIHGMDYESWLYETSPSPKAAEMRMKNVNQLFSWMTEMLEGSELDEPMTLTQVVTRFTLRDMMERGESEEELDQVQLMTLHASKGLEFPYVYMVGMEEGFLPHQSSIDEDNIDEERRLGIIGFNSEVKQKH

SEQ ID NO: 75034 - protein, 76 aa, Zea mays
  Coding DNA Sequence Number=SeqID_31659
MAPLRRYSLPPRLLRREEDGVLTGDLVMDGYDLSGQWNVRQITIVRAWYYRVYFSSGPSTFDPTVINAYRFGLWAI

SEQ ID NO: 75035 - protein, 153 aa, Zea mays
  Coding DNA Sequence Number=SeqID_31660
MANIPRRVILFALESDFDNFVTLPAAESAGCLATSLWVFSEFTKLIPIVWLINELGLKDIPLLGRKYTWTNGQIDPTLLLQKFGLQSLYLEPGVVSVGVLGPTAHPGLPLKVLAALKCVTPYVLASMLCVMGYKWTRGISVPRKPPIFGLILR

SEQ ID NO: 75036 - protein, 322 aa, Zea mays
  Coding DNA Sequence Number=SeqID_31661
MYQKITEVLKEGKTGMGKWTLETKPVHVHMANIFSALYFEDTIRLVQQNAQLRNQTRMLSAVLDQRTCKHIWRCMGNSMRRGRRLVQMFNQHPLLWKKEYGLQQPAALVIINNTVDAQRIEARMCAPDDFCKNSKQLGIMARSGFRELRIWGAWLRKGRIGREGSRHTWWVIVSGDEVEKRGSVRPAVLGGTGEDLTAAVAVVGSVVAWREIASEDQQIQIRSPWLSSERWQRHQQEPTEDPRGRGTGHGDVWDEWEHVRGRGIEPSDGSRGSGGGGKHEVWEREGDDDLATRETSGLDDRARHPTHPNDHDFPDDVDRPIT

SEQ ID NO: 75037 - protein, 66 aa, Zea mays
  Coding DNA Sequence Number=SeqID_31662
MCYLGANDDGAEAPRDQNAAERERGATTRELRVVVTKAFGVAPSAFYKPREGRSWLYHSKSTAGAA

SEQ ID NO: 75038 - protein, 120 aa, Zea mays
  Coding DNA Sequence Number=SeqID_31663
ILGVSYGWCADYGIKYIGWQGLRIAARYCINMSSLADVSACVTPCLIRVDGPDGDVVTGEFRHPFGYFGGRLRIPEQLSETPIRSDSYFVCLKVVSQLAQSHDDHPESSFVHVGECFYEV

SEQ ID NO: 75039 - protein, 62 aa, Zea mays
  Coding DNA Sequence Number=SeqID_31664
MGLKTLSTKCTFASLTHQRKDSQGYAGLRESSISLPEAKLTHDELYRFVILTNSKILKNTEM

SEQ ID NO: 75040 - protein, 158 aa, Zea mays
  Coding DNA Sequence Number=SeqID_31665
MSGAPEDCNCQPVTFGNFWRQHRYNSPDCPVYTGHVRCSKGERPQELASLGNSVWLLRYNSPDCPVRAQKSELQRSEPNGFGDVAVAPDMSGSNWRRNSRCNVDTTDSPVNYSEADKQKSEAGEFLRALTLEQWNMSEYNGKSVKYSVCLKKISEGGR

SEQ ID NO: 75041 - protein, 174 aa, Zea mays
  Coding DNA Sequence Number=SeqID_31666
MTHHLQKAPLTATDPPTANAPDPGTSYKHKQATPPSQRADRPADPAFPRADQVADHLQEEGGVEWVEEGREMSERAVPPLPSSLLVELPEDLYFTQISRLPSHPHLRHYASYLVNPHNDIGGAPRLAPIGYRHAWLLPRHAPSRALAPNPPLAQDDDYLAPLQADQEKELKLVQ

SEQ ID NO: 75042 - protein, 451 aa, Zea mays
  Coding DNA Sequence Number=SeqID_31667
  Gene Ontology: Mol. function=nucleotide binding; Biological process =defense response
  Homolog annotation: Hit_ID=A2YRN5; Match level="QueryCoverage=57%, HitCoverage=20%, E-value=5e-17, Identity=33%"; Hit description =Putative uncharacterized protein
MEQSILPDLMQSLGNLHKIQSLKLESHPGCGRADNAMFDAMALPGHLRHLLVSEYFVHLYRLPSCINPLCLVKLSHLELYVIDMDEHSMQILGELAELRHLVLSTRSTVRVNNVAADGFFHKLRSCKFYTSMVLFVLNEDSSVSFTLWNGTDDLVLSYGKKDGECPSAPAVMPNLEELLFSAQPKWSLMKCQGSHGNLGLEHLRSLQKVTAVISCELYMFEAEKMEAELGISCDRYFVEAWVMDAEDGLRDAIGVHPNHPTLVLGRKNEGVLASDVPQEEHEGEGSSVHLNACKQPTTRVQTLNGSGSWIKTFSNSESVRGVKEQPEGDRKMIIMINHWYMTIIIFIPPYTCVFFHLSIYIYAYMIKMMKCWLRDVNGDPIPANPWGIPPIRVRAHRSNPRSWRSLRPPGARCCPPPEAASHRREVMDLSSDPKRKPRCLSKVVMLALLMS

SEQ ID NO: 75043 - protein, 126 aa, Zea mays
  Coding DNA Sequence Number=SeqID_31668
MASSRARVEATVQSDGNEQGLNRNQSRALPPLHLCKGQGKHLKGGTTTKKATGDLPLQPGSHCASNTNDCAAGPQRLGQSTNRARESRLEGVNRAKLKFTKLITTTSRVSVRNIIESERGCKQSQR

SEQ ID NO: 75044 - protein, 126 aa, Zea mays
  Coding DNA Sequence Number=SeqID_31669
MASVTSSLFFATASLVMVALIMHGGDSNTMCYAARHLADATAASSACGHAFTDARACRRFPRWTPCHVPVPPIPAVPNTAALPLMPVVPHYWNRRLCRVPEALGKALKTLGKLFAECRTRQRGLGI

SEQ ID NO: 75045 - protein, 387 aa, Zea mays
  Coding DNA Sequence Number=SeqID_31670
  Gene Ontology: Mol. function=oxidoreductase activity; Cellular component=chloroplast thylakoid membrane; Biological process =potassium ion transport
  Homolog annotation: Hit_ID=Q8H4J8; Match level="QueryCoverage=88%, HitCoverage=87%, E-value=1e-131, Identity=65%"; Hit description =Aldo/keto reductase family-like protein
  Pfam annotation: Domain name=Aldo_ket_red; Domain location=52-374; Score=72.0; E_value=1.9e-18; Accession=PF00248.12; Description =Aldoketo reductase family
MITALQVSGGGLPLLFARRRRRAFRPPQAVASDAAAAAEGTAREDGGKVALGGSGVAVTKLGVGAWSWGDTTYWNEFRWDDTKLKAAKGAFDASIDCGITFFDTAEVYGAGVRIRAWKLDDALRPYLTTTRHKVNLTLLPNVFCRHQVSGAINSESLLGRFIKERQRKEQVDVAVATKFAALPWRFGRGSVICALKASLDRLGVSSVELYQLHWPGIWGNEEKRLRDAYERLRKRGVPLASNQVNYSLIYRNPEENGVKAACDELGVTLIAYSPIAQGALTGKYTPESPPKGPRGRIYTPEFLTKLQPLINRIKEIGGSYGRTSTQVVLNWLVCQGNVVPIPGAKNAEQAREFAGALGWSLAPDEVEELRSMARQVKPVIGFPVEKL

SEQ ID NO: 75046 - protein, 305 aa, Zea mays
  Coding DNA Sequence Number=SeqID_31671
  Gene Ontology: Mol. function=ARF GTPase activator activity; Cellular component=ER-Golgi intermediate compartment; Biological process =regulation of ARF GTPase activity
  Homolog annotation: Hit_ID=Q10N88; Match level="QueryCoverage=87%, HitCoverage=59%, E-value=1e-113, Identity=76%"; Hit description=ARF GAP-like zinc finger-containing protein ZIGA2, putative, expressed
  Pfam annotation: Domain name=ArfGap; Domain location=11-116; Score =93.8; E_value=5.5e-25; Accession=PF01412.9; Description=Putative GTPase activating protein for Arf
MSCAFDDYYIKDYGVILAPERNPQWASVSYGVFMCLECSGKHQGLGVHISFVRSVTMDSWTEAQLRKMEAGGNDRLNAFLTAWGVPKETSHVAKYNFNAATAYRDCIASLIEGKPWTDPPVVKETPGSGAPAPARKPPLHASRGGGGWDDWDDDFRPDMRRNQSVGSFAVAGAQSGRQPPRSKSTQDIYTRQQLEASVANKDDFFARRMAENESKPEGIPPSQGGKYVVFGSSPAPSANRNGGAAQGDVLQVVSQGFGCLSLVAASAAQSAASVVQVGTKEIQSKLKVIGDGGDPNGHYDKDDHQ

SEQ ID NO: 75047 - protein, 213 aa, Zea mays
  Coding DNA Sequence Number=SeqID_31672
MAQEASRGAKDATSARNRRKAYRGARSTCAGGRVKSGDVDLVSPARDYKRANLAKGLVQISSWHLGLATMWLWVTPGIPLAVRNTLPRPRQWHQREVQGRRQQPRRFYCLFHGEDCTHLTRDCPETKPTRDRMSRAQPAANQRVVAHTYHHHHQQPYNNEQPQHPPNHTYQPRQEVQVLPPPPLHHPNPQHHNHPKHPSRKTSPNNHIAESST

SEQ ID NO: 75048 - protein, 112 aa, Zea mays
  Coding DNA Sequence Number=SeqID_31673
MSGVHRTVRCDNGTTDISAPTATCSALNARQHAQKSGTPILAHRTLYSTCLVRHRTSRRAQKTELQRSELNGFGDVAGAPDMSGVHRTVRNFVFQVIEKRKLTRSEGPFERG

SEQ ID NO: 75049 - protein, 106 aa, Zea mays
  Coding DNA Sequence Number=SeqID_31674
MGCTGGAPNGCSPRPSNGFFKDNPFEGLPFACGNWHEAILHYALEVSIMSSIFCCRGIHCMPCTDVTVLKNILIIPGRPPLMGVGKGRLDGWKCLLNALRLFSDRS

SEQ ID NO: 75050 - protein, 129 aa, Zea mays
  Coding DNA Sequence Number=SeqID_31675
MTKTLASKVYYKRNSGSPPHNEQPHSTEERPAEQQKTDERLVVARPSGDDDDEFCPGGPNNSSDDLRADAAVRRPPSVPKLERQGRAEGRRVGGKRHQTCGGPCGNLVFQVIEKRKLTRSVGSFERGKG

SEQ ID NO: 75051 - protein, 175 aa, Zea mays
  Coding DNA Sequence Number=SeqID_31676
  Gene Ontology: Mol. function=transcription factor activity; Cellular component=nucleus; Biological process=regulation of transcription, DNA-dependent
  Homolog annotation: Hit_ID=A3BEV8; Match level="QueryCoverage=96%, HitCoverage=93%, E-value=1e-23, Identity=40%"; Hit description =Putative uncharacterized protein
  Pfam annotation: Domain name=AP2; Domain location=10-61; Score=69.0; E_value=1.6e-17; Accession=PF00847.11; Description=AP2 domain
MTPGDAGPEVKYRGVRRRPSGRYAAEIRDPARKTPIWLGTFESAEAAAHAYDAAARTIRGAAARTNFPSASISATVAPPAAPAATSSHSSTVESWSGGSGGGAPVGILRAPAAEEDCRSYCGSSSSALCEDGASGPGCGDETAAPPRCSPLPFDLNVPDPAADEMDWRCDTLLHL

SEQ ID NO: 75052 - protein, 313 aa, Zea mays
  Coding DNA Sequence Number=SeqID_31677
  Homolog annotation: Hit_ID=Q6QP51; Match level="QueryCoverage=12%, HitCoverage=17%, E-value=8e-09, Identity=74%"; Hit description =Putative growth-regulating factor 1
MNKTLASKVPLQTELWFRLRTYEQPHSTEERPAEQQKTDERLVVARPSGDDDDDFCPGGPNSSSDDLRADAAVRRPPSVPKLERQGRAEGRRVGGPPLRRGGWVPRVMQAGSKQKKPNRRARCVQPPSGYKRPSTFAQTSERKGGQPCRRHATAPSGRTSPTPNTPDMGAQAHASCNRRAECFVHATAPPLAPLPRLLDCGTNNATRGHPAHDPAAPAWRDGQYGRRRAGSNGGGRRAGTGKGGYPEKDPSPRRNQAPSPPTDQRFEGWPPGRVRQPPQIAWALHPLLVRGSKAGPSKGFHGRLRLLGLRAHY

SEQ ID NO: 75053 - protein, 87 aa, Zea mays
  Coding DNA Sequence Number=SeqID_31678
MSGGSAKREMETGDKAISHGKAPSRESGAKGREESPPRVKSHRSGDKKKKTKKVVYYETDSSSPIVWWSLRGLSDPGNQGRKLTRSK

SEQ ID NO: 75054 - protein, 259 aa, Zea mays
  Coding DNA Sequence Number=SeqID_31679
MTGDKQRQKLKQKPLSKISNTYIKKVDKKVATPYLIKKKKNGKVIAIKANKQANKEKGAKRIWVPKEIISTMKRTKKDARLTWTEELRKATPQKKTLKRSKKSPSVLPADYLCVEHRIVRWHTGLSGAHTPDYPVHQRTAAQWLVPGGTQREDHRTVRCGKPAAPTVTCSDRATARRTGHATVRYPSEAKAIEGLRDGVEIAGQTRPGFWGLDHFPCVVDDEFEAPKMDGHSWGLDDVAIGHPGLGEVVENVQGPYLAC

SEQ ID NO: 75055 - protein, 255 aa, Zea mays
  Coding DNA Sequence Number=SeqID_31680
MALIVGRIRELEAEVFRLGVNHALVVTRSQYEDSIKLDQVCIRGLRLRSLGALPVKGPMRGRHRAVTRFAEHPSIDIMLDDSFGSNRAWHPISSVPPMASILLGVGVMRGIEDKIPAFIDHPYELQVIGSREMVMGYEGRNHPWAVIQVGQKHLEDVTRAIIEGHPFVVADARLTWTKELRKATPQKKTLKRSKKSPSVLPADCLCVEHQTVRWHTGLSGVPGNSSPTASSRWHLERRPPDCLVWKACGANGHLL

SEQ ID NO: 75056 - protein, 53 aa, Zea mays
  Coding DNA Sequence Number=SeqID_31681
MGTKPTRGHQRVQATARRANGGADQLRRAIAQCPRVFNSNSNQLPNSNQIKHV

SEQ ID NO: 75057 - protein, 80 aa, Zea mays
  Coding DNA Sequence Number=SeqID_31682
MAMMESLGVVSPSESIKDRLDVGLLIEDPLTGHMPRRGQHILESLLLCRVKKRQTFVASVQRWYPKKRTKTKSTGGKALR

SEQ ID NO: 75058 - protein, 212 aa, Zea mays
  Coding DNA Sequence Number=SeqID_31683
  Gene Ontology: Mol. function=protein binding; Cellular component =anchored to membrane; Biological process=xenobiotic metabolic process
  Homolog annotation: Hit_ID=A2Z2Q8; Match level="QueryCoverage=69%, HitCoverage=45%, E-value=6e-40, Identity=58%"; Hit description =Putative uncharacterized protein
  Pfam annotation: Domain name=Thaumatin; Domain location=2-131; Score=- 4.3; E_value=7.1e-08; Accession=PF00314.8; Description=Thaumatin family
  Subcellular localization annotation: CTP_CleavageSite=32; ConfidenceScore=5.10e-01
MSLSTWASPTRPEASTGRAWPGPIRTGPKRVRAGSVPGGPFGHLYLNRSCPKELQVERGGTVACRSACEAFGQDQYCCSGAYATPAACRPTAYSSIFKSACPRAYSYAYDDGSSTFTCHSAAGYTIAFCLPPSSGLHGSDVTPLVSPPASGQSTGRVGGDGVGSADQPPHPATGNSDGGGYHQLWMTMSLASTLHDQLWLLLPLPAVLLLLL

SEQ ID NO: 75059 - protein, 276 aa, Zea mays
  Coding DNA Sequence Number=SeqID_31684
  Homolog annotation: Hit_ID=Q6JAD6; Match level="QueryCoverage=79%, HitCoverage=36%, E-value=7e-60, Identity=51%"; Hit description =Putative uncharacterized protein
MCNVRCTGWARVDLPLCGPVRCVPDSNCAMYGVHRTSTVHCLHDETEVHPLAVDPRPLNLQRAIAIRVFLSWGPLAEKKTPNKYQDPGVLLQGSVVSSDSCACSPMYVEEWVRVFYAIVWINPGHQWMRFRFEHEDVTLHTTQIRELFGFPKSTTRLHNMCYGTLDPPHHPHNGVAPSTAHVAALFRPPFTYESRCSPVDFTPAVKFLYELMRHTLLSRMGYREATTHIQLWLLSALATLDASRLQFGFYRLAPEDTTLDSVDPLAPDFRDEDEAI

SEQ ID NO: 75060 - protein, 170 aa, Zea mays
  Coding DNA Sequence Number=SeqID_31685
  Gene Ontology: Mol. function=molecular_function; Cellular component =anchored to membrane; Biological process=biological_process
  Homolog annotation: Hit_ID=A2Z2Q8; Match level="QueryCoverage=91%, HitCoverage=46%, E-value=5e-62, Identity=73%"; Hit description =Putative uncharacterized protein
  Pfam annotation: Domain name=Thaumatin; Domain location=38-169; Score= 67.5; E_value=4.6e-17; Accession=PF00314.8; Description=Thaumatin family
  Subcellular localization annotation: CTP_CleavageSite=73; ConfidenceScore=5.13e-01
MGEASRASSSAYPLLLVLALAHWRGVAAASSTTFTVSNYCSQPIWPGTLAGAGTPQLPTTGFRLDPGQSALVPAPAGWSGRLWARTGCAFGAGGEGTCQTGDCGGRLECAGAGGAPPATLFEVTLGKGATGLDYYDVSLVDGYNLPVVAVPRAPSGAGCNATGCTADLNL

SEQ ID NO: 75061 - protein, 260 aa, Zea mays
  Coding DNA Sequence Number=SeqID_31686
  Homolog annotation: Hit_ID=Q84JT9; Match level="QueryCoverage=60%, HitCoverage=60%, E-value=7e-18, Identity=38%"; Hit description =Putative uncharacterized protein P0686C03.145
MSTAVARPAHGGFRQSGSGKPDPEDADRMRDANGYLVQEREKEEEERGGEAAAAGREEEALSEASSIGAASSDSSSIGENSASDKEGSDGEEEEVEGKAQGLGMMGLATLQSLDDALPTKRGLSNFYAGKSKSFTSLAEAAATAAAKEIAKPENPFNKRRRVLRAWSRRRASCSALATAYLPPLLAPDHAVVEEDDEEGADDEDEDEGQHGRGGLRGRRPPTFPSPRLSAHATAGQMARAGSFRSPRSFSMTDLHSAEYE

SEQ ID NO: 75062 - protein, 152 aa, Zea mays
  Coding DNA Sequence Number=SeqID_31687
MGKSKKGGGSSHHSGDKRKRELTPPSEDFGDSEYLEEEFSSESEGCSAPASPPASSGDSNDSQGIAAEVWTYIRAVERVGLEGSDESEYSSDEENSSDSSEEGSGGDGGDGDDDGGNGDGGGDSSKGGDDTGKGGSGDDSKGSNKGSNKASG

SEQ ID NO: 75063 - protein, 647 aa, Zea mays
  Coding DNA Sequence Number=SeqID_31688
  Gene Ontology: Mol. function=nucleic acid binding; Cellular component= intracellular
  Homolog annotation: Hit_ID=Q94FY3; Match level="QueryCoverage=67%, HitCoverage=82%, E-value=0.0, Identity=96%"; Hit description=C2H2 zinc-finger protein
  Pfam annotation: Domain name=ARS2; Domain location=373-589; Score= -84.0; E_value=0.024; Accession=PF04959.4; Description=Arsenite -resistance protein 2
MTEVADASPPPPTAGGGDRKRGRASPVPPLPGQHKRRREEGGGGGFDRRRLGPVGGGGHEQDDRSDLNVAAVFNAVEISLPGSKLVMVAYEAVDGMESLSWYGNGLGGIGGRGGDSRYTNRAPDSGRGGWNEGSGNSRREGLMSYKQFIQELEDDVSPVEAQSRYEEYKSEYITTQKKAYFALHKDEDWLRNKYHPTNLENVIERRNELARTTADDFFLQLQSGSLDTGPGLTGSAVSKSGNNSSKNLDAVEGDGKKGKLGKGSDDSYYAAPKAHPVSSEVRRIRIDIEQAQGLICKLDSEKGIENNILSSSNHEKPDMDKSHGSMGPIVIVQGSSTVKGLEGTELLDTLVTYLWRIHGVDYYGMSETNEPKGLRHVKADARTYNGASSSATEWENKLDSFWQDRIQGQDPLEILKAKEKIDGAATEVLDPYVRKIRDEKYGWKYGCGAKGCTKLFHAAEFVQKHIKLKHTDLVVDLTSKAREDIYFENYMNDPKAPGGTPIMQQPAPRGKGRQRPPIESRLRDERGNHRLDSDGSGENPDDPVYDSFGDPTMHGAFPPDIPAPPVLMPVPGAGLSPVPDLIYRALQLPRPGCSRGRSDRHGLPKLVGLPPDTRLGKHYSAKSKHLALSKITAEEPQQASQHLCLDS

SEQ ID NO: 75064 - protein, 270 aa, Zea mays
  Coding DNA Sequence Number=SeqID_31689
MNTDVPGSNALTDRAKIDLNMLLALVLDEVDGEVDNSDVAAVDTHTSREVVIKLLEELAELARLSHHISNSLVCSLSTRTGDHRLKLGGPRDEVVPKEHCIAGCRPAETDLLDSICDVGLGEGEILKSVNKVAIGSWVIGRDTVAKDLDLRVHCPPGSHMACSPAWQCTPGYFGWTTAPQSFDCKDSVILEDSRGCLERLAPEREAGRVQQDVEACEPPQRGWESQRPAGGGQLGRGRGAGKGGRRLGAQAPTARGMAITTRPNPKTLNW

SEQ ID NO: 75065 - protein, 290 aa, Zea mays
  Coding DNA Sequence Number=SeqID_31690
RDEVDNATTLHWRARRQASPTAAALHERVHRQADPPTAVVAPRERAQAGEPDRRPPPLHGRARRQAGPPAAAAAPLEGGGGQLDGWEAASAARAAGWGRAGCGELLALALAGEARKRPTRGRRRLLGAGKGRRCLIRRGGRGATPVGRKAAVAGRGRGPATTRRKAGGTTQWGSGGWAGASSRAASARTPRRALGRGWTRRAAGTRVGGCCWGRGAEDRTGQGRGVASGWEGSRPGREGWASRGGGCVWGSWLAAVGEEVVLLDGDTPHPESAKETSNNWEAILSFKVGS

SEQ ID NO: 75066 - protein, 27 aa, Zea mays
  Coding DNA Sequence Number=SeqID_31691
MTLRTSPTPSTTSPEQSHRRELRKFIT

SEQ ID NO: 75067 - protein, 136 aa, Zea mays
  Coding DNA Sequence Number=SeqID_31692
  Subcellular localization annotation: CTP_CleavageSite=82; ConfidenceScore=5.13e-01
MTVAGGREQRSHRQPSSRPIRGQQENPLSRREDNAPVIRSSNGSRTRNGRPANRTPRRINSAGPGKGDTPKRILPREGTRLRASLLIRGSKAGPPKGSTAASDRVGPTPTTGQRFEGRPPEGFHGRLRLLGLRAHY

SEQ ID NO: 75068 - protein, 79 aa, Zea mays
  Coding DNA Sequence Number=SeqID_31693
  Gene Ontology: Mol. function=RNA-directed DNA polymerase activity; Biological process=RNA-dependent DNA replication
  Homolog annotation: Hit_ID=Q8S461; Match level="QueryCoverage=98%, HitCoverage=5%, E-value=7e-11, Identity=38%"; Hit description =Putative prpol
MEAYYEEVRHLEDKLFGLELNHAARRYNKALGDAQRGIRARPHDETPPVDGSKAMQIDGDSDRATPAMDWRTPYLEYLL

SEQ ID NO: 75069 - protein, 114 aa, Zea mays
  Coding DNA Sequence Number=SeqID_31694
  Subcellular localization annotation: CTP_CleavageSite=54; ConfidenceScore=5.35e-01
MPVAPSANFATGLDPAPPRRVAAPPGEPRRPRRAAPPPGEPLPGTRARGSLHVSGAGDSGPSRCALASPSPPRRRPPALRPCPDGCAPRRAPRRPCLASCPCPGDSRPACLSVV

SEQ ID NO: 75070 - protein, 85 aa, Zea mays
  Coding DNA Sequence Number=SeqID_31695
MTVATPVHGPISGCNPRYLKTYPKPSGAIRDEERTQRSKDETLEGKHPWYLLNRGFSPRVSHLRQNFASPEVATAPSVSPELIPD

SEQ ID NO: 75071 - protein, 453 aa, Zea mays
  Coding DNA Sequence Number=SeqID_31696
  Homolog annotation: Hit_ID=Q6QP51; Match level="QueryCoverage=22%, HitCoverage=37%, E-value=2e-09, Identity=41%"; Hit description =Putative growth-regulating factor 1
MRRKDGGYPPSGGLEGGKTRCIREREDMVAFQRGQLHRHLRHHRASSIAEPIPRLEATQRTTQQRQPGAAVNAAKSGPAVMTVAGGREQRSHRQPSSRPIRGQQENPLSRREDNAPVIRSSNGSRTRNGRPANRTPRRINSAAPSLLTDQRFEGWPPEGFNSRLRSRGPYTHYWSEVRRPAPQRVPRSPQATRAPRPLLIRGSKAGPRRVHSRLRRRARDDQGYVRYITKARATLPSSLETPCSAPIEGNMALSPLLLAERRRRGRLGGCSRKPGSDRTVDSVNIPARELGPRPYTRATASSHEGTTRPAEALCEALRPRRSETTPPRPRGLHPAGALARTHRNKMQPRKAGPLAKKCDESLQASANTPFEARGLLSGTIIRGILKTPNSQLGSDSGSAPEDGELRSARPRARTRAKPRKTANSAPPDPGLGLGLSPGRRRTPLRPTQGSDSG

SEQ ID NO: 75072 - protein, 226 aa, Zea mays
  Coding DNA Sequence Number=SeqID_31697
  Subcellular localization annotation: CTP_CleavageSite=49; ConfidenceScore=5.53e-01
GFRGVLGKCPGFLKGRTPRSPGRGVSSAEPRTPSRPSRGRSAPYRAQLRLALLAAWPAVRLRWRMSCLGPVTAWRTPAAVRPTPGARVPSLVRASCACCVEKCLRAATRPTGSRARYTLPSSSSPPGVRLVGSRAPAAFASCRRRPMAGGTEDTSLALLVSDVAHAEGRRRVGVTRPRIGPPERTTSSPARRLRAEAGAGPSARTCYLVDPASSHMLVSKIKPCMC

SEQ ID NO: 75073 - protein, 82 aa, Zea mays
  Coding DNA Sequence Number=SeqID_31698
MGKPVPSVLMLLLSRVTALVPTITGMGDHVSGRVRGKVCGQVQSGIRTLILILILSRRPRIPMDPCPQTNHQYDVNVGTTNF

SEQ ID NO: 75074 - protein, 183 aa, Zea mays
  Coding DNA Sequence Number=SeqID_31699
MAQRLTRSTCAGGVPNSGERDCAFPVAEVPGSSSGKLHGLLGKLPRGLDRAEEGGKQFGHGGCLRAALTGRGEVARAMGELRGVGRGTGDATGKMARHWGGLYSCGACVVTGGRRRVGGTLMDTKFHKHQVIEWEYMLGQSIMEGLIAKFQACDLYAFMGQMTDYSEMAVKQFIATAEINIED

SEQ ID NO: 75075 - protein, 166 aa, Zea mays
  Coding DNA Sequence Number=SeqID_31700
MKTLTTFCGYHPLEMVMHPLGLFPADKKDDPMWCNRVSHVKDVWAMYPDLVGRVTVQCMSFVVDLSSELVEKDLQVERLSQRITTLEQHVEIRDNTIDVLENQLHDVQRELEEANDHLDMHHLEMEANEAESEGEEAPEELGPAPSANGTTSAMPPSPASSVASTT

SEQ ID NO: 75076 - protein, 153 aa, Zea mays
  Coding DNA Sequence Number=SeqID_31701
MGKNNKRKREPTPPSEEFGDSEYSEEEFSSEPEGSPAPVSPPASSDDSDDSQGIAAEVWTYIRAVERAGLEGSDESECSSDEEDSDGGDEGEDDDDDNDDGWGGGDGSRDSTKGSSRGSTKGGGGGSRDSTKGSSRGSTKGGGGGRGRGRASG

SEQ ID NO: 75077 - protein, 173 aa, Zea mays
  Coding DNA Sequence Number=SeqID_31702
MPPRMRKTARKSTGPFSVPRHQLAPQHEGSSSGGNDPIGDLEAQVDQLRAELRHRNDLWVVDGERINDLRTEIRHLQDQLADRDLALDWAVNSRSLAWAKEARARARVEEHSSAVDNLQLWQKKKKRRNEQSWAETSPGGPIRTGNRDAPARARARARTRPHNYLAKTPRGLN

SEQ ID NO: 75078 - protein, 216 aa, Zea mays
  Coding DNA Sequence Number=SeqID_31703
MAPPVNVVGPCPMLGDVEAPLRSRSSLSSEAEVESEPSGRARRRPSAEARAESEPWGRAKRSSSFFRAEPESEPWGRAEWSSSSSGAEPESEPWGRAERSSPSSGAEHESEPWGRAKQSFPWRLGPGLAAVSLTLSSGTAVRAAQAALSFCQTGQWSGEATFALNVPAIWSVGVAIWPRLLLGEDWASGESRLCANGCYQLRFRSLEGTPNYGPQQ

SEQ ID NO: 75079 - protein, 50 aa, Zea mays
  Coding DNA Sequence Number=SeqID_31704
MELFQRPSLCISEISARLPAYALEISILALGVEDSLGAPEVHPMGVAPEL

SEQ ID NO: 75080 - protein, 67 aa, Zea mays
  Coding DNA Sequence Number=SeqID_31705
MGSHDPRAKRESRLMGKVCDLCRGDTSIRDGWFTDDDEDGYDHAYGNGKQGVEADLQEFQDVDEFED

SEQ ID NO: 75081 - protein, 72 aa, Zea mays
  Coding DNA Sequence Number=SeqID_31706
  Subcellular localization annotation: CTP_CleavageSite=35; ConfidenceScore=5.39e-01
MATARPGQRAATPAPTGGLLPLTARPWKNCRALLPCSTGRITVAWPWPPTPTWSTSWPATNSLECPLRSSWW

SEQ ID NO: 75082 - protein, 111 aa, Zea mays
  Coding DNA Sequence Number=SeqID_31707
  Gene Ontology: Mol. function=nucleic acid binding
  Homolog annotation: Hit_ID=Q8GZZ4; Match level="QueryCoverage=32%, HitCoverage=9%, E-value=4e-11, Identity=83%"; Hit description =Putative uncharacterized protein OSJNBa0013D02.8
MTMGTLQVATFTALLFRVFVAGLDCFGPVRSGYSHTIHLTMIIRVCGVLHVAIAIASFVGTLLRCQLIVFFLWTGDMPRYDDRYGGTRLYVGRLAPRTRSRDLEYLFGKYG

SEQ ID NO: 75083 - protein, 263 aa, Zea mays
  Coding DNA Sequence Number=SeqID_31708
  Gene Ontology: Mol. function=kinase activity; Cellular component =ornithine carbamoyltransferase complex; Biological process=amino acid metabolic process
  Homolog annotation: Hit_ID=Q6QP54; Match level="QueryCoverage=42%, HitCoverage=37%, E-value=1e-17, Identity=52%"; Hit description =Putative kinase
MAPPVDVVGPRPRLGDVEAPPRSRSSLSSVAVVESEPLGRARQRPSAEARAESEPWGRAKRSLSSSGAEPKSEPWPKSEPWVGRSGVRRLPGLSPSLSPGSGGAEFVVFRGFSPSPSPGSGGAEFAVFRGLSPSPSPGSGGAEFAVFRGLSPSPSPGSGGAEFAVFRGLSPSLSPGSGGAEFAVFRGFSPSPSPGSGGAEFAVFRGLSPSTSPGSGGAEFAVFRGLSPSPSPGSGGAEFAVFRGFSPSPSPGSGGAEFAVFRG

SEQ ID NO: 75084 - protein, 231 aa, Zea mays
  Coding DNA Sequence Number=SeqID_31709
MGSRSLPVPRKNLRLRVKVPTVDSCRRWTREASRLGVAPPLSPVPEHQQPQAKTSEEVSERTKKEPIARGGGVGGCGGGRISAVSTTATVEDEAGKAPNTVTSRTRWRSRAPRECSARARRTTACRRRTCNGGGGAMGRIRGHPLMVGDPLDGGADGGDGVGFDGDGAELRAGWAGGAQEDFHARGRARMTAAGVTRITAAVSRVQTAEAEQGVCTPTIRTYRVVETSTVY

SEQ ID NO: 75085 - protein, 435 aa, Zea mays
  Coding DNA Sequence Number=SeqID_31710
MGSARVAFVLLLLEEHNFAEVGTFQPSLGFKDFHQAARLHPLTNGEKALTGLAEEADFDNAGSIGRKRRQLQHAWFAGSAGSGTASGATSPRWAECGYLPAVRAAVAPRAPGDRPRHRTPLGLRSCSWVVLPLLRHDTFARRLELARPGGLEWGSAGGQVDATVGAEVVAAGEGFSADEIVSTICAPGLRLSGFNIWFSSPARGHEREPSSGSVCPGTIAAAAEESLSSVGLATQGFSCSAKETLGRSAMSRSQRQQCQRGQMRSRLKKKLRRPRSRRLPRPRRRSSGGWNLARSPTGGTNPGVGRGADILLRGGDPPTVSLSEAGSDSAEGGVDAESAAAPPIDDLFVGSKIAYPSESYLSRKVMSEDSVIDIVEKARKIVSAEKFSSIKTCSVSGIAYPSVSYLSQKVMSERGFPLLAPEGGSGFAEARLTLP

SEQ ID NO: 75086 - protein, 326 aa, Zea mays
  Coding DNA Sequence Number=SeqID_31711
  Homolog annotation: Hit_ID=Q6J9V9; Match level="QueryCoverage=29%, HitCoverage=31%, E-value=3e-19, Identity=57%"; Hit description =Putative uncharacterized protein
MQAACNCTTGMHPFDFDASSMAAQAHTSCNRRAGYYVHKTAPPLTPMSCLLDCGTCAVTRGNPAHDPTVPTKHIGHRSVSRERRRDGRYGQKWAGSNGGSRRQKQQSNCLQAHVSSWSSRGALSHGMKTTHPCSVPRTARATAAPRTTRPVSLTPRQGRRHLWQAKRATLHLRHDDRVKKGTRKGDTPKGILLREGSGPRALLLIRGSKAGPSEGLAPQKGSTAALEHSGSAPTTDQGFEGWPPEGFDSRPRTRRARDDSGYVRYMAEARATLPRGSEAALANPAPAKPLTASTYQPENSEPDHAPGLRSDRMREQPDRPRRHERH

SEQ ID NO: 75087 - protein, 623 aa, Zea mays
  Coding DNA Sequence Number=SeqID_31712
  Subcellular localization annotation: CTP_CleavageSite=56; ConfidenceScore=5.17e-01
MQATCNRAKWTRFSDSQRASMEAQAHASRNRRAGCCMQATAPPHAPSSRLFGCGANAATRGDPAHDPATPAWRDGQYGQKWAGSNDGGRRAGEAVTSSASLTSHPGAGPPKGSTAASGYSGSAPITDQGFEGWPQRVHSHLRHRARDDQGYVRYITKARAALPRARTRAKPRKTVNSAPPDLGLGLGLSLGRRRTPLRPTPGLGLRPGLCRTTSVSPDPGARARPRQRKTDSTPASEEPPHRPASGAGPPRQQGAPSSPYPEPTRAAENKTGGRQQGLDRSDSCPSAKLRCASDSHDITLAGCQDLSGCHIGMAFLEKVGRAGPRTGQALSWGRSLPSPAWTLVTPYCKRTRPGRGTNTKAAGFPLLSHARLRPRRFPPFALAHALDPSGLGHAAHSLIGSGTPGLETPTSVVGEPSTEGRFGHFSGAFWAFFGYFVRRKDVQCRGRAEYGGTFWAFFGYFVRRKDVQCRGRAEHRGAFWAFFGYFVPRKDVQCRGRAEHGGTFWEFFGYFVRRKDVQRRGRAEHGGAFWAFFGYFVRRKDVQCRGRVEHGGAFWAFFGYFVRRKDVQCRWRAEHGGAFFGYFVRRKDVQCRGRAEHGRAFWAFFGYFVRKKDVQCRGRAEHG

SEQ ID NO: 75088 - protein, 312 aa, Zea mays
  Coding DNA Sequence Number=SeqID_31713
MGVEHGVSGELQAGPTRSEAAVEPFGGPAFEPLISKEARSLVPSRGRIPFGPLRVREPFEERITGALSSRRERGFSCCPGWDVSLADDHPARQLRDAWAWASMLVCRELEKCVHLARLHAAYMAARPFRPLVWAKVEGHFPAAPLHRRSPKMVTSSLMVGESELGCGLCPSLNLKDFHHQGWGGECAELSVPGFWTRVASGPLAAPASATAAGRGSSAGVIAKAGHGPTSNSTAFCPSLPYEFWHGRGPPGSSIRPEVSAAAVRPPGAEVVVVAAAGAGDGAPFVGLPLLRRPSPMEWGCSYLRRGEPEFRL

SEQ ID NO: 75089 - protein, 225 aa, Zea mays
  Coding DNA Sequence Number=SeqID_31714
MGDRSRVKLPFICFNGRFSGAFFGYFVRRKDVQCRGRAEHGGAFFGYFVRRKDVQCRGRAEHGGAFFGYFVRRKDVQCRGRAEHGGAFFGYFVRRKDVQCRGRAEHGGAFFGYFVRRMDVQCRGRAEHGVAFFGYFVRRKDVQCRGRAEHGGAFFGYFVRRKDVQCRGRAEHGGAFFGYFVRRKDVQCRGRAEHGGVGIRGRRTQDMTDAIIPALKHRIPSELRS

SEQ ID NO: 75090 - protein, 496 aa, Zea mays
  Coding DNA Sequence Number=SeqID_31715
AFFGYFVRRKDVQCRGRAEHGGAFFGYFGRRKDVQCRGRAEHGGAFFGYFVRRKDVQCRGRAEHGGAFFGYFVRRKDVQCRGRAEHGGAFFGYFVRRKDVQCRGRAEHGGAFFGYFVRRKDVQCRGRAEHGGAFFGYFVRRKDVQCRGRAEHGGAFFGYFVRRKDVQCRGRSEHGGAFFGYFVRRKDVQCRGRAEHGVAFFGYFVRRKDVQCRGRAEHGGAFFGYFVRRKDVQCRGRAEHGGAFFEYFVRRKDVQCRGRAEHGVAFFGYFVRRKDVQCCRRFETGGSLSRRAGRRGVSSEAEVESCLQLPWPSPSQGVGRGGSRPAEARAESEPWGRARRSFVVFRVLARVRALGSGGAEFAVFRVLARVRALGSGGAEFAVFRVLARVRALGSGGAEFAVFRVLARVRALGSGGAEFAVFQVFARVRALGSGGAEFAVFRVFARVRALGSGGAEFAVAPLARPNCLSDSLCRVALQSEWRRRRCPSVRLASGAVE

SEQ ID NO: 75091 - protein, 320 aa, Zea mays
  Coding DNA Sequence Number=SeqID_31716
MALGTQCLCSPLATEQGRFSGTLCGGRMSSAVGEPSTEGHFFGYFVRRKDVQCHGRAEHGGVDIRGRRTQDMTDAIIPALKHRIPSELRRGFFGYFVRRKDVQCRGRAEHGGAFFGYFVRRKDVQCRGRAEHGGAFFGYFVRRKDVQCRGRAEHGGAFFGYFVRRKDVQCCGRAEHGGAFFGYFVRRKDVQCRGRAEHGGAFFGYFVRRKDVQCRGRAEHGGVDIRGRRTQDMTDAIIPALKHRIPSELRRAFFGYFVRRKDVQCRGRAEHGGRFSGTLCGGRMSSAVGEPSTEGLFSSTFVQLYYVPCRGCPYYYVWSS

SEQ ID NO: 75092 - protein, 158 aa, Zea mays
  Coding DNA Sequence Number=SeqID_31717
  Subcellular localization annotation: CTP_CleavageSite=88; ConfidenceScore=5.14e-01
MPASPEPISGERDKTCGKPPKGHWGTVIFNARTYPMQGCSVATSSGPSPRPSLVLPSISVTEDAPSVIRYSEADTFLKKLFPILSTVSTTTVWATPPQGAQNIFHHYHPPLLRKARGMQIETKESWIWGKGQTLNISDDNEDLIPHVKIFYGRKMRII

SEQ ID NO: 75093 - protein, 130 aa, Zea mays
  Coding DNA Sequence Number=SeqID_31718
MEGNQQPEKCWDKMSRDEALEIPTTDFIKLDTLFFGIVPTEGEYSLGHLFMLEWQSATRGHPDGSHHRSLGGTTTPDDERQNITMGRPHDLGEKAISSTTMWSVEETKKANLGFLDEHKTMIINSSLTAK

SEQ ID NO: 75094 - protein, 364 aa, Zea mays
  Coding DNA Sequence Number=SeqID_31719
MGGAEPGSFAEKDPSRATGVPVARRVGLGPRLACQKLEKRVHLARLHAACMAARPFCPLVWAEMGGRLAGSSRLPSPRMGDIRRLSASSLKERNSMGVGTSQPSFGFKDFHHPAWPYPATGGHPRWPRWKMRRVGEPPPRGSAAPFFPLRPGVKGVLEPHGDFLQPCQDMRGARGPGPPFPCLNGWFSSSVGGSPSAVTPPLKLLPKLLRCLGQGWWPSRDPSAALWWIKAGGSDISMNRGGVGSRMGNLVGRSLAVSPVSGADAQVGQSRPRIGLAPLEAGCPRPQGSPWTSAPPEAGSGFAVDVVDAEGATAPFGVKTRACRIRSSCSVRFLRPPRPEEHALAALAKLRLFFLLFRASGLCR

SEQ ID NO: 75095 - protein, 475 aa, Zea mays
  Coding DNA Sequence Number=SeqID_31720
MGDRSRVKLPFICFKGRFSGAFFGYFVRRKDVQCRGRAEHGGAFFGYFVRRKDVQCRGRAEHGGVGIRGAFFGYFVRRKDVQCRGRAEHGGAFFGYFVRRKDVQCRGRAEHGGAFFGYFVQRMDVQCRGRAEHGGAFFGYFVRRKDVQCRGRAEHGGAFFGYFVRRKDVQCRGRAEHGGAFFGYFVRRKDVQCRGRTEHGGAFFGYFVRRKDVQCRGRAEHGGAFFGYFMRRKDVQCRGRAEHGGAFFGYFVRRKGCPMPWASRARRGVLGIFGYFVRRKDVQCRGRAEHRGAYWAFFGYLVRRKDVQCRGRAEHGGAFWVFFGYFVRRKDVQCRGQTEHGGAFWVFFGYFVRRKDVQCRGRAEHGGAFWAFFGYFVRRKDVQCRGRAEHGGVDIRGRRTQDMTDAIILALKHRISSELRGVFWAFFGYFVRRKDVQCRGRAKHGGVGIRGRRTHDMTDAIIPALKQRISSELRS

SEQ ID NO: 75096 - protein, 341 aa, Zea mays
  Coding DNA Sequence Number=SeqID_31721
  Gene Ontology: Mol. function=protein binding; Cellular component =integral to membrane; Biological process=vesicle-mediated transport
  Homolog annotation: Hit_ID=Q8H3D2; Match level="QueryCoverage=65%, HitCoverage=89%, E-value=1e-103, Identity=85%"; Hit description =Putative Vesicle-associated membrane protein
  Pfam annotation: Domain name=Synaptobrevin; Domain location=156-242; Score=97.7; E_value=3.6e-26; Accession=PF00957.12; Description =Synaptobrevin
MVSPAPGCRDSGEDGGKAEWLIYAFVARGIAVLAEYTEFTGNFPAIAAQCLQRLPAGSSSASTGPDGRGGAPVRFSYACDGHTFNFLLHRGYAYCVVAKESVPKNVSVAFLERLKDDFMKRYGGGKADTALAKSLNKEYGPVIKQHIQYVLDHSQELDKTLKVQAQVSEVKNIMLNNIEKTLDRGEKLSELQDKTSDLHSQAQEFKKQGVKIRRKTWLQNVKIKLSGYLFVKALTAPSMKHSSNKNGAARLWQSCDGCEFVLVRSSVYPHMLWLSSSIPPDKYHGTNVNDIYDTKSITGEGGSLNMLAQASRNCKSRFSDHYNAIVGPIVLSNEPLWSLQE

SEQ ID NO: 75097 - protein, 331 aa, Zea mays
  Coding DNA Sequence Number=SeqID_31722
  Gene Ontology: Mol. function=metal ion binding
  Homolog annotation: Hit_ID=Q6YSZ2; Match level="QueryCoverage=94%, HitCoverage=91%, E-value=2e-70, Identity=43%"; Hit description =Putative uncharacterized protein OSJNBa0003K21.26
  Pfam annotation: Domain name=DUF789; Domain location=118-322; Score =151.1; E_value=3.1e-42; Accession=PF05623.3; Description=Protein of unknown function (DUF789)
  Subcellular localization annotation: CTP_CleavageSite=28; ConfidenceScore=5.12e-01
MAGPSGASSSSRGAGVVVDRFYSPPHVRRQQQEEQLQRLKGLAQGQRPSSPAAGTLTPRAAKQKTPPAEMPVPVKESERRADASSKPVSAPAYTAKAAATADGVTTPPPSPAGLDEAGNLDRFLSSTTPSVPVHYLPKTSMRGWRMGDVTNSRPYFCLGDLWEAFKEWSFYGAGVPLVLSGGESVIQYYVPYLSAIQLYADPSKFQSKIRPIAGSSHSGVLGRDKPRHAFSSQMRIGCFEPATWYPIYRIPTGPTLKDLDACFLTFHYLSTPTKGMFHLLLILIPVHQHAPDLGALIAIWTPLTADDWLRHRQVYHPDFRFFLTHYNTALR

SEQ ID NO: 75098 - protein, 159 aa, Zea mays
  Coding DNA Sequence Number=SeqID_31723
MSSSSDSERDSSDSEDDLRVLQVIIGNQKNIVAATSLLSWYYASYVGTYNQRTLISVQCIEELATIKECGLTLRVVFVTEPPKSLGPPTVVLVQRTSDNPAGAPESLDKFGICIPYLSQERFTRHNKRLSRICWPLGIKVSDQVFMSAKLRQSESIILS

SEQ ID NO: 75099 - protein, 45 aa, Zea mays
  Coding DNA Sequence Number=SeqID_31724
MAPTSWTAGGKFAILSLSVVNFSILDPDPQIIDTDGPTSHRQRVT

SEQ ID NO: 75100 - protein, 143 aa, Zea mays
  Coding DNA Sequence Number=SeqID_31725
MGKKRKREPTPPSEDFGDSEYSEEEFSSESEGSPAPIPLRESSDDSDDSQGLAAEVCTYIRAVERSGLEGSDESEYSSDEEDSDGGGEDEDGDDDDDDDEGCGGGDGDGSGRGGSSGSKEGDGGGSRGSNRGGSGGGSNRASG

SEQ ID NO: 75101 - protein, 145 aa, Zea mays
  Coding DNA Sequence Number=SeqID_31726
  Subcellular localization annotation: CTP_CleavageSite=32; ConfidenceScore=5.44e-01
MGKNKKGSSSSHHSGDKRKREPTPPSEDLATRNTRRRSSPPSPRVLRLPPLPPALSDDSDDSQGIAAEVWTYIRAIERAGLEGSDESEYSSDEENPSDSSEEGSGGDGGDGDDDGGDGDGGGNSGKGGRDSSGGGSSRGSNKASG

SEQ ID NO: 75102 - protein, 39 aa, Zea mays
  Coding DNA Sequence Number=SeqID_31727
MAHRTVRCATGKALPWTSLAPPGRGCTGQSGAHRTVRCP

SEQ ID NO: 75103 - protein, 791 aa, Zea mays
  Coding DNA Sequence Number=SeqID_31728
  Homolog annotation: Hit_ID=Q6JAD6; Match level="QueryCoverage=87%, HitCoverage=97%, E-value=0.0, Identity=64%"; Hit description =Putative uncharacterized protein
MEKCKPIKTPMPTNGHLDLDEGVAISPPPAISTGGHRLRLCSGDTEPLSFPPSCPCLTVCRLPFRLDRHLSCELSRHQIRMPRTKNASASGGGDDEDPRRPFRQVKGKTVYLEQQEGRKKRRTDREARAAAVAAAAAAQAALGDQPQIPSDQIAFRARRLTSRSRSSSHTSTSTPPPTLPAPVTPIAPSTSTAIPTTSSTPASTASPAPAPASAPPVPPPRFWERDETEVRPLVLDPRLFDLQRATAARVRRFRYVPVESWLPTQRDPAAGVLFSTRIQESFFRAQMSAQIALRVHRLLDLPAFLLAAGAESEAHLTYLPGLLTLLTLSGRYVEEWVRVFYASVWIDPDHHWMRFRFEREDVTITASQIRQLFGFPESTTRLHSLCYGSSDPPRRPHGGVAPGTAHVAALFRPPFTDGSRRSPADFTTAAKYLYELIRRTLLPRMGYREATTHIQLWLLGALVSHSEFDVVDFLICEIEDTVLDGIRARRQLPYAHYLCHIFAQLIQPPRFQSTLEASRLVFGYYRPAPEIPVPATASVFDSQAEDAALRQLDTQGTTADDDDDDDDDDDFGVPPLPPRSHDHEAGSSSAAPPHPQAMDPALASILQTLTQQQAHLAAEQARLSDRMLSMFQNMQDRQDALQQQLLQDRAESRAFMALMLQQSGVSVPPVQSAPPPPLHAPVVPSILSGPPVGTSPLRPVTLAFTSPVLSSVCPQPPVPPASAVTTTAVAVSVTASVLVAPAARPPSESVPAPASTADPGSETDSDPPSAFALLPRPRPDAPPPPPPASGV

SEQ ID NO: 75104 - protein, 203 aa, Zea mays
  Coding DNA Sequence Number=SeqID_31729
  Gene Ontology: Mol. function=magnesium ion binding; Cellular component=integral to membrane; Biological process=photosynthesis, light harvesting
  Homolog annotation: Hit_ID=Q00827; Match level="QueryCoverage=100%, HitCoverage=98%, E-value=1e-65, Identity=55%"; Hit description =Chlorophyll a-b binding protein 48, chloroplast precursor
  Pfam annotation: Domain name=Chloroa_b-bind; Domain location=58-196; Score=3.5; E_value=1.2e-05; Accession=PF00504.12; Description =Chlorophyll A-B binding protein
MAITSRALVGKPAAGTRDVFGEGRITMRKTAAKPKPAASGSPWYGADRVLYLGPLSGSPPSYLTGEFPGDYGWDTAGLSADPETFAKNRELEVIHCRWGHARRARVRVPGAARPQRRQVRRGGVVQGRAPRSSARAGLDYLGNPSLVHAQSILAIWACPGGAHGRRRGAIVTGKGPLENLADHIADPVNNNAWAYATNFVPGK

SEQ ID NO: 75105 - protein, 269 aa, Zea mays
  Coding DNA Sequence Number=SeqID_31730
MGAQAHTSCNRRAGYYMRETAPPLAPIPRLLDCGTSATTRGDPAHGPTVPTEHIDHGDRERGYSKRDPSPRRKRAPSPLLIRGSKAGPSEGFDSRLRALGLQALLLIRGSKAGPSEGFDSRLRALGLRAHHWSEVRRLAPRMGSTAASSHSGSAPTTDQGFVGWPPKGSTAASEHVERGMTLGTSDTWPRLGLRSRGTLGHFRDQQERFCNGIPSERASGPLADPYRMGHGRPLGSLVSNSLETPCSASSEGSMALSPLLLAERRRRGV

SEQ ID NO: 75106 - protein, 34 aa, Zea mays
  Coding DNA Sequence Number=SeqID_31731
MSIRSQLLLMLCVVYAVVHQWTYCKKCSSTRVPV

SEQ ID NO: 75107 - protein, 770 aa, Zea mays
  Coding DNA Sequence Number=SeqID_31732
MSTVAGRNPAAETGDDPAPAAAPSSEKRKLGTATGGLGVSDSFAMELMETCAAPGGRMSSPELRESSAWMLKVTGGWWPKNVPIPRAAGEDFFTSRMVRDLRVFPYGRNIAAVVSAVMDKDRQEAAQKRRAVIRLPEARPKRARGTARAAALGGSQPTLAAKSAGPGSSKVPDVVKAAGAGRAKSTSTGAAKARELPPPGKRIADFGTDISVDDYLTGSGEGQLVVVSPAVATTVSATVPGAKGGALSAGGEISALAAVKDEAGDVSRRLKEASQRLSQAADFADRVASGALTAVVSAEVERLRAQHAEAVREKSAADSKCRKLAKKVAALESERTELRRQLTEERREANQALAKAQSAQADANVARVEGSLARQRAEEWEERFNALQARMGRAEASTRLEVERTRKQLMDSYHELGARTADFEVPDRESGLRCLEWLQEELLALPTIVEGFMSYASLVTCEGAMNALSREGCRHYEVFDRSDEDFEREIYKVEDPMVKESAGALFDRMWGPHGREVVRERSDTTRGQPARDEKVEDFEALNSARPEAESNPVAAGPEVAPAPPPETIEGSLDAPAAIAAGGGSSPTAVPKAEDPPKTATELAAEDPTAAGSSQVQDFGPAHATATANFLAASTVDAGNESDESASKFSDFGDSGSSVEWTEESSDEDLDYFVALDVAAAEASPRAADAEVVPGPSAGRKRRRAVAKRRVSEADGGRLRVGRAGKQELLSSPVVASVGEGELRSLFEGEELRIMLFNYREMGIIPKVEPM

SEQ ID NO: 75108 - protein, 363 aa, Zea mays
  Coding DNA Sequence Number=SeqID_31733
  Gene Ontology: Mol. function=magnesium ion binding; Cellular component=integral to membrane; Biological process=photosynthesis, light harvesting
  Homolog annotation: Hit_ID=Q00827; Match level="QueryCoverage=71%, HitCoverage=98%, E-value=1e-134, Identity=90%"; Hit description =Chlorophyll a-b binding protein 48, chloroplast precursor
  Pfam annotation: Domain name=Chloroa_b-bind; Domain location=58-226; Score=284.1; E_value=2.8e-82; Accession=PF00504.12; Description =Chlorophyll A-B binding protein
MAITSRALVGKPAAGTRDVFGEGRITMRKTAAKPKPAASGSPWYGADRVLYLGPLSGSPPSYLTGEFPGDYGWDTAGLSADPETFAKNRELEVIHCRWAMLGALGCVFPELLARNGVKFGEAVWFKAGSQIFSEGGLDYLGNPSLVHAQSILAIWACQVVLMGAVEGYRVAGGPLGEVVDPLYPGGSFDPLGLADDPEAFAELKVKEIKNGRLAMFSMFGFFVQAIVTGKGPLENLADHIADPVNNNAWAYATNFVPGKAFFRSPDGFALWTLYFDCVIVRNKVFGERKGAKAGREPKVKQSFGASEVALHKRGRSNNTVVLAKSFIMVVRDIARNWKADGSSTASCVSTADGREESGSGDPW

SEQ ID NO: 75109 - protein, 592 aa, Zea mays
  Coding DNA Sequence Number=SeqID_31734
  Gene Ontology: Mol. function=methyltransferase activity; Cellular component=intracellular; Biological process=metabolic process
  Homolog annotation: Hit_ID=A2YIG3; Match level="QueryCoverage=84%, HitCoverage=60%, E-value=1e-117, Identity=65%"; Hit description =Putative uncharacterized protein
MATSTSKSQPLLLNRACMWILLGKLPDGNCKMSRDSILVAELPSAYSRFSWQGLSPRDLLCSFCRLQRLPEPHFAVSRVSCDTLMSALSSKERGAPAGSAENQYTNDVRINKEKPDLFKCEVNIRSRKQEILLEYSAADTWSKESDAIQNSSLKVLIWFNNYFKKLTSKTGKLYLSESTADVKVHSNIFLQEFAMCLSVYGKNGGSDSAMCSAVGPFSMDTQKKHLESTAKLTHIEGPDSGVFPSHGSLTCISYTASLVTKDKAKTYLLESHNEFEFEIGTGVVSNQLESCVTQLSVNQTARFVAELPPRDLIMAASCEFSHDLSNVSSGVHILNIVAESCFLEFSVKVLQVDFGCGSGSLLDSLLEHPTTLEKLVGVDISRKGLTRAAKVIEHVEEDQATLFGNIVLSSFRPTVLIVSTPNYEYNPILQGSAMPNKDDEADESTGPYKFRNHDRKFEWTRLQFQCWATGLAVKHSYSVEFSGVGGSGEELGYASQIAIFRRLVQGQEAMCLDKDGDQPYEGYYLADEPGVHFVWQPNQESSVLVMSRAFDDYYIEDCGIILAPEVTQRMIDNSDQFVILATVRVAFVLACL

SEQ ID NO: 75110 - protein, 364 aa, Zea mays
  Coding DNA Sequence Number=SeqID_31735
  Gene Ontology: Mol. function=magnesium ion binding; Cellular component=integral to membrane; Biological process=photosynthesis, light harvesting
  Homolog annotation: Hit_ID=Q00827; Match level="QueryCoverage=71%, HitCoverage=98%, E-value=1e-135, Identity=91%"; Hit description =Chlorophyll a-b binding protein 48, chloroplast precursor
  Pfam annotation: Domain name=Chloroa_b-bind; Domain location=58-226; Score=284.1; E_value=2.8e-82; Accession=PF00504.12; Description =Chlorophyll A-B binding protein
MAITSRALVGKPAAGTRDVFGEGRITMRKTAAKPKPAASGSPWYGADRVLYLGPLSGSPPSYLTGEFPGDYGWDTAGLSADPETFAKNRELEVIHCRWAMLGALGCVFPELLARNGVKFGEAVWFKAGSQIFSEGGLDYLGNPSLVHAQSILAIWACQVVLMGAVEGYRVAGGPLGEVVDPLYPGGSFDPLGLADDPEAFAELKVKEIKNGRLAMFSMFGFFVQAIVTGKGPIENLADHLTDPVNNNAWAYATNFVPGKAFFRSPDGFALWTLYFDCVIVRNKVFGERKGAKAGREPKVKQSFGASEVALHKRGRRSNNTVVLAKSFIMVVRDIARNWKADGSSTASCVSTADGREGSGSGDLW

SEQ ID NO: 75111 - protein, 174 aa, Zea mays
  Coding DNA Sequence Number=SeqID_31736
  Subcellular localization annotation: CTP_CleavageSite=32; ConfidenceScore=5.12e-01
MMVLASVAATSFAILLLFSLPSCLCLRVTPFSAEDVGAGASSPYSFHSSPDTDPCSGYCTSMRMFPNMRAPSFSPSSDVPFVFPAFALFFLPNLLPLPTVVAASRPTLANTGTGGILPMSPPDAQVFVVSFLGNEQDLEIHAGTNRGCSSVVFLALAYIRSFMRPHWRNRLHGV

SEQ ID NO: 75112 - protein, 507 aa, Zea mays
  Coding DNA Sequence Number=SeqID_31737
  Homolog annotation: Hit_ID=A2WS77; Match level="QueryCoverage=100%, HitCoverage=100%, E-value=0.0, Identity=68%"; Hit description =Putative uncharacterized protein
  Subcellular localization annotation: CTP_CleavageSite=37; ConfidenceScore=5.31e-01
MAAGSIVVDFPSMGAALCFPSLDSLLRDSASGFLAAVSNAPAPGAADLTNFHRVFSRVLSAYPDPPLEAVWFFSALSFHDRPDDLRSLLQLLSAFTASSPGTAKPLALLAPVVSELFHADKPRRETETLVEAVLSYISICSNRSAPLFDRGRHRRRLWSVRYSRERCPFQVLFPLAGDEARRELMKEGCSVDYLAGVVLAEAFLLRLCLKVQNATGVPRSELQKELKIWAVSSIPVFQNHRFFGVLLNMLLNSPLPVYSLVSADDEILLRDVLYDSLILVDYSFINNGVGVDLLPIYVLRLVITLDAVNDARRKGDQGRAVSFINAFSTSNVPNFLIKWATFQAGSGALSKPIANTPQSIIKWLVDLEVKGLKVFGDYSSCIMERFAYDGVKNGHGNMIHSDADLFFFDKQSGREFMDTKGSEDEAVDEMETAGNNAFMAAAQSMKGVTDGMRKRKSCGYEDATAVKFVKYKVEDSSLKDYLSAANGISSGSEVENPQSDDEMEESN

SEQ ID NO: 75113 - protein, 120 aa, Zea mays
  Coding DNA Sequence Number=SeqID_31738
MGQKPSYLLLLVGLLAIAMLCAGLGHAKRQLNDANGGGLELSLGSKAATAGAKTEPLDPSLSDDYEVCAVMGYGGGCFVAGGGRMAVALRWGCALLSGAGCGSCRRARGWVAGALWTLMF

SEQ ID NO: 75114 - protein, 183 aa, Zea mays
  Coding DNA Sequence Number=SeqID_31739
  Subcellular localization annotation: CTP_CleavageSite=79; ConfidenceScore=5.80e-01
MAPSSRRQHGSTPHVAHPTPTSTQPPPHLSTSPSEPLQPCSASRSRPRHVACSNRVLPPSCCHTAPSYHAPHNSGSSVLIASKESLAEDSNPSQCTLLRFADLASFYSTHKGLLTLSIRLFFIYQLSKYLSCATIEMDSTQAPISQGEFACSTYLFRDWIPDLSVKSLDLGLLPVHLVKNHLD

SEQ ID NO: 75115 - protein, 267 aa, Zea mays
  Coding DNA Sequence Number=SeqID_31740
  Homolog annotation: Hit_ID=Q6QP51; Match level="QueryCoverage=19%, HitCoverage=30%, E-value=4e-07, Identity=50%"; Hit description =Putative growth-regulating factor 1
MELDDVIRLDWSRSDRSHFAAPLTGLTEGQRRLRRSDCCAARQSEADRQPGPASGTIGNSASPDLGLGLGLSPRRRRTPLRPTQGSDSGSAPEDDELRSARPRARTRAQPRKTANSALPDLGLGLGLSPGRRRTPLRPTQGSDSGSALASVDGLRLARPRGSDSTSASEDRLDLDLGGASTSPNLGRGPATQAMTAPRTLYDDGGSQPPYGSKRTSVRTQQLRQLSFRQASALLRRPRHHTNRAHCSISEKFAIIEVLRRGFDDLEA

SEQ ID NO: 75116 - protein, 237 aa, Zea mays
  Coding DNA Sequence Number=SeqID_31741
  Homolog annotation: Hit_ID=A3AYA7; Match level="QueryCoverage=87%, HitCoverage=25%, E-value=7e-25, Identity=32%"; Hit description =Putative uncharacterized protein
MKPKAGGIVSARGNSKLEDDSAESNEATGVFGSNETGLGRSRTKASAKVVLPAKSTNSFDHKDSTGLSSLKGALLGLASYDSDDDDDADTDSKDKMPISNLSSKDNAGDINTEEPEQMHIRDTENGEFRFKAKTCTEPMGAFDRMDEKANTHSEKSSTEDFVNEVKADHTKELEYSRAEKYNNDDKYSMYGNIDKRGSCKEGKGSGRAAKHESDTREPHYRARAFAWKLVMMRTAIG

SEQ ID NO: 75117 - protein, 257 aa, Zea mays
  Coding DNA Sequence Number=SeqID_31742
  Gene Ontology: Mol. function=protein dimerization activity; Cellular component=nucleus; Biological process=regulation of transcription, DNA-dependent
  Homolog annotation: Hit_ID=Q84P61; Match level="QueryCoverage=54%, HitCoverage=79%, E-value=6e-36, Identity=59%"; Hit description=OSE2 -like protein
  Pfam annotation: Domain name=bZIP_1; Domain location=171-232; Score =31.1; E_value=4.1e-06; Accession=PF00170.12; Description=bZIP transcription factor
  Pfam annotation: Domain name=bZIP_2; Domain location=171-225; Score =38.2; E_value=2.9e-08; Accession=PF07716.6; Description=Basic region leucine zipper
  Pfam module annotation: Pfam domain module=bZIP_1::bZIP_2; Domain location=171-232::171-225
  Subcellular localization annotation: CTP_CleavageSite=52; ConfidenceScore=5.41e-01
MASSRVMASSSPPQHAGAGSSSDLARFRSSGGIGSMNMDNIMREIYGPEAVNATVNGRVEPSPAAPEAAARRTSEEVWKEISAAGGLSAPVLPPPPAASTGAGARGGGGGASEMTLEDFLARDSCAMAAVMEGDMALGFPNCEGDAAGSVAGEAGGGRGSRKRALLDPADRAVMQRQKRMIKNRESAARSRDRKQAYIAELESQVMQLEEYQAELLTEQEDRRQKRLKELVERVVPVIRKKSPQDLRRNNSMECYLD

SEQ ID NO: 75118 - protein, 166 aa, Zea mays
  Coding DNA Sequence Number=SeqID_31743
  Gene Ontology: Mol. function=heat shock protein binding; Cellular component=intracellular; Biological process=tricarboxylic acid cycle
  Homolog annotation: Hit_ID=Q9XGC8; Match level="QueryCoverage=40%, HitCoverage=21%, E-value=9e-14, Identity=62%"; Hit description=Iron sulfur subunit of succinate dehydrogenase precursor
MNIYDDNSLACLTKIFGASSASTVSPLPHMLVVNDLVVDMDLVVDMNNFYNQYKSVEPWLKRKDHPPHDIRPKAAEGTASETILKSREEDLNVQRTKVRNDIKEAEGELEKERATREAHERAFAEVRAKAERIALERITSAHQRASAEAHEKEEKGNRSSSSGEGH

SEQ ID NO: 75119 - protein, 402 aa, Zea mays
  Coding DNA Sequence Number=SeqID_31744
  Gene Ontology: Mol. function=transferase activity; Cellular component= extracellular region; Biological process=lipid catabolic process
  Homolog annotation: Hit_ID=A2Y4L2; Match level="QueryCoverage=23%, HitCoverage=19%, E-value=5e-37, Identity=81%"; Hit description =Putative uncharacterized protein
MALHKLYDDGGPQLSYGSRTTLRRTSDSHDITPAGCPDLSGCHVGMAFSEKVGRAGPRTGQALSWGRSLPSPAWTLVTPLLQAHLTWARDEHEGRGTSTSLTLDSGRLASPPFALAHALDPSGLGHAAHSLVGLGTPLSRNADKHLYPNPYPDGRFPAVAGWYHLYVSYACAWASRCLAFLKLKGLDHTICITVVKPIFERTKERDGHLGWVFPAAADEEPSIETDPLNGARSVRELYEIASSNYAGKPTVPVSLQSRHSKSTKQAADLIPPSSFPARRSAVGQAAEDGVYKCGFAKKDDRVLVPDLGSLTSIHDRARELFYYLKGGQVDYSEEHSKACSHNRFGRIYHTGHYLVCYEHNPVHFVGHSAGAQVVRVLHQMFADKRDGIVQEYVFSNVIKSYD

SEQ ID NO: 75120 - protein, 170 aa, Zea mays
  Coding DNA Sequence Number=SeqID_31745
  Subcellular localization annotation: CTP_CleavageSite=56; ConfidenceScore=5.36e-01
MAAHPDGSARVFLSTQAGKVFLATVPPREICHYRSPQVSTRAQTPPRRAAAVPRLRAAAPDATDAAAALMVACAEAGDFAEARSLWAQLLHSSVAPCLPAVAPCLLPAYPFLDITDEVHMDNEFGLMGLATTISESVHRTIDASINHLPVLVCLLQAPRYMELLAMASTF

SEQ ID NO: 75121 - protein, 328 aa, Zea mays
  Coding DNA Sequence Number=SeqID_31746
  Homolog annotation: Hit_ID=A2XVA0; Match level="QueryCoverage=10%, HitCoverage=6%, E-value=2e-08, Identity=86%"; Hit description =Putative uncharacterized protein
MSSGVPYMAPFGIVPLVAVLKIFKNIQSLEVCGGLITDAGVKNIKVLKALTLLTVFTVSGSLILPEPVPEIMGTRNYGYGFGYRCLSAFRDRGVPKPTSECAACPSPDGSSAWASAKGGEARRPESSVREVEVPRPSCSSRAQAGRRGVSSEAEVESAFCCRGRARAKGSGEAEVVRPRPGRSPSPGVGRVGSRSAEARAESEPWGRARRSFVVFRVLARVRALGSGGAEFAVFRVLARVRALGSGGAEFAVFRVLARVRALGSGGAEFAVFRVLARVRALGSGGAEFAVAPLARPDCLSDLLCRVALQSEWRRRRCPSVRLASGAVE

SEQ ID NO: 75122 - protein, 154 aa, Zea mays
  Coding DNA Sequence Number=SeqID_31747
  Homolog annotation: Hit_ID=A3AZ41; Match level="QueryCoverage=73%, HitCoverage=52%, E-value=3e-38, Identity=71%"; Hit description =Putative uncharacterized protein
  Subcellular localization annotation: CTP_CleavageSite=47; ConfidenceScore=5.07e-01
MGNSNHYINWLSSHMFLKTSSLILEHFVIPGTTVILGAVAVAVLGSRCNAVTVMVLNLAATPIELSLIVPFLRLGETITGSGHFPLTANALKNVLTGHASKDVLLSIVNAMLGWLIAAPFVLAVLYAVSFPCFKVLVNRFGGIPSSPRTPLKAV

SEQ ID NO: 75123 - protein, 273 aa, Zea mays
  Coding DNA Sequence Number=SeqID_31748
MSSIPPPAGGLSAAIVVVARRWKKCHVVAAVEGHELKSPETKHRPGPERLLETAHLELDGELFVSTQQAPTWRANCRRFETGGSLSRRAGRRGVSSEAEVESAFCCRGRARAKGSGEAEVVRPRPGWSPSPGVGRVGSRSAEARAESEPWGQARRSFVVFRVLARVRALGSGGAEFAVFRVLARVRALGSGGAEFAVFRVLARVRALGSGGAEFAVFRVLARVRALGSGGAEFAVAPLARPDCLSDLLCRVALQSEWRRRRCPSVRLASGAVE

SEQ ID NO: 75124 - protein, 58 aa, Zea mays
  Coding DNA Sequence Number=SeqID_31749
MECVLVVGLWCTQQDPTLRPSSRQAVSTLRDEAPLPMIIGFGLGFSAQFYGYMSFGSL

SEQ ID NO: 75125 - protein, 145 aa, Zea mays
  Coding DNA Sequence Number=SeqID_31750
MAQVIVAGFPILQGRKARAAKPFLLVAEKNKCTARDGNGYPKLETRWVFTLLGADRAVAGLKTPSTGEDAVYGAHAPTQYLDNATCFKSRVPLVAHFMPAICVWYSPCALSGWTVSALRTDKDTGKGERAYALRARVVFESTRDA

SEQ ID NO: 75126 - protein, 184 aa, Zea mays
  Coding DNA Sequence Number=SeqID_31751
  Homolog annotation: Hit_ID=A3AZ41; Match level="QueryCoverage=29%, HitCoverage=25%, E-value=6e-15, Identity=63%"; Hit description =Putative uncharacterized protein
MEARSSSCLLGVRHPSISRPPSSEHEHQRSPYCPYLCSPFLLLFTPRAITGRPPLPPYARTGVLPWLHAKIVDPMLQVIRRGAEPKQLAFSAALGITIGIFPVCENKIWLLGNEKSKAQSKLAPTFKVQAIAKGSVSRGFANCSPEMVAHEAVLDFELELLDVRAPVGACMCVDAMALVVDPLT

SEQ ID NO: 75127 - protein, 138 aa, Zea mays
  Coding DNA Sequence Number=SeqID_31752
MEVTGRVESFPTTIEDRKEGWKGEVEDRIPVSGVRNSATTETLSKDSSMVQHESAHGIYDKLVAEIWKKIDPQLWLSGSLMGCSPWYSVQLKQIRSPANPPPTTNSTVIRAVAGPTCPRDGQIRAHSKRSSPTVIGVD

SEQ ID NO: 75128 - protein, 54 aa, Zea mays
  Coding DNA Sequence Number=SeqID_31753
MARVACTLRGKRLDGGVFVLSVDVRKQQTFVVSVPRWSQKKKTKSKAAGGRVPP

SEQ ID NO: 75129 - protein, 125 aa, Zea mays
  Coding DNA Sequence Number=SeqID_31754
MAEGEEAPTGSMAGGEVALTRYMAWVEAAAIPTRSTSEGEEAPTVSMAGGELAAAGSMVEEGKVRRDPWPGVVELDATVSTAKGEEVPTGSIFAVRRQQPVVKQAGLEFHCAKIMSRHLVALSIR

SEQ ID NO: 75130 - protein, 162 aa, Zea mays
  Coding DNA Sequence Number=SeqID_31755
  Gene Ontology: Mol. function=nucleoside-triphosphatase activity; Cellular component=protein complex; Biological process=protein catabolic process
  Homolog annotation: Hit_ID=P46465; Match level="QueryCoverage=56%, HitCoverage=21%, E-value=2e-28, Identity=72%"; Hit description=26S protease regulatory subunit 6A homolog
MENVTADFFRKHFHLPMEAASTHTRIPPVPNTHATARRPPPHHHCRCRKRRWIWRRLPPVLVITDIRASRLLDNEIRVLKDELQRTNLELESFKEKIKENQEKIKLNKQLPYLVGNIIEILEINHEDEAEEDGANIDLDSQRKVKCVVLKTSTRQTKCGSNI

SEQ ID NO: 75131 - protein, 309 aa, Zea mays
  Coding DNA Sequence Number=SeqID_31756
  Gene Ontology: Mol. function=structural molecule activity; Cellular component=cytoskeleton; Biological process=phagocytosis, engulfment
  Homolog annotation: Hit_ID=Q03341; Match level="QueryCoverage=25%, HitCoverage=20%, E-value=3e-37, Identity=94%"; Hit description=Actin- 2
  Pfam annotation: Domain name=Actin; Domain location=1-245; Score= -134.9; E_value=2.3e-07; Accession=PF00022.10; Description=Actin
MEKIWHHTFYNELRVAPEEHPILLTEAPLNPKANREKMTQIMFETFNCPAMYVAIQVVLSLYASGRTTGIVLDSGDNVDLVDPRESVTGSGEPGLPEAAVMRKDIAAVSNEDGLPTRKDSDEDAASEPPPSHKALRQNLVTKEFNPQHDEFLRTLAVLSSCMRGTLLVIVMSYSRASSVQLLGKPAISMYEPYGNSTTTMDPLIHCVRHADKGGCKDDKLKTVTKFQRIKVDSVRFEDEKLQDTSYWANITNPMAPLPFHVSNALRDDGAQGVKWWLARTRVLCNKALFPMRVPITIALASPVTRALSH

SEQ ID NO: 75132 - protein, 181 aa, Zea mays
  Coding DNA Sequence Number=SeqID_31757
  Subcellular localization annotation: CTP_CleavageSite=32; ConfidenceScore=5.72e-01
MATVAVVAASTTMGTTTAGIGSRVASVGRGARQRGRSGRQCSSRRHLGAVESRRHGVRSPHEFLQNKVITDLLEGRERGGAGDDRAKVLISQVEAMEKCKDKDPIIDRSVEISKSIRKSLSSYELGVKMKSLRLLVPEELIFQGNPGLKEVGLLFLLACLLFRGKKVVAHGEGDEGRQWGG

SEQ ID NO: 75133 - protein, 360 aa, Zea mays
  Coding DNA Sequence Number=SeqID_31758
MEAQAHASCNRRAECFVHATAPPLAPPPRLLDCGTNTTTRGDPAHDPAAPAWRNDNAPVFRSSNGSRTRNGRPTNHSPCRINSAAGQAGPGKGDTPKRILPCERTRLRASLLIRGSKAGPSEGFNSRLRARGLHTHYWSEVRRPAPRKGSTAASGYSGSAPTTDQGGNDLVTESHQREASSPRTPSPGDRVRSPETPCSAPTEGNMALSPLLLAERRCRGVCKKVESVPDRPLALCRGSGAALANPAPAKPLTASTYQPENLGPDRTPGLRPARMRERPDQRNIARGIKTSEESNHSSEASGATPGGHHRKLRFARPRARTRAKPQKMANSAPPDPGHGLGLSPGRRRTPLRPTQGSDSG

SEQ ID NO: 75134 - protein, 26 aa, Zea mays
  Coding DNA Sequence Number=SeqID_31759
MEVAARRRGDRWWMRPGLGPRELLLP

SEQ ID NO: 75135 - protein, 104 aa, Zea mays
  Coding DNA Sequence Number=SeqID_31760
MPSGVLAVAKTPCGERACGNSLLCGKSGVLDGASCGDATSGAFGGCLEEGEHQEALLALSSPTVVPKKASSVGMVCLGGTSSVEVVVPTWSLLPPSPCLRPPWG

SEQ ID NO: 75136 - protein, 479 aa, Zea mays
  Coding DNA Sequence Number=SeqID_31761
  Gene Ontology: Cellular component=integral to membrane; Biological process=peroxisome organization and biogenesis
  Homolog annotation: Hit_ID=Q2QWV1; Match level="QueryCoverage=100%, HitCoverage=97%, E-value=0.0, Identity=85%"; Hit description=Amino acid transporter, putative, expressed
  Pfam annotation: Domain name=Aa_trans; Domain location=24-469; Score =480.5; E_value=2.2e-141; Accession=PF01490.9; Description =Transmembrane amino acid transporter protein
MEVSAEAGNAGAAEWLDDDGRPRRKGTFWTASAHIITAVIGSGVLSLAWAIAQLGWVAGPTAMLLFAFVTYYTATLLAECYRTGDPDTGKRNYTYMDAVRSNLGGAKVAFCGVIQYANLVGVAIGYTIASSISMKAIRRAGCFHTHGHGDPCKSSSTPYMILFGAAQVVFSQIPDFDQIWWLSIVAAVMSFTYSSIGLSLGIVQTVYARACSESIERIVAANGGFKGSLTSIGFGAGVNSTQKVWHTLQAFGDIAFAYSFSNILIEIQDTIKAPPPSESKVMQKATRLSVATTTVFYMLCGCMGYAAFGDDAPDNLLTGFGFYEPFWLLDVANVAIVVHLVGAYQVFCQPIFAFVERRAAAAWPDSAFVSRELRAGPFALSPFRLAWRSAFVCVTTVVAMLLPFFGDVAGLLGAVSFWPLTVYFPVEMYIKQRRVPRGSARWISLQTLSVTCLLVSIAAAAGSIADVVDALKVYRPFSG

SEQ ID NO: 75137 - protein, 81 aa, Zea mays
  Coding DNA Sequence Number=SeqID_31762
MAPRRGIVEWWPTDLNQGLRLDHHTREPGFRVFCYEGEEKELLSGGIHPLVPQNAANDAEVETGSGSAICCAIHAVHDDQS

SEQ ID NO: 75138 - protein, 69 aa, Zea mays
  Coding DNA Sequence Number=SeqID_31763
MGKPVPSLLMLLLSRVTALVPTITGMGDHVSGRVRGKVCGQVHSGIRTLILIPFSHLVDNQSPWIVVYN

SEQ ID NO: 75139 - protein, 185 aa, Zea mays
  Coding DNA Sequence Number=SeqID_31764
MQPGCTPSPAVTQDGDLQFDGGKSEPGCGLCPSLSFKDFHHQCWGGDCRVPGSLARVASEPLPAPPSATAAGRGSSADEIAACLPAGSLLGGRDELPSSMHLPCRDFLWSELEQVSSSSPMADHLPWRSAPPLFLGDRCSVRFLPPPPVFGAQHSHLLGELLQHSLHQQIPNPTPCTLVLAHSRG

SEQ ID NO: 75140 - protein, 118 aa, Zea mays
  Coding DNA Sequence Number=SeqID_31765
MGDDELTCSSSDQRKSLHGRCMEEGSSSRPPRRDPAGRQATEKKGRHGQPSAMGKLGEGLLLAVDQGEDEPRESRAREGGRESCLTADAGGHGAREESLPAAVWEKGIGKKRKWRLGG

SEQ ID NO: 75141 - protein, 73 aa, Zea mays
  Coding DNA Sequence Number=SeqID_31766
MARIRPPTGETPDEASPHISHTGKERKNEGSEWAGVEAPELGHDTRQGGGRLTQKAYQSARITSVFGLETVPG

SEQ ID NO: 75142 - protein, 158 aa, Zea mays
  Coding DNA Sequence Number=SeqID_31767
  Gene Ontology: Cellular component=integral to membrane
  Homolog annotation: Hit_ID=Q2QWV1; Match level="QueryCoverage=82%, HitCoverage=26%, E-value=2e-43, Identity=73%"; Hit description=Amino acid transporter, putative, expressed
MGPPLVPLHGCGSHNVVVVGSKHNVALMEVSVEAGNADTADEWLDEDDRPRCMGTFQMTSAHIVTAVIDSRVLSLAWAIAPLGRVVGPATILLFALITYDTATLLAECYLTGDPGTGKRNYTYMDAVRANLGGTKVAFCDAIQYDKTNLVGVAIGPTA

SEQ ID NO: 75143 - protein, 85 aa, Zea mays
  Coding DNA Sequence Number=SeqID_31768
MNVDDNSSDSNDYEEPNDDYEEGALEDGHNHYPRPVGNRIVIGLINEDKIQSPKMCEALRHAKTWHEAIGPMKLQIKESHPRAIN

SEQ ID NO: 75144 - protein, 204 aa, Zea mays
  Coding DNA Sequence Number=SeqID_31769
  Gene Ontology: Mol. function=shikimate kinase activity
  Homolog annotation: Hit_ID=A2WJM8; Match level="QueryCoverage=70%, HitCoverage=42%, E-value=1e-26, Identity=78%"; Hit description =Putative uncharacterized protein
  Subcellular localization annotation: CTP_CleavageSite=30; ConfidenceScore=5.75e-01
MAMRAATAAATGFFSPSTVPPRRFSSVTPPASLCTARCIQRHRLRAFPSLEIPLEELNPSVDLLRRTAEAVGDFRKTPIYIVGTDCTAKRNIAKLLANSIIYRYLSSEELLEDVLGGKDALRAFKESDEKDSQLFDALYDVMTDIEIQAMSKLRQRYDELKERYGRGYSSIDLVTLEDMVLEIVRQIEKLIRAKEMMEAAGKPF

SEQ ID NO: 75145 - protein, 26 aa, Zea mays
  Coding DNA Sequence Number=SeqID_31770
MEVLQKGKQLKGPTTTPPPNFQILLK

SEQ ID NO: 75146 - protein, 120 aa, Zea mays
  Coding DNA Sequence Number=SeqID_31771
  Subcellular localization annotation: CTP_CleavageSite=62; ConfidenceScore=5.11e-01
MSARKTHKVPCVQFASSDGTVLSESVGRAAITQFYPNRSRCTILGKTLRKRFTNKWLHQLVLARESKSTKGDIDSRKLAADGSVDADFANSPFYPALVMDRHDHTRRKSTREAVEARLER

SEQ ID NO: 75147 - protein, 234 aa, Zea mays
  Coding DNA Sequence Number=SeqID_31772
RRVRPTDEEVRLRLVVYEGLADELKATHLLIRKPVGSSELEAMWDDLAGESETEGQHYEDGNCNSPTTTKPSSHRPPTDDRAPSHGDALVGGKGQLSYSPSPVGKGTTWQCKNRNRERMRRAPSAMHPGGWILFWRLGRRTEMSYGSSSPPDFRYLKPLNSAPFNPVRWITSNGAKMRRGREAHAVGLNFRPRPMLGPVRAPLPTQWKRAEPPQRWAASQRDWARTPLPRPEPN

SEQ ID NO: 75148 - protein, 57 aa, Zea mays
  Coding DNA Sequence Number=SeqID_31773
MGKPVPSLLMLLLSRVTALVPTITGMGDHVSGRVRRAICCQVQSGFNNIILREEKLS

SEQ ID NO: 75149 - protein, 160 aa, Zea mays
  Coding DNA Sequence Number=SeqID_31774
MDESCTQLLSSDPMINLNTTVFFFLYSFPFARNLHNLESLALTIRIKVKALDRPLKFLEPLAHRTLFGAHRTVRCPHHTVGSATRHARIAWLTVGSADRWLTGQSGAPQDSPGERLQVVEIPRKRDIVKERKTPWYSSGSLDHLKEVECNPRPLGRHNVE

SEQ ID NO: 75150 - protein, 318 aa, Zea mays
  Coding DNA Sequence Number=SeqID_31775
  Gene Ontology: Mol. function=peroxidase activity; Cellular component =cytoplasm; Biological process=response to oxidative stress
  Homolog annotation: Hit_ID=O23983; Match level="QueryCoverage=40%, HitCoverage=52%, E-value=9e-64, Identity=90%"; Hit description =Ascorbate peroxidase
  Pfam annotation: Domain name=peroxidase; Domain location=1-117; Score= -15.3; E_value=6.3e-06; Accession=PF00141.14; Description=Peroxidase
MTEKGRPVAVDKPQPPPEGRLPDATKGSNHLRQVFGKQMGLSDQDIVALSGGHTLGRCHKERSGFEGAWTTNPLVFDNSYFKELLSGDKEGLLQLPSDKALLSDPVFRPLVEKYAADEKAFFDDYKEAHLKLSELGILTGLLSFMMDDALTTGSIKTSDAEKRRLAKASLAYNCESKNCPHFRKLFPEYVEKYNQQLQLENTAAEPVPQENPAPAPSPAAQQAPTVANRAQPLAEARRDKNQKKAVPFWMVLSAKTNLNVEQVFFSIARDIKQRLSETDSKPECWRAASFLKYTELNRRESLALASDGLNYECNEAPS

SEQ ID NO: 75151 - protein, 189 aa, Zea mays
  Coding DNA Sequence Number=SeqID_31776
  Gene Ontology: Mol. function=protein transporter activity; Cellular component=cytoplasm; Biological process=intracellular protein transport
  Homolog annotation: Hit_ID=A2ZLA8; Match level="QueryCoverage=76%, HitCoverage=18%, E-value=1e-41, Identity=59%"; Hit description =Putative uncharacterized protein
  Pfam annotation: Domain name=Uso1_p115_C; Domain location=56-184; Score=74.3; E_value=4e-19; Accession=PF04871.4; Description=Uso1 p115 like vesicle tethering protein, C terminal region
  Subcellular localization annotation: CTP_CleavageSite=64; ConfidenceScore=5.20e-01
MALSTSEFCVSQRDSSSAASLAAAASSALLAASKELLRTGGGTTTDTSQKPSSGRERVQIESLRQELEGAKRQIGALKSEKSQIEAEANNQRNLSVKLESDLKRLSEAYNSVPYPDVEAIKAQAKEEAEKDSEAERNDLLVCLGQEQTKVEKLSTRLTELGEDVDTLLQGIGDDTAIPDDDDEDEDDEE

SEQ ID NO: 75152 - protein, 308 aa, Zea mays
  Coding DNA Sequence Number=SeqID_31777
  Gene Ontology: Mol. function=catalytic activity; Cellular component =membrane; Biological process=metabolic process
  Homolog annotation: Hit_ID=Q7G3D3; Match level="QueryCoverage=84%, HitCoverage=11%, E-value=1e-139, Identity=93%"; Hit description =Acetyl-coenzyme A carboxylase ACC1A, putative, expressed
  Pfam annotation: Domain name=Carboxyl_trans; Domain location=4-308; Score=93.8; E_value=5.3e-25; Accession=PF01039.13; Description =Carboxyl transferase domain
MWARRLHALLSLLPATLALAVLLAAFQLLFDVEQFVLADNNMTPKLTTQDYSRLSSSVIAHELQLKNGETRWVVDTIVGKEDGLGCENLHGSGAIASAYSKAYKETFTLTFVTGRAVGIGAYLARLGMRCIQRIDQPIILTGFSALNKLLGREVYSSHMQLGGPKIMATNGVVHQTVSDDLEGVSAILKWLSYVPPYVGGPLPIMKPLDPPERPVTYLPENACDALAAICGIQDGEGRWLGGMFDRESFVETLEGWAKTVITGRAKLGGIPVGVIAVETQTVMQVIPAGPGQLDSAERVVPQAGQVSQ

SEQ ID NO: 75153 - protein, 53 aa, Zea mays
  Coding DNA Sequence Number=SeqID_31778
MARVACTLHGKRLDGGVSVLSVRKQQTFAVFVLRWCPRKNLSCEVAGGCWPPT

SEQ ID NO: 75154 - protein, 84 aa, Zea mays
  Coding DNA Sequence Number=SeqID_31779
MSVRIFDMAVVRDWSIVITSAMYQFDNNENYVFLDKATYLHGGVLPRGSSSDDSDDPSTPRQGRSQDCDIRGASQFINTIKNIV

SEQ ID NO: 75155 - protein, 144 aa, Zea mays
  Coding DNA Sequence Number=SeqID_31780
  Gene Ontology: Mol. function=oxidoreductase activity, acting on single donors with incorporation of molecular oxygen, incorporation of two atoms of oxygen
  Homolog annotation: Hit_ID=Q7EYC9; Match level="QueryCoverage=47%, HitCoverage=21%, E-value=1e-15, Identity=61%"; Hit description =Putative 2-oxoglutarate-dependent dioxygenase
MVEKMTLEGLGVWDERSVGSHLESLTQGVRLSRYGAPLDKGTGMSMKEHRDDTMVTGIVQHDVEGLELQCRPRTGAGPTTLATRTRSPSSPASSSGYVRTTPATVRAMDELVVDGDRLLRYEDYSSALIRRSADGLEKDEAIMS

SEQ ID NO: 75156 - protein, 272 aa, Zea mays
  Coding DNA Sequence Number=SeqID_31781
  Gene Ontology: Mol. function=kinase activity; Cellular component =ornithine carbamoyltransferase complex; Biological process=amino acid metabolic process
  Homolog annotation: Hit_ID=Q6QP54; Match level="QueryCoverage=26%, HitCoverage=25%, E-value=2e-18, Identity=67%"; Hit description =Putative kinase
MAPPVDVVGPCPSLGEVEAPPRTRSSLSSKVEVESEPSGRTRRRPSADARAESEPWGRAKRSSSSFGAEPESEPWGRAKRSSSSSGAEPESEPWGRAKRSSSSSGAEPESEPWGRAERSSSSSGAEPESKPWGRAERSSSSSGAEPESESWGREKRSPSSSGAEPESEPWGRAKRSFPWSLGPDLAAVSLTLSSGSVVGAAQAALSSCQIGQWSGEATFALNAPAIWSVGVAIWPRLLLGEDWASGEPKLCADGGYQLRFRSLEGTPNYGPR

SEQ ID NO: 75157 - protein, 161 aa, Zea mays
  Coding DNA Sequence Number=SeqID_31782
MQESLAGPPSQQNPPEGLPRNPLQDRHHSKILPRASLGIPCRTAITAKSSRGPPYTDHSPTALAPFGAGSNGPRSSSSPRRMNTAAPTSHGGGPAGDSHIAHPNPKTATVGPKRSRERGEFVGGSYQAFGVAENSGHDKVLPGGAETPVGNSWHPGRKPSR

SEQ ID NO: 75158 - protein, 213 aa, Zea mays
  Coding DNA Sequence Number=SeqID_31783
MSQREALATELRDKLSALDKILEEEQIQQTTTVERLQKLQQELKGKASDAALAEEKLKVKGESLDRRETDLARREMDLARREKDLAFREEMLTRRGELLAEHELEAEKKEKEVEEQVRQFNAAQAAQGFQAVEATRKALEDLQAEHRTGVQRIAAWAGEASMALVPLGMSPISVSELPTSISDVLPVLDSAFDAWTRFLAPAWRPRAAGSIRR

SEQ ID NO: 75159 - protein, 337 aa, Zea mays
  Coding DNA Sequence Number=SeqID_31784
MTILATLPTLDESGVAVRQTGGWDPHRGIQISDALAGGPQPAGVAPSAPIVAPRPLDKGKGATSSASTGTSALGSSRGSEEERRRQLHRADWSFVSDPPRSVRGLLVGSRRSAPKPRARRDASVRRHHHHRAHRHHHHHRHRSRRHHHHLGVIFPRGTRSSNSNNSSSSKSGGRLASRVAAKSRAPRLPPPVLPRSRLLRQIPCPPAAGRLAVAAPMSSGVAAAEEVPTAPTATAASTTAMPSSTPSAAAEEVPTAPTPAIEEAAPVPLPRVLSRAHQALHETKAAILWEWEALEAKNQRLSDWRTQLEERTKAASRQFASERSELEQDRKDYKRDL

SEQ ID NO: 75160 - protein, 93 aa, Zea mays
  Coding DNA Sequence Number=SeqID_31785
MSIILQYLVLTCGVCETARVSSHTFIAQQVVGNNVHELAKGGSSREVTAITAKSSRGPPYTDHSPTALAPFGYQDDLQVTRNLALVVAIQTNM

SEQ ID NO: 75161 - protein, 190 aa, Zea mays
  Coding DNA Sequence Number=SeqID_31786
  Pfam annotation: Domain name=SlyX; Domain location=100-167; Score= -6.3; E_value=0.036; Accession=PF04102.3; Description=SlyX
MKTLTIFCGYHPLEMVMHPLGLFPAEKKDDPMWCNRVSHVKDVWAMYPDLVGRVTVQCMSALYRLQALQSDAMAHLANIAQTAKLTLDSREDFVVDLSTELSQRITTLEQQVEIRDNTIDVLENQLHDVQRELEEANDHLDMHHLEMEANEAGSEGEEAPEELGPAPGANGTTSAMPPSPVSSVASTAQG

SEQ ID NO: 75162 - protein, 67 aa, Zea mays
  Coding DNA Sequence Number=SeqID_31787
MAVNIDGHLSMYHHKMVNTRKGGGIDLPPNRHTRRIFRQPQQQPEMDPLQPPPAGANPAVTAQMQIM

SEQ ID NO: 75163 - protein, 66 aa, Zea mays
  Coding DNA Sequence Number=SeqID_31788
MVSSTASCKNYNNPQLTVRITLPSDTTDAQYSMQVAKVEEKFFESRLGKERAWLPRTMNLCNLRAR

SEQ ID NO: 75164 - protein, 88 aa, Zea mays
  Coding DNA Sequence Number=SeqID_31789
MESARDSGARLGAGQRAEEVSQGCTSCLPHRAATAIQATAANSTTSSSPVRNVNEKQSFTPDRGVMEDLDVDEEYGWVGAVELLAYPK

SEQ ID NO: 75165 - protein, 270 aa, Zea mays
  Coding DNA Sequence Number=SeqID_31790
MHRILPPSEPPDGERPRCLRLVVGGAQPYGGGHPSAIARLQGFSSGSPAAFPHRWSPRMVTTSSMVGRSKPGCSLCPALSFKDLHHPCWGGGRGESGPAFAWAGVPLLPPASGGGNHPPALRRRHPPAMRGKANCCCSGRRRANWSLSSRRPSDVEVTSEVSVSRRRRSPSAHSALPPKASLAQLKNPRLLCDEPEPEAAVSAWTEAESAREEASLAQEHVASLAEEVQQRRLEPGQVEILPPASPSEARPDSSEGGDDAEGAVAPSVDV

SEQ ID NO: 75166 - protein, 254 aa, Zea mays
  Coding DNA Sequence Number=SeqID_31791
MGEWERERELGEEESLVVGGRREELDCPFIEEGGDERSARERCMAGGFKAIDDIHGASMRERETNALKFITPRESERRVGQLGWRRGADPGATGLGALRAGRAAARSVVRRQGRLTWSLGGAAVGAPVQSAGPGRARERGKEERGVREGVTGGTAGGARLRARGLGAAAGEQGLTAGGGLGGKGRAGRGRAATAGREACAGEGPSHRRRARVRRGPPAWGPQARGRGAAGRGEGLAGEGRGGARRGGKRLAGRG

SEQ ID NO: 75167 - protein, 105 aa, Zea mays
  Coding DNA Sequence Number=SeqID_31792
MRKWARPSPLLLVLLSCRSNIPLDRPTRWQGGRPSHTINHFLNGTCKNYATSKAEYTNTQLDLTVQGVKQSHYLREADDSNRVLTLQGLTALAYNAPLTPAAAVQ

SEQ ID NO: 75168 - protein, 94 aa, Zea mays
  Coding DNA Sequence Number=SeqID_31793
MESHDLQAERESRLVGGNENAGLALTMVMVVSITTTAQEKMKPWNETSRSSKTMTSSRRGLAATPSQLPMKAACIYVSFPHFDYCKDYVDVSDI

SEQ ID NO: 75169 - protein, 54 aa, Zea mays
  Coding DNA Sequence Number=SeqID_31794
MAGRGKGERAGGTTEGHRAGGSMAATARLSEKKRKKERVMPEFGQVLLDFKTFN

SEQ ID NO: 75170 - protein, 47 aa, Zea mays
  Coding DNA Sequence Number=SeqID_31795
MFGLQVVMRMKVFDYDYGNGCQHCNHCSGEDEAVEGDFQEFQDYDEF

SEQ ID NO: 75171 - protein, 257 aa, Zea mays
  Coding DNA Sequence Number=SeqID_31796
MAPPVDVVGPCPGLGDVEAPPRSRSSLSSEAEVESEPLGWARRRPSAEARAESDPWGRAKRSSSSSGAEPECKPWGRAKRSSSSSGAEPEFEPWGRAKRSSSSSGAEPESEPWPESEPWGRAKRSSSSSEAEPESEPWGQAKQSSSSSGAEPESEPWGRAKRSSSSSGAEPESEPWGRAKRSSSSSGAEPESEPWGRAKRSFLWRLRPDLAAVSLTLSSGTAVGAAQAALSPCQTGQWSGEVTAVTSALSTGGRASG

SEQ ID NO: 75172 - protein, 155 aa, Zea mays; identical to SEQ ID NO: 73058
  Coding DNA Sequence Number=SeqID_31797
  Gene Ontology: Mol. function=RNA binding; Biological process=response to stress
  Homolog annotation: Hit_ID=A3A2F0; Match level="QueryCoverage=37%, HitCoverage=8%, E-value=2e-18, Identity=74%"; Hit description =Putative uncharacterized protein

SEQ ID NO: 75173 - protein, 217 aa, Zea mays
  Coding DNA Sequence Number=SeqID_31798
  Gene Ontology: Mol. function=actin binding
  Homolog annotation: Hit_ID=A3AFD1; Match level="QueryCoverage=40%, HitCoverage=24%, E-value=5e-21, Identity=57%"; Hit description =Putative uncharacterized protein
MAEIDATPLESMRAPVDLFDRGSGQSRHSPDGNAAAGSERKPAQAGHDADRSPAEGSVGALAAVRERLHGRPPPHSPAGGGEHQHHEPAVRDGRRAGRREGRPRRRQGVGRHRAARGGGYGDEGRPGVEREGTKDVLARILLLNETVLSSAVAAIRAEEERSVFFQEATLQFFDSDRNLEVARRQMEVMEGMEAELLAKSVEVEYLRAELKQAEMRF

SEQ ID NO: 75174 - protein, 177 aa, Zea mays
  Coding DNA Sequence Number=SeqID_31799
MADSEDPTKVSTTNIIKPTMGALPADDKQPFEDLVMRDEKEVMRQWNEQRDKEEAELLHKLSDGAKRQRKSTCHTSRWIATRRSCVNGRSIWNLSYLRSRLLLFSIKEDDMHPHCEVIPLIFFVQPHCLIDIVVHLVCALLQKYVYLIRTRVELKDWSKAGSLESRVEWNWRLVMST

SEQ ID NO: 75175 - protein, 36 aa, Zea mays
  Coding DNA Sequence Number=SeqID_31800
MGSHDPQAKRESRLMGKEEGVEADLQEFQDFDEFED

SEQ ID NO: 75176 - protein, 460 aa, Zea mays
  Coding DNA Sequence Number=SeqID_31801
  Subcellular localization annotation: CTP_CleavageSite=19; ConfidenceScore=5.31e-01
MPSSSSSAAATPPAGSSPSAAASSEETLSSLMAEELRAGDSVDFGVSRMSSARVEDMQRLGYFGGGVARAPGTEKVPEPEGELVVFEGVFRRRSPLACTPVCWRSPAQVQRANTSADAECRGGPVEKRMIGDEVAQFGSCTFTSKTGKTTMQWGNWNEFWFYVAEGTVEGHEGLPVSEMCSHFYSAYPPFEVAEDDVDEGALRCAAGQSSGRDLVEEFVAYGVWPLAHGWALGEVCPRQMPFRGGKVVRSPAFALNLQNRDPAAFVREAEDEAVRLVGRYVPRIEGRRSWEIRGSNDRLNRVFELNQLPYDGYPGQDDADRRGKKPVVETKDDPAPAAAPSSKKRRLGTAMGGLGVSDGFARELMRTCAAPGERMSSPELRESSARMLKVTEGCWPGNVPIPRAASGDVFTSRMVRKWRVFPYGRNIAAVVSAVMDKDRQGAAEKRQAAVRLVEARPKRQ

SEQ ID NO: 75177 - protein, 42 aa, Zea mays
  Coding DNA Sequence Number=SeqID_31802
MPEVGLPKQQKLQDGYPHTLECTVSDGDMAHPGSMALVLTAE

SEQ ID NO: 75178 - protein, 205 aa, Zea mays
  Coding DNA Sequence Number=SeqID_31803
  Subcellular localization annotation: CTP_CleavageSite=40; ConfidenceScore=5.16e-01
MAVSHSEISYCRRLTSADSSAIRWLSRSRALFLWRSSDRSCSTLASRNNKTPMFPHLQQHGFENPEYGVYLRKSYPTKEKDSQGDAGLRESSANVCKCKDDFCLHTSKDMKPHRTPPRATYDAKNVPGIGCKPNGSNHHCIYLPLPEVRANPKYDPEAHHLFLTPNLVHQFHIIRLISDAAPTHKLKPRRGLHLSLHPPNCSGAA

SEQ ID NO: 75179 - protein, 482 aa, Zea mays
  Coding DNA Sequence Number=SeqID_31804
VSAEVEKLRTQHADAVREKSADDSKCRKLADKVAALEGEKADLRRQLAGERRETNEALAKAQASQAEAKLARAEGNIARERAEQLQERLIALESRVERAEAAMRAEAERTRTQLVSTYRELGRTAGAPRCRGGFMSYASLVTCEGAMNALSREGCRHFEVFDQADEDFDRDVYKVEDLVVKDSAGALYDWMWGPHGREVVRERAETAMAQVTFSFVWHLLDVGRCVASGWTTSGAEQRLPDPEPTLGGRVGVALEPTPETAKDEPDAPTSAAAGEDLPRRWLKAHLMPPRLLRRVLKIPRRWQRKQQRKQRRSQWRRLPQRQGLRRFKIFEPAHATATTECLAASTAEGGNEYGGSASEFFDFTDSGSSVEWTEESSEEDLDYFAALDVAAAEASPHAADAQDVPGPSTGRRRRRAVAKRRVSTEERGRLRVSRTGRQELLSLPAAASTGEGELWSLFAGEELRIMLFNYREMGIIPKVEPM

SEQ ID NO: 75180 - protein, 214 aa, Zea mays
  Coding DNA Sequence Number=SeqID_31805
MATSSAEFPQENVRYDLGHGYEQMTYGPVVGVLCRTAHPGKTTFTITRKTQRLHSELSPAFEDVGEKKGKKGRRSTDGKRKRPPSPPSEDFGDSEYSEEVSSEYDLSPALASPMVSFDDSDDSMGLSNAEWVYIRSVERAGLGGSDDSEEVSSKAVVDSSDSEEGGDSEVDGDEGDSGSSSRGGDGSSRGGDGSGDVDGGEGSSRGGDSKGGDD

SEQ ID NO: 75181 - protein, 61 aa, Zea mays
  Coding DNA Sequence Number=SeqID_31806
  Subcellular localization annotation: CTP_CleavageSite=18; ConfidenceScore=5.37e-01
MQSTTKLQKVVPKGAQPRLQKGNSCAPRSYQGTEVTMSSYNFVKIINFTFNMLEGTRQVFS

SEQ ID NO: 75182 - protein, 375 aa, Zea mays
  Coding DNA Sequence Number=SeqID_31807
  Homolog annotation: Hit_ID=Q6QP51; Match level="QueryCoverage=14%, HitCoverage=25%, E-value=1e-19, Identity=83%"; Hit description =Putative growth-regulating factor 1
MQVACNRTTGTHPFDFDASSMEAQAHTSLPRLEATLRVAQQCQSSASITGQSAVGGGAMVDMAKSGPAVMAAADRRKRRSNRLQAHVPSWSSRGALSHGVKMTCPCSVSRMARATTAPQTTRPIALTPQQGKRQLWQAKRATFHLRHDDRVKKGVRRLAPRKGSTAAPEHSGFRLITDQRFEGWPLGRVQQPPQSTQAPRPLLIRGSKAGPSKGSTAASEHSERGMTLGTSDTWPRLGLHSRGTLRHFRDQQERFCNGIPPEGGIEPSDPIEWDRKEVSASPDLRARPRLGLGRRFPPRPTLGLGPASASEGGLRLARPQGSASTSTSEGIASSPHPGLGLRRSLRLARPWARTDHATGGLKRSSDGHDTACTGL

SEQ ID NO: 75183 - protein, 92 aa, Zea mays
  Coding DNA Sequence Number=SeqID_31808
  Subcellular localization annotation: CTP_CleavageSite=24; ConfidenceScore=5.56e-01
MSLISLSNSSSWSVGLVAFLFWLRASQRERVSWFGSSGCSVAVPGAEAFFGGMTKARKESRLMGKVCDLCRGLETDISVVLMVMSGLGILFD

SEQ ID NO: 75184 - protein, 362 aa, Zea mays
  Coding DNA Sequence Number=SeqID_31809
MGSARVAFVLLLLEERNLADVGTLQPSLGFKDFHHPNWGGGRGKSGPASAWAGDPLLPPASGGRNYPAALRRRRPPAMRGKVNYCCLARVQHSVLRPGDCGRLHPGVAQHVVRHEGGTRVLGRSHSHFCGEDRSEDLPVRFGVAGARWCSVGGQVDAIVGAEVVAAGEGFSADDTVNATCTPGLQLFGFNGWFSSPARDVNEGLPAVTFALGPSPLLQRLQASHPEFVVPQALRCGGCSYPREWNRSSICNGTLSAGVTSEVSVSRRHRSPSARSTLPLKASLAQLQNPRLLCDEPEPEAAVSTWTEAESAREGASSAQEQVASQAKEVQQQRLEPGQVIRERDQLRSHASEAVSRADVLGG

SEQ ID NO: 75185 - protein, 97 aa, Zea mays
  Coding DNA Sequence Number=SeqID_31810
EQVIEDPGTQQVEITEQELIKAAFGGQKLQKAKTNRGLIGEAETLWAAKTAMSLSLHATDATNREKELMKACTETLSWRLQSSGMPRSQRERLASLN

SEQ ID NO: 75186 - protein, 326 aa, Zea mays
  Coding DNA Sequence Number=SeqID_31811
  Homolog annotation: Hit_ID=Q2QQ41; Match level="QueryCoverage=57%, HitCoverage=67%, E-value=2e-15, Identity=29%"; Hit description =Putative uncharacterized protein
MKLKQFASSCGWCKVILHCDGNANSELGGVAALHTPCCKINFDSNKKVLMEPVVLNRERDAADRIKRMPMLFDDHHDEDFYGLPRKYSIVARVEVKFPIEPRYHDRQHFILSDINGAKIEAITYVSVTVKHFNNLLHEKHVYNMHNVKFGLHPGEFNFRHLNGPMELYFNQQTIVEPYTFPIQMPPFPKHIFFNLDDIAELPNRSLVDIMAIVVHMDTIHRTMWGPFRKIVIMDARGSLHIIKVWGDLLNKNALRWALAKEDYGIIIGTMFRRFRKQEFLESSDHTAIHFNPFHHNTHYFGPIQKALVARNNRQFAVTFLEEQRRR

SEQ ID NO: 75187 - protein, 70 aa, Zea mays
  Coding DNA Sequence Number=SeqID_31812
MEFQVTLEEPADPRRTRCSRILIRDSEEFQPVVPVVKAEPLKNQWAHEDVEEDDVKESWEEEEEEELHAC

SEQ ID NO: 75188 - protein, 505 aa, Zea mays
  Coding DNA Sequence Number=SeqID_31813
  Gene Ontology: Mol. function=helicase activity
  Homolog annotation: Hit_ID=A2Z8X5; Match level="QueryCoverage=76%, HitCoverage=41%, E-value=6e-59, Identity=36%"; Hit description =Putative uncharacterized protein
MTVEQKNDKSRKRREVIHLGPVSLSDGCGTIDFTNFATQDGDEKINVNQDDDSDWLHRNETFKADDVFTTRDLLTPGGVHETVGNTSNHNLEKAAYFRERYKNLTPAEREFRRERLRLYNSTPKRKGSKIEYIRKRRALLADTLSHESIAMESPTYTPKVVHPTTDAIEPDGSAVTPCDWVIPEIASNPFLPASTQTEDANSLHMSTGPLRRKQHVPHGERQSILARRNRQFEASISRNMATATDDTINDAGEGDDWTQPHITATINNNVQCRSQCHGAIVATNESASMTEQGSGVDHTQSKPRVISNVDDDDGVVFEDDADENEGYLFAGQYEDTDEDIEVDGSQDESTATDVPDPYDKVFNGHFSFTSLYCCLDSMTTNVRDSGIYTFRAQGMMYHNIKSFGRDGGAEHKHLNLYFYDDDPTLEQRYRKCREEHQQKDKEVIRQIVDILRGNPYSEHLRTMGHVENLDDYRIALNLDQTLNQKTYNTPLTSEVAAVWIEGSEG

SEQ ID NO: 75189 - protein, 122 aa, Zea mays
  Coding DNA Sequence Number=SeqID_31814
MKLPKPSDLAEPHRRPRITLAGLLPLTGECGPGQNTRRRRTPPLAHVDPPTPVTSDDDPHIDVTIVTSLTSLDTSPEQSCRRKLRKAMKNNEHGMNIFFLVYLSDKEHRKNTENPSAELIQG

SEQ ID NO: 75190 - protein, 251 aa, Zea mays
  Coding DNA Sequence Number=SeqID_31815
MTASKKGPGKGDTPKGILPREGTRLRAPPTDQRPAPQKGSTAASGYSGSAPTTDQGGNDLVTESHQREASSPRTPSPGDRVWQITRSSPETPCSAPIEGNMARLGGCSRKPGSARTVDSVNIPAQELGTRPYTWATANSHEGTTRPAEALREALRPRRSETTPPRPRGLHPAGALARTHRNKTQPRKAGPLAKKCDESLQASANTPFEARGLLSGTIIRGTLKAPNSQLGSDSGSVPEDGELRPTQGSDSG

SEQ ID NO: 75191 - protein, 18 aa, Zea mays
  Coding DNA Sequence Number=SeqID_31816
MESGPFGLKARTIRWGRA

SEQ ID NO: 75192 - protein, 618 aa, Zea mays
  Coding DNA Sequence Number=SeqID_31817
  Gene Ontology: Mol. function=cysteine-type peptidase activity; Biological process=proteolysis
  Homolog annotation: Hit_ID=A2X4U2; Match level="QueryCoverage=67%, HitCoverage=48%, E-value=1e-42, Identity=31%"; Hit description =Putative uncharacterized protein
  Pfam annotation: Domain name=Peptidase_C48; Domain location=80-287; Score=49.8; E_value=9.8e-12; Accession=PF02902.10; Description=Ulp1 protease family, C-terminal catalytic domain
MESLFVGLSHNKPKKSVATAIVREVLYHDWLLLDYICTQGDLALIDFIKEIPCEPRVEVVLIDDAFVERKWMECLFQPSAYLGDEVIDCYINLIKAQKHLKCRSGGRVHIENAFQFNFLKQDGDLEIKTEELYPIKDMAHICSAERRVLLYLDHDMVFIPINIRETHWYLAVIHARNMEIQVLDSLGTSQDRKDLTDSIKGLQIQIDMISQRKELKDHRWPDLQVASWPLREINMGYAKQTDSSSCGLFLLNYIEYWTGDELSNSFTQDDMSHFRKKMAAILLSLDLNKRRGCLLYKNEKEVDSRSPSDVELLENPTDSNKRKLLHVLDDSEVVYEDEEGPITQADLQRWFVDDWDKRAPVKVSTDGCTNDFLMVGLSTKDMPVTKADSIDVLCDYIMLIEDDTTLERTWVRSFNPFKIEISVKDLQNILTTTQDMILRCFDMAVRLLANKESRRPKQEIINNRKHYMDMRFWRMVGFGKLPKYHQDPTTEELAKTLDCWPSMNYYITGCRYVLMPWKFNGCYALFIIDHVKKHVTFIDFTPTQDWCKHMPYKRFNTSYLVLQAMAMWGNDRPLKFVGDAKTLRRNFVIDLLSYEDNSCRYAIPANIQQRLIDIAKKD

SEQ ID NO: 75193 - protein, 247 aa, Zea mays
  Coding DNA Sequence Number=SeqID_31818
MGTRWSPTTLRRGLAWDVELAAHDVTAAVQQQGRNPLFSGALIADVEEVEGAMELTMDLGVRLSCWPCGAEGDTGADGHGEKWSVQGAYIYCAQAKGCGGREIKSQQPGAIPAEADPLGLLPAGHLFFQLLVVANTLQLCGGDVLQPCRGRRTVAAQLGCKIPPSSLHSRQGRQRGPAGALRSGPLFGFNSWFVSLEREREREPSGGRVRPGTMAAAAEVAGGSPGVRRSAGSRLFIPAGTEPEFRL

SEQ ID NO: 75194 - protein, 130 aa, Zea mays
  Coding DNA Sequence Number=SeqID_31819
  Homolog annotation: Hit_ID=Q10KU7; Match level="QueryCoverage=32%, HitCoverage=22%, E-value=2e-09, Identity=73%"; Hit description=Novel plant SNARE 11, putative, expressed
MESPSTLAACNAWHYCHQFCCTAYSFKESRYQSNLGNNNKRVDLFDMCAGSSEPAAEDNIQMASENGGWNYNGNKGGGGGRGRGNWGYGDLVMTKNLSPFLGSFFISAIITEINEKLGVAVQEGDTDCDA

SEQ ID NO: 75195 - protein, 160 aa, Zea mays
  Coding DNA Sequence Number=SeqID_31820
  Homolog annotation: Hit_ID=Q8H6I6; Match level="QueryCoverage=68%, HitCoverage=19%, E-value=2e-28, Identity=58%"; Hit description =Putative uncharacterized protein ZMRS072.10
MSGSEKGAAEPTRGDGHPRRGCYCSLLLLSTTAEAAGRQRLDWIGRRKKKCHHVPESHVDGGGRGRRGPSGSGHDLTRPPAPPWTGATNGDGSITWARPASERIGRRASAEHGPSKTPRAQQGVPPRLTPASALEGIVATPDPGLGLSLGLGRRSSPRPT

SEQ ID NO: 75196 - protein, 448 aa, Zea mays
  Coding DNA Sequence Number=SeqID_31821
  Homolog annotation: Hit_ID=Q8H6I6; Match level="QueryCoverage=95%, HitCoverage=71%, E-value=1e-137, Identity=63%"; Hit description =Putative uncharacterized protein ZMRS072.10
  Pfam annotation: Domain name=Remorin_C; Domain location=299-407; Score=78.0; E_value=3.1e-20; Accession=PF03763.4; Description =Remorin, C-terminal region
  Subcellular localization annotation: CTP_CleavageSite=81; ConfidenceScore=5.46e-01
TGHGRRHEASTTSSSSSSSTASAQKRRGESQQQAAVVPATPGPALQFLASPAHHHNHPQTQLVAPRRSVPSKWEDAEKWLRQSSSSSGSDHHLHGNARAAFSRQRSGGLGHRGGAGGGGGDEKSAAVAVRRSVDALRDAHSLALYAAPAAEVLLKDKFTDNEEPSKESFVFRSSCCEAAEPAKGADDDDDGRCQRRRDVGTETTPLGSSCHTPLKSASPARHNTPASRSSGPLVPYAGGGGGTDISELAGFRLAKLDLGARFGAHATLVGWSSKEEEEDDEDVSKSLRHFEATVGGIACDRRGGDCRWDDDDRAKSCIRYQREEAKIQAWVNLESAKAEAQSRKLEVKIQKMRCNLEEKLMRRMTTVQRRAGEWRATARAQHLQQLRRAAAHGDGDGRRLRATATSTAHHHRHLPGSSEAPSCACFPCSTSTSGGGNNVVSGGLLSYY

SEQ ID NO: 75197 - protein, 421 aa, Zea mays
  Coding DNA Sequence Number=SeqID_31822
  Gene Ontology: Mol. function=sugar:hydrogen symporter activity; Cellular component=integral to membrane; Biological process =carbohydrate transport
  Homolog annotation: Hit_ID=Q8LJX7; Match level="QueryCoverage=99%, HitCoverage=58%, E-value=0.0, Identity=77%"; Hit description =Putative sugar transporter
  Pfam annotation: Domain name=Sugar_tr; Domain location=8-412; Score= -94.8; E_value=2.8e-05; Accession=PF00083.15; Description=Sugar (and other) transporter
MTSHRPAGEIAAIVEGVDIISDSTVGAARAQSFSGTSASHTWPRSTFYWQLSDPLVDLLGSVHENMSEGGSRRNSFFPVFNSFSFPEHEHMNEHRDGNSDQQTRETYYAGEANNGDGLRASLLSQAASVEVNDTNTSFTSEGSSSYLRRHGTSVLAQEFMASIHDYDIEEEEEEIHGFALPHQSAPRDMESTGRHPFRHQIVRLSETADMKFKWRSTGISGLLRCAPEIFEQSGVASLFSDIGLSPHSTSILMSTLNALLILPCITAAMLLMDVCGRRVIVLATTPVLILSLSVMSMSTLVNMGPFESAVLFHFALTICFWSYVIGLGPIPNILCSEIFPTKARATCASFCSLSFWFGGLLSAYCFPVMLSTIGLGGACGIYALVCCAPLFLVYYRIPETKMLNLELIAELFKLSRQEHVQ

SEQ ID NO: 75198 - protein, 174 aa, Zea mays
  Coding DNA Sequence Number=SeqID_31823
MVTSSLMVGESEPGCDLCPSLSLKDFHHQGWGGDCSVPGLQTRVASEPLAAPASATAAGRGSSTGAIAGADHGLTSNSTAFCPSLPHEFWHGRGPPGSGIHPEVSVAAVRPPEQKSSSSPLLEQVTARRSSAFHCSAGLPPRSGVVRTCGGGTGVPFVMALRMPVFLFIVAVEA

SEQ ID NO: 75199 - protein, 244 aa, Zea mays
  Coding DNA Sequence Number=SeqID_31824
  Homolog annotation: Hit_ID=Q8H6I2; Match level="QueryCoverage=100%, HitCoverage=100%, E-value=1e-133, Identity=99%"; Hit description =Putative MURBZC
  Pfam annotation: Domain name=Zea_mays_MuDR; Domain location=62-244; Score=-33.2; E_value=0.0028; Accession=PF05928.2; Description=Zea mays MURB-like protein (MuDR)
MDSAAELCAQKLSLAAVVARDTLNASVAASIVAGDYCATFSLGNNVVSTLDVLEFAVAAENSALRSYKQASAAVDCAKETVAKYSENCLVHMMILKKTEGCPYVVHISSCHVSASLVQFMVNRKLAQALRYAMSQMSDTAKKLQDTASLCYTNEEVVDGFKLTQVARSMDELAEMLEVTAIDCQVSMMDPTTMLEAGYASEDTAVWEDVFRDREIMNQPLEAETLAEHCAKWGLNYNEIWDRSV

SEQ ID NO: 75200 - protein, 157 aa, Zea mays
  Coding DNA Sequence Number=SeqID_31825
MVTRVCLLSPLDWAWERGFITGPGPSYLVSVLETLWIHSAAAGSGAPCADAAAFSGWGLCRTEYDRRGRRARRRRRRARAEPWPVSSEQERERVAERGRRSPWVFSSRDVAVAAAPKPPADPSSGRRAEDEVQLAAGARRGNATAARLKLRLRRLCA

SEQ ID NO: 75201 - protein, 89 aa, Zea mays
  Coding DNA Sequence Number=SeqID_31826
  Homolog annotation: Hit_ID=Q8H6I3; Match level="QueryCoverage=82%, HitCoverage=44%, E-value=2e-16, Identity=64%"; Hit description =Putative uncharacterized protein ZMRS072.16
MAFAGNADDSAEDYSAEATVVRFDPPLPLLRAPVPSPASSGEGPVLAFRDAASWRAAWEAAEASLVSQCELAEVPRGSHARHFSSMPVM

SEQ ID NO: 75202 - protein, 163 aa, Zea mays
  Coding DNA Sequence Number=SeqID_31827
  Homolog annotation: Hit_ID=A5HEH5; Match level="QueryCoverage=81%, HitCoverage=60%, E-value=6e-39, Identity=64%"; Hit description =Putative GRF-interacting factor 2
MQQQMPMPPAPAAAAAAAPPAAGITTEQIQKMMQPGIVPGAGHYMSQVPMFPPRTPLTPQQMQEQQQQQQFQQQQQQVQALTFPGQMVMRPGTINGMQQQQPMQADPARAAAELQQAAPIPADGRGSKQDTAGGASSEPSANESHKSATGADTEAGGDVAEKS

SEQ ID NO: 75203 - protein, 70 aa, Zea mays
  Coding DNA Sequence Number=SeqID_31828
MGDEKEACMMYESMRHAEIVPDGKLCCILGIGNDMGDCDDSQKAKAHKQQQLFRVQIAVAASFSETETTK

SEQ ID NO: 75204 - protein, 78 aa, Zea mays
  Coding DNA Sequence Number=SeqID_31829
MAACLEAAREACAKFAKAKCAGPFQDARIAHEGVLANTGFDVWGAAADKSSSTAAAAACALNGQPPRREKARSGGLVR

SEQ ID NO: 75205 - protein, 134 aa, Zea mays
  Coding DNA Sequence Number=SeqID_31830
  Gene Ontology: Mol. function=nucleic acid binding
  Homolog annotation: Hit_ID=Q8H6I9; Match level="QueryCoverage=40%, HitCoverage=8%, E-value=3e-19, Identity=90%"; Hit description =Putative oligouridylate binding protein
MASNHPALMGQHSLKQVAALGIGGGASQSIYDGGFQGINTVTGTTSAQQQQQLIARGGPTGGSGWALAHPKPGPPGTPPGHPFSRRDAVSTSPDSSSLIFAVVRLFLASWRLETWPLREEFLAAGFLAAGVVEW

SEQ ID NO: 75206 - protein, 316 aa, Zea mays
  Coding DNA Sequence Number=SeqID_31831
  Gene Ontology: Mol. function=ubiquitin-protein ligase activity; Cellular component=ubiquitin ligase complex; Biological process =protein ubiquitination
  Homolog annotation: Hit_ID=Q9AV81; Match level="QueryCoverage=37%, HitCoverage=22%, E-value=6e-40, Identity=70%"; Hit description =Putative WD-repeat containing protein
  Pfam annotation: Domain name=Prp19; Domain location=47-102; Score =70.2; E_value=6.7e-18; Accession=PF08606.2; Description=Prp19Pso4 -like
  Pfam annotation: Domain name=RS4NT; Domain location=92-127; Score =31.1; E_value=4e-06; Accession=PF08071.3; Description=RS4NT (NUC023) domain
  Pfam module annotation: Pfam domain module=Prp19::RS4NT; Domain location=47-102::92-127
MSGLLFERRLIERYIEDHSKCPITKEELTMDDIVPIKTNKVVKPRPLQATSIPGLLGIFQNEWDVLMLSNFALERQLHTARQELSHALYQARGLKKHLKRLNKPKHWMLDKLGGAFRSFPPLLQIVNSVVMNLVVVEDGCHIQGSVVCNNVQLQERAVIERLPDVVFEEGRPWDWDSSKCSTDQQENDTFIVHYDLTDQNMATAGDDSNPTLSDQSTGGENSVGQSSGTGQANEPASPYTPISSMMQNQGMGTPSVQQSESSRSGPYRFRTLTDLFDATEQVHDFEYSGVCMLSADEPACVGQALSTGLLEKSYGG

SEQ ID NO: 75207 - protein, 93 aa, Zea mays
  Coding DNA Sequence Number=SeqID_31832
MAMADMRALGTGRIRCGRSMALADAWAGEPARMGRGSGRCADRWFRHGQKGSTVGRQRVRGWRTDAAPSQAMQLRWDRRRQTSIGASCDGGIP

SEQ ID NO: 75208 - protein, 81 aa, Zea mays
  Coding DNA Sequence Number=SeqID_31833
MADEAIKKNEKESHDARDEAKQDAKRAMIIAGLSPPPEPYNPEADPVMKAALDVMQIANEVVDEVVDKLLHEVAERILKEE

SEQ ID NO: 75209 - protein, 102 aa, Zea mays
  Coding DNA Sequence Number=SeqID_31834
  Homolog annotation: Hit_ID=Q7XBD4; Match level="QueryCoverage=31%, HitCoverage=3%, E-value=3e-07, Identity=81%"; Hit description =Cinful1 polyprotein
MAKNVGFPKLELGLSAMSKDDLADSLAYNSLKTWEAKTPSGRPTSSRGFTAEVLLWAPPKNKNSKSLLFPHLQQHGFENPEYGVYFHKSYPSKEKTLKDMLV

SEQ ID NO: 75210 - protein, 220 aa, Zea mays
  Coding DNA Sequence Number=SeqID_31835
MNVCELTLAVSHTPPQVKNSTPGDYVRARVLVPRNPEADRWDPSCRLTLHRGRTHWLAGPPCQAPTSLFLRCANRASSAWRDSRIPLGWAANGLRAAIRGPEPDPYPPLPSVAPTSHRHQNAVARRVRRFGPLSSTGRFLSDWAEVWGAGASPGPVGHGWNLSLAHRAADDQEFLAVAALPPCVAGRAEYRLDSAADGGSNGWDQIPVHGVGRLIWALNL

SEQ ID NO: 75211 - protein, 30 aa, Zea mays
  Coding DNA Sequence Number=SeqID_31836
MAPPWKSAAAVSSEGIWRPVQEVKKSDKRF

SEQ ID NO: 75212 - protein, 202 aa, Zea mays
  Coding DNA Sequence Number=SeqID_31837
MGGGREFRARRAAVGGGEEHWRSEYVFNVVAAIPSSKPNRIGLHDANAIANLGGGYSPEIEGRTRPATTHGGIMVSLRDGEELLWHRGLSLRLRQRVAPPSANNPPWPFTEVRQPTVTGFAGGGPDFTLPLRYSYGREEGRRREKGRASGMSRRPKLLCTSVVHAVRSWQGKFAGDIGGRRAEFVSVSAIDLTAWSHRSWTE

SEQ ID NO: 75213 - protein, 39 aa, Zea mays
  Coding DNA Sequence Number=SeqID_31838
MDLSKALIGSTSEKMYLCQDLVDVGLMIEDPLTGHMPRH

SEQ ID NO: 75214 - protein, 154 aa, Zea mays
  Coding DNA Sequence Number=SeqID_31839
MGAVAWQQHRTLARHQPLPVIGQVRSGAKAREGRAGEVDGELQAGWTNAGRNPEERRATEVEQRAGAQRRRFPWGTGRVGLLFYLSVEPDFRGRSGRRRARCVWCPYERPKLRGAIPPTTRAGIGEEIGRGNGDEPDREGPPLSSFKSQFKPGF

SEQ ID NO: 75215 - protein, 120 aa, Zea mays
  Coding DNA Sequence Number=SeqID_31840
MVPEAVAALQLVKGPVGVVYSTVPAKKPRCVLGVHTTPGDTHAVHQKFRIIIRKLMSSRYYVSFASQLESRAVRVEQSQQFFFRSKSTNVRLLADLTRCACFFGKNVWFSSHIKLASWGI

SEQ ID NO: 75216 - protein, 168 aa, Zea mays
  Coding DNA Sequence Number=SeqID_31841
  Subcellular localization annotation: CTP_CleavageSite=37; ConfidenceScore=5.55e-01
MQAACNRAKWAHPSDFQRTQHGGPGPRVMQPARRLLRASNCTATRTTTTRPRLRNQYHDLRQPCVPGKGDTPKRILLREGNRPRASLLIRGSKAGPSEGFNIRLRAPGFRAHYWSEVRRLAPRKGSTAASGHSGSAPTTDQGFVGWPSKGSTAASGHSGSPPQTQSEG

SEQ ID NO: 75217 - protein, 137 aa, Zea mays
  Coding DNA Sequence Number=SeqID_31842
MQELMAQQNAILRQLAQHQPPPQPYGGGDHHQRPPAAATYQEFLSTQPSLFTRAEDPLDADRLRIFTHKSCYPSSKGSRLPIHLYRGGVAGTAIAAKSSRGPPYTDHSPTALAPFGYQDDLQVTRVLTAKRSNIDKH

SEQ ID NO: 75218 - protein, 168 aa, Zea mays
  Coding DNA Sequence Number=SeqID_31843
MAGRGFADGGGRAVVSELAGAAWPDCAGGLLGLAEITDREWSSKARAGESRAQPMPSHDMLRTTKMKRGGGGRHRPWGELERRWLGGALGARVRQHATNDGVRGGDSSARRSSVLSACRTGWLRALAARASRAGGASAVVVLESTSTEKLYSDGRKPIFSGVYRNRQC

SEQ ID NO: 75219 - protein, 86 aa, Zea mays
  Coding DNA Sequence Number=SeqID_31844
MRVEWDALSLIIRGTGCSSLRRRAVNGARCMRLALPRLVRPLGRSGDEDDGYDYDYGNGCPCCNHCSGEDEVVEEDFQEFQEYDEF

SEQ ID NO: 75220 - protein, 72 aa, Zea mays
  Coding DNA Sequence Number=SeqID_31845
MASLAQGQKQPCPASGVIDPVETPRYPCCFCIRGVLRNAKFVNSCVIAATVDVALRAGPFGEMSSHVDSPCD

SEQ ID NO: 75221 - protein, 85 aa, Zea mays
  Coding DNA Sequence Number=SeqID_31846
  Subcellular localization annotation: CTP_CleavageSite=47; ConfidenceScore=5.60e-01
MASGSPVSPSMAPAAPLLSSPHSDLHFPQGTTGVCPCMFPIPLDLAAGAMPPNSSDLLLSSPQNSSRSELAVTHVSMPGTQQQPV

SEQ ID NO: 75222 - protein, 44 aa, Zea mays
  Coding DNA Sequence Number=SeqID_31847
MAVIEAMPQAMDWPPQLLKKCLRVPEEQLPMEELSVQGDLTYTE

SEQ ID NO: 75223 - protein, 83 aa, Zea mays
  Coding DNA Sequence Number=SeqID_31848
MNMCELTLDVSHPHRSRTVGHLSMYHHKMVNTRKGGGIDLPPIRGLRLPKVPSDLNQNHSVKKYKEYEGWCRAEAMRRGASAR

SEQ ID NO: 75224 - protein, 90 aa, Zea mays
  Coding DNA Sequence Number=SeqID_31849
MLLARIKAMIRNEEGDSNTMELLTAAGGQWRELATEDSGFAVSGEEIPSSGAPRLHMLEGARNTIHAHRAPPWSSSRGPNDIPGEARFST

SEQ ID NO: 75225 - protein, 49 aa, Zea mays
  Coding DNA Sequence Number=SeqID_31850
MGKPGPSLLVLLLCQVTTLVPTITGMGDHVSGHVRRAICGQVHSGLVVV

SEQ ID NO: 75226 - protein, 269 aa, Zea mays
  Coding DNA Sequence Number=SeqID_31851
MSQPEYDGREFVEHGIEKCVVTVYIGSSPHHVEWSVTAAGHRYKDTCQVVARKALRTLCQIYEEEVADTPLRFFPPFQRNRPVWMARMRALEGKQLLEDDPTVVHLTAYLLTLDAQYDFLARHHQPCGSKSPLHPTLFNPGELKIPRFFEGHPVSTRGEKKAWELPEGAIVLEGIPVFPRAMDKKEHHESSQDPPPELFEPLTMNKIPAPSLEVKEKAASTPPAPPPSEELQEPVQLEEEFNPVLPSQSPPEEVINISSLFTHPGDVSD

SEQ ID NO: 75227 - protein, 57 aa, Zea mays; identical to SEQ ID NO: 44635
  Coding DNA Sequence Number=SeqID_31852

SEQ ID NO: 75228 - protein, 227 aa, Zea mays
  Coding DNA Sequence Number=SeqID_31853
  Gene Ontology: Mol. function=nucleic acid binding; Cellular component= intracellular; Biological process=regulation of transcription
  Homolog annotation: Hit_ID=Q6K9W9; Match level="QueryCoverage=74%, HitCoverage=72%, E-value=2e-25, Identity=34%"; Hit description =Putative finger protein EPF1
  Pfam annotation: Domain name=zf-C2H2; Domain location=150-172; Score =19.5; E_value=0.012; Accession=PF00096.17; Description=Zinc finger, C2H2 type
  Pfam annotation: Domain name=zf-C2H2; Domain location=98-120; Score =17.2; E_value=0.06; Accession=PF00096.17; Description=Zinc finger, C2H2 type
  Pfam module annotation: Pfam domain module=zf-C2H2::zf-C2H2; Domain location=150-172::98-120
  Subcellular localization annotation: CTP_CleavageSite=24; ConfidenceScore=5.07e-01
MSSVPDCSDAIVPNSKRRRHRSPPAASSSSSHSSSTTQKEELEDEEEDMAKCLILLAQGPAAIEAARVMPAPRSRPKSTGSRRFLAAAEARGGVCVSYECKTCNRCFPSFQALGGHRTSHNKHPRRPAEEVLAAMAITTTLSLAATRPAHECSSCGSVFTSGQALGGHMRRHRPLTTTSSSPATGTEDQQDSSSKLLQESRINLELDLNLLPSTEQEKTIMTWKTNE

SEQ ID NO: 75229 - protein, 68 aa, Zea mays
  Coding DNA Sequence Number=SeqID_31854
MASRPSREYWRGETAAINSITREEKNVLHQLRFWRQQIESLGEAPSVCAKSNGAITQKKKQPGKEKMI

SEQ ID NO: 75230 - protein, 1016 aa, Zea mays
  Coding DNA Sequence Number=SeqID_31855
  Gene Ontology: Mol. function=oxidoreductase activity, acting on the aldehyde or oxo group of donors, disulfide as acceptor; Cellular component=mitochondrial matrix; Biological process=metabolic process
  Homolog annotation: Hit_ID=Q6Z3X5; Match level="QueryCoverage=96%, HitCoverage=97%, E-value=0.0, Identity=92%"; Hit description =Putative 2-oxoglutarate dehydrogenase, E1 subunit
  Pfam annotation: Domain name=E1_dh; Domain location=236-567; Score =254.6; E_value=2.2e-73; Accession=PF00676.11; Description =Dehydrogenase E1 component
  Pfam annotation: Domain name=Transket_pyr; Domain location=630-846; Score=246.0; E_value=8.5e-71; Accession=PF02779.15; Description =Transketolase, pyrimidine binding domain
  Pfam module annotation: Pfam domain module=E1_dh::Transket_pyr; Domain location=236-567::630-846
  Subcellular localization annotation: CTP_CleavageSite=43; ConfidenceScore=5.64e-01
MTWFRAASGAARLALRRSLATRTPPAAATRCGRCFHSTAMRPRSAAPVPRAVPLSRLSDSFLDGTSSVYLEELQRTWEADPSSVDESWDNFFRNFVAQASPSAGVSGQTIQESMQLLLLVRAYQVNGHMMAKLDPLGLDDRAVPEDLRLGLYGFTEADLDREFFLGVWRMSGFLSENRPVLTLREILNKLQQAYCGPIGYEYMHIPDRDKCNWLREKIETAKPKEYNKDRRLVMLDRLIWSTQFENFLATKWATAKRFGLEGGETLIPGMKEMFDRAADLGVENIVIGMPHRGRLNVLGNVVRKPLSQIFSEFTGGTRPVEGEDGLYTGTGDVKYHLGTSYDRPTRGGNRIHLSLVANPSHLEAVDPVVIGKTRAKQFYSNDADRTKNMGILIHGDGSFAGQGVVYETLHLSALPNYTTGGTIHIVVNNQVAFTTDPRAGRSSQYCTDVAKALNAPIFHVNGDDLEAVVCVCELAAEWRQTFHSDVVVDLICYRRFGHNEIDEPSFTQPKMYQVIKNHPSSLKLYEQKLLGTGEVMKEDVQRIHDKVNRILNEEFAKSKDYVPNKRDWLSAYWTGFKSPEQISRVRNTGVKPEILKRVGQAITTLPENFKPHRAVKKIFELRAAMIESGQGIDWAVAEALAFATLIVEGNHVRLSGQDVERGTFSHRHAVLHDQETGAKYCPLDHVAMDQNEELFTVSNSSLSEFAVLGFELGYSMENPNSLVLWEAQFGDFANGAQVMFDQFLSSGEAKWLRQTGLVVLLPHGYDGQGPEHSSARLERFLQMSDDNPFVIPEMEPTLRKQIQECNWQVVNVTTPANYFHLLRRQIHREFRKPLIVTAPKNLLRHKDCKSNLSEFDDVEGHLGFDKQGTRFKRLIKDRNDHKQVEEGVNRLILCSGKVYYELDEERKKSERGDVAICRVEQLCPFPYDLIQRELKRYPNAEIVWCQEEPMNMGAYSYISPRLFTAMKALGRGSFEDIKYVGRAPSAATATGFLSVHAQEQSELVKKALQAEPIKFL

SEQ ID NO: 75231 - protein, 152 aa, Zea mays
  Coding DNA Sequence Number=SeqID_31856
MGKNNKGGSSSHHSGDKRKREPSPPLEDSLSEVKGSRRPVEAEVKAKENVWEVEKVIGLSEIAYFGVVSDESEVSSNEENSSDSSEEESSGDGDDEGDDGDGGDGGDDDNDDGKGDGGNNGKGDGNGGKGDDNSRGGGGSSKASGKVPRFKY

SEQ ID NO: 75232 - protein, 189 aa, Zea mays
  Coding DNA Sequence Number=SeqID_31857
MGVTKGRLDCLPRWCLHTSPGRLLLILPLFSSLPINHGKNKKGGSLSHHSGNKRKREPSPPSEDFGDSEYSEEEFSSESEGSPVYASPLVSSDDSDDSQGIAAEVWTYIRAVERSGLQGSDESEISSDEENSSDSSEEESGGDGDDEGDGDDGGDGGDDGDGGNNGKGDDDGGKGSGGSSKASGKAPLL

SEQ ID NO: 75233 - protein, 117 aa, Zea mays
  Coding DNA Sequence Number=SeqID_31858
MNVCELTLAIFTLGQEQLLQDEEHKGCYDEFEESRFGSIPSILGVLVLILLVEEGGGGTACAQRGSPALRCLTSAPVWCSVCSDYCPPWPGAWAPCCAVFVFSGWCRGRLPRLRQRL

SEQ ID NO: 75234 - protein, 119 aa, Zea mays
  Coding DNA Sequence Number=SeqID_31859
MNVCELTLAIFKLGQEQLLQDEEHKGCYDEFEEKVEVALLVRSEVLLRSVVSPVHLCGALSVLIIVHRGLVPGLPAARCSSSRAGAVDVSLGSGSGSSISVNLPPCRPERGRRNWFSGT

SEQ ID NO: 75235 - protein, 123 aa, Zea mays
  Coding DNA Sequence Number=SeqID_31860
MAHRNVHGVAIGLPCLRAKPAPSFLDCNILYTLKVLGSTTIWLGRAAKPKDLQQFQAQELYTVAHYRYREHKTQGRRSGRFHQQKPTCRLSSLPISSNLQPRARTNSHSPCRRTMHRTGKQAC

SEQ ID NO: 75236 - protein, 197 aa, Zea mays
  Coding DNA Sequence Number=SeqID_31861
  Homolog annotation: Hit_ID=A2Z3U9; Match level="QueryCoverage=14%, HitCoverage=6%, E-value=1e-07, Identity=93%"; Hit description =Putative uncharacterized protein
MARGGSAGGEVNERKRGVERRGLQHSMSLCGPWCKAEEERRQARMEGARMWIVGARTRMEGMRGGDHLALMMETLGKMPRKIASLGTRSKDYFDDALKILKFGVKLAATQLGQAKKNENQTMYNMSLVHFNQATKHCLLALNMRAPLSLVLSLSQAQVGPGNQTHPKVHCKTWFVRTFTLINRFITPQYVGVKPANG

SEQ ID NO: 75237 - protein, 216 aa, Zea mays
  Coding DNA Sequence Number=SeqID_31862
  Gene Ontology: Mol. function=hydrolase activity, hydrolyzing O -glycosyl compounds; Cellular component=integral to membrane; Biological process=cell wall organization and biogenesis
  Homolog annotation: Hit_ID=A3BFE2; Match level="QueryCoverage=26%, HitCoverage=11%, E-value=2e-14, Identity=74%"; Hit description =Putative uncharacterized protein
MNRGGEDEEHTARNIRSKAEWQARACKGLALVLFGPAPRLQLVARALQLSRQVCAAHPHQTMEACYCLSSSASSPFSVHPRREAGEQHDLVARGLGVARRRGCQAGPIQGHVRHRRPREVRDASAFLVYKPANATYMSSLLLDHIERLFAFADAYRGSYTRTFLELSDYYNSTMYQDELMDVPFSTASKQVFEATVEFSRNMGSFGSRSRGHQAGP

SEQ ID NO: 75238 - protein, 382 aa, Zea mays
  Coding DNA Sequence Number=SeqID_31863
  Gene Ontology: Mol. function=histamine receptor activity; Cellular component=integral to membrane; Biological process=G-protein coupled receptor protein signaling pathway
  Homolog annotation: Hit_ID=Q5NKT2; Match level="QueryCoverage=94%, HitCoverage=92%, E-value=3e-58, Identity=75%"; Hit description =Putative uncharacterized protein 131L1.1
MGGAAAGGGGCAGGEWGAARAKVASVLGVAGCALNCAVSFVVFSALDVLDVVLCLVYKLVDYAAEAEWKSCYCAAASGPRAAQLPLAAAPPAAGGPKVVRLSASSAKLQLEDVSDTLYVRPSLLADATRAGNGSGSGVAPALTVSPAIAELIRGKMDRAPRPPRQAPCWSDCDCKVCHAWSGSPASSSHLYVHVQAPAMAVETGGRGVHPRLHLVVRVLDGDALLPGAGVGVGVGGAVRDAARGSAAGVAADRVRGVHGVLDSTEQCHGPSGLAVGRVRTFLIEAFMCHTHNAAWHTLHNIICGSAGRMGAYLDAVDRGLSCKVAFFHGRDDELLPVECTLAAGARVPRARVTVYDRKDHITIVVGQERLFAAELEAIWRAD

SEQ ID NO: 75239 - protein, 46 aa, Zea mays
  Coding DNA Sequence Number=SeqID_31864
MRLHTLRGMKAEDICIAFICIHEVIFADDVVLYPQRCLLLIKGSGK

SEQ ID NO: 75240 - protein, 142 aa, Zea mays
  Coding DNA Sequence Number=SeqID_31865
MGTNGHLDLDTGGKSVDQKRHSAIIHRTVRCSKEERPQELASLGKLLRYNSPDCPVYTGLSGEPAEQRLLRANGHLQAHLMRARSAQKSGTRVTVHRTIYNTCPVCTGHPGGPRRQRSYGRIPTTLVTWLAHRTCPVYTGLS

SEQ ID NO: 75241 - protein, 112 aa, Zea mays
  Coding DNA Sequence Number=SeqID_31866
  Subcellular localization annotation: CTP_CleavageSite=71; ConfidenceScore=5.13e-01
MDRHHLHVAGSGPQCLPPSGTSAGSPDYATLRTPPPPTYGMPSYEALRYNSPGLSGVHRTMSDAPRKSGLRNSPASGNCSAIIHRTVRCTPDCPVNQQNNGYFAPTVTCRRI

SEQ ID NO: 75242 - protein, 56 aa, Zea mays
  Coding DNA Sequence Number=SeqID_31867
MPIFSTNSVHVQDSNVALYSRQKSAEVKLYETRMMPTMWSFKTPQAKIEAMISCFG

SEQ ID NO: 75243 - protein, 223 aa, Zea mays
  Coding DNA Sequence Number=SeqID_31868
  Homolog annotation: Hit_ID=A2YN98; Match level="QueryCoverage=13%, HitCoverage=18%, E-value=1e-06, Identity=70%"; Hit description =Putative uncharacterized protein
MPVRTLDVSLIFVAEEDRWECKDGDGEREDCIEEEVDSWGERGETRTPAGATCESEEFGQTIKFDINDLKQYYYTINAEEYLCFPEHLCTCYSYVYDVVGHDEQLSARICVCRILHGRFLMGARPVGAKATHLPLRARIESRCVDYDWDCDGVGLQWSSSRPRHNETHQGRDARLEKGMAWMVGTFQRIGSTEQEVVVVGGADAAVAVAEKVGEEDLAAMEWD

SEQ ID NO: 75244 - protein, 448 aa, Zea mays
  Coding DNA Sequence Number=SeqID_31869
  Gene Ontology: Mol. function=nucleotide-sugar transmembrane transporter activity; Cellular component=integral to membrane; Biological process=nucleotide-sugar transport
  Homolog annotation: Hit_ID=Q2QYU1; Match level="QueryCoverage=60%, HitCoverage=49%, E-value=1e-107, Identity=68%"; Hit description =Nodulin-like family protein, expressed
  Pfam annotation: Domain name=Nuc_sug_transp; Domain location=269-426; Score=-82.9; E_value=6.1e-08; Accession=PF04142.6; Description =Nucleotide-sugar transporter
MVLLALPLIIPACSSCSYVDTDGPDPAYDDPHKPLLISNSHQMESNAMMQKPKENQMQVKGRLETLGEEHSAKKLIRCVDFWLYYTAYFCGATVGLIYNNNLGQIAQSLHQQSQLTMLLVVYSSCSFFGRLLSTLPDLLHRVACCCIGPHANGLFLMWNQQDGSTLVAGTTLIGLSSGFIFAAAVSVTSELFGPNSVGVNHNILITNIPLGSLLYGQIAAMVYDANGQKMTVVDNRTGIVDTMIVCIGVKCYSTTFVVWACITFLGLITSFDEVRVYPIPVMLYLVKNLLQYYIFEYVDAPAYQILKNLNIISTGVLYRIILKKKSDHVLQTPIRGWVMAIVMALLSGFAGVYTEVIIKKNPSRNINAQNFWLYIFGMLFNLVAICVQDFDAVMNKGFFHGEVYMSTTIIWIKNISKMLPAQTMMQEELLPSLKMQKSECLLTNLKTP

SEQ ID NO: 75245 - protein, 221 aa, Zea mays
  Coding DNA Sequence Number=SeqID_31870
MEAERTSRYRVHDRRSRRLRYPKPGVKKKTCKVKVDRVVKRYGFFELDDEALGLAMLFIVVANHRRIRVPTPSDRVTSLLGMRAAEARVSRTDRASAQATTSSVLLPALLDLQCLCFLPPLLPLFIDAIDDRLEALGALSSPLSLPIKFGTPFLSSSPSSSLSLLLTQARPSLSHSLLAHAVVVRPTVRGAPSELRSRITTIAPVPLPAEPSLLVDHHSCA

SEQ ID NO: 75246 - protein, 523 aa, Zea mays
  Coding DNA Sequence Number=SeqID_31871
  Gene Ontology: Mol. function=CTP synthase activity; Cellular component=cytoplasm; Biological process=pyrimidine nucleotide biosynthetic process
  Homolog annotation: Hit_ID=Q8L6Z9; Match level="QueryCoverage=93%, HitCoverage=99%, E-value=0.0, Identity=60%"; Hit description=CTP synthase-like protein
  Pfam annotation: Domain name=CTP_synth_N; Domain location=20-254; Score=455.9; E_value=5.5e-134; Accession=PF06418.5; Description=CTP synthase N-terminus
  Pfam annotation: Domain name=GATase; Domain location=257-503; Score =205.3; E_value=1.4e-58; Accession=PF00117.19; Description=Glutamine amidotransferase class-I
  Pfam annotation: Domain name=Peptidase_C26; Domain location=274-485; Score=-111.8; E_value=0.068; Accession=PF07722.4; Description =Peptidase C26
  Pfam module annotation: Pfam domain module=CTP_synth_N::GATase::Peptid ase_C26; Domain location=20-254::257-503::274-485
MSSPSPSPPAPAEEEGRAPTKYVLITGGVVSGLGKGVTASSIGVVLKACGLRVTCIKIDPYLNTDAGTMSPFEHGEVFVLDDGGEVDLDLGNYERFIDVTLTRDNNITTGKIYQSVIEKERRGDYLGKTVQVIPHVTDEIKQWIQSVSSVPVDGQTRPADVCVIELGGTVGKENFCLIHVSLVPVLGVVGEQPLIGSVKEKLSQFCHVPVENILNIHDVPNLWHVPLILRNQKAHEAIIKQLNLARVKVALVGKYTNLTDSYLSVVKALLHASVACSLKPSIQWIAASDLEDATAISAPDAHAEAWETLKGSSCILIPGGFGDRGISGMILAAKYARENRVPYLGICLGMQISVIEISRHVLGLEDADSEEFNKDTPNHVVMYMPEVSKTHMGNTMRLGCRRTFFSKPDCLTSKLYGSPPHVDERHRHRYEVNPSFVPMLESAGLHFVGCDESRNRMESEPACTYEQIVELQDHPFYVGVQFHPEFKSRPRRPSPPFTGLIMAATKQLGANSNSSNGFVGASD

SEQ ID NO: 75247 - protein, 431 aa, Zea mays
  Coding DNA Sequence Number=SeqID_31872
  Gene Ontology: Mol. function=tetrahydrofolylpolyglutamate synthase activity; Cellular component=cytoplasm; Biological process=folic acid and derivative biosynthetic process
  Homolog annotation: Hit_ID=Q2QLY6; Match level="QueryCoverage=95%, HitCoverage=99%, E-value=1e-103, Identity=71%"; Hit description =Dihydrofolate synthetase/folylpolyglutamate synthetase, putative, expressed
  Pfam annotation: Domain name=CbiA; Domain location=62-241; Score= -38.1; E_value=0.089; Accession=PF01656.14; Description=Cobyrinic acid a,c-diamide synthase
  Pfam annotation: Domain name=Mur_ligase_M; Domain location=62-280; Score=-33.2; E_value=0.0012; Accession=PF08245.3; Description=Mur ligase middle domain
  Pfam module annotation: Pfam domain module=CbiA::Mur_ligase_M; Domain location=62-241::62-280
MAGGEAEGPLGGFFDYMERLRNYERSGVPRGAGTDSDDGFDLGRMRRLLRRLGDPHTDFPAVHIAGTKGKGSTAALLSNIMRAQGYNVGSYSSPHLLTIRERISVGNDGGPVPVRLLSDLFDGAKEAIDEAIELENGSLTHFEVFTALSFLLFSQENVDIAIIEAGLGGARDATNVIRSTELAASVITTVGREHLVALGGSLQSIAIAKSGIIKQGQPVVIGGPFSAVIEQIIRDRAFLTQSPVISACDPGIKSFTKCIDWDNAHTEESAKALSGVIEAVRPEGPLALVVGMASDKEHLAFAEQLLSGQTPDVVLLTEASIAGGSSRAMPASSLKEVWIAAARHRGIEYVDIGGISGTETLEHIADLLGSPSLSSRRKPMVIGCQDMGPFSWNLIIAASQLLESRGRAPGLICVTGSLHLVGAILQKLGRH

SEQ ID NO: 75248 - protein, 597 aa, Zea mays
  Coding DNA Sequence Number=SeqID_31873
  Gene Ontology: Mol. function=triacylglycerol lipase activity; Cellular component=integral to membrane; Biological process=lipid metabolic process
  Homolog annotation: Hit_ID=Q2R051; Match level="QueryCoverage=88%, HitCoverage=79%, E-value=1e-173, Identity=58%"; Hit description =Lipase family protein
  Pfam annotation: Domain name=Lipase3_N; Domain location=63-142; Score= 15.9; E_value=0.0069; Accession=PF03893.7; Description=Lipase 3 N -terminal region
  Pfam annotation: Domain name=Lipase_3; Domain location=195-332; Score= 104.3; E_value=3.7e-28; Accession=PF01764.16; Description=Lipase (class 3)
  Pfam module annotation: Pfam domain module=Lipase3_N::Lipase_3; Domain location=63-142::195-332
MATAAGTAVLLYLVLSGRLCGDAAGDGGALEDQLISSALEARRRRKEDTRARREQRRAPPPCTKRRWPERPPDGWGEAAALTARTVGFTWAETLGKWTLGEVAFGIKYYMRQQGNLQHEYAGSDSVLLDGAEVRQVLISLLRYLKQCMYFSKKPYNVFLEYGGYGHNDVLIRKPKARLLKPAFTIVRDRSSQCFLLFIRGAISVKERLTAATGTEVPFHHVVVQEGRVSNLVLGYAHCGMVVAARWIARQAIPGLSKAIEQFPEYEVKVIGHSMGAGIATILTYILRENEKLSSSTCIAFGPAACMTWDLAESGKDFVTTIVNRNDLVPSLGIVSAAKLRIEVMSSSWAHDLGRQIQQTRFLGFVNRSVSFIRSHVPFVSDPRSKVVDVDMLQSQSPEAGSKPSADTHAVVKKRPALVCWSYVATPNPKQSMESSIQMQGTEVQTDTAVETEKNSEAAAAELVSIHLGELNIQESDKDDDKRGEKGSETDEEETMEILESLADEKHMPSSSSFAQEPQQLYPPGKILHMVGLAAAEVATTSQQGAQEEVVALYETPRHLYSKIRLARSMIGEHYMPKYIKTMEKLIHKLAEDQLDSL

SEQ ID NO: 75249 - protein, 173 aa, Zea mays
  Coding DNA Sequence Number=SeqID_31874
MGEVSPGGHQGSHLMTRGPDPALVKEANRRARGVQPSHGCAPPQLRHNWRPNSEAQAHTSSTRGSPAHGPTVLLSTTVRGQSAVGISTTVGMVIAGPAVIAATGTRKQRSNRQLDSGPTCKLASSPEAGSGATVGSVKVIQQAARLLGLLANSKEEGAETDLWEFQDFGEFED

SEQ ID NO: 75250 - protein, 190 aa, Zea mays
  Coding DNA Sequence Number=SeqID_31875
  Subcellular localization annotation: CTP_CleavageSite=76; ConfidenceScore=5.13e-01
MRKVYEENICGDLKNDYEGWHPSTTIRFQGFSSRSPAAVPRRRSPRRMTTSLVVGRSMPGCGLSPTLNFKDVHHPRCGGRRVEPGPYPPFGLVIRFFLQHSEEKGVHQSCGGGPWLHGADRLQAVSCSVSGPLGLDGSGAASDAASCRLGALGDRTRRRTPRRWRRRSWMVLYSLLLVETGARTPSCVLR

SEQ ID NO: 75251 - protein, 71 aa, Zea mays
  Coding DNA Sequence Number=SeqID_31876
MAVGALQKGTWAAVLVRMEAGTRAGGTACSRLQGGRIEFFQSMNYSDSGAKHNYYCLAPELRTMKNATYEH

SEQ ID NO: 75252 - protein, 89 aa, Zea mays
  Coding DNA Sequence Number=SeqID_31877
MQDIEVSRVNAIITKSIGHDEVKARLTKWQKKTITGKVSGPTVSKALIPFMSHPVLKGKLPAEEKTSIGCRLARAHCLQADPAGAPPAG

SEQ ID NO: 75253 - protein, 297 aa, Zea mays
  Coding DNA Sequence Number=SeqID_31878
MAVRLLRTQRLTPKEYDSWAQAPVSEADLLFSAEMKRHGGGHHRLPLQDVHGATLLPLAFGGMGVVQRPSEGGRRAELRLHFSRELHQHPMWSGQAAWLIRNKCGGCATQKPYVRLRPLAYVMTSGPRGSIGSPPERGAEAYAVWSRHVSAPDLRLTLIKAWVFLVPESRDLAVSGPDHAQGVRDPSQGFGHTRGGSGPYPEATIIAYLCKMFMGATLLPPAFGGMGVAQRPSRGRRRAELRLHFLRELHQHPMARDLHDLFWEAKLCVRTPWTAVLDTRTLVTEWWSVQAYCTGPG

SEQ ID NO: 75254 - protein, 92 aa, Zea mays
  Coding DNA Sequence Number=SeqID_31879
MRIRLKMMKIKIKRMSHLNRRTRIKGEMKLIKKKKMIKRFRVKDRYTQESTKVEDALRDSDWVLAMQQELNNFTRNEVPNGYSATSKMSMVW

SEQ ID NO: 75255 - protein, 73 aa, Zea mays
  Coding DNA Sequence Number=SeqID_31880
MLIPDGSTVIVFNIVFNIVVGEGATATPIAPRSSLYYPNILSIDMVVEVDIIFDPGLDLDHSEEGWSQGSRCP

SEQ ID NO: 75256 - protein, 329 aa, Zea mays
  Coding DNA Sequence Number=SeqID_31881
MDESGVPPGTSNCITFESQRIGDASGGIRAVRSQPEYDGREFVEHGTKKCVVNVYIGSSPHHVEWSVTAAGHRFKDTCQVVARKALRALCQIYEEEVADTPLRFFSPFQRDRPVWMARMRALMIARAEDAEKRNCKLHVDLTTAQARATALESREVIAIEALKQAKDEHVQKLMEAYLVTHNQCRALWIQEPAPSNPVQPMRVEGPQILEGHPISIRGEKKAWELPEGAIVLEGILVFPQAMDKQEHPESSQDPPPELFEPLTMKKIPALSLEIKEEAASTPPALPPSEELQEPVPLEEEFNPVLPSQSQPEEVMNISSLLTHPGDVSD

SEQ ID NO: 75257 - protein, 43 aa, Zea mays
  Coding DNA Sequence Number=SeqID_31882
MASGSSRPQIDQAYRRNLAEFGTSPRRETEVLRETEVLREAVA

SEQ ID NO: 75258 - protein, 136 aa, Zea mays
  Coding DNA Sequence Number=SeqID_31883
MASTTTVARDFSGDKCRRSEETAGYKYLQLQLPSKSDLQPLATPMVVMPSRETDNIAEHGHNAAKHVASLISVDTPKVGPDIQQCTTKKSSIIADKKAMKKLFVSQLECKDTPDEPRVQSSRSEKGTSQNPHTKKI

SEQ ID NO: 75259 - protein, 218 aa, Zea mays
  Coding DNA Sequence Number=SeqID_31884
  Subcellular localization annotation: CTP_CleavageSite=64; ConfidenceScore=5.31e-01
MFNSCPRPALCSDLGKLKGTPSGSSSKGEGSNLTIWSWRMSAMASMYPLIARTMPMRPPVSTACLTALRHLDDLRGRLQLGLGSFGFGRRCENQIVENAMRGRKEQVWGDRSSEWTRRASSQASIARGISDGRGKGVEDRGTTGDVGGRQRRSGGTELRPEVPHGRGDGLAEHLGLTAQAGAKLSEVAARRSGGTELRPEVRSSMARSTVGTELCESV

SEQ ID NO: 75260 - protein, 154 aa, Zea mays
  Coding DNA Sequence Number=SeqID_31885
MRTAVVERRDEEEDDGDDRDGEQPLLPRSPIGLLRHRRRLRPVGRWYAVGAAQYVPESSTLILLEKYGCVHLGNTISTTDDCISDNQGAGWSMVYQLESARNFNELTSYSIDNSALMVIDTHLLHCTVPLDEDEPLPNPLELLAEESLSISTDW

SEQ ID NO: 75261 - protein, 184 aa, Zea mays
  Coding DNA Sequence Number=SeqID_31886
  Gene Ontology: Mol. function=transferase activity, transferring hexosyl groups; Cellular component=integral to membrane; Biological process=polysaccharide biosynthetic process
  Homolog annotation: Hit_ID=Q10MK0; Match level="QueryCoverage=85%, HitCoverage=39%, E-value=1e-57, Identity=60%"; Hit description =Glycosyltransferase 3, putative
  Pfam annotation: Domain name=Glyco_transf_34; Domain location=16-184; Score=4.5; E_value=1.8e-07; Accession=PF05637.3; Description =galactosyl transferase GMA12MNN10 family
MAPRQPAGSQPSSRRGAPGSSPRRCSDPNGEHLLLRAFKTKADYCRVHGFDIFYSTAVLDAELSGFWSNLPLLWMLMLTHPQTELLWWVDSDVIFTDMLFEPPWDKYAGHNLVLPGSEEKWSLDLLNALARIGPRGPVRELYGRVIAEMLSDQKPYEACDQSALIYQLVTEHGRRGDKTFLESS

SEQ ID NO: 75262 - protein, 114 aa, Zea mays
  Coding DNA Sequence Number=SeqID_31887
MALQTSPYGFEHNSLNTTAVRRAWHSHQDSIPLTPLTQAIDGPRKFHVFLAVPVTDWVRYRHVFRGIYGTQLPTRGPLGGLSCLNAPLTTVGFRCVTGHRPQRATIHGEVLGPR

SEQ ID NO: 75263 - protein, 418 aa, Zea mays
  Coding DNA Sequence Number=SeqID_31888
  Gene Ontology: Mol. function=transferase activity, transferring hexosyl groups; Cellular component=integral to membrane; Biological process=polysaccharide biosynthetic process
  Homolog annotation: Hit_ID=Q10MK2; Match level="QueryCoverage=96%, HitCoverage=88%, E-value=1e-166, Identity=67%"; Hit description =Glycosyltransferase 5, putative, expressed
  Pfam annotation: Domain name=Glyco_transf_34; Domain location=104 -350; Score=287.1; E_value=3.5e-83; Accession=PF05637.3; Description =galactosyl transferase GMA12MNN10 family
MTVAVVVFALFMFTSPDLRWQLPRIRIEYGRHDEPSSAPTADGRTTTLPVLAGAKSDDEEQRLPPPRQLTDPPYSLGTAVSDYDARRAKWLRDNPRFPAFVAPGRPRVLVVTGSAPRRCGGADDGDHVLLRAFKNKVDYCRVHGFDVFYSNAVLDAELSGFWTKLPVLRALMLAHPEAELLWWVDSDVVFTDMLFEPPWGKYGRHNLVVPGWNDKVYGARSWLGINAGSFIIRNCQWSLDLLDAWARMGPRGPVRYEYGKVLGKALSDRPSYEADDQSALVYLLVTQRLRWGDKTFLESSYSLHGFWLGIVDRYEEMQRDASTPRDGGERWPLVTHFVGCKPCGGQYASYEASRCRTGMERALNFADDQILRLYGFEHESLNTTAVRRVRNDTGGPLDADDVEIGRLLHPTFRAAGPW

SEQ ID NO: 75264 - protein, 22 aa, Zea mays
  Coding DNA Sequence Number=SeqID_31889
MGLLVLLVILLMGLLVLVILLM

SEQ ID NO: 75265 - protein, 197 aa, Zea mays
  Coding DNA Sequence Number=SeqID_31890
  Gene Ontology: Mol. function=protein dimerization activity; Cellular component=nucleus; Biological process=regulation of transcription, DNA-dependent
  Homolog annotation: Hit_ID=Q10MJ6; Match level="QueryCoverage=55%, HitCoverage=63%, E-value=2e-16, Identity=45%"; Hit description=BZIP transcription factor family protein, expressed
  Pfam annotation: Domain name=bZIP_1; Domain location=1-55; Score =23.7; E_value=0.00067; Accession=PF00170.12; Description=bZIP transcription factor
  Pfam annotation: Domain name=bZIP_2; Domain location=1-46; Score=7.5; E_value=0.075; Accession=PF07716.6; Description=Basic region leucine zipper
  Pfam module annotation: Pfam domain module=bZIP_1::bZIP_2; Domain location=1-55::1-46
MASNRLSARKSRMKQQQHVDDLTAVAERLRRENEAMRAGVGGVVRQSIELEQENRVLAAHARQLCATLLLRNSQLRLLGDVAGLPLDVPLVPDHLVQLYGVGTPCALSSPPSHCSKLRKKKLGVTLIWTSRGHSPLVGDAIASDGASWSGTTVAAATVAGPNMDLRPMPVLRGGGEEEHQLQLHLGVIELVDERLAG

SEQ ID NO: 75266 - protein, 316 aa, Zea mays
  Coding DNA Sequence Number=SeqID_31891
  Homolog annotation: Hit_ID=Q6J9V9; Match level="QueryCoverage=22%, HitCoverage=32%, E-value=2e-12, Identity=51%"; Hit description =Putative uncharacterized protein
  Subcellular localization annotation: CTP_CleavageSite=44; ConfidenceScore=5.24e-01
MEAQAHMSCNRRNGYCVQGNRTATRANDASSRLRNQYRDSRQPCAASDTSGRRSGRRFVSVIMTASKKGPGKGDISKKDPSQRRKWASTVGPPTDQGGLKAGPSEGFDSRPRARKVKDDPGYVCYMAEARATLPMPLDDPYRTGLGHPLGSPASNSLETPCSVPPEEARGLLSHQATAEPLTMSTNQRENSKPDPSASEEESPPRPTLGLGLSLGLGRRSPPRPTLGLGLGLGRSHNPARAQPRPQEKSPPRPTWASDQLHYRGYIITLLLASCLRLRRNKTGVPSKVTPGSRRFSDGHVSSQIHPIAQLGISLYL

SEQ ID NO: 75267 - protein, 133 aa, Zea mays
  Coding DNA Sequence Number=SeqID_31892
  Gene Ontology: Mol. function=transferase activity; Cellular component= endoplasmic reticulum membrane
  Homolog annotation: Hit_ID=Q7XIE1; Match level="QueryCoverage=74%, HitCoverage=19%, E-value=2e-30, Identity=68%"; Hit description =Putative alpha 3 glucosyltransferase
MLWTVLSSDLLVFFLAALWFVWAYMKLGVGISGEERREGSMWLLAMVLISPCLVLIDHGHFQYNCISLGLTLGAIAGVLSRNELIAAALFTLAINHKQVHTILDKENFTLKELLDEDEIIQECKALNSILINL

SEQ ID NO: 75268 - protein, 102 aa, Zea mays
  Coding DNA Sequence Number=SeqID_31893
  Subcellular localization annotation: CTP_CleavageSite=59; ConfidenceScore=5.20e-01
MPPPRPQPWHLLPSPHAHLVVPARISGHVQAVSTCHSPSTYLPSPTPHPCTRTPDLPSSAAARVEAVEVDEIQAETIGPLHPRRSVTILGSLFPSVALQSPI

SEQ ID NO: 75269 - protein, 98 aa, Zea mays
  Coding DNA Sequence Number=SeqID_31894
  Subcellular localization annotation: CTP_CleavageSite=26; ConfidenceScore=5.40e-01
MSKNTRDTRFIPRFGHTTKVPYFLVEAPTKSRVSFNPNPPFCQPQKSSPHTNLCSNERISLQIFEMGEARGVREKVGGVSQVRNGVQVVLFCGGERWE

SEQ ID NO: 75270 - protein, 107 aa, Zea mays
  Coding DNA Sequence Number=SeqID_31895
  Subcellular localization annotation: CTP_CleavageSite=46; ConfidenceScore=5.24e-01
MPEPTHEEVSASPDLSARPPPRPRKVVSASPDLRAQPPPRPRKVVSASPDPRARPQPRPRKMVSASPDPRAPPQPRPQKESRPHLTPASASGGVSASPDLGLGPTAS

SEQ ID NO: 75271 - protein, 36 aa, Zea mays
  Coding DNA Sequence Number=SeqID_31896
MPWKWDRHTLESLFLSRVLTLCCCDGVKVPVGSAFL

SEQ ID NO: 75272 - protein, 268 aa, Zea mays
  Coding DNA Sequence Number=SeqID_31897
MSPASRYDAWAEQCSELIHDSVGVHTHGSASHSHPRHPPLIPTSAVAPTINGIAPAIPFTSQISCYIQGSGDGSWPPPQSPSTDNASLPSKKRLFLCSNPRRWWHDARSLDPKSRSPYPCSLSALPFPRRVGLLVRPPIPRDRWSSNSRGLDMPNLKKQCGRFVSTMPCPRCFDLLAMGEHNGHGGGRPSLRPAARPWRKAADDIVVSYTFVVLSAPNPHAAALCASALLPAPNPAPLLCSLCSRASAALITRALDPQVSLQNHARLP

SEQ ID NO: 75273 - protein, 41 aa, Zea mays
  Coding DNA Sequence Number=SeqID_31898
MAVMGSTSDKMYLCEVPNFGIENDKNETGQLYLDSLKPAYP

SEQ ID NO: 75274 - protein, 234 aa, Zea mays
  Coding DNA Sequence Number=SeqID_31899
  Gene Ontology: Mol. function=hydrolase activity; Biological process =metabolic process
  Homolog annotation: Hit_ID=Q850X1; Match level="QueryCoverage=28%, HitCoverage=32%, E-value=4e-20, Identity=75%"; Hit description =Putative isomerase
  Pfam annotation: Domain name=FAA_hydrolase; Domain location=14-143; Score=-57.9; E_value=0.0006; Accession=PF01557.9; Description =Fumarylacetoacetate (FAA) hydrolase family
PVPVIGPQKNDEELGNPVPKEPILFLKLTLSFLHAGVATIAVEILETLESLHHMVELAVVISRRGHDVPEASTMDFVRVNLFTVPMLQIWVGSATARLQLQALAHRDGQARREGTSKQHMIDCYIQTLAKVLGRTPGVSWIRMLMQSARTTEKMESGITTGTEEVAVAEDEATRDMVVVSGDLSLITFPCFFAFVVHTVFLESLNVICLMHAIIIEIHEKLGVAVQEGDTDCDA

SEQ ID NO: 75275 - protein, 191 aa, Zea mays
  Coding DNA Sequence Number=SeqID_31900
MAHTRKTARKSTRPFGVPRHQLAPRHEGSSSGSNDPIGDMEAKVEQLRSELRHRNRAWEQDNQRIAELSADVSRLQYEILERDSAIDWAVNSRSIAWDHEAKARAHVAELSATLDSLQVYYNTLHEEVHVLYARLHPDVPSDAAAMGAGPSDTANEGPDGELDLFRPPPSMNLADERSHAAGNEATKDDED

SEQ ID NO: 75276 - protein, 447 aa, Zea mays
  Coding DNA Sequence Number=SeqID_31901
  Gene Ontology: Mol. function=metal ion binding
  Homolog annotation: Hit_ID=Q9M4C5; Match level="QueryCoverage=82%, HitCoverage=86%, E-value=1e-164, Identity=73%"; Hit description=VIP2 protein
MLLADQGAEQFFVMIWDLGGIDAMYQLGGKPKLKKGGMLGNVTSLSVLEELQLPENHEMQRRSLSPQFSLGLVQSGLNCIGSAFNAKGVMQCPNCRKIEKGNWLYANGSRSAHDVSMDEWAHDEDLYDVSYSDMPFRFHWCPFGRLTQLPSLFEEGESSPPVTFHDFMGQHVFTEQVAVSAAAGTTNPCPYVAYLHPLTPLTSLSSSHVPDRTMDRPAYHDHWNPMAGPSDVRSMQTMQPADFHHSHWAHVPHSYGQPNSNNEQPGIPFGARAVRVDGDSQRRASVVSPSYFSNGSGSRSRPPNVPPLMPQFMRAHGSISEQYQQNSSSSLFAGAHRSGGMRPAPTPLPENPTFTLFPPGSSGHSSMETDDAGGSRFYAWEGDRFAPYPLMPVDCETSWRTSQQQSHQSTSEPTSAPRRLFGQWLAVGRPSPSPEGSSYRQLHSPRM

SEQ ID NO: 75277 - protein, 192 aa, Zea mays
  Coding DNA Sequence Number=SeqID_31902
  Gene Ontology: Mol. function=metal ion binding
  Homolog annotation: Hit_ID=A2Y0J5; Match level="QueryCoverage=58%, HitCoverage=25%, E-value=4e-14, Identity=42%"; Hit description =Putative uncharacterized protein
MGVGAEPKDQAATAAGVPAEQDEAGGKEDKAAAVSCSICLDAVLAASGERSTARLHCGHEFHLVSGHRVRAHDDLYAAFGPNLFDIGVGGDGRFSSSLSLPDGNRFCGYSTTASSRCGNSLGLSSPSPRADSLSRDSSESGFVVDDGDDAAAAAASVTDRQLRLVSLALQYQGVVNRFERCLSYLADASNKL

SEQ ID NO: 75278 - protein, 57 aa, Zea mays
  Coding DNA Sequence Number=SeqID_31903
MASPRQHRLRGEGSVLVLWGGEGEGRNQPRTRRMGARTEWNDERAEQVELSKLDYIS

SEQ ID NO: 75279 - protein, 178 aa, Zea mays
  Coding DNA Sequence Number=SeqID_31904
MGKNNKRKREPTPPSEEFGDSEYSEEGFSSESEGSPAPVSPPASSDDSDDSQGIAAEVWTYIRAVERAGLEGSDESECSSDEEDSDGGDEGEDDDDDDDDDDDDGDGSGRGGGDGSRDSTKGDSSRGSTKGSSRGSTKGGGGGRGRDSTKGDSSRGSTKGSSRGSTKGGGGGRDRASG

SEQ ID NO: 75280 - protein, 160 aa, Zea mays
  Coding DNA Sequence Number=SeqID_31905
MWQDAKKSFAQMNVNGNLQNRIGIQMGQVKAIEIKEAVEKGRNGESEIAKKKRNVNHGFMGILCRDSDPMTNPPRTNLPWGKDPDGHKVEKRMKSRPFSWAPSQLYWQTEQEPNCREDLEAGKQELGHRKQRRLKAQYMRDILESDTVSKSAQLAPGSYF

SEQ ID NO: 75281 - protein, 149 aa, Zea mays
  Coding DNA Sequence Number=SeqID_31906
MGKNNKRKREPTPPSEDFDDSEYSEEEFSSESEGSPAPVSPPASYDDSDDSQGIVAEVWTYIRAIERSGLEGSDESEYSSDEEDSPEEDGDDDDDDDGGDGGGDGDGGGRGGNGDGRGGNGDGKGGNDGSSRGGSGGGSSSKGSNKASG

SEQ ID NO: 75282 - protein, 218 aa, Zea mays
  Coding DNA Sequence Number=SeqID_31907
MMTTSSMVGRSKPGCGLCPALSFKDLHHPCCGGGRAEPGFYLPQGPAGRLFLHHSGERALTGLAEGANFDNTGPVGGKRRQLQHAWLAGSAGSVVASDAASCRLIRAWPSVRRTGGRCTVRTWGSSKTSQAARAAFLFLDCLVLTPARRLRPEAGAAAIPWRSTGTQVATVGMDRGGVDSKRGFIGPGARGFPGRGGAAVALAEATERPAEASASGRN

SEQ ID NO: 75283 - protein, 475 aa, Zea mays
  Coding DNA Sequence Number=SeqID_31908
  Homolog annotation: Hit_ID=Q6QP51; Match level="QueryCoverage=16%, HitCoverage=38%, E-value=2e-14, Identity=55%"; Hit description =Putative growth-regulating factor 1
MTIGEGMQPGCVMKILEAERWLKGADPREVALLQQQQDEGNTDAPHPGARKAALPTRVLKRHGQSLHRHTPGSSPYDTGAGSHTSCKLTRNGRSQTAARGACNRPAVTSTPPSSPKPVVERADRHVGGMQPHHGCAPFRLHRIRWVSVKAQAHMSCNRRAGYYVQETAPPLAPISRLLDCRTGEGVTVDMAKSGPAVKAAADERKQRSNRLQARVPSWSGRGALSHGVKTTRPCSVPRMTRARAVAAQRTTRPVALTPRQGKRHLWQAKRASFHLRHDDRVKKGTGKGDISKGILLREGSGPRALLRIWGSKAGPSKGSIAAPEYSGSAPTTDQGFEGWPLGRSRSDRSHFALPLTDLTGKQRRLPRSDCCATHQGEADNSQVQPQAQQEAPPRPTLGLSLGRWSPPRPTLGLGLNLGLRRWSPPRPTPGLGLNLDLGGIASSFDPGLGLRRSLRLARPWARTDHATGDTSLPYP

SEQ ID NO: 75284 - protein, 85 aa, Zea mays
  Coding DNA Sequence Number=SeqID_31909
TTDQAKDGGKKSFEVPSAREKVKETRKPKPWVKKKSCKVKVDRVKKSYDDRCSNGQLSPIWKEIAHRTSYRTCPVVHQAVQCATR

SEQ ID NO: 75285 - protein, 66 aa, Zea mays
  Coding DNA Sequence Number=SeqID_31910
MAVDGQLDSQDVIVQSKTLYVSDRGAPLFNLSQREAEGERSPSHAKSRSALAELCHESASTRRVIP

SEQ ID NO: 75286 - protein, 384 aa, Zea mays
  Coding DNA Sequence Number=SeqID_31911
MSKNTRDKRFILRFGHTTKVPCFLVEAPTKSWVSFNHNPPFANHKAEVKFNSAEETFNSAEVKFNLAEEKVNSAKVKFNSAEEKLNSAEVKFNSAEEKLNSTKCRARPVLSAVPGPPLGPVGSAQARHGKLGWHGAGTAHPAAGQQCNPPPAPTSQSPLPSRGRSVAHSLTRSRSRSNPNSLSLSRGPRAIRRRPASSPLPRSLRPPPPLSAPVSISASGLRSPALRLGASARTRIDRRSSENGDPLRLSPARICAFVNRGLRTGAICASAEIPELRSPSSLSSLLSSSPPPASGVICASAEIPVLRLAPLRNRDSGVRYGGTGTGTGTLLSPSSGLPLGLSSLLALVSLTYLLLPLRHCPALALALVLSSLLAPVSLSASPLS

SEQ ID NO: 75287 - protein, 113 aa, Zea mays
  Coding DNA Sequence Number=SeqID_31912
  Gene Ontology: Cellular component=ribonucleoprotein complex
  Homolog annotation: Hit_ID=Q9AYP4; Match level="QueryCoverage=36%, HitCoverage=22%, E-value=3e-16, Identity=95%"; Hit description=40S ribosomal protein S10
  Pfam annotation: Domain name=S10_plectin; Domain location=37-104; Score=31.8; E_value=9.8e-11; Accession=PF03501.6; Description =PlectinS10 domain
MAPGASDYLTVEYHSRELPSFPSDDEGATAGSGVLIIPKKNRNEICKYLFKEGVLYAKKDYNLAKHPQIDVPNLQDSRYHWLFFRHNMYQLRQERDMKHETFAILSLGRSYSQ

SEQ ID NO: 75288 - protein, 116 aa, Zea mays
  Coding DNA Sequence Number=SeqID_31913
  Homolog annotation: Hit_ID=Q10CI6; Match level="QueryCoverage=50%, HitCoverage=33%, E-value=5e-07, Identity=57%"; Hit description =Expressed protein
MGQKPSYLLLLVGLLAIAMLCAGPGHALCQLNDANGGGLEFSLGSKAATAGAKTEPLDPSLSDDYENGTSHVEFEPELGRATVVPAATTVTVTADITHRTGWKQMGGGNQQAPYTI

SEQ ID NO: 75289 - protein, 451 aa, Zea mays
  Coding DNA Sequence Number=SeqID_31914
  Gene Ontology: Mol. function=helicase activity; Cellular component =chromatin; Biological process=protein amino acid phosphorylation
  Homolog annotation: Hit_ID=Q9AYF0; Match level="QueryCoverage=95%, HitCoverage=32%, E-value=1e-146, Identity=59%"; Hit description =Helicase-like protein
  Pfam annotation: Domain name=DUF889; Domain location=332-451; Score= -7.3; E_value=5.5e-11; Accession=PF05970.5; Description=Eukaryotic protein of unknown function (DUF889)
MQMQLHLPNMHMVAFHDRQMVQRVVNRPGADRSMLTAYFEANRLHEEAPGILYCDFPEWFTWQSGKGKVWQRRKRDTGGQVGRIVSTHPAEGERYYLCVLLNHVAGAISYVDPRTVDGVRLPTFHEATERRGLLESDNTLDECLTEHALFQMPSALRRLFATILVYSTAREVYEEESVEPTVADVALKETLNEEQRAAYDKIMSAIDTDQGGLFFVDGPGGTGKTYLYRVLLATLRSQNKIVVATATSGVATSIMPGGRTAHSRFKIPLTIDDGVVCSFTKQSGTAELLRKASLIIWDEASMTKRQAVEALDNSMRDIMGRPGLPFGGKTIVFGGDFRQVLPVVRKGSRAQVVASSLRMSYLWESMSHLKLVSNMRAKNDPWFEEFLLRIGGGTEVTNRDGDIRLPGEVCVPYSGSDSDLDNLIDYVFPNLNEKYIRFHLHYFTSDTINAK

SEQ ID NO: 75290 - protein, 184 aa, Zea mays
  Coding DNA Sequence Number=SeqID_31915
  Gene Ontology: Mol. function=voltage-gated anion channel activity; Cellular component=mitochondrial outer membrane; Biological process =anion transport
  Homolog annotation: Hit_ID=Q5JLT5; Match level="QueryCoverage=98%, HitCoverage=46%, E-value=1e-35, Identity=43%"; Hit description =Putative 36kDa porin II
MRNESIISEIQVQLKHKNVIVDVKSKFRPSFTVEELGLPSLKNIMAISYPHQAFGRFGIQYLRNYVGINASSSMNTKPSVNLSVVFGNEAIPAGADVAYDATTGDFTKYNAWFEFQQCRSQCCYDLEQHRGQPHCVLHSYHLANTEKDTTVGMEVTRNFSTKASIVTFGTCHALDPTTTMKACN

SEQ ID NO: 75291 - protein, 153 aa, Zea mays
  Coding DNA Sequence Number=SeqID_31916
  Subcellular localization annotation: CTP_CleavageSite=25; ConfidenceScore=5.07e-01
MAIVFNAPIIFNVGKVFRFGSLSCLADRKRCPTPRHRPIREGIFSNGSNRERRIIPLDPSKDYSDELRSMKTSTKLRPHRTAVASTLPRAILAPVTQPTEEAPLVRRTLLSTLPTRVWIQITQRKGAESPGTSVAAGARPKIIPVAPPTWETT

SEQ ID NO: 75292 - protein, 104 aa, Zea mays
  Coding DNA Sequence Number=SeqID_31917
  Subcellular localization annotation: CTP_CleavageSite=19; ConfidenceScore=5.06e-01
MPPWARLSAPVSPGAGPARSMRSPPLSLTPHGPAYNEQSEVPECVVGDLPEQQPGEGGSGLFPEYLSAGKGSRLMGKVCNLCRVLGTGISAELTVKSSLGILFD

SEQ ID NO: 75293 - protein, 41 aa, Zea mays
  Coding DNA Sequence Number=SeqID_31918
MAVDGQLDSQAVILQSKTLYVVGSRSQRAIDGGRADDWANG

SEQ ID NO: 75294 - protein, 85 aa, Zea mays
  Coding DNA Sequence Number=SeqID_31919
MKGVLKGLGGYSIGRKFLLEPITEGPDICQIDGCSVKLEYKRRQVKYGLFDTNVTCHYNLVYAKKLNFQAAKGENFCCNGTKKPS

SEQ ID NO: 75295 - protein, 562 aa, Zea mays
  Coding DNA Sequence Number=SeqID_31920
MPSLGGRKVRSPLFALDVRGRDPAAVVREAEDGAVRIVGRYVPKTEAQRSWDIRGSNDRLNRVFELNCFPYGGYPGEDVVDRHGKKPAAVTEDDPALEAAPATKKRKLGTAVGELGVSDSFAMELMETCAAPGGRMSSPELWESSARMLEKCRAVIRLPDARREAKRARGSAKAAVPSGSQPTLAAKPATPGSSKVPESTKAVGAGGTNSALDGAAKVRELPSPGKHVADFGTNISMDDYLVGSGEGQMVVVPPAVATTTSTTVVGVKGDAFCASGEILLAAAVKDEAGTMSRRLREASQQLAQQLSQAGGEGGRPRGREDGPPPPAGGGKEEANQAIAEAQAAQAEAKLARAEGSLASQRAEEWEVRYNALRSRVDKAEASTRSEIERTRAQLMDSYRELGARTTDFEVPDREAGLRFLEWLQEELLVLPTLVEGFMSFASLVTCEGAMNALSREGCKHYEVFDRADENFGRKIFKVKDPVVKDSAGALFDRMWGPHGREAVRERSDRAREHMARVEDVKDLGDLNGARSEAEVNPVLPEAEVNPEAVEGLLRRTCAHCVW

SEQ ID NO: 75296 - protein, 88 aa, Zea mays
  Coding DNA Sequence Number=SeqID_31921
MESYAMWVATGVASAFFASLERCSCIHLHTVEDDGDEEEEDLEEARRSFSRPISEYYYDRQEDEEQHPVSRVTVDEICDSPCPKEIPA

SEQ ID NO: 75297 - protein, 116 aa, Zea mays
  Coding DNA Sequence Number=SeqID_31922
MDSTSEKMYLCQLCNRFRISLSPMFCNLCKTGETFLKRPRRACYNGLDHAWASVLDETAGWDDLVIGLRPATRGMKGKVCQSSCLRWCSETGEGIEQRVASSPSPQHSPIIDISNF

SEQ ID NO: 75298 - protein, 180 aa, Zea mays
  Coding DNA Sequence Number=SeqID_31923
MSNVTCSLHALGATPKERGNSILPTGKVPACHAAVDNHGVDVGFTTQIDVSGVEGQWHMGPLRLHDWTIDDDVVDVAVGVGEVRFVPPGGVGMRGAVDAERGRGFFAVEQPVKSVRLLRTSPAPTASSVSAALGDTLGGEGPRQRGAGWRCCVPVADCGRPDRSLLAKASSTYSWTAESL

SEQ ID NO: 75299 - protein, 171 aa, Zea mays
  Coding DNA Sequence Number=SeqID_31924
MSARRVKRSWKGGPNYLGGSISAGIGVKPFFADIMRHLQKDFLKDLPRNSLPFLPKYSEEFILKTRNMPSRTRRTARKHTGPIGVPCHQLAPRHDNSSSGSNDPIGDLEAQVELLQSELRHRNDLWVTDGERINKLRAAIRYLQDQLVKRDLALDWAVNSRPFAWAKEAKA

SEQ ID NO: 75300 - protein, 26 aa, Zea mays
  Coding DNA Sequence Number=SeqID_31925
MRLHTLRDDVVLYPQRCLLLIKGSGK

SEQ ID NO: 75301 - protein, 194 aa, Zea mays
  Coding DNA Sequence Number=SeqID_31926
MPPRTRRTARKHTGPIGVPSHQLAPRHDNSSSGSNDPIRDLEAEVSRLQAELRRRTAIWVVDGDRINELRRDVRHLRDQLADRDLALDWVVQSRSLAWDKEQKAQARVAELNLAVDELQTYCNTLHEEVHVLYSQLHPSEPTNPDESEAGPSHVAGHALGGELDLFQPPPSMRLVDEWSPPLDDEATKSNGSRE

SEQ ID NO: 75302 - protein, 245 aa, Zea mays
  Coding DNA Sequence Number=SeqID_31927
  Homolog annotation: Hit_ID=Q6EN70; Match level="QueryCoverage=60%, HitCoverage=36%, E-value=1e-15, Identity=27%"; Hit description =Streptococcal hemagglutinin-like protein
MEDIHSSKPERGLDLPSLKALASALPDRQAKTPPPAAVKPAPVPVPARKKVLAKKGAAAAMGGSKDAGKQEDVHRLRILDNCYMQYRFLNAHAEAAAIAKKDVAEKTIYGLSERIANMQKYVAQKKAELECLKRMEKANTGEVKLALNSAMEIMKQLSPCVDKLSRKIYLLGLIDYLAMKVGETEDVASELSNVVSDEQVLLQECADLLHQAHDIQDGKLSETWRGSHTIPTCFEDGAATGGSRV

SEQ ID NO: 75303 - protein, 151 aa, Zea mays
  Coding DNA Sequence Number=SeqID_31928
  Gene Ontology: Mol. function=carboxyl- or carbamoyltransferase activity; Cellular component=ornithine carbamoyltransferase complex; Biological process=amino acid metabolic process
  Homolog annotation: Hit_ID=Q8SA97; Match level="QueryCoverage=66%, HitCoverage=18%, E-value=4e-10, Identity=40%"; Hit description =Ornithine carbamoyltransferase
MAEVESEPLGRARRRPLAEARTEFESWGRAKRSSSSSGAEPKSEPSVGRSGIRRLLGLSPSPSPGSGGTEFAVFRGLAQVRALGRVERNSSSSGAEPKFEPWVGRKGVRRLPGLSPSPSPGSGGVEFTVFRGLARVRALGRAERSSPSSGA

SEQ ID NO: 75304 - protein, 39 aa, Zea mays
  Coding DNA Sequence Number=SeqID_31929
MGSGFMLSVLRSYNFSNISQWLLDTKYVRGQDKPVEGTF

SEQ ID NO: 75305 - protein, 38 aa, Zea mays
  Coding DNA Sequence Number=SeqID_31930
MEALWKQASRLKNQVARQSGAAEDGWLVAGLGCRSAVG

SEQ ID NO: 75306 - protein, 333 aa, Zea mays
  Coding DNA Sequence Number=SeqID_31931
  Gene Ontology: Mol. function=protein serine/threonine kinase activity; Cellular component=cytoplasm; Biological process=protein amino acid phosphorylation
  Homolog annotation: Hit_ID=Q75H77; Match level="QueryCoverage=100%, HitCoverage=100%, E-value=1e-160, Identity=79%"; Hit description =Serine/threonine-protein kinase SAPK10
  Pfam annotation: Domain name=Pkinase; Domain location=23-248; Score =222.6; E_value=9e-64; Accession=PF00069.16; Description=Protein kinase domain
  Pfam annotation: Domain name=Pkinase_Tyr; Domain location=23-246; Score=-34.2; E_value=2.6e-10; Accession=PF07714.8; Description =Protein tyrosine kinase
  Pfam module annotation: Pfam domain module=Pkinase::Pkinase_Tyr; Domain location=23-248::23-246
MDRAALTVGPGMDMPIMHDGDRYELVRDIGSGNFGVARLMRNRADGQLVAVKYIDRGEKIDENVQREIINHRSLRHPNIIRFKEVILTPTHLAIVMEYASGGELFERICNAGRFSEDEARFFFQQLISGVSYCHSMSSVLHSQPKSTVGTPAYIAPEVLLKKEYDGKVADVWSCGVTLYVMLVGAYPFEDPDEPKNFRKTIQRILGVQYSVPDYVHISPECQDLISRIFVANPSTRITMPEIRSHPWFLKNLPADLVDDSATTTSKQYEEPEQPMQGMDEIMQILGEATIPAAGSRGLNQFLNDGLDLDDDMEDLDSDADLDLESSGEIVYAM

SEQ ID NO: 75307 - protein, 50 aa, Zea mays
  Coding DNA Sequence Number=SeqID_31932
MDPKGKGMVVDNNEKESVGGLRLPKVSSDSSRYHSRRSPNNTKVDTASKM

SEQ ID NO: 75308 - protein, 53 aa, Zea mays
  Coding DNA Sequence Number=SeqID_31933
MAPKRKTANSSAAVIPTIDPNSQLPFAEHSATERQGLSSISVSRASRLNSGYQ

SEQ ID NO: 75309 - protein, 150 aa, Zea mays
  Coding DNA Sequence Number=SeqID_31934
MRSTHLGWGTRRHSLVGLGTPRSRNADTHGRVRVRVSGKADRAEGLLRLRDTDTSLITFRLRHNDRVRKGTRLRASLLIRGSKAGPSEGFDSRLRSRGPYTHYWSEVRRPAPRKGSTTALGYSGSAPTTDQGFEGWPPKGSQPPQTQSEG

SEQ ID NO: 75310 - protein, 139 aa, Zea mays
  Coding DNA Sequence Number=SeqID_31935
MQDAARQALSQYCSLFSGVADGLDLKYYPRRSTGNAGGVIVSPVGEGNPRLNNMVNLVTVLNTELDHALDELGEMSENRRRGARRAQPEQQAPQEDVAQQHQLPPPPLMTVEQMFMMQTQAVQEISQTLAEMQQQLPPP

SEQ ID NO: 75311 - protein, 97 aa, Zea mays
  Coding DNA Sequence Number=SeqID_31936
MSTSVSRLAAATSGGGSRLGMKNKAKARKTNGASDDGKNDGDEEEARIPTDFDECVSRQDLEAHNKLLKEQMEETVHKSVHDAFIDMNFGKTYERLD

SEQ ID NO: 75312 - protein, 23 aa, Zea mays
  Coding DNA Sequence Number=SeqID_31937
MTPSVCRLSIHFLPNRVDYFGMC

SEQ ID NO: 75313 - protein, 127 aa, Zea mays
  Coding DNA Sequence Number=SeqID_31938
MAKTMSKSVFLQRERSVWDALLRQKGLLDRSNEQLARKSIEATDLLTMCLVLRDEVVVVHREVAHVAEKVRSLEENLQKLKQELGISINMSQTLSQAVDEKIVALNSLSKVVANFGQTFGTEDIPLG

SEQ ID NO: 75314 - protein, 91 aa, Zea mays
  Coding DNA Sequence Number=SeqID_31939
MAHEIIKKNEKDIHDSREEAKKVEKAAEFEKQIGIAYWLLSYLLHREPFDPLADPETKKAIEIINMAEAIVDEVVTKLLNEAAKSVLKEEE

SEQ ID NO: 75315 - protein, 115 aa, Zea mays
  Coding DNA Sequence Number=SeqID_31940
MARRLHLTMKGVGLLTQGDPSRCGRRHYSPHRGGIAWFAPTQGPQAAYGTGRIGISHPFPRSAVGELRREINISNGVSDAAIDATSATLDLSNVSGMASMNIAGGAATTSEVETS

SEQ ID NO: 75316 - protein, 143 aa, Zea mays
  Coding DNA Sequence Number=SeqID_31941
MEYYSAPLLQGAPVKGKCAFGPFLSILVIECQHKCFCVDLCNVVDKVQIMSKGKIELEMRWLCSAKVCSVWEHRTVRWCTGQCPVRQAGSSELAALGNSPATYDYNSPDCPCVANPSLAPCFFVNFKCKGERLQVVEIPRKRD

SEQ ID NO: 75317 - protein, 137 aa, Zea mays
  Coding DNA Sequence Number=SeqID_31942
  Pfam annotation: Domain name=C2-set_2; Domain location=19-101; Score =2.0; E_value=0.06; Accession=PF08205.3; Description=CD80-like C2-set immunoglobulin domain
MTRPRLLSVVTYNSASPEPVLGPGIAIIVPPRCQPTPDGTCVQQSTDWSSGGNYISPEVGLSLGTNFASPEPGLSYLLHANPAGGHSFNCVVHVYESRSRLGHGLGHGFGLDIINERAPDVTRNSRADVLPMAFRHT

SEQ ID NO: 75318 - protein, 186 aa, Zea mays
  Coding DNA Sequence Number=SeqID_31943
MASLGRSHQARVKPAFYPGARNLLKVREIKLEKFGSSESDMHQPVVHQTIWCAPDSVRCQGWRPDEQAALGKILLRGYNSPDCPMCQRHTRPTVDQTISGDMWLSQRSEGRIGLSGVPREPIAAMVSFARKGRESRTVHCPVRPRIEGSHALPNGTQTTPSCLGAIKGTPRRMEHHTKQSLNIQQN

SEQ ID NO: 75319 - protein, 176 aa, Zea mays
  Coding DNA Sequence Number=SeqID_31944
MAEKLSVLPPRDPWPISSVADEDLQALPKSAQSGSTGLSGGAPDSVRCARLAPANWPLSGIHRRRTTIIHRTVRCAPDCPVSQRAAGPTVGRAICAGHVVGPTARRGHRTVRCANGSQATVGAKAKTPPFARGLRCSRWSDGGKAGRDTLRRTRHFDEGLRRRPHTARPRSAPNAP

SEQ ID NO: 75320 - protein, 55 aa, Zea mays
  Coding DNA Sequence Number=SeqID_31945
MELLAIWQGGLSGVCFALSEMGVEGADGGVFIGERALAKVKKNFTTQMHAEDWAY

SEQ ID NO: 75321 - protein, 87 aa, Zea mays
  Coding DNA Sequence Number=SeqID_31946
MSELLGHQRGSTPSGENTQGTHELSDGRTDRSTSGARWRDFMERGGAERRQASQARRAEEKLGTQRGKPESSGVEGMQAPANPRAWP

SEQ ID NO: 75322 - protein, 142 aa, Zea mays
  Coding DNA Sequence Number=SeqID_31947
MGLRGWKREKRGGQGAGDAAAGEEEEVERTHWEEMELSGCAVEQAAMEEQRFDWEGGDGTALGMSGTRARLQEEDMLDNRRRGGRRAQQEQAAPQDEAPQQQQLPPPPPITIEQMFLMQTQAVQAIGQTLCRCFDHGGSLDR

SEQ ID NO: 75323 - protein, 127 aa, Zea mays
  Coding DNA Sequence Number=SeqID_31948
MADPTVIPIATPAPFIEDPTTLTPLPPQAINAVAHSVPPAVVTMAGPPNLRVPVRDSQINLVLHDVGAWADRYEEFLPCLDAVEDATTAHSGVAAFTCDFFQARSEIRDAGENPPSYQPRPSGFMSK

SEQ ID NO: 75324 - protein, 242 aa, Zea mays
  Coding DNA Sequence Number=SeqID_31949
MSEIDRLISDVAPEKDIAEVSTDKALALKMKEFKKASSEDTELDLRHLGGQELSDEDISELKEFALAALALHARGMLAAAAGAAPAWRAPRSVRLRWRGLARSAAPPCSPLAQSACPWRGLARGVAPACSPSARSACAGAAPACSPPVRSACPWGGPGVLTPSSVPLCVRPCVVKECGGDGDDDYDYGNDESEVSSDEGNSSDSSEEGSNGDDDGEGEGDDGGDVDGDGDGKGGSGNGKASG

SEQ ID NO: 75325 - protein, 156 aa, Zea mays
  Coding DNA Sequence Number=SeqID_31950
MGCVRFEQGDRADEDGPRASGWREENSAARPAPTIVPPNWVRLTTAKFSLGRNRKLRLARPQGSASTSASEGGLRLARPKGSASTSASGGITSSPDPGLGLRRNLRLARPWARTDRATGPPTEARRHQQDPSSTDSYASTGLRHFSDGHVTAYTGL

SEQ ID NO: 75326 - protein, 176 aa, Zea mays
  Coding DNA Sequence Number=SeqID_31951
  Homolog annotation: Hit_ID=Q6QP51; Match level="QueryCoverage=42%, HitCoverage=34%, E-value=6e-33, Identity=90%"; Hit description =Putative growth-regulating factor 1
MQVACNRTTVAHPFGFVVSSMEAQAHTSCNRRVGYYVQEIAPPLAPMSRLLDCGTGVATRGSPAHDPTVPIKHRGSKAGLSEGFDSRPEHSGSKPITDQGFEGWPLGRVRLLPQSARAPRPLLIRGSKAGPSEGFDSRPRACRVRDDSGYVRYMAEARATLPRYPRTFPRPAGAIL

SEQ ID NO: 75327 - protein, 200 aa, Zea mays
  Coding DNA Sequence Number=SeqID_31952
MPPAPPQGIPAAGGDPDRDGDDNDVVGSSSHDTELSEEPEPEGWIARPITRDTARGGVADGLDLKYYPRRSTGSAGGVTVSPVGEGNPRLSNMVNLVAVLNKQLDHALDELGKVRAEVAELRAECASRHYLDGGSPALLGFSTLTVHRPVVASTMMSENRRRGARRAQPEQQAPQEEAAPQQHLPPPPPMTIKQMFLMQT

SEQ ID NO: 75328 - protein, 177 aa, Zea mays
  Coding DNA Sequence Number=SeqID_31953
GEIRMFGCSAGARSKAEINSHVFDALWTRQSTPDARPACPASCQSPAGAMARARAYKTPRDLDRTPPHALNLAGAQTHRRLPVHGVSAAARSPYHRRPANRALTNPVQPSEKTVHTSVKLPERGIGVCFAGEASPRSPDSTRPPASVDRVILCSILRFLVHTASTPPREAHCAIGLN

SEQ ID NO: 75329 - protein, 28 aa, Zea mays
  Coding DNA Sequence Number=SeqID_31954
MGTTWGGVVCKARVLTKRYSGKSLSPLK

SEQ ID NO: 75330 - protein, 377 aa, Zea mays
  Coding DNA Sequence Number=SeqID_31955
MDDLGLAAPRGCAPSLFIQELRLLYFPSFVLRNDLRDQADLASARSVTTGSWFSDCIGASGLLVVVGSQGLHSDTLLGHLGSGEWGVALSGQKGNRNLWVKDVWITCGDGDDDYDYGNGKWYSFRLERELEQQGSSSSPQQVVESVRSCSLVLPLEAPPAPPLSAPAAGVAVAGDPDDRGGDSSSSFSTDLSAEQEPERWVARPITRDAARGCHFHDALDTLLRQALDRHTWSIEYRCVVFQHSHRVYPDRWEATCLVHRPENSLRVRSGVADGLNLRYYPRRPSGSIGGVVVSPVGEDNPRLSSTVNLAVVLNMELGHNLDELSSVADPPKLLGPHAPAVVSKKSDGYACAPDNLTGSVRVSLGPRINHLQPRSQD

SEQ ID NO: 75331 - protein, 216 aa, Zea mays
  Coding DNA Sequence Number=SeqID_31956
  Homolog annotation: Hit_ID=A3A0H5; Match level="QueryCoverage=18%, HitCoverage=8%, E-value=5e-07, Identity=66%"; Hit description =Putative uncharacterized protein
  Pfam annotation: Domain name=RVP_2; Domain location=1-83; Score= -33.1; E_value=0.0004; Accession=PF08284.2; Description=Retroviral aspartyl protease
MIVGMFPDDSHIAEVIFDTGATHSFITASWVEAHNLPITIMSTPIQIDSASGKVRVNSVCLNRWYNFTHKPCISSSLGRPKPVNTSEHSASSPALQRLRPRRASSPAASVALLRARGSRPAVGHRLSRTTAGGTARHSRTGAQLPSWRAAQRARVLDHQPEFEDDPDLYVLKPLKYIGIEVWQAEKEAFEEAEKERKAREDRLDLVISMLIIIYDS

SEQ ID NO: 75332 - protein, 165 aa, Zea mays
  Coding DNA Sequence Number=SeqID_31957
MTNFGETKDDEQNVWQSTGEQHQCECCTGTITESESEARNRFDGEVLCLDAVGDCSKRRGSKAIATVHGEVELRQGINRRDRGGDFIGEQRRPRDASDGAPIIALAVNGDGEGTAAMNKKGRGMVQSGAVVVAIRLGDIGASTSFTGWEMRGGGRRTSHRRADAA

SEQ ID NO: 75333 - protein, 118 aa, Zea mays
  Coding DNA Sequence Number=SeqID_31958
MGARNLRMADWIARPTRGGGRPKSGDDDLAVPVRQGFDPCLEKLHGSTWKLSKGSVEAEGLWKWLAAMAGARTGGAELARSQGWCLANEDFGPAARGYSATFVINGAPICRIPPLSPI

SEQ ID NO: 75334 - protein, 80 aa, Zea mays
  Coding DNA Sequence Number=SeqID_31959
MRARPTPLLLLLLSCWSSIPLNHPTRRQGAEVPDLSASRDNSDLAEDDPCDSTTTSKPEAPMQSLNQLPVVTDLADARSA

SEQ ID NO: 75335 - protein, 200 aa, Zea mays
  Coding DNA Sequence Number=SeqID_31960
  Subcellular localization annotation: CTP_CleavageSite=80; ConfidenceScore=5.60e-01
MGAIKVKAQSTQGTRSRLAQAQPRAKAADPGGFTSRPRPPSSNGHTFGSPEAQSSQRSNLGQIATPTDPKSSLGRYRKLRLARPQGSDSASAPEDDELRLARPQGSDTASAPEDDELRLARPRARTKPRLRKTTNSVSPDLGLGLNLDLGRRSPPRLTQGSDSASTSEDGLDLDLGGASASPDLGLGLTASQEGPSLPYP

SEQ ID NO: 75336 - protein, 326 aa, Zea mays
  Coding DNA Sequence Number=SeqID_31961
MLFFRHVGKTSLVPPPVGGLTAAIVAVARRRKEYHVVAVVKGNEIKTPETENRPGLERLLETTHLELDGKLFVNTSGEAEAPPRSRSSPSSDVEAESDPWVGRGGDRLPRSRLSPSPRSGVAEFVVFRSRGCVRALGRARRSSSSSGAEAVSEPWGRARRSSSSSEAEAESEPWGRPRRSFLWRPRLDLAAVSLTLSSGTAVRAMQAALSSCQLCADGGYQLRLGVFGVPLIMVPDKCYGCDGAATSSEVTTSLEKDAEANSDEWWRLESSRDIMLANFRGVLKATSVRHSQRSFDDEAWRVLMRRRTMAKQLQEGLAHCMIATEQ

SEQ ID NO: 75337 - protein, 103 aa, Zea mays
  Coding DNA Sequence Number=SeqID_31962
MVLPCPSRSTKLLRDEASLGVIGAVSRTPDRSPRPEVATVGLHHVAKDGAGAARAIAEFRSAEPSTPALWELEEVAGELARSDRDAAKLPSENRDCRHCYPNS

SEQ ID NO: 75338 - protein, 146 aa, Zea mays
  Coding DNA Sequence Number=SeqID_31963
MGKNNKRKREPTPPSEDFGDSEYSEEEFSSESEGSPAPIPLRESSDDSDDSQGLAAEVWTYIRAVERSGLEGSDESEYSSDGGGEDEDGDDDDDDEGGGGGDGDGSDRGGSSGSKDGDGGGSSGGGGRSRGSNRGDCGGGSNRASG

SEQ ID NO: 75339 - protein, 150 aa, Zea mays
  Coding DNA Sequence Number=SeqID_31964
MSSRRGLAATLSRLPVKVVHLERLHHRMHEEQEHRRQELEQQGSSSSPQQEVESVRSCSPMPPLEVPLAPPLGVPAARVAVGGDPDDRGDNNSSSPSTDLSEEQEPEGWVARPITRDATRGCHFHDALDTLLRQALDRRTWSIEYHCVVF

SEQ ID NO: 75340 - protein, 117 aa, Zea mays
  Coding DNA Sequence Number=SeqID_31965
  Subcellular localization annotation: CTP_CleavageSite=50; ConfidenceScore=5.02e-01
MSNSTTSRGRGGGGGVRPKPRGSCRASDDAAQAQQQLAGHTLTPPSPWLPASLVRGATLPPKYRRQLMGDPPPPAYTDTPPGSEWRYSLHLTQQANDERFDAFKLQRQPRLAVRCPS

SEQ ID NO: 75341 - protein, 184 aa, Zea mays
  Coding DNA Sequence Number=SeqID_31966
MNALVESLVSQDFVGEAEVSKRERECVRGYIKDPPKAGSYWEKRGKNRLNRFSDRLNRFPPGRSQFTNLLSRRLDQIQNRSSREKLRLNWFSQKIYNDFSDSSDCQTGQSRDGRGTVPKPVEPVSKAENQVLNILKRTKVEFLWEVKMVFLKGIHDLEKCSRRCFQRILNLAHCITYLTIADPS

SEQ ID NO: 75342 - protein, 304 aa, Zea mays
  Coding DNA Sequence Number=SeqID_31967
  Subcellular localization annotation: CTP_CleavageSite=36; ConfidenceScore=5.19e-01
MAAATGRAGWPESRAVAAHAQSRRGLAHSRRGGCTRAHNALGRETPGPRPPRPSRPERIYLCAPPGLHTEPSRPRAAPRRRGRTARAGQAGPRPRAPGPVARVPPGGRARADGDSVRAHRRGGLCPRHSRGRTRAAEGRRAHSRRGGPLPQPLEGRARGRARAAEPLAAPSAARPREDRAPAPSRSRADGAGGRRACDQGRHGHRSCLAGAARCRAATYAWPEPRATRGPPALYRRGPRFRLPWPCLGRSHARRVWGTQAAGHALSGCGAQRAVLAAQRARARRAHRRTSVTPLRARAGLPRAI

SEQ ID NO: 75343 - protein, 297 aa, Zea mays
  Coding DNA Sequence Number=SeqID_31968
  Homolog annotation: Hit_ID=Q6J9V9; Match level="QueryCoverage=21%, HitCoverage=33%, E-value=2e-09, Identity=47%"; Hit description =Putative uncharacterized protein
MQVACNRTTGAHPFGFVASSMEAQAHTSWTGKGDIPKGILLREGSGPRALLLIRGSKAGPSEGARDDSGYVCYMAEARATLPRSRPRLPRDAISPRPSPASGGNSSPRRIHASPEGLLKRRAHPRLARSPARAGFVAKQPWPNRLTNRPYRRRIQCEDRLTPYPDTRTSVGKVEPHAQQEAPPRPSLGLGLRRRSPPRPTLGLGPHLGLGRWSPPRPTLGLSLNLGLGRWSPPRPTPGLGLNLGLGRWSPPRSASTSASGGITSSLDPSLGLRRSLRLSRPWARTDRATRDTSLPYP

SEQ ID NO: 75344 - protein, 161 aa, Zea mays
  Coding DNA Sequence Number=SeqID_31969
MHRALPPSEPPDGERPHCLRLAAVGGQVAAVVGAEVVAAREGFSADETVGATCGRTFGSSTLTACPRPSYGDWSRASHLEFVIPQALWCGGCSYPREWNRSSVCNGTLSMGNPQLLFDEPEPEAAVSAWTEAESARKEASSAQEQVASQAEEVRQRRLELG

SEQ ID NO: 75345 - protein, 303 aa, Zea mays
  Coding DNA Sequence Number=SeqID_31970
SQMEVRCRTSFCQNEDGFPKLLRACTVRLGIRSQPEYAGREFVEHGTEKALRALCQIYEEEVADTPLRFFPPFQRDRPVWMARMRALEGQQLLEDDPTVVYLTAYLLTLDAQYDFLARHHRQMIARAEDAEKLNRKLHVDLTTAQAHVAALESREVIVVEALKQAKDEHVQKLMEAYLVTHNQRRALRIQEPASSNPVQSIRAEDPQILEVFPQAMEKQEHPEAYQDPPSELFEPLSMKKIPAPSLEVKEEAASTPPAPPPSEELQEPVPLEEEFDLVLPCQFPPEEVINISSLLTHPRDVSD

SEQ ID NO: 75346 - protein, 363 aa, Zea mays
  Coding DNA Sequence Number=SeqID_31971
  Gene Ontology: Mol. function=molecular_function; Cellular component =cellular_component; Biological process=mechanosensory behavior
  Homolog annotation: Hit_ID=Q8WXC7; Match level="QueryCoverage=67%, HitCoverage=68%, E-value=2e-18, Identity=34%"; Hit description =Putative uncharacterized protein
MQELGHEKQRRLKARLLRDILEPDTLSKSAQSSPGGHLRNPSMPRGYPTIVSKRADVPPHHSVIFLKITCKAGYHSALPLKRRPRVQSLGITSKMPMPTFTHSALPLKRRPRVQSLGITSKMPMPTFNHSALPLKCRPRVQSFGITSKMPMPTFNHSALPLKRRPRVQSLGITSKMPMPTFTHSALPLKRRPRVQSLGITSKMPTPTFTHSALPLKRRPRVQSLGITSKMPMLTFNHSALPLKCRPRVQSFGITSKMPMPTFNHSALPLKRRPRVQSLGITSKMPMPTFTHSALPLKRRPRVQSLGITSKMPTPTFNHSACPLTRRPRVQSLGITSKNTDADLQSLGVVSKTPTLYSVARHYF

SEQ ID NO: 75347 - protein, 125 aa, Zea mays
  Coding DNA Sequence Number=SeqID_31972
MAIIKPTNEEAQVGPRSKVNNMVPDQRSWLLYSGGRHGGDGGIPVRWSVSCQHDTGRANLVESRRDTVMFWARTCRHVGLNMSPDTTLLHLTRSYRVVELGRVLQCGVGLGPLPCNSLTSTSPDG

SEQ ID NO: 75348 - protein, 191 aa, Zea mays
  Coding DNA Sequence Number=SeqID_31973
  Homolog annotation: Hit_ID=Q8LND1; Match level="QueryCoverage=53%, HitCoverage=6%, E-value=6e-08, Identity=33%"; Hit description =Putative transposable element
  Subcellular localization annotation: CTP_CleavageSite=20; ConfidenceScore=5.03e-01
MGPVGMVGKVDDAGMVPSPLASQSGSTVQTAIGVSGGVLLHFNITPQVSAIVLLLDRQRQKKVTDFETHHRDYIDEWDQESTLNYVNDQPHTNYHFRRCKLKGQWTTAHYVDQESSDDEDTLFDIATRLGSQIEATPILDRVRVSRRLRCAATRCGYVDDDDADDDDGDDDNEDEGEENIVAARHDVIGPS

SEQ ID NO: 75349 - protein, 79 aa, Zea mays
  Coding DNA Sequence Number=SeqID_31974
RRLKAANEKRAHDAREWEAARAEKQMLGNLAGRLSVKIECVVNYLADEARARYVQEKMATSKLSELIALAEARLRGRGG

SEQ ID NO: 75350 - protein, 209 aa, Zea mays
  Coding DNA Sequence Number=SeqID_31975
  Homolog annotation: Hit_ID=Q6JAD6; Match level="QueryCoverage=34%, HitCoverage=9%, E-value=5e-20, Identity=68%"; Hit description =Putative uncharacterized protein
MAGWVKIYIGPQLNHSPLEKSTAFLWHTGQSGALSACQWSVQDGEDEECHTVRGGDDQDPPRPFRQDKGKEVYLEQVRHLSSRACSTPALFDPSATTPPSSTTAAPVALEPSTTPVALPASTTPASTAPAPSFALPIPLPRFWEHDETEVCPLAADSCLLDLQRATSARVRRFRHVPVEPWLPTQRDLAIAPLFSTRTQESFYRAQLTT

SEQ ID NO: 75351 - protein, 161 aa, Zea mays
  Coding DNA Sequence Number=SeqID_31976
MEGKSRPSFVVAGESSRERNDRREMRRCATEDAEEPNAHISKKQLTPGPPPGGDPRGAARGVFQAALDDSRLFFGFYRLASEDTAPALEDMLAPDFRDEDEVIYQFEDQGATADTSSDDEDLEIPPPPPVPPHSHDHEAGGSSAAPSVAPLAIDPALAAII

SEQ ID NO: 75352 - protein, 179 aa, Zea mays
  Coding DNA Sequence Number=SeqID_31977
  Gene Ontology: Mol. function=binding; Cellular component=integral to membrane; Biological process=transport
  Homolog annotation: Hit_ID=A2Z2Y7; Match level="QueryCoverage=59%, HitCoverage=25%, E-value=5e-37, Identity=78%"; Hit description =Putative uncharacterized protein
  Pfam annotation: Domain name=Mito_carr; Domain location=72-165; Score= 82.4; E_value=1.5e-21; Accession=PF00153.18; Description =Mitochondrial carrier protein
MGGTAFCLGEECAGPLSWERFLVQAAETSGAASARPTAKFALLHDMRFLVQAAETSGAASARPTTKFALLHDMVFLLGALAKLGATVVTYPLLVVKSRLQAKQEIGSNVMSRYTGTIDAIIKMVRYEGLHGFYKGMGTKIVQSVFAASVLFMVKEELVKLAVLLVASSRTMLITTSKKQ

SEQ ID NO: 75353 - protein, 195 aa, Zea mays
  Coding DNA Sequence Number=SeqID_31978
MNCFTSPAHPPVVHYEMLQLQGDSCWLPAALLLDSGADLVPGYKRRWGRSMSGALVGKSREAPGHRAVLIYENIFFISSCTILLVASNIMVFKSPGRPVDDGDRLANSRYLANQTYKTRESPELVKDWRSRWFLIREEPPELVIEEEEQPEVFAGRSRQEPRNKRNSSQPARKDKRLRDEIRKAKRDLESQPISA

SEQ ID NO: 75354 - protein, 202 aa, Zea mays
  Coding DNA Sequence Number=SeqID_31979
  Pfam annotation: Domain name=IQ; Domain location=115-135; Score=20.4; E_value=0.0066; Accession=PF00612.18; Description=IQ calmodulin -binding motif
  Pfam annotation: Domain name=IQ; Domain location=73-93; Score=25.0; E_ value=0.00028; Accession=PF00612.18; Description=IQ calmodulin -binding motif
  Pfam module annotation: Pfam domain module=IQ::IQ; Domain location =115-135::73-93
  Subcellular localization annotation: CTP_CleavageSite=50; ConfidenceScore=5.21e-01
MDRRSMTPGISSRLSSPPPAAHPSPPPAAAPSAAAMPSHPPSPTLDAFTRLEEKWDQFIVMFHRYKEKTEKELQAAVRLQAAARGFLARRQVQSLRGEKHLAVASRATPWPSSHEQAVVRLQAAVRGFLVRRAPPCTAKEGRLLHSGNCLGAGQTQHKNGLVPPSPFIQRELEDELVLKGGGDVMGIIGSETQQPGWDKARE

SEQ ID NO: 75355 - protein, 45 aa, Zea mays
  Coding DNA Sequence Number=SeqID_31980
MTAGSAKGVALVDGPSRGRERVDGAVPAITFGRQLSRPPWPAVPT

SEQ ID NO: 75356 - protein, 431 aa, Zea mays
  Coding DNA Sequence Number=SeqID_31981
  Gene Ontology: Mol. function=binding; Cellular component=integral to membrane; Biological process=transport
  Homolog annotation: Hit_ID=A2ZNC2; Match level="QueryCoverage=39%, HitCoverage=51%, E-value=8e-68, Identity=62%"; Hit description =Putative uncharacterized protein
  Pfam annotation: Domain name=Mito_carr; Domain location=132-197; Score=53.7; E_value=6.2e-13; Accession=PF00153.18; Description =Mitochondrial carrier protein
  Pfam annotation: Domain name=Mito_carr; Domain location=36-115; Score= 1.8; E_value=0.0021; Accession=PF00153.18; Description=Mitochondrial carrier protein
  Pfam module annotation: Pfam domain module=Mito_carr::Mito_carr; Domain location=132-197::36-115
  Subcellular localization annotation: CTP_CleavageSite=43; ConfidenceScore=5.08e-01
MTLVALALNPLRKQGNVSRIHAAPPAMLLQDSRHHSNGHVNTRQQTERSTKKRKARSGASATPASTMYQMLQLIQTEGWSGLYSGLKPSLIGTAASQGIYYYFYQILKNKVEDIAVARSKKGLGDGTVGMLSWLGIAAVAGSINVLLTNPIWVLVTRMQIQEVYHESGVRGFWKGLIPTLIMFMIYETLAKRLQSKRSGKQLPKRHLTAMEPPPPPGSFSLPLLSLAAATCQQRPAPRAPRQQQRLGPRARTARPRTPAGGSLRLAGLRLRDRAPGLGRAPKATSGRVAAGTLLARQCSLHCHRGGRAPTPGGLARAESLGPRPALLWSGYRGCARTDAARCARAPGAAPSALHRRPAPVLLAPVDPAPSRSTSPEDPRPCCSAPSSAPAVPCRGRPTPSTQPPLLFRARLVQSAPPCTGRHELYLARLLL

SEQ ID NO: 75357 - protein, 262 aa, Zea mays
  Coding DNA Sequence Number=SeqID_31982
  Gene Ontology: Mol. function=protein serine/threonine kinase activity; Cellular component=plasma membrane; Biological process =protein amino acid phosphorylation
  Homolog annotation: Hit_ID=A2Y5X3; Match level="QueryCoverage=50%, HitCoverage=14%, E-value=1e-33, Identity=53%"; Hit description =Putative uncharacterized protein
  Pfam annotation: Domain name=LRR_1; Domain location=110-142; Score =2.4; E_value=1.1e+02; Accession=PF00560.24; Description=Leucine Rich Repeat
  Pfam annotation: Domain name=LRR_1; Domain location=56-79; Score =15.1; E_value=0.27; Accession=PF00560.24; Description=Leucine Rich Repeat
  Pfam annotation: Domain name=LRR_1; Domain location=86-108; Score =0.4; E_value=2.6e+02; Accession=PF00560.24; Description=Leucine Rich Repeat
  Pfam module annotation: Pfam domain module=LRR_1::LRR_1::LRR_1; Domain location=110-142::56-79::86-108
MPQHILTENSDSEGKVYLEHEHSFNLLGSFNHIDEKALNSNKFTGTIPPTLGLLSNLFWLDLADNQLTGSIPVSTATTLGLDQLTHTKHFHFNKNQLSGTLTGLFNSNMSLIHILFDSNQLTGPDTRGARGHFIAPSSIGTALRERFLLNISNLVNLKRAELGQQLAHWTIARSKQHDQIECRVGEKGGLTKKLFDFAYKRNLASLNGVEWLRTWVPYVLNVKNVGTYVLNVKNVGTVELNGQPSPTHAGPISSTATWTCRT

SEQ ID NO: 75358 - protein, 127 aa, Zea mays
  Coding DNA Sequence Number=SeqID_31983
MGAATAAVRKGDGPETGKDGSEMWRRSTSPKVKYSSGPAVRVRRSGGAACESVFGGGGVEGMRACWASAGRRDGVVVGCGVQNNLRVVDVGDNHEVPLLNDGQRHMRPRRTASRGRTGSRQASFRHR

SEQ ID NO: 75359 - protein, 297 aa, Zea mays
  Coding DNA Sequence Number=SeqID_31984
  Homolog annotation: Hit_ID=Q6J9V9; Match level="QueryCoverage=43%, HitCoverage=45%, E-value=9e-58, Identity=85%"; Hit description =Putative uncharacterized protein
MKQLAGTPNPRSWKGMKLTTYPGDRVGLRKPKQEASANGRVKNHHRPLFRVYKGPGEIHPRLRPNPPQNSNSKGKRHLRQAKRVPFHLRHDDRIKKGTGKGDIAKRILIGEGNGPRALLLIRGLKVGPSGVRQPPQSTRALSPLLIRGSKAGPSEGFDSRLRARRVRDDPGYVRYMAEARATLPRYPRTFPRPAGTICNGIPPEGGIEPSDPIEWVRVRQITCSLGHDRELRLARPQALASGEGPCLVHPRASATASASGGVTSSPDLNLGLRRSLRLARPRPRADYATGDTSLPYP

SEQ ID NO: 75360 - protein, 206 aa, Zea mays
  Coding DNA Sequence Number=SeqID_31985
  Subcellular localization annotation: CTP_CleavageSite=74; ConfidenceScore=5.51e-01
MKFKPRDETPVPRTARTRNGRHANRPSRHLNSPAKQATPFGRRGGRRFAFAIMTASKKRLGGCSRTRLWPKLLTASTNQPDNLEPDHAPGLLSGRKRERPDRPKHYEKHLDLRGVKPLLRGLGGYTRRENSAARSAPTDVSATPATTDNRSRSTTKLKPRAPQEAPPRPTSRSGLGRRSPPRPTPGLGLDPGLERNRVLARPRPRP

SEQ ID NO: 75361 - protein, 107 aa, Zea mays
  Coding DNA Sequence Number=SeqID_31986
MALGPTRHRHREVFFNLQPSPPRKGAEKGPGWEVREGRRPWMEEGAMRKEELPAQPNREGKGVSDFGRPFSSFSSWNRIKVIVGNIFLDVKGEVINLDGFWVEQRRT

SEQ ID NO: 75362 - protein, 244 aa, Zea mays
  Coding DNA Sequence Number=SeqID_31987
  Pfam annotation: Domain name=zf-CCHC; Domain location=161-178; Score =17.7; E_value=0.0032; Accession=PF00098.14; Description=Zinc knuckle
MAMHLALFLKVGCDISTKIEQLESSATSTATDDSLVKRNEKLKAKLASSQEAIENFLGKMEILSIHNNELTTKLENISSTPGASLVEIPEIIKKDASTSCSNLIDDSNPCDQVAKENEQLKQEVARLGKALYDKKGKAKQIQPPQDNTTTEVKKPVEGKTVICRLCHKEGHKSFQCKVRTGDKQKLKQKPTSKISNTYIKKVDKKAAISYLIKKKKNGKVIAIKANKQANKGKGAKRVTEPPKS

SEQ ID NO: 75363 - protein, 165 aa, Zea mays
  Coding DNA Sequence Number=SeqID_31988
MARSEQRRCSTGAIGPEPRNPNRRAGSADDVRGIRRRQIRVPPRGDTYVTHDWCTFFVYLSWDDSARTVEAQRGSRLAYILDVARDFRRVKRRPFGRLRCDLRLTKNERKVVDFTAREVWAELQVPEIASIWEESLRQTREVPQRRSATPRRSTRRGRRILLKGD

SEQ ID NO: 75364 - protein, 167 aa, Zea mays
  Coding DNA Sequence Number=SeqID_31989
  Pfam annotation: Domain name=zf-CCHC; Domain location=115-132; Score =23.1; E_value=0.00048; Accession=PF00098.14; Description=Zinc knuckle
MKLRYYNASEDEAFENKSPTIMIGKTGTFEMSRKICRGEEPTSSRPYAFACDERNGKKKAPTPSSSSEEEEEEESDDDEDNQPSTSSSEDEETIRRIEKVEDLLFNIDRKKQRKRGCFACGDKGHFRDNCPTMVVPIKERSKGKALTSVKTWDDSSSKDEPPRTRSH

SEQ ID NO: 75365 - protein, 132 aa, Zea mays
  Coding DNA Sequence Number=SeqID_31990
MRLGVPFIAPRQLGAVENIPGRQILPRDGNGYPKPETRWVFTPLGFWIMISSIITILIDYEKIIILEMKPAGNPWVPVNPMVFSKYAQQFQKSVQPELKRFNRFSPLSQSDLPVSQSEKVMCRFLENRFNRI

SEQ ID NO: 75366 - protein, 78 aa, Zea mays
  Coding DNA Sequence Number=SeqID_31991
MTNPQPTDPTAQLQLADGGLSSNLGRPRNYQWSRPFLPPQPRGDDDPRRQAEYRRQRNPGEKFTKLCHRIRSSGGSRS

SEQ ID NO: 75367 - protein, 271 aa, Zea mays
  Coding DNA Sequence Number=SeqID_31992
MGDIRRLFASSLEERNSVGVGTFQPSFSFKDFHQPARLYAPPPRRRRRSPKTVTTSPWVGRSKPGCDLGPTLSFKDVHHPRWGGGRAEPELYLPRGFVGHPLLRRSRERALAGPAGGSDFDNAGPVDGRHRQPQRVGLVGLAPGAPSCRKAAAAPCAREDRPRCRALLGRRSCSGAVLPLHRYGASTGRSVPCSSGRIRVGICRRADGPCRRCRGGGGSRSPRRRRDHRHHPRFGPPDLCTCPRPSSVGVGEGKLAATFALRPSPLQFGHP

SEQ ID NO: 75368 - protein, 95 aa, Zea mays
  Coding DNA Sequence Number=SeqID_31993
MAAWLRMELDVVVKNRLHGRIKGHESAPDNMSIVKSDMHSNHGDTKRSQKRGGVGGQGKGRAPGGRRRKHKGAHCGDGGDGMGRMADTEVETDGG

SEQ ID NO: 75369 - protein, 181 aa, Zea mays
  Coding DNA Sequence Number=SeqID_31994
  Subcellular localization annotation: CTP_CleavageSite=87; ConfidenceScore=5.66e-01
MQAACNRAKWARFSDSQHAQHGGPGPRVMQPARRMLRACNSTATRAPTVPPRLRSQYRDSRRPTARPSSASLARRRSGRRFAFAIMTASEKRPGKGDTPKRILPRKGTRLRASLLIRGSKAGPSEGFDSRLRSRGPYTHYWSEVRRPAPRKGSTAASGYSGSAPITDQGFEGWPSKGSQPP

SEQ ID NO: 75370 - protein, 126 aa, Zea mays
  Coding DNA Sequence Number=SeqID_31995
  Gene Ontology: Mol. function=protein transporter activity; Cellular component=cytoplasmic vesicle; Biological process=intracellular protein transport
  Homolog annotation: Hit_ID=A7QH73; Match level="QueryCoverage=72%, HitCoverage=27%, E-value=5e-15, Identity=42%"; Hit description =Chromosome chr18 scaffold_96, whole genome shotgun sequence
  Pfam annotation: Domain name=WD40; Domain location=10-50; Score=16.5; E_value=0.099; Accession=PF00400.23; Description=WD domain, G-beta repeat
MKLWDWDKGWECARTFRSGGINVDHIAFDPKETNRFVATDCLDGKVMIWSLDSPEPEYHLPKTDFKGIMFLEFFTRYGRQCLIIAHEDHKAHGKDGFTNVAYMCQRGPLVNFYLLLKEASTFLAYL

SEQ ID NO: 75371 - protein, 420 aa, Zea mays
  Coding DNA Sequence Number=SeqID_31996
  Gene Ontology: Mol. function=protein serine/threonine kinase activity; Cellular component=cytoplasmic vesicle; Biological process= protein amino acid phosphorylation
  Homolog annotation: Hit_ID=Q2R8X2; Match level="QueryCoverage=59%, HitCoverage=34%, E-value=2e-30, Identity=33%"; Hit description =Protein kinase domain containing protein, expressed
MATGWWGGWAAAPGCLILEGTQLQSAGKLLLQVHPTFLVFELQPAGKLTPCLLHLTNDTDEDMEFKLRIEEGVDQRWSEQFGEERFSGCGVVAARSTYTLILTVSWERDDIPENRFCEMILDSWPKQNWYSEANKNSKEATSGQLGVTISWMEKPRTLCSVKFIARKQWFICATETEGFAHVYSYETEEMQKVNSFRAQEMQKVNSFRADDDHIRPISLAVHPSQPYVMSWYYGNETMKLWNWDKGWECTRTFQISGKTFKKIAFDPKETNRFAATAVGTSFFDTDVDVMIWSLDCPEPEYYLLWTDIRVIMFLEFFTCYDRQYLIIVDEDNKAHVWDLQQREFAFKKRKSLSLEPSVFSHPNLPLLLAAPIERTCCFWSAKDFSFYGVLDNSGGENVVGIACLMGSKRRKFRDSASLST

SEQ ID NO: 75372 - protein, 323 aa, Zea mays
  Coding DNA Sequence Number=SeqID_31997
  Subcellular localization annotation: CTP_CleavageSite=17; ConfidenceScore=5.40e-01
MSECRLNTGVTITSVPRLFNVWHRVSSRVTFRFKFSLDDVMTRMMVMIMLMVMMARLRHTARKSVIPFLPSRLAERPLRRPVTEVPPTPPLGVPAARIAVGGDPYDGGDDGSSSHNTDLLEECHFHLDTLLRQALDPHTWSIEYRCVVFQHSRGVYPDRWEATCLVHRPENSLWGAEVCSEHYSISERDSAEAAMQDVARRALLHYCSVLGGVADGLNLRNYPRHPSGSTGGVVVSPVSEDNPRLNSTVNLAAMLNTELDHALDELSRARAEIAQLRAERAEHRHLVDGSPAPVGTQHPYRSPQHGHHAYGNPDCRTRINLEP

SEQ ID NO: 75373 - protein, 75 aa, Zea mays
  Coding DNA Sequence Number=SeqID_31998
MALLSLMETCSASALNWCCLTVLLVLKCREGMIHQLILERVNQASQEAILSLGVGVDIFRSIARQMQKSVSILTN

SEQ ID NO: 75374 - protein, 181 aa, Zea mays
  Coding DNA Sequence Number=SeqID_31999
MEKEKGKGNRVGRARDSFSPGGGPAHAPPLATLLAPPRAPARPPVAPCAASCVPLPGPPAAPPARPRRGPAAPQPRRGPCMAPARPCLAPRRRPMLGPGAASRSHPRAPPLGPGCGPLPGGAHAAPGAAPRSRPRAPPLGPGGGPLPGGDDEDDGYDYAYSNGEDEVVEEDFQEFQEYDEF

SEQ ID NO: 75375 - protein, 248 aa, Zea mays
  Coding DNA Sequence Number=SeqID_32000
MDALGFEYSHYNNLAQEAEARVKRKWKRGVDFSSYTGLTSLDLSPATAHGSLYVGFYLNHHTVSRYLVTAALSLPWIFLRATPARDISSAKAVSNKERYMVLSSKYRGLSGTLNVEGSGSALSALFVHQPPPEKFPAFVPRAGDCFFRARALDPARFAAGIEAGGGEAAVRRRVCRRRARTPCNRGRATPRNRRSKPGSPCSSPESRHRQKASSSADFVEGSWQKEENLLAAVVFVFDSVHRGRSANS

SEQ ID NO: 75376 - protein, 122 aa, Zea mays
  Coding DNA Sequence Number=SeqID_32001
MVWHHGPNFDWQHEPFDAAIMRASGGENAHEQYTLFDIMIDSTEPKEQELEVARLRGELRQRDEHHKVQQDYMFSFIQQQHEIIQELSQQHGLDVVLPEFRPPLPPMLPQLSPFLSTISQVH

SEQ ID NO: 75377 - protein, 61 aa, Zea mays
  Coding DNA Sequence Number=SeqID_32002
VVPFIHKSCYPSAKGSLPRDRDFPYTSTEEARQGFLPDRHRSKINQGPPYTDHSPTALAPF

SEQ ID NO: 75378 - protein, 91 aa, Zea mays
  Coding DNA Sequence Number=SeqID_32003
MEWVFLRRKNAWRIICGIFGQYFWKESKGISGKYLGSISGKNLRGITREIFVDSSRRWNFNKSRPLRSIWLLIANADSGYSKIIFRLLAFA

SEQ ID NO: 75379 - protein, 70 aa, Zea mays
  Coding DNA Sequence Number=SeqID_32004
MGVEGAGGGVIGERGCWGVWSGSDGAGDTRQQVRQGEGEDGVAGDDGGGGALAKVKKNFTTQCMQRTGHN

SEQ ID NO: 75380 - protein, 144 aa, Zea mays
  Coding DNA Sequence Number=SeqID_32005
MGKNNKRKREPTPPSEDFGDSEYSEEEFSSESEGSPAPVSPPVSSDNSDDSQEIAAEVWTYIRAIERSGLEGSDESEYSSDEEDSPEEDGEGDDDDDDDDGGDVSDDGNGGSRSGNDGNRGDDGGSSRGSNGGGSSKGSNRASG

SEQ ID NO: 75381 - protein, 158 aa, Zea mays
  Coding DNA Sequence Number=SeqID_32006
MGNVRLLVRGEFCPFTSLWGKKLPHPHPLMEEFSTVNQESGSIAISSCGSLGYGVMVVLVVGVILIIPTQITNAKSVASLVTLLLGVGSGSTKTSMALRKITSAVVASYDIDTIWYANIVATYHITEDPKELTVRKDYNGHDQFTLSIFFARIIKHDE

SEQ ID NO: 75382 - protein, 117 aa, Zea mays
  Coding DNA Sequence Number=SeqID_32007
MKALDLPFYRCKERVQVYNEGCSLCANVSGREVPEPCVHANVAVGEVLEAYVHDNVAVGEVPEPCRSTAGGAAGILLTSPCFRRGLRITVVMDARGEPSLPVTGTSQMGRRSCSLVA

SEQ ID NO: 75383 - protein, 226 aa, Zea mays
  Coding DNA Sequence Number=SeqID_32008
  Homolog annotation: Hit_ID=Q6QP51; Match level="QueryCoverage=63%, HitCoverage=55%, E-value=1e-24, Identity=48%"; Hit description =Putative growth-regulating factor 1
MVEEGHGSCGGTTVAETKAEGERKWQGKEPPPALFWGKRHLWQAKRASFHLCHDDRVRKGTGKRDISKRILLSEGNRPPSPPTDQGFEGWPLGRVSTAAPEHLGSEPITDQGGSKAGPSEGFDNRPRARRVRDDSRYVCYIAEARATLPRYPRTFPRLAGAIFVTESHQREISSPRTLSNGSGSGKSPAGKQRCSPRSDCCASYPGKANNSKFSLGRNRKLRLARP

SEQ ID NO: 75384 - protein, 90 aa, Zea mays
  Coding DNA Sequence Number=SeqID_32009
  Subcellular localization annotation: CTP_CleavageSite=51; ConfidenceScore=5.15e-01
MSKNTRDTRFIPRFGHTTKRSEVRGVRDQLNCPSGPVQLVLTSEFRRENPSSTARRQVQLLKKLNSAEVKFSWKAQLQLKKFSCFSARTL

SEQ ID NO: 75385 - protein, 450 aa, Zea mays
  Coding DNA Sequence Number=SeqID_32010
  Gene Ontology: Mol. function=cysteine-type peptidase activity; Cellular component=nucleus; Biological process=ubiquitin-dependent protein catabolic process
  Homolog annotation: Hit_ID=Q0JCS2; Match level="QueryCoverage=87%, HitCoverage=99%, E-value=1e-164, Identity=72%"; Hit description =Ubiquitin carboxyl-terminal hydrolase
  Pfam annotation: Domain name=UCH; Domain location=64-433; Score =271.4; E_value=1.9e-78; Accession=PF00443.20; Description=Ubiquitin carboxyl-terminal hydrolase
  Subcellular localization annotation: CTP_CleavageSite=31; ConfidenceScore=5.29e-01
MAKLARSPTTSPPAAAADKHRSAAGSGLRSLASAASGWWDRWTVIGSGLSKLERAFGDQFPEGERYFGLENFGNTCYCNSVLQVRNRLGGLFLAFDEVGVPFCLSKVWCSVACRGPALYYCAPFREQLLEYYRRNRNLEDAEENLLTCLADLFSQISASKKKTGVIAPKRFIQMVRKLNEYFRGYMHQDAHEFLNFLLNEIVDILEKESSSAKDSPGTTSSENVSNGAAVDGVRKEPLVTWVHKNFQGILTNETRCLMCETITAKDETFFDLSVDIEQNSSLTSCLKNFFSTETLNADDKFFCDKCCSLQEAEKRMKIKKAPQILVIHLKRFKFIEQLNRHKKLSYRVVYPLELKLSSNSADADCEYSLFAVVVHLGSGPNQGHYVAMIKSHDHWLSFDDDNVEMIPESTLQTFYGSYHEYSGNTDHGYILFYGRIGGSGNEKTDSSDGV

SEQ ID NO: 75386 - protein, 272 aa, Zea mays
  Coding DNA Sequence Number=SeqID_32011
MHANKAQLPYSDRERAPKLLHALDRRVWEVKVSVIIESPNYETLTVDELFSKLKSIEIDHQTRAKIENPRSRSRALGMRSLHLWSPAAPKKGKSEFGPRDHHSGRHKGKYSSSKYKSKSKGGFNKEALKKNDLDHDSDDVVSSSSDEETERWVEDKLNGLFFIADTAGGFCTMALGEDTVGTSDDKDIGDDTTSKVLPSTDDLAVEIEELNAALASQDKLLRQAARERREIRSKYKSTLRELESARASVEVSDETECDECALHMSNITTLQT

SEQ ID NO: 75387 - protein, 149 aa, Zea mays
  Coding DNA Sequence Number=SeqID_32012
MPKKWCGAQEWWSMVEVKVMRARADGLGAVKGECWVLTDKSEQPGDQPRWLTPGTRTCARTWWSGPCCRHGRGLAGHSSHRGGRARGAVLTTIWWFGPQNHPALQMPGFAEFGPQNSAVAVLEGTGGGMRRDYGGCVKAKHLRVKDVAI

SEQ ID NO: 75388 - protein, 480 aa, Zea mays
  Coding DNA Sequence Number=SeqID_32013
MNRHRHSRCHYKRNSGSVPAGGADGLDSGEASPSCHHVSTDGGVRLSTNAAPANAGRSKAHQQDASSAELEDGFHHQKLEEEVASRPTREELVVTVLGDHRRGDAAGLPDVFLEAERWLKDQRVKGQTAMQAACDRAKWAHPFDSNATNMEAQAHTTCNQRAGCYVRATAPPLAPLPRLLDCGTSTATRGNPAYDPTVPARRIGHWSVSCGRRCDGQYDQKWVGSNGGGKRAEAAVTLTGGTFGRRSGRRFAFAIMTASKKGPRKGDTPKGILLREGNGPRAPLLIRGSKAGHSEGFNSCLKALGLRAHYWSEVRRPAPQKGSTAASGHSGSAPTTDQGGNDLVTESHQREALSPRTPSKGDRVRQITRRGSGAALANPTPAKPLTASTYQPENLVTPVSTKLQRPDGVRLSQGSVHSRDTISPRPSPASGKGSRPRRIHVSPEGPLKQRTHLRLARGPVFAKKQPWPDRHADRPYRRSI

SEQ ID NO: 75389 - protein, 268 aa, Zea mays
  Coding DNA Sequence Number=SeqID_32014
MTSPTPISGGDTHFSSDYLSHEGFPSILWEMLSSAGYPTPPLYTMQLADDTTEAAAMKTLTSFYGYHPLEMTLQSDAMAHLTNLAQTTKLTLDSREDFVVDLSLELVEKYLQLHDVQEELEEANDHLEMHQQDMEANEAESQPQRPLTATTYQEFLSTQPPLFTKAEDPLDADVWLRGLNTKLCERLNIVWANNFNELVNLAISQEDCIIAHRAEKKRKAPISGPSAPPRDSGLSPTVRAEDFSSRQEDGLSGHLSSRKRPTVFQLPP

SEQ ID NO: 75390 - protein, 87 aa, Zea mays
  Coding DNA Sequence Number=SeqID_32015
MNKNTRDTRFILKFGHTTKEGVIDQINCPEKPVQLVLTREFRRVNPSSTARRQVQLLKKLNSAEEAQLSWSLVHLKSSTAAEEAQLS

SEQ ID NO: 75391 - protein, 78 aa, Zea mays
  Coding DNA Sequence Number=SeqID_32016
  Homolog annotation: Hit_ID=A5C0V4; Match level="QueryCoverage=75%, HitCoverage=8%, E-value=5e-07, Identity=45%"; Hit description =Putative uncharacterized protein
MSGGAPDIVQWHTGQSEWTLEEFEELIHKAFKDVVSVDLAMASNLDSSNKKNINRGFGFVRFSSHAMFDIFVLLWNVV

SEQ ID NO: 75392 - protein, 370 aa, Zea mays
  Coding DNA Sequence Number=SeqID_32017
  Homolog annotation: Hit_ID=Q6BTJ4; Match level="QueryCoverage=41%, HitCoverage=22%, E-value=5e-07, Identity=31%"; Hit description =Similar to CA1621|CaIFF6 Candida albicans CaIFF6 unknown function
  Subcellular localization annotation: CTP_CleavageSite=22; ConfidenceScore=5.08e-01
MRRAKNFGSGSQPFFGSCSCARAGLTRGVWKGLSEEPVLELSRSPPKPPVNSCKREQQRMCLSTYRGDDDVAHGMRRLHGDQSAPDSAARAAPTAAPLDRVRLTAAKSGLERHRKLHLARPRARTRAQPRKTTDSASPDPGLGLGLSPGRRRTPPRPTQGSDSGLSPGRRRTPPRPTPGLGLGLSPGRRRTPPRPTQGSDSGSAPKDDELCLARPQGSDAGSAPEDDELRLARPQGSDSGSAPEDDELRLARPQGSDSGSAPEDDKLCLARPQGLNSGSAPEDDELRLARPQGSNSGSALEDDELRLARPQGSDSALASADGLRLARHRGSDSTSASEDRLDLDLGGASASPNPGLGPTTSQEGPSFPYP

SEQ ID NO: 75393 - protein, 136 aa, Zea mays
  Coding DNA Sequence Number=SeqID_32018
MSPGRWVPTVGASDNWATGQSGGALDSPVVHWTGLSEFRWTRTTVGEPNDLGGSVTPVPNPTAWIEIPKGIPPSNLVHPHRIGRHRATPSHDADTVASPPYAVETMPEFTERHPGVVIVVGNQAKLRPRLGGLQLL

SEQ ID NO: 75394 - protein, 102 aa, Zea mays
  Coding DNA Sequence Number=SeqID_32019
MSTREPPYTIRMVRNKDPHAGHRRRLQSPPLTLFSYGETVCALGDSGSGLDGQGSMGREIYTLMWCPGSWIGSQQTLDDRGARRFEDDLTRRPDQAVIRGRA

SEQ ID NO: 75395 - protein, 109 aa, Zea mays
  Coding DNA Sequence Number=SeqID_32020
  Gene Ontology: Mol. function=nucleic acid binding
  Homolog annotation: Hit_ID=A3CIR4; Match level="QueryCoverage=68%, HitCoverage=14%, E-value=8e-10, Identity=51%"; Hit description =Putative uncharacterized protein
  Pfam annotation: Domain name=RRM_1; Domain location=21-69; Score =28.7; E_value=2.2e-05; Accession=PF00076.13; Description=RNA recognition motif. (a.k.a. RRM, RBD,
MASPRGGFDEQDRRTEKGTEVFVGGLPWSATESMLRQGYGFVRFAKRDYANTAKRQKNGIELQGKRLVFELSMDQDTVFFGNLCKEKSAIPVHCLRQPNVAVPELLSAS

SEQ ID NO: 75396 - protein, 229 aa, Zea mays
  Coding DNA Sequence Number=SeqID_32021
MARVARTLLATDRLKGVVYSRVARTCSCSGGSVGIVDIKHILESLFFSRWFIRCPWGNRTDPVKLSGAHAWPSEFFETRTGACGPDTLGGSATRSGVRRLLGLSPSPSPGVGAERSSLSSGADPESEPWGRAERSSSSSGAEPESEPWGRAERSSSSSGADPESEPWGQAERSFLWPLRPDLAAVSLTLSSGTAVGAAQAALSSCQAGQWSGEVTTVTSALSTEGRASG

SEQ ID NO: 75397 - protein, 355 aa, Zea mays
  Coding DNA Sequence Number=SeqID_32022
MGNARNPSALPLEGHNFVEVDTFQPSFGFKDFHQAARPHPLAGGHPRRFKDVHHPGWAGGWAEPELYLLRGFVGQPLPQHSRERALSGPAGGSDFDNVGLVGGGRRQLQRVGLAGSAPGAPSRRKGGCRAARTGGPPKTSRAARAAFVFWGCPAFAPVRHLCAEIDAPLVWEDPSGNLPVGRRLLSSVPRWRRLEKSSSLTGSLPPSALWASGSLYLSSPLERRCGRGHCCSGVRPEAIAVAVRPPGAEVVVAAAGAGDGGRPGALSPRGPSNVGGLDPRSLFDEPKPEVAVSAWTEAELARKEDLVGRSLAGSSAGRTDAGVGSPMRRAGLMSSGDTWLRLRGGRPSRLLEPDS

SEQ ID NO: 75398 - protein, 424 aa, Zea mays
  Coding DNA Sequence Number=SeqID_32023
  Homolog annotation: Hit_ID=Q6J9V9; Match level="QueryCoverage=14%, HitCoverage=31%, E-value=2e-07, Identity=43%"; Hit description =Putative uncharacterized protein
MAERYQLPRSCVPPTARRKDCGRSPSGGSEGGKTRCIREREDMVAFQRDHPPFKGDSPHLRPQPSRAESSPTRSKVLPPTARGLGPTRHASWPRAEEAKPPCAVHATAQRLQAFLHFRPDQRVKGRTAMQSACNRAKWAHPFDSNTPSMEAQAHTSCNRHAGCYERATAPPLAPLPRLLDCGTSTTTRGNPAYDPTVPARRIGQGPVSRRRRRDGRCGQKWAGSNGGGRRAEAAVTSSAKLTSPHGTAREPSPTARPCSVPRTACARATAAPRTTRPVALTPRQDRRHLWQEKRATLRLRHNDRVKKGAPHRFDLVYFPFSSFSLLQQGPGKGDTPKRILLREGNGPRAPLLIRGSKAGPSEGFNSHLRALRLRAHYWSEVRRSAPRKGSTAASGHSGSAPTTDQGFVGWPSKGSQPPQTQSEG

SEQ ID NO: 75399 - protein, 129 aa, Zea mays
  Coding DNA Sequence Number=SeqID_32024
MAPLLSLSGQENALPCFPLPSTPKHPAVPCALLSHGNQQELHFLHGRRPTQRLCATPPPQTVSPLARCSPWCPLAVRQNAQQAARCSSPSATPSKPLLVVDVALCPFDKIPSHVDSHASSHDSFRLIDL

SEQ ID NO: 75400 - protein, 226 aa, Zea mays
  Coding DNA Sequence Number=SeqID_32025
MKSRAREDGSSTRKLDASRDYGEEPWRAGKTLKQQLRRDRQGRGWAEQKARSGVAAGESRQGQRRDSAHNRNKHQTRHERPSWAPGCASQQGGHGQKFELGKIQALQGMRTRECTRRAPACETWSRASNYWEKRLGAQRRSGEQSMARNTGRIGAAGRAEPGYELSERMAMETRPTSTMAGRERAAQGRKGKGEPGMELTPARKREMGWTFKEPGAAGRSGGERRP

SEQ ID NO: 75401 - protein, 100 aa, Zea mays
  Coding DNA Sequence Number=SeqID_32026
MVQRERRGGRGAWQEEEEGLHTGLGKKGAEGKGGAMGEAIAQLGKELGGHGASAERPLGGSAHLLAGVACLRSLVARKWKKGATARGFYALRKNGSAPRL

SEQ ID NO: 75402 - protein, 157 aa, Zea mays
  Coding DNA Sequence Number=SeqID_32027
MRRGSGAAAAGLLWHYVEHAEGTTQGRSTWLRELASRLLTGRALGKQTPWEVICCCGLVPEMEELANLGSGSGGTSLDLEQGARAWGSRGTLRVNERVERGPELVLTRGPGIGGGKARWRPVEDVGRRVERVDDALLREGTDAMDAGLERRARRRSS

SEQ ID NO: 75403 - protein, 115 aa, Zea mays
  Coding DNA Sequence Number=SeqID_32028
LEENIMKVGSNAGFSWKAMPLVDSKVMELPLDAQSSGRRLDVDERVEQCRAVVGVLHVLARFVLVLQMQHLRGMKAKSHHQPNQGGTCKNYATNKAEYTNTQLDFFGVRSLLLYL

SEQ ID NO: 75404 - protein, 154 aa, Zea mays
  Coding DNA Sequence Number=SeqID_32029
  Subcellular localization annotation: CTP_CleavageSite=73; ConfidenceScore=5.56e-01
MANKKSTTVRQRPGSCRRSAQQRAGVPGHTCRNNLDRTRPSETTALGNSRRLSKNPSWAPRKKSGRGNRETARANREQRARRERQGAQRLARKDPEPEQKSERHGSSRPPARRTGSRMQREEMTREKEISAGSRKRQRYRKNLEQGRQRDKAGR

SEQ ID NO: 75405 - protein, 197 aa, Zea mays
  Coding DNA Sequence Number=SeqID_32030
  Gene Ontology: Mol. function=protein binding; Cellular component =cytoplasm; Biological process=multicellular organismal development
  Homolog annotation: Hit_ID=Q2QXL9; Match level="QueryCoverage=100%, HitCoverage=100%, E-value=7e-79, Identity=73%"; Hit description =CENTRORADIALIS, putative, expressed
  Pfam annotation: Domain name=PBP; Domain location=19-189; Score =186.5; E_value=6.8e-53; Accession=PF01161.11; Description =Phosphatidylethanolamine-binding protein
MSRVLEPLIVGKVIGEVLDHFNPTVKMVVTYNSNKQVFNGHEFFPSAVAAKPRVEVQGGDLRSFFTLVMTDPDVPGPSDPYLREHLHWHLYVYIANQGRVFLFAGPHTGTGRIVTDIPGTTDASFGKEVVSYEIPKPNIGIHRFIFVLFRQKSRQAVNPPSSKDRFSTRQFAEENDLGLPVAAVYFNAQRETAARRR

SEQ ID NO: 75406 - protein, 70 aa, Zea mays
  Coding DNA Sequence Number=SeqID_32031
MGRARASARAARWVGRGGRAAPKGADAGPRHGQGKPRGESARHGHGKGAETGLLGPCFVAEGPAGRNSFG

SEQ ID NO: 75407 - protein, 52 aa, Zea mays
  Coding DNA Sequence Number=SeqID_32032
MGKPVPSLLMLLLSRVTALVPTITRMGDHVSGRVRGKVYCQVQSGLRNHYAK

SEQ ID NO: 75408 - protein, 49 aa, Zea mays
  Coding DNA Sequence Number=SeqID_32033
MAEALAAMAGGIKLAGAKERWLAGEEIWSQEIWSVSLPKPEANSRFCRV

SEQ ID NO: 75409 - protein, 258 aa, Zea mays
  Coding DNA Sequence Number=SeqID_32034
MTSHVPTDGGNPHSHTDGLAREGFPRILWEVLQGAGYATPPQYTVQLFEEHPVPRCRVRKTLEPHPLQPGWRSLDSESFGFRADDTIESTTLHVLTTFCGFHPLEMSTHPIGLFPTEKEDDPIWKDRVEHAKDVWALYPGHTAHLTVRCMSAMYRLQALRGETMSQLMGLVESTKITLDNREDLVVDLSTELVEKDLQELMAQQNEILRHLAQRQPPPQHYGGGDHHQRAPAAATYQKFLSTQLSLFTRAEDPFDADV

SEQ ID NO: 75410 - protein, 185 aa, Zea mays
  Coding DNA Sequence Number=SeqID_32035
MQYNGSSSLISCEKQTIQIEFLSLQVAALVPTITGMGDHVSGRVRRAICGQILDGRFWCWILGYLLSNSLLRHEDAAEVVGGSCSGQTTTRVTRSTCSAGFTNSGERDYTIPVGLVLGSSSSKLHGLPGKLSEGLDRAEVGGKEVGHGGCPRASLAERGEVAGAAGELERVRHGTEEATVKMAVH

SEQ ID NO: 75411 - protein, 68 aa, Zea mays
  Coding DNA Sequence Number=SeqID_32036
MAEKDLQVEQMSNEIQELEELVGTRENIVEVLEDQLINTQQQLAEANQHLDMHHQDDRAGVPDLSDSD

SEQ ID NO: 75412 - protein, 443 aa, Zea mays
  Coding DNA Sequence Number=SeqID_32037
  Homolog annotation: Hit_ID=Q6QP51; Match level="QueryCoverage=47%, HitCoverage=90%, E-value=7e-11, Identity=30%"; Hit description =Putative growth-regulating factor 1
MRKKHGSVPKLHTCSGPDSHNEQKTLAFEMPLPTELRFPPPQTRTTPLRGGRPAEQRKADEWCAVTCSSSGDDDAFCSEGPSSGNADLRLDAAARRPPPMPKLVRQGRAEGRRVGGQPVAGPGYLAGSRTSSSCRGGCRHRERLRSHSRLKARHAADASATDDGRLSLRSLSEGAGRRPRGGRPQLGALPSPALVMKILEAEGGEEAAARLAFPHHQAGGRHLRDRERGMPRKGSFSAKEPGSEPPTTDQGFEGWPSEGFNSRLRSRGPDTHYWSGVRRPAPRRVPWPPQATRAPRPLLIRGSKAGPRRVHSRLRHRARDDQGYVRYITEARAALPSSPETPCSVPIEGNMAHSPLLLAERRRRGAQPPDFTKTGSAVESLRSGTLLLCRTDVQNIGSPKQSRSHRASLHPLVKEPDMRPTCLWKNATAYASRQMESEPDGQG

SEQ ID NO: 75413 - protein, 183 aa, Zea mays
  Coding DNA Sequence Number=SeqID_32038
  Subcellular localization annotation: CTP_CleavageSite=47; ConfidenceScore=5.21e-01
MALHKLYDDGGPPALLRKQNDVSRDSTAPTAVPPPGSAAPPTATTSRQQGAPDLSGCHIGMAFSEEVGRAGPRTGQALSWGRSLPSPAWTLVTPLLQAHPTWARDEHEGRGTSTSLTLDSGHLASPPFALAHALDPSGLGHAAHSLVGLGTPLSRNADKHRLYLWASWVGTALTGRDKIRFDL

SEQ ID NO: 75414 - protein, 363 aa, Zea mays
  Coding DNA Sequence Number=SeqID_32039
  Gene Ontology: Mol. function=protein serine/threonine kinase activity; Cellular component=cytoplasm; Biological process=protein amino acid phosphorylation
  Homolog annotation: Hit_ID=A2XLC5; Match level="QueryCoverage=89%, HitCoverage=98%, E-value=1e-117, Identity=68%"; Hit description =Putative uncharacterized protein
  Pfam annotation: Domain name=Pkinase; Domain location=95-344; Score =155.9; E_value=1.1e-43; Accession=PF00069.16; Description=Protein kinase domain
  Pfam annotation: Domain name=Pkinase_Tyr; Domain location=95-344; Score=-42.9; E_value=8.9e-10; Accession=PF07714.8; Description =Protein tyrosine kinase
  Pfam module annotation: Pfam domain module=Pkinase::Pkinase_Tyr; Domain location=95-344::95-344
  Subcellular localization annotation: CTP_CleavageSite=74; ConfidenceScore=5.38e-01
MALAGDERLPPFHLSLNVPSRPAVQESSFRHANPPSSTKAIARNKRLPPFHLSLNVPSRPAAQEPSSRHANPPVAAPEPASTPLARSTQFRLADFDRLAVLGRGNGGTVYKVRHRETCALYALKVLHEDAGAEADILGRLASPFVVRCHAVLPASCSAGDVALLLELVDGGSLDAVSRRRGAFAEAALAEVAAQALSGLAYLHARRVVHLDVKPSNLLAHRGRRDQRVLSRSGDHCTSYVGTAAYMSPERFDPEAHGGHYDPCAADVWSLGVTVLELLMGRYPLLPAGQQPNWAALMCAICFGEPPALPDGAASPELRSFISACLHKDYCRRASVAELLAHPFIVGRDVLASRDALQQLVAEA

SEQ ID NO: 75415 - protein, 142 aa, Zea mays
  Coding DNA Sequence Number=SeqID_32040
MSDFEKDVDDVLAPVKKSLDRRSVVTLREWCKGPKSITNGCEAEVEGSQPEGRAQQAAASGETARDGSDDNCSVEGRVRSKGNMGGSEKGPTTGDEGGPIPERLAVVGDEAARDGEGTRDRGGCGAHAASALAPVVLATRCA

SEQ ID NO: 75416 - protein, 208 aa, Zea mays
  Coding DNA Sequence Number=SeqID_32041
MARGEGDGDTGGGEEWGMIQIILSIGFDGVLRLVAICLVDLVAVMAPGEETGERDRTTPSTYSPTGNSKYDSPSLSMRFLQRYPTSMMHMLFTSWLKSTLLSRPFGGRGKSHSDFLYLLMDFTKEANNDNAFVNLTSPEVACWLWGPMGPTTHTDMLSRAAPRPARPSTSTYYQDPWRQDLTRRQWPELHGVQISSHRPPSSSTLDSH

SEQ ID NO: 75417 - protein, 165 aa, Zea mays
  Coding DNA Sequence Number=SeqID_32042
  Subcellular localization annotation: CTP_CleavageSite=48; ConfidenceScore=5.01e-01
MKMNISTGALVASPSSLLSYGQFNGGDQEHHHRRRRQKRRRFGVGEGAAALGQGKTPTPGWMKVVAEGAAAFTGIGFLLPHRLTPKAVDAARAAAVAVAEARCAALVAEKEARAAVQSASIAADKVQLVVEAVKYRSFVEDNSMVESLVTDFVSLFLCRMWNDRV

SEQ ID NO: 75418 - protein, 61 aa, Zea mays
  Coding DNA Sequence Number=SeqID_32043
MEKAKRYKGVEEAEMYKAVAVPRPRARGGSAEAVSSKATFGHHRYISMTIMVYLHMRQHHY

SEQ ID NO: 75419 - protein, 132 aa, Zea mays
  Coding DNA Sequence Number=SeqID_32044
MEMGAELEEQGARQGEATAATIGNKPELRALENHQTEDGNLETLDLCTSFSRLQASTGEWSVAEPAQPRDLGSQLRRGVRVQSARILPASLTRALLQEEGVRGSFRLRAGGRETVYSGRLRSATFTVSGHAL

SEQ ID NO: 75420 - protein, 601 aa, Zea mays
  Coding DNA Sequence Number=SeqID_32045
  Gene Ontology: Mol. function=protein binding; Cellular component =endoplasmic reticulum; Biological process=embryonic development ending in birth or egg hatching
  Homolog annotation: Hit_ID=A7P3Y3; Match level="QueryCoverage=99%, HitCoverage=99%, E-value=1e-153, Identity=49%"; Hit description =Chromosome chr1 scaffold_5, whole genome shotgun sequence
  Pfam annotation: Domain name=DUF747; Domain location=268-593; Score =474.3; E_value=1.6e-139; Accession=PF05346.2; Description=Eukaryotic membrane protein (cytomegalovirus gH-receptor) family
MSLRSGGRQLSFELLAGDLTADDPDDISPRSLPDTSSDGQRRRRRRSKRKRGFRSPPIQEAVSEGEQQPRVEGGGNSAAAFRVLDLKSTAETVCESSDAERSAASCVTYVGVELRQRSVSGGGRVVAASADDGTSSCGSSTRESAAAAAAVADVAAMAWRPEAKWRHEEEAGRRSRRWTGRKFERLDKSPFRYFLGELYGGNSLRSTIAVGNEKKRQRVYNTMFHVPWRCERLIVAGFFVCLDSFLSLLTIMPARIVVTIWRVMKTRKFRRPNAADLSDYGCFVVLALGVASLQMIDISLIYHVIRGQGTIKLYVVYNVLEIFDKLCQSFGEDVLQVLFNSAEGLSACSTDNVTFELMRFILDEAIAVVAFDILFCRLHQLIFLLVTVAQAITLSTCIIAHNNALLALLVSNNFAEIKSNVFKRVSKENLHNLVYYDKYIIERFHIMAFLLFVLAQNILEAEGPWFDSFLINASLVFLCEVLIDAIKHSFLAKFNEIKPVAYSEFLEDLCKQILNDKPDDRQKDLTFIPLAPACVVIRVLTPVYATLLPAGPFIWRIFWILLWSVLTYFMLAIFKIIVGLILRCLANWYVNLRLTRKQHVD

SEQ ID NO: 75421 - protein, 90 aa, Zea mays
  Coding DNA Sequence Number=SeqID_32046
MGEIKSSLVGFGGLNENQIKGLTVKKNIAYVKLGVHILKTTGQAKYEGKKSFEVSSAWEKDKDAEEPKATGEKEDLQSQGLIELRKDMVH

SEQ ID NO: 75422 - protein, 57 aa, Zea mays; identical to SEQ ID NO: 44951
  Coding DNA Sequence Number=SeqID_32047

SEQ ID NO: 75423 - protein, 307 aa, Zea mays
  Coding DNA Sequence Number=SeqID_32048
MARLRHTARKSVIPFLPSRLAERPLRRPVAGQSSHLERLHHRLREEQERRRQEQRSSSLSLHQEIESVRSCSPVLSLKPPPAPPLGAPASGVAAGGDPDDGGGDDSSSHDTDFSANPEPEGWVARPITRDAARGHSRGVYPDRWEATCLVRCPEDSLQGAEACSEHYSISERDSAEAAMQDAARRALSHYCSVFGGAADGLDLKYYPRRSSGSTGGVIVSPVGEGNPRLSSTVNLAAVLNTELDHALDELSRARAEIALLRAERAERRFLDGGSPAPVGTQHPYRSPQRGHQSYGNPACKTKINLEP

SEQ ID NO: 75424 - protein, 106 aa, Zea mays
  Coding DNA Sequence Number=SeqID_32049
MAAGGETIHVDQLGTSTGMDIIAVPNGGHQQKRMESSDMDVVTGGANIVAVTLAAALRAPRNVDDNTRSTEMVGADQHIPMRHIDPYDQDTPHILQIHVHNQTILI

SEQ ID NO: 75425 - protein, 103 aa, Zea mays
  Coding DNA Sequence Number=SeqID_32050
  Gene Ontology: Mol. function=glutamate-5-semialdehyde dehydrogenase activity; Cellular component=cytoplasm; Biological process=amino acid biosynthetic process
  Homolog annotation: Hit_ID=Q53UC8; Match level="QueryCoverage=43%, HitCoverage=6%, E-value=1e-16, Identity=93%"; Hit description=Delta1- pyrroline-5-carboxylate synthetase
MAFRFAEIEYVTKILQHPPRLKYRKLVNSSFADMQKPQTELDGKACAAVGQSGLMALYDMLFTQGTLYDAATTAYGQVCALFLSWAIRKAVGAGMYTLPTREQ

SEQ ID NO: 75426 - protein, 493 aa, Zea mays
  Coding DNA Sequence Number=SeqID_32051
  Gene Ontology: Mol. function=unfolded protein binding; Cellular component=mitochondrion; Biological process=protein folding
  Homolog annotation: Hit_ID=A2ZL18; Match level="QueryCoverage=74%, HitCoverage=34%, E-value=0.0, Identity=87%"; Hit description =Putative uncharacterized protein
  Pfam annotation: Domain name=HSP90; Domain location=13-488; Score =372.0; E_value=9.6e-109; Accession=PF00183.9; Description=Hsp90 protein
  Subcellular localization annotation: CTP_CleavageSite=54; ConfidenceScore=5.11e-01
MAARRKIQGGRRPIGPAAPSMGADPQASAASSRPADSRRGGRSAWRAPCWRGLVAEDGAEPPPAAVLVTRSKGAGVAAEAMGEVEFRSILFVPATRKEDVTADSRKTKNIRLYVKRVFISDDFDGELFPRYLSFVKGVVDSNDLPLNVSREILQESRIVRIMRKRLVRKAFDMILGISCSENRDDYERFWENFGKFLKLGAMEDKENHKRIAPLLRFFSSQSNNELISLDEYVENMKPEQKDIYFIAADSMSSAINAPFLERLTEKDYEVLLLVDPMDELAIQNLSSYKDKKFVDISKEDLDLGDNNEEREKEIKQEFSQACDWIKNRLGDKVARVDISNRLRSSPCVLVAAKFGWSANMERLMRAQSMGDTASLDFMRSRKVFEINPEHEIIKALNVACRNNPDDPEALKALDVLFETAMISSGFSPDNPAELSGKIYEMMTSAIAGKWSSQPQAQAQPADPIPQHDAPVRSDEPLEAQVVEAEPVEAGQQK

SEQ ID NO: 75427 - protein, 297 aa, Zea mays
  Coding DNA Sequence Number=SeqID_32052
  Pfam annotation: Domain name=DUF1005; Domain location=192-297; Score=- 93.9; E_value=0.06; Accession=PF06219.3; Description=Protein of unknown function (DUF1005)
  Subcellular localization annotation: CTP_CleavageSite=20; ConfidenceScore=5.39e-01
MGSDTLAGSTTIVSGGSLTRSSKGGGRRTHRGPLCWGSRGLATRGRVAAVGHTVECHGKGMGLSLQGELLKENLIAGVVEWYGSLDESLQVVIAATETTQKVQDEDAVEDKLIKITEGVRHTIHSTIVLADGELNREGADESQEDNIVHLVPGWRQWGNGVVENVVDERVALEREEHLITPVGVVRDIESNMTTIFVPPPPLSACAPASAKPMRHPHRLRSGDAQLGYRFELPDPPGGAAASWATRYGPGRLRDVDHRAGGGRGRPSVEIGVAHVGCAEDVVAFVALADDCPCPDLR

SEQ ID NO: 75428 - protein, 160 aa, Zea mays
  Coding DNA Sequence Number=SeqID_32053
  Subcellular localization annotation: CTP_CleavageSite=43; ConfidenceScore=5.09e-01
MGEGLMAAASALRSSLLLFGPSEQKSSSLLLERVAVSHPSAFCCSAGPPIVWGCLYLRRWNWSSVCNGTLSASACSLWLSGPEHGSVIDIVEKARKIVSAEEFSSVKTCSVCGITYPIVSYLSQKVMSEVSVSRRRRSPSARSALAAYVYYVVFRIPLSK

SEQ ID NO: 75429 - protein, 359 aa, Zea mays
  Coding DNA Sequence Number=SeqID_32054
  Homolog annotation: Hit_ID=Q6J9V9; Match level="QueryCoverage=20%, HitCoverage=27%, E-value=1e-07, Identity=41%"; Hit description =Putative uncharacterized protein
  Subcellular localization annotation: CTP_CleavageSite=86; ConfidenceScore=5.22e-01
MHGGSAKTWLPFKGVTLLLKATLPTCVLSHRGLSLLQHAPRSSPYDTGAGSHASCKLAQGRRSQTATRGARNCPAVTSIPPLLPKPAGERADSHAGGMQPRQAGGSSGHVVSQAHVPSRDSKGTLSHDVKTDRRHLWRAKQATLHLRHNDRVKKGTGKGDTPKGILLREGSGPRAPILIRGSKAGPSKGFNSHLGALGLRAHYWSEAGPQRVHIRLRRRARDDPGYVRYITKARATLPRGSGAALANPAPAKPLTASTYQPENLGPDPKSGLERHRKLRLARPQGSDSGSAPEDDELRLTRPQGLDSGSAPEDDELCLARPQGSDSGSAPEDDELRLARPQGSDSSSAPEDDELRLARP

SEQ ID NO: 75430 - protein, 190 aa, Zea mays
  Coding DNA Sequence Number=SeqID_32055
  Gene Ontology: Mol. function=carboxyl- or carbamoyltransferase activity; Cellular component=ornithine carbamoyltransferase complex; Biological process=amino acid metabolic process
  Homolog annotation: Hit_ID=Q8SA97; Match level="QueryCoverage=79%, HitCoverage=23%, E-value=4e-16, Identity=41%"; Hit description =Ornithine carbamoyltransferase
MAPPVDVTGLRPRLGDVEAPPKPRSSLSSMVEAESEPLGRARRRSSAEARAESEPWGRAERSSSSSGAEPESEPWVGRSRVRRLPGLSPSPSPGSEEAEFAVFRAALSFYQTGQWSGEVTAVTSALPEGARQDKDLYADGGYQLRIRSLEGENPVFCVEKKASRSTLVDVRSYAQIGIAIVLTNTVWVCL

SEQ ID NO: 75431 - protein, 315 aa, Zea mays
  Coding DNA Sequence Number=SeqID_32056
MAALSSLTEAGGRQQGLDRSNSCPSARHRRSSDGHDITPAGCQDLSGCHIGMYLGRQLSPARHVALCYTPVVHLDPLLTPIKGRTRALLERVGRAGTRTGQALSWGRSLPSPAWTLVTPYCKHTRPGRGTNTKAAGFPPLSRRTPAALLSPPFVLAHALDPSGLGHAALTRRPEGPPVSKRRQNRTWSVAVSPGEPAERGDAGAAAGNRRRVACCAFRRAHSKHRRGTAQQHASREDTESRAMAGMLQGVCCSTPWGVGGAAGALSAGHGEKGRSCCCNFWALCRGGRKEQQGAASMLEWSSAMGGKMAGRALEN

SEQ ID NO: 75432 - protein, 132 aa, Zea mays
  Coding DNA Sequence Number=SeqID_32057
  Subcellular localization annotation: CTP_CleavageSite=22; ConfidenceScore=5.12e-01
MQVACNRAKWTRFSDPRHASVEAQAHASRNRRAGCCMQATAPPLAPPPRLLDCGTSGREQRSRRQPSSRPIRGQQENLLSRREDDAPVIRSSSGSRTRNGRPANHSPRRINSAAGQAALLAGEAGDASPSPK

SEQ ID NO: 75433 - protein, 259 aa, Zea mays
  Coding DNA Sequence Number=SeqID_32058
  Homolog annotation: Hit_ID=Q8H8K3; Match level="QueryCoverage=41%, HitCoverage=8%, E-value=4e-08, Identity=36%"; Hit description =Putative retroelement
  Subcellular localization annotation: CTP_CleavageSite=59; ConfidenceScore=5.36e-01
MATVVLSPLRKQGDISKIPAAPTAVLLQGSSAPPTATIPRTQGSSTSLTATLAYNELVRDMYSRLNLIINELNSIGINKLGDADIVRKIISLLPQQRYRSIITILHNMEDLSTMTPTIVIGKIAAFEMSRKMCQGEEPTSSRPYAFACDERKGKKKAPTLSSSSEEEEEEESDDGEDNQPSTSKQNIAASYRAGGLEHRRRRFQVLDKHYGSSFKETTRDFLFCLAALTNTMERHAGAHHGLRTSCSPLRQATGFYNQQ

SEQ ID NO: 75434 - protein, 131 aa, Zea mays
  Coding DNA Sequence Number=SeqID_32059
MAGMLQGVCYSTPWGVGGVAGALSAGHGEKGRSCCCNFWALCRGGRKGRRPCWNGARPWEGRWQGGRWRTRKGAMAAGGAYSKGARPCVQAGRGVEGEQQQGRELVHAMEERSSAPREEDTREGEEAAGGG

SEQ ID NO: 75435 - protein, 199 aa, Zea mays
  Coding DNA Sequence Number=SeqID_32060
  Subcellular localization annotation: CTP_CleavageSite=55; ConfidenceScore=5.35e-01
MAPRMPHDDGGSQPPLRKQGDVSKDSTAPTVVLPPGSSAPPTATTSHEQGAKTSPAATTACTQGTSSSPLDTLAHCYISHCTPGPSPCAYKRKVQGPLTKGWSRGEGRDDTRISISLSPTRTLVTPYCKRTRPGRGTNTKAAGFPFYACLPPAFPPFALRLAPTHLGWGTRRQITRRSRDPPGSKRRQIRKYNYPRLTH

SEQ ID NO: 75436 - protein, 137 aa, Zea mays
  Coding DNA Sequence Number=SeqID_32061
MTGKQRRLPRSDCCATRQSEARNSQVQPQAQQEAPPHPTLGLGLGRRSPPHPTPGLGLTLGLGRRTPPRPTPRLGLNLDLGRNRVLARPRPRPQEESPPRPTLGSDQPRHGGYIITLPLASSGYGGTRPASHPGSPQ

SEQ ID NO: 75437 - protein, 114 aa, Zea mays
  Coding DNA Sequence Number=SeqID_32062
MASTEEGTEEREGGMCAHWVLGSRHRGQVDEDEAGHGQDRGADFPPPCADWAGVGWACAATAQARRRLGKGAAGRGCSARGAASASGSWARMQARDGAQGGKKKRKARKREGNT

SEQ ID NO: 75438 - protein, 70 aa, Zea mays
  Coding DNA Sequence Number=SeqID_32063
MGERKGPSRGGALVMELLLGAIHGRREETGRRKNYASCCCREGEGDREREALDEREIRYGDIKLVRIRLN

SEQ ID NO: 75439 - protein, 379 aa, Zea mays
  Coding DNA Sequence Number=SeqID_32064
  Gene Ontology: Mol. function=protein dimerization activity; Cellular component=nucleus; Biological process=regulation of transcription, DNA-dependent
  Homolog annotation: Hit_ID=Q8LN44; Match level="QueryCoverage=84%, HitCoverage=78%, E-value=7e-96, Identity=63%"; Hit description =Putative transcription factor
  Pfam annotation: Domain name=bZIP_1; Domain location=230-293; Score =29.5; E_value=1.2e-05; Accession=PF00170.12; Description=bZIP transcription factor
  Pfam annotation: Domain name=bZIP_2; Domain location=230-284; Score =30.7; E_value=5.5e-06; Accession=PF07716.6; Description=Basic region leucine zipper
  Pfam module annotation: Pfam domain module=bZIP_1::bZIP_2; Domain location=230-293::230-284
MAPAQHQKQRPGLPPPAPAPAGAGSHSLHADMCVDDSSAPGRAQALGGLPPRKAHRRSRSDVVPYGYFQPLPPPSPSPKVEAGGWGLASGGGGGAGDDLLNAYMSMEGMDGLNHSDGDSRGSSGMRTNGADSSENESEDYGAGADSQFFLWGDGGKRRRNASGEPAAPPAAAAAAARHARSHSMDSLMGKLSFSANGEPGKFSLDFGGGEFTPAEMKRIMADEKLAEMALADPKRVKRVLANRQSAARSKERRMRYIAELEQKVQILQTEATTLSAQLTLLQRDSAGLATQNNELKFRLQAMEQQAQLRDALNEALTGEVQRLKLGDTASSGNNLPQQVQLRCQNQVAGLHKQQQQQGGEQIPFYQLEQNGAPRNDAPK

SEQ ID NO: 75440 - protein, 127 aa, Zea mays
  Coding DNA Sequence Number=SeqID_32065
MEDGDSAYGGGGTDVTRDGDAVTRSIAAGVLAFGLACITVYRCGRGSRAGKCVSGSVVAATVGAFHAFRLWILPPDTIGAYQKVNATDGVGTAVERIAHQVLAAENSLFPAAGSLAAENNKLFSAAT

SEQ ID NO: 75441 - protein, 85 aa, Zea mays
  Coding DNA Sequence Number=SeqID_32066
MEEGKKHGGGRTMLAATAVREKETGRGKRWTSERLGRAARWTPLACWLVARACPALEAKHHATAMATAARKIRYGDIKLVRIRLN

SEQ ID NO: 75442 - protein, 50 aa, Zea mays
  Coding DNA Sequence Number=SeqID_32067
MGPRRSARSAKVGVQRFIRFGFVSHPPWGGKEEGVEADLQEFQDFDEFED

SEQ ID NO: 75443 - protein, 160 aa, Zea mays
  Coding DNA Sequence Number=SeqID_32068
MAPWRRGWSEPELGRGGDSSEVEVESEPWGRARRSSSSSGAEAESEPWGRARRSSSSSGAEAEMGAEPWGQARRSFLCRLRLDLAAVDLTLASGTTVRAGQAALFSCQVGQWSSEVTAVTSALSTENRVRIRCQAILALNAPAIRSIGVAIWPRLLLCEH

SEQ ID NO: 75444 - protein, 111 aa, Zea mays
  Coding DNA Sequence Number=SeqID_32069
  Subcellular localization annotation: CTP_CleavageSite=78; ConfidenceScore=5.15e-01
MAVGSVLSYGAPDSPVRHRTLSGAPATSADRWGSTVEALACGASGLSGGAPDRRAFNALQSTVAREVAVAPLAHRIVRCAPDSPVNYSGAPSDFPEGEEFELKSSGAPDTV

SEQ ID NO: 75445 - protein, 252 aa, Zea mays
  Coding DNA Sequence Number=SeqID_32070
MQHLEPLWGTSSDKVSTGRPWWSTPLGLYAPAKGVNSTQDRCTYPLRPCRQYPSLGRLTWTKTNDLQRPQQVWQAVDERATLGGLESEDDAEPGHGFLAVLSSLWGRGYLTHKLGIRFPKDKGLRRPKQPDQPRRLTGPAGRGSGRGLTTLGAVSAVSATLPRPKGSALRLPGGRLGTSAATRRSRAPQAYSPLGRAVHHHQDFEARNIQAGQRSRRGLQQRLEHPTATSLLPLKCFKSFMYLVSFTYVDKA

SEQ ID NO: 75446 - protein, 128 aa, Zea mays
  Coding DNA Sequence Number=SeqID_32071
  Homolog annotation: Hit_ID=Q6J9V9; Match level="QueryCoverage=55%, HitCoverage=24%, E-value=2e-30, Identity=90%"; Hit description =Putative uncharacterized protein
MQEACNRAAIVHPFGFVASGGPAWRPGPTCHGPGKGIFRKGSFSAKETSSEPITDQGGSKAGPSEGFDSRPRARRVRDDPGYVRYMAEARATLLRYPRTFPRPAGTICNGIPPEGGAEPSDPIERVRV

SEQ ID NO: 75447 - protein, 87 aa, Zea mays
  Coding DNA Sequence Number=SeqID_32072
  Homolog annotation: Hit_ID=A2WXH3; Match level="QueryCoverage=87%, HitCoverage=12%, E-value=3e-20, Identity=64%"; Hit description =Putative uncharacterized protein
MAAADKRLASELAPRSYLNGKAESVMQKLVTCVQNTVELYHELHALDRLEHDYRLKQKEQDGLSLRGDSLDILKQETILDCGVLWKQ

SEQ ID NO: 75448 - protein, 192 aa, Zea mays
  Coding DNA Sequence Number=SeqID_32073
MGPGILRNLLHEHGRVLARVERRSTEPGIVAIDRWVQKPEALEIGELVRDAMRQGVARQIDARHQLEYPLERELLPLPDDVDPILVDGPIQRSCAGVVLGVLHGSQVSQLSQDQPYQSVVGQVQQLELRELRRLRRDLAAELVRAEPKDLQRRNEGPDPARDVAVEPVVADLYGGRGLVAARWRSGLVAARA

SEQ ID NO: 75449 - protein, 150 aa, Zea mays
  Coding DNA Sequence Number=SeqID_32074
  Subcellular localization annotation: CTP_CleavageSite=53; ConfidenceScore=5.68e-01
MVTLRTIDPYSNLDLSVFSKYAFSPSGASTVSHSVRSVQSTGETASSLCTRSRSANARSRSGSSKTLPPLLSRTWSLRGHLPLHLSQRCPLHHHRASWLLEETLTEMETMTTPVAVRATTRSSRRSRSWRDGSLDLSLVMLLAGVTLKVA

SEQ ID NO: 75450 - protein, 53 aa, Zea mays
  Coding DNA Sequence Number=SeqID_32075
MTHKEVTDKRMIALGAIEKDKIMVARAYNKKETLALASLIDDEKKLGDCQFDL

SEQ ID NO: 75451 - protein, 138 aa, Zea mays
  Coding DNA Sequence Number=SeqID_32076
MGGPAEQQKTDERHAVTRSSSGDNDDFCSGGPNSGSDDLRADAAARRPPPMPKLVRQGRAEGHRVGGDSPHLRPQPSWAESSPTRSKVLPLRRRDWVPHVMQAGPEQKKPNRRARCMQPPSGYKWPSTFAQTSGRKSG

SEQ ID NO: 75452 - protein, 585 aa, Zea mays
  Coding DNA Sequence Number=SeqID_32077
  Gene Ontology: Mol. function=oxidoreductase activity, acting on paired donors, with oxidation of a pair of donors resulting in the reduction of molecular oxygen to two molecules of water; Cellular component=membrane; ...
  Gene Ontology: Cellular component=Biological process=lipid metabolic process
  Homolog annotation: Hit_ID=A8T614; Match level="QueryCoverage=62%, HitCoverage=92%, E-value=1e-113, Identity=55%"; Hit description =Fatty acid desaturase-2
  Pfam annotation: Domain name=FA_desaturase; Domain location=285-542; Score=264.3; E_value=2.5e-76; Accession=PF00487.15; Description =Fatty acid desaturase
  Subcellular localization annotation: CTP_CleavageSite=48; ConfidenceScore=5.14e-01
MAPPVDVVGSRPRLGDVEAPPRSRSRSSLSSAAVVESEPLGRARRRPSAEARAESEPWGRAKRCSSSSGAEPKSEPWVGRSGVRRLPGLSPSPSPGSGGAEFLMVPEVGPDCLSASLCQVALQPVRRRRRCPSVRPLCADGGYQLRIRSLEGRVVITLSYRSFDTRYKTTNILLIQGAARGQPAVVRGGANKTRPTAGGGSGGGETATDDAAANAKRSPADKPPFTLADIKRAIPAHCFRRSALRSTSYLLRDLSAVAALFYVALVAIPSLPAGGALRLAAWPLYWAAQGCALNSVWVVAHECGHHSFSEHAALDDAVGFALHTALLVPYFSWKHSHRRHHANSASLDRDEVYVPWRRSELPALVRGLHANAAVRLVLLALVLVFGFPLYLTCNITGRPYPRLASHYDPYSPIFSGGRERAQVVASDAGIAVFSLALYRLSSSSGGGGLATLALVYGAPLLVVNVWLVLITFLHHTDAAVPRYDSGEWDWLRGALATVDRDYGAFLNAAFHNIADTHVVHHLFPSMPHYHAAEATRAIRPVLGEYYRFDDTPIARAAWRAAKECLYVEPDARREGVFWFASNKQA

SEQ ID NO: 75453 - protein, 169 aa, Zea mays
  Coding DNA Sequence Number=SeqID_32078
  Gene Ontology: Mol. function=electron carrier activity; Cellular component=anchored to membrane; Biological process=electron transport
  Homolog annotation: Hit_ID=A2X9T9; Match level="QueryCoverage=54%, HitCoverage=37%, E-value=5e-23, Identity=53%"; Hit description =Putative uncharacterized protein
  Pfam annotation: Domain name=Cu_bind_like; Domain location=41-122; Score=123.7; E_value=5.5e-34; Accession=PF02298.8; Description =Plastocyanin-like domain
MAPSSKKVVLVIVVVVTVAAVLTAPGPALAADLLVGDSQGWRLNVDYDEWADGKDFIVGDTLVFKYAKGQHTVVQATAASFAACSQSNSLGTWASGDDRVPLNTSGQWWFFCGVAGHCEQGMKFGVTVLPVVKLSSSSSSAPPALIAHGGGAAAGLAAAAVAAAAALLF

SEQ ID NO: 75454 - protein, 111 aa, Zea mays
  Coding DNA Sequence Number=SeqID_32079
MRIRSESSGTRGEKEREVGAPSPTTQTSAGGVVVYRRCARDPGWFNRCLRWRVDGSACGNRSSAHRIRRGSRVTVVNAPRTITADHYVNWNMENYPGKQCYHKGLWTPLAD

SEQ ID NO: 75455 - protein, 167 aa, Zea mays
  Coding DNA Sequence Number=SeqID_32080
  Homolog annotation: Hit_ID=A2YII1; Match level="QueryCoverage=85%, HitCoverage=65%, E-value=1e-22, Identity=40%"; Hit description =Putative uncharacterized protein
  Pfam annotation: Domain name=Cu_bind_like; Domain location=25-140; Score=34.8; E_value=1.4e-08; Accession=PF02298.8; Description =Plastocyanin-like domain
MAMAVALHLGPASAEYYLVGDSAGWTLNYTIGWPENKTFKVDDFLGTDYGGTEQKPAHLASSSSYQDENDGRPSILFPQCFRYPRGEYTVTEVDSQTFRECYRQGNAVHEWTSGNDTVRLDSPGRRWFFSSLDDHCDMGLKLFVDVVGSAPPAQHPLPPAQAPAPVL

SEQ ID NO: 75456 - protein, 254 aa, Zea mays
  Coding DNA Sequence Number=SeqID_32081
  Pfam annotation: Domain name=Sex_peptide; Domain location=44-100; Score=-4.5; E_value=0.069; Accession=PF08138.2; Description=Sex peptide (SP) family
MGKPVPSLLMLLLSRGRVPLDSPTRWQDGWPSHSNNHFLQSLDKCEICAMVFVCLELLLSFHNKISNRPGEGDDQRDRDGWGPGGLAAWGFAESPSQSRCPQPQSGLRRRLAVRRLSPSQTRTGRNTNRRQLCPVRLYSCVSCVRALRGRVGMWPTWAHGPWPWDGLMADWQYNGSSNLISCEKQTIRIEFLNLASDRTCTHHNRNGRPRLRSREEGNLRAGSLRLCINRGLPSKAVAGRSSGAGSGAGSGATS

SEQ ID NO: 75457 - protein, 134 aa, Zea mays
  Coding DNA Sequence Number=SeqID_32082
  Subcellular localization annotation: CTP_CleavageSite=38; ConfidenceScore=5.15e-01
MPPWFGRSRSRRRPPPPVLVARVAPTTSDTDPHTDVTVATSRTSLTTPPELYCRRFAPYSMICLRIRKIEKAIPIHYVILKGNLRLKDCNLADGEYILVPEQGAAQEVAPDPAPEPAPEDLPATALEGKPRFYA

SEQ ID NO: 75458 - protein, 134 aa, Zea mays
  Coding DNA Sequence Number=SeqID_32083
  Subcellular localization annotation: CTP_CleavageSite=38; ConfidenceScore=5.14e-01
MPPWFGRSRSRRRPPPPVLVARVAPTTSDTDPHTDVTVATSRTSLTTPPELYCRRFAPYSMICLKIRKIEKAIPIHYVILKGNLSLKDCNLADGEYILVPEQGAAQEVAPDPAPEPAPEDLPATALEGKPRFYA

SEQ ID NO: 75459 - protein, 319 aa, Zea mays
  Coding DNA Sequence Number=SeqID_32084
  Homolog annotation: Hit_ID=A3AA79; Match level="QueryCoverage=31%, HitCoverage=62%, E-value=8e-36, Identity=73%"; Hit description =Putative uncharacterized protein
MAGESIEILPDGWDSSRSGACSCDVIRASRRHGWVAQRVVPQDLPPPGSPVPRLFSPRPESLIQRSSWYDTQIECVAISRFGQLRIPINCDGAGPGSSVCRKWRALTSDDELWRKLFNDRWGADAAAFYAPEGSKSWKDVFAVQDRCDRYRLGVRIIREGKNYYLIYQGEIQRYLDNQKFAMTSFLTKKNCQAQVSEADMNAMWKHPDVYKEWIKSGERRGNVRFSHDAKNRPYLSRVEVKASTKGFGARFCSGSPYAIQCKFVEAAINAILPQSPPTALPAPSILLPTHPSILARALRTRSIHASLQQQMKLKDFHDW

SEQ ID NO: 75460 - protein, 516 aa, Zea mays
  Coding DNA Sequence Number=SeqID_32085
  Gene Ontology: Mol. function=DNA-directed DNA polymerase activity; Cellular component=nucleus; Biological process=DNA replication
  Homolog annotation: Hit_ID=A7P225; Match level="QueryCoverage=98%, HitCoverage=99%, E-value=5e-90, Identity=40%"; Hit description =Chromosome chr19 scaffold_4, whole genome shotgun sequence
  Pfam annotation: Domain name=CDC27; Domain location=26-516; Score =51.9; E_value=2.2e-12; Accession=PF09507.1; Description=DNA polymerase subunit Cdc27
MAGEAVDQSLLHLLPQIHALFSDPLRVISYKWLSRNFSVSSNDAKRLLQEFVDKHGTDLQVIYSVSGWLKSNPENYCVKLVSGPKLEEARHGFKDSCSVQIYSIQACIPKDTAVLWNHEFVQAEELFNQPFDDENCLRDNRFCGVLNSFVKRTSNGKHVSSLPPKPLNSAAVVEQSKPSVTPKEQFVTAQQQDLLVSSKHGAGNKSEKDNSTLLDKAGNAPVVKEQSIDAHASKSRAHNGKTMPNNGGSLANMWGRASTKPKPPSTTNSTVVESVAATLDAQICAKEEADGNSSDDEQGIKYKRESTNANNRKRRAVFDFSDDEEDENIISIASPEVLKQRTPDPVIETAEDAEVNQKNLENKDDVPNTEKGSSMGVDSDFTSECKTKTVNTMNHSGITLKEKSSDPPVSNKKQDSAVEPASTAPKRRKVLKTRIDERGREVTEAVWEGEGSADDKAEKNVSTTAASGATLPSKPKPATSTDQIKAPSKTAAGNKKPAKAKAGTKQGSIMSFFKKA

SEQ ID NO: 75461 - protein, 198 aa, Zea mays
  Coding DNA Sequence Number=SeqID_32086
  Homolog annotation: Hit_ID=A7QEQ5; Match level="QueryCoverage=26%, HitCoverage=22%, E-value=4e-07, Identity=52%"; Hit description =Chromosome chr16 scaffold_86, whole genome shotgun sequence
  Pfam annotation: Domain name=CCT; Domain location=146-190; Score =71.2; E_value=3.5e-18; Accession=PF06203.5; Description=CCT motif
  Subcellular localization annotation: CTP_CleavageSite=96; ConfidenceScore=5.77e-01
MAPAPSSSKAATCKPARASWHSGTSHRPPQAGASRHSAARSTTPAARSTAPSARPPGAPAPRPPPAHPPSPRPQLEQGQAAKHQPPALRSPSPVPVQFARQAVSDQAGQPWPLDVYVHSLQNLGANTPRPAANVCVTISDLKTEERKQKLSRYGKKKIKRNFGKKIKYECGKALADSQPRVRGRFAKIEECNLLKPSK

SEQ ID NO: 75462 - protein, 62 aa, Zea mays
  Coding DNA Sequence Number=SeqID_32087
MKKVVYYETDSSVPSTSNAESTSSKRQEHKKYNKSPYFDGEEYYMWTLVADALGQGWEHHDT

SEQ ID NO: 75463 - protein, 124 aa, Zea mays
  Coding DNA Sequence Number=SeqID_32088
  Gene Ontology: Mol. function=nucleic acid binding; Cellular component= nucleus; Biological process=DNA replication
  Homolog annotation: Hit_ID=A2XB99; Match level="QueryCoverage=99%, HitCoverage=58%, E-value=6e-39, Identity=58%"; Hit description =Putative uncharacterized protein
VNDASDSFETAAIQNGMYIAVIGSLKGLQERKRATAFSIRPITDFNEVTLHFIQCVRMHIENTELKVTPFSVLRHRVTSGSSDTDLHTQVLNFFNEPANLDAIDYNMDSGRLYSTIDEFHYKAT

SEQ ID NO: 75464 - protein, 77 aa, Zea mays
  Coding DNA Sequence Number=SeqID_32089
MSGQDLEQAKVLLFGSIVEKIVNNCDIIVTNPDIVEGFVCRIDRSEQTEDKDILRHELHFRCNLLDVIFFPPQSDFE

SEQ ID NO: 75465 - protein, 128 aa, Zea mays
  Coding DNA Sequence Number=SeqID_32090
  Subcellular localization annotation: CTP_CleavageSite=30; ConfidenceScore=5.25e-01
MTTDPKRPKTQPLRPPRLHQLPPLDIRPPRESRRRTEGGTPNMGRRTGLRLKTNRSGGRRSGRKHDVAKGSPEDGTLPGLSPPHRSKLVLRQHGSSSLISCEKQMIRIEFSNLARILVIIMLSEEKLS

SEQ ID NO: 75466 - protein, 131 aa, Zea mays
  Coding DNA Sequence Number=SeqID_32091
  Homolog annotation: Hit_ID=Q9SE34; Match level="QueryCoverage=32%, HitCoverage=18%, E-value=2e-08, Identity=61%"; Hit description=Rar1
  Pfam annotation: Domain name=CHORD; Domain location=13-44; Score= -13.4; E_value=0.0032; Accession=PF04968.3; Description=CHORD
MSRTEAAKSGTAAPVRCQRIGCDAVFSDDDNPEGSYQYHPSAHLLDGVGDVGPGEGQVLEHAGQAPVERCVCDWGLVVLKELRLSVGRRGAGLAIGHASSLQDVEGILALVEEETLRLALGSDALEMVKRP

SEQ ID NO: 75467 - protein, 221 aa, Zea mays
  Coding DNA Sequence Number=SeqID_32092
  Homolog annotation: Hit_ID=A2XFR6; Match level="QueryCoverage=66%, HitCoverage=42%, E-value=6e-07, Identity=31%"; Hit description =Putative uncharacterized protein
ELEQQGSSFSLQQEIESVRSCSRMLPLEAPPAPPLSAPAAGGDPDDGGAQSRDLPGPLGGDLLGAPSGEQSPGAEICSEHYSISEWDSAEAAMQDVARRALSHYCSVLGGVADGLNLKYYPCRPSGSTGGVIVSHVGKDNPRLSSTVNLAVVLNTELDHALDELSRARAEIAQLRAEHAERRHLEDGSPAPVGTQHPYRSPRRGQQAYGNPDCRTKINLEP

SEQ ID NO: 75468 - protein, 110 aa, Zea mays
  Coding DNA Sequence Number=SeqID_32093
  Subcellular localization annotation: CTP_CleavageSite=49; ConfidenceScore=5.11e-01
MVKNFGSKTVQIAMNAVVTSHLLVCLYSAAGEKAKRQNFYTRRTPARTRCLVDRRDRTVTLQGGVATRWEIESFLDNELREVENKPPTGCLILRGCLLLLSTPSSSAHVF

SEQ ID NO: 75469 - protein, 155 aa, Zea mays
  Coding DNA Sequence Number=SeqID_32094
  Gene Ontology: Mol. function=DNA binding; Cellular component=nucleus; Biological process=regulation of transcription, DNA-dependent
  Homolog annotation: Hit_ID=Q10FB9; Match level="QueryCoverage=65%, HitCoverage=54%, E-value=1e-27, Identity=61%"; Hit description =Homeobox protein OSH1, putative
  Pfam annotation: Domain name=KNOX1; Domain location=1-38; Score=40.6; E_value=5.8e-09; Accession=PF03790.4; Description=KNOX1 domain
  Pfam annotation: Domain name=KNOX2; Domain location=44-95; Score =79.6; E_value=1e-20; Accession=PF03791.4; Description=KNOX2 domain
  Pfam module annotation: Pfam domain module=KNOX1::KNOX2; Domain location=1-38::44-95
MSHPLYPAVLRAFIDCRKVRVPPEIVGRLSALADDVEMNSDDIQEQRRAADPELDQFMEIYYHMLVRYRQELTRPIEEADEFFRSMEAQIDAFSLLGRTSLIVIRGARPCVASNDVTQQIHQTPPATLPTHEREDELDFVETLFASGGIDHHSSL

SEQ ID NO: 75470 - protein, 148 aa, Zea mays
  Coding DNA Sequence Number=SeqID_32095
MAASIPYDFVVTGSGVSAEQVLHVLGLDRQEEAGSAAKGRAAEAATHPSGGIAHARRCCTGSRGGGRRGQRWGGAEATNGKTEAVEGAMLIAVAVVAEGMAWGGGIGFEVLRTGRPHGCRSLASRCRDLGRRRMRIWELGSACEGGDF

SEQ ID NO: 75471 - protein, 815 aa, Zea mays
  Coding DNA Sequence Number=SeqID_32096
  Gene Ontology: Mol. function=RNA-directed DNA polymerase activity; Biological process=RNA-dependent DNA replication
  Homolog annotation: Hit_ID=Q8LSR5; Match level="QueryCoverage=13%, HitCoverage=6%, E-value=8e-11, Identity=35%"; Hit description =Putative reverse transcriptase
  Pfam annotation: Domain name=zf-CCHC; Domain location=104-121; Score =22.5; E_value=0.00059; Accession=PF00098.14; Description=Zinc knuckle
  Pfam annotation: Domain name=zf-CCHC; Domain location=123-140; Score =17.1; E_value=0.0039; Accession=PF00098.14; Description=Zinc knuckle
  Pfam module annotation: Pfam domain module=zf-CCHC::zf-CCHC; Domain location=104-121::123-140
  Subcellular localization annotation: CTP_CleavageSite=55; ConfidenceScore=5.58e-01
MKNVGSRADPIPLFLYTVRGVRNQKLLPAQSRRGRPPATAAVRLQPESRPSPHVRRSTFRTTPRLPGGADVEGWELVESRRAKRLRLRALRVRRHGPSPSVFNGVCFNCLSPRHLARQCRLETRCFSCLALGHKAASCPGSPATSPEPKARVHTTTAVHPVWARLGGSEAAGSSVWSRLGGTKGPRRPNSVWGRISPPMDRSDAERQRLTLAPKRIHAMSSAEEDLKKAVVISVISERSSVPGEEVAALLAPWLEVEEGSLSLLRLSVSSFLLFLPSVRLIQLLEEKKSLLKAPSFSVLCQQWSRFANSSGGILPFLVNFHLDGIPVHAWEAATVERLLKTFASVFCVQSDLDDLTSFRCSAWCVDPALIPDSRELWITEPLQSPENAGQGFRTLIYQVRIHWSFPSSSAEHGPPPSLGDSGARDRARRSPRSRSPPGNGRGQSSRPRRSVMERLGPQINDGQSNLEGRRSSASNKRCSGIETFPLGASALVPLATDLGDIDEGISNLVSRAGLEASFVTALAPVPLVPLMARADKEGEHLVYDHRAGLETPSLGVSAPVYMAATSPIDGATAAETLNCDHRAGLEAPSLGVSALGRSHGMLDPISVRGGALSVAGTVSPRALLVYSRRRPILADVGADSVSGTADRVDDLELSSPTGRQELLEGQAGDDCSADCISASVLDTTTSDVDHSLVQDFLATITKPVDCILARPATQKRRRKQTPKDFIPRRSNRLKKDGRGAPSTAVRKIRVDIARTLGILADQEGLAQEALDEYGRLFSKPLSQDHVAALAALFGWAIPENADAADSLLGQSPIIV

SEQ ID NO: 75472 - protein, 193 aa, Zea mays
  Coding DNA Sequence Number=SeqID_32097
MSEEERARGVVIELAAIVTLQSTDRATKLSGYPGEEVCEGGECVRLQPKRESPEKMGKIIQNHQIVFIARKTEYRGGPKITVNQTTGDLGHDVGSRVAETSMPCGGGGGGDQGRRWRHAGGGGLERVEWPRAVTAGEKGPGGQILHRKTRGVKLNGTGVVSGESTNRKKVVSDVGSYENIVEVKRPRENRGTY

SEQ ID NO: 75473 - protein, 120 aa, Zea mays
  Coding DNA Sequence Number=SeqID_32098
MSGGDETGKMTDSEKLDRILGQLATMNHRLDTHAQRITLMEQEPPPIRARCGYNLRPRRPCLRVLHSRAMLAQGTLPLGVATTDMEVVAGAFWADTVIATTTEDHCDILALGMVISWPKA

SEQ ID NO: 75474 - protein, 148 aa, Zea mays
  Coding DNA Sequence Number=SeqID_32099
MASQEPPPVADADAVQETARQALVAAAQDRVRTAQDALARECQAASDPERVAAVAHNVTFPPPHGGVPNNDADVVEGPNYEVVLIVNLHARVSRTYVPLCPWFWIPFLPTTIIGVISFYSPSSAIEEQFLGNCEARALRLDAELRVFI

SEQ ID NO: 75475 - protein, 461 aa, Zea mays
  Coding DNA Sequence Number=SeqID_32100
  Subcellular localization annotation: CTP_CleavageSite=39; ConfidenceScore=5.19e-01
MGQVQLRTRASLLSPPPTPQLPPLLPRRPPTTAHPPALAADHPTAGQPPSPSEAHFPAWEKSSRGPAPWSALLGPVHVVPCVRAPGTARTPRGPPKACPFRQHAPLLRRRASPASGRCSRPPLPEPSSGRPISTGCFLPGRRPLVAQRCRTSQPALRRLLVVGLHLCPRLDVLPGLRLLAWTSVSRAVACPCDLCPAVDYLLVAVQPPYVAPSLAAPISYSFDAVPFGPSPPVSIICSAATLPSSATAPTGVLGPAPMAAAPSVPMPSTAHATPDFSGPAFALATDTPSFLTPPSSAEIVVCVLLHDGQLVHGTFVAFDQTMNPVPRDCVEIHHQANRHMPGLLVFPTVAVASLMMEAYNPSSHPGVLLGAPQHSPRNPRLRHPLPLPQIGWSTSEPLPTPLLPLPRYPITILHTPRILPLSWVGIGSIVPVPSVGASVSLGPFYLNDVLVALDLNTSSSL

SEQ ID NO: 75476 - protein, 190 aa, Zea mays
  Coding DNA Sequence Number=SeqID_32101
  Homolog annotation: Hit_ID=A3BP01; Match level="QueryCoverage=22%, HitCoverage=23%, E-value=2e-09, Identity=67%"; Hit description =Putative uncharacterized protein
MKGLSKQLSGIEIVKDLTKIIINEKGDMFQGYGGDGGHGRQPALGVIPTQPRAKRFEVKFADPPSPWPPLPHPHRHLAPLPLPLEISADLAYRGSAMCGGVSIDGGGRRGGSLRGTLRWVVEEESEGGRRGCLAEPRGEDERHLQGHNLGETATMSVPHGRRQDLELAIDDFDEELIDPELCYSFQHNTK

SEQ ID NO: 75477 - protein, 141 aa, Zea mays
  Coding DNA Sequence Number=SeqID_32102
MLVDYTTVLDRTSVSVEGPTQQGVESIVEVTLASRVASDGSSDPSLRLRLLRELCAMARTATSVVVISVSAKVSSSSRDALWWCRGHLWLRCRRRRPPRLHFLLRRGGRVLLLLVPLLLLAPTLLLLVQAMMQSLQVTGLT

SEQ ID NO: 75478 - protein, 110 aa, Zea mays
  Coding DNA Sequence Number=SeqID_32103
MQDAARQALSQYCSLFSGVADGLDLKYYPRRSTSSVGGVIVSPVELDHALDELGKVWTKVAELRAECAAHHYLDGGSPAPIGIQHPYRSPPCGRFDYGTPDCRTQIDLDP

SEQ ID NO: 75479 - protein, 85 aa, Zea mays
  Coding DNA Sequence Number=SeqID_32104
MVILMLVLVSSRLVALTVLLLLLLRKLPLVLVLMLTQMLSLKHMVATEVVPELLLGDGFRVGMSGEEAEVGVAAAAPAALLLVSD

SEQ ID NO: 75480 - protein, 442 aa, Zea mays
  Coding DNA Sequence Number=SeqID_32105
  Subcellular localization annotation: CTP_CleavageSite=47; ConfidenceScore=5.27e-01
MVAIQGSRPPFKGDSPHLRPQPSRTESSPTRSKVLPLRPGGWVPHVMQAGPGQKEPKPPRTERTTAQWLQALLHFCPDQRVKGQTAMQAACNLTRGRTLSTSTRPAWSPRPTRHVTGAPVTTCEKLHRHSRQYRAFSTAEPVPRLEATLRMTRQCQPSTSVTGQSAAREGATVDTARNGPAVMAVADGRKQQSSRQQAHAPSWDSERTLSHGVKTTRPCSVPRTARARTTAASRTTRPVALTLRQDRRHLWQAKQATLHLRHNDRVKKGTGKGDTPKGILLREGSGPRAPLQIRGSKAGPSEGFNSRLRALGLRAHYWSEVRRLAPRKGSTAASGHSGSAPTTDQGFVGWPPKGSTAASEHAERGMTLGQGSVHSRTQSRLARAQPRAKATDPEGFTSRPRAPSSNGHTFGSPEAQSSQRSNLGQIATPTDRIAGAFNARIA

SEQ ID NO: 75481 - protein, 75 aa, Zea mays
  Coding DNA Sequence Number=SeqID_32106
MAGFRLRKKRSERERGREGSTEGASEQGKVGEQGARLKRGKDVRRWPEITRSWARPLRGSLAGGWGRADRWGRQD

SEQ ID NO: 75482 - protein, 225 aa, Zea mays
  Coding DNA Sequence Number=SeqID_32107
MVALAKFIWVKATYDSEPSVEVFYKELLPSLAKECHQWQDCAVWHMHVYTEDREDFERSCGTHAVCQEQVGELFKAKKGDANEDSLHRASKTSSGHNLVELNGLHYGPYPEEGSTDARDAGERNKRGGAKCGGLDEGCSKGKVVVPPMKNRRKVEAKAKGPARATGVEEASDKFAEELAKTCAEPGECESSMPLSDVLVINDNQLWTDNSWRNKNASWIIEDRKS

SEQ ID NO: 75483 - protein, 90 aa, Zea mays
  Coding DNA Sequence Number=SeqID_32108
MEILYIPNSNLCLDNSSTTNTRSLTVISDDGVLDDAVMVDDDEEEDDITYRLRRRVVCFTWASSLVASVFVAQATFEICVAGLVAIHEST

SEQ ID NO: 75484 - protein, 64 aa, Zea mays
  Coding DNA Sequence Number=SeqID_32109
MAERYSDDGEGTTCGEVHGCSQRVFRERRKEIEREEVLDHHHVHCNSKQRSKLSMEDQTVTAMA

SEQ ID NO: 75485 - protein, 93 aa, Zea mays
  Coding DNA Sequence Number=SeqID_32110
MEAQDLQGTRAREKVKVIVVPKVKVKKMLCISQGYSAEEDSYRRLRLRDESMRDMEIQPGSRMPKLWLKKLRLSTMTEVEDGTNLKEKRLINP

SEQ ID NO: 75486 - protein, 110 aa, Zea mays
  Coding DNA Sequence Number=SeqID_32111
MTVLRVDENPAPDGEKSSLDDEYVSADDEHVDDEDKETDSVGDYENPSRTSQLKKAPWPNLKKEPSNDEEEEKTIKFHIWWGSKWDMMASHVIAALAVLLQFPASFVHLH

SEQ ID NO: 75487 - protein, 298 aa, Zea mays
  Coding DNA Sequence Number=SeqID_32112
  Homolog annotation: Hit_ID=A3BDE2; Match level="QueryCoverage=64%, HitCoverage=32%, E-value=1e-07, Identity=28%"; Hit description =Putative uncharacterized protein
MDCEIPRESHGKKRSNECSKENVADVQELVDELIVFEHLDYGKDIMFPTRPLKHHASTGSVQIPGDIGKTLNYVMTKNQSMPVGSAIGSGYPVYGGKLSTLGTIFSSIQTEIPSIQSSSYSISNDWVAQCPSACIEQWIPMECNIISQSNAYLMMHSSSAFCAPEHEGCSETQAPNLCSGSDVVFDPSQCYPVASFSDLGIPDTPLIAGFLNDIALEPTNNTSLGGAGFLNANLKDQSHLNRQEPRNETSPEAGFLNANLEEQSHLNWHLQEPEPWANGDKCFDQWFDPCHMPDFLGS

SEQ ID NO: 75488 - protein, 202 aa, Zea mays
  Coding DNA Sequence Number=SeqID_32113
  Gene Ontology: Mol. function=DNA binding; Cellular component=nucleus; Biological process=regulation of transcription
  Homolog annotation: Hit_ID=Q3C253; Match level="QueryCoverage=67%, HitCoverage=19%, E-value=3e-15, Identity=37%"; Hit description=GAMYB- like1
MASHLPGSTDNEIKNYWNTRKRRKRRCGSPLHPEYMLSQVTHKDMDCETPGESHGKKRSNECSKEKVADVQELVDELIVFEHLDYGKDIMFPTRPLKHHASTGSVQIPGDIGKTLNYVMTKNQSMSVGSAIGNGYPLSVPLNMRVVLKLKLQTYVQCYPVASFSDLGIPDTPLTAGFLNDIALVLEEQFPPLHNQGQSEQQP

SEQ ID NO: 75489 - protein, 728 aa, Zea mays
  Coding DNA Sequence Number=SeqID_32114
  Gene Ontology: Mol. function=protein binding; Cellular component =nucleus; Biological process=negative regulation of ethylene mediated signaling pathway
  Homolog annotation: Hit_ID=A2YET8; Match level="QueryCoverage=85%, HitCoverage=100%, E-value=0.0, Identity=68%"; Hit description =Putative uncharacterized protein
  Pfam annotation: Domain name=F-box; Domain location=146-194; Score =18.8; E_value=0.02; Accession=PF00646.24; Description=F-box domain
  Pfam annotation: Domain name=LRR_1; Domain location=301-328; Score =11.2; E_value=2.6; Accession=PF00560.24; Description=Leucine Rich Repeat
  Pfam annotation: Domain name=LRR_1; Domain location=381-403; Score =0.8; E_value=2.1e+02; Accession=PF00560.24; Description=Leucine Rich Repeat
  Pfam annotation: Domain name=LRR_1; Domain location=434-457; Score =3.6; E_value=66; Accession=PF00560.24; Description=Leucine Rich Repeat
  Pfam annotation: Domain name=LRR_1; Domain location=460-483; Score =0.9; E_value=2e+02; Accession=PF00560.24; Description=Leucine Rich Repeat
  Pfam annotation: Domain name=LRR_1; Domain location=513-535; Score =2.9; E_value=88; Accession=PF00560.24; Description=Leucine Rich Repeat
  Pfam annotation: Domain name=LRR_1; Domain location=540-562; Score =2.3; E_value=1.1e+02; Accession=PF00560.24; Description=Leucine Rich Repeat
  Pfam annotation: Domain name=LRR_1; Domain location=593-616; Score =5.9; E_value=25; Accession=PF00560.24; Description=Leucine Rich Repeat
  Pfam annotation: Domain name=LRR_1; Domain location=620-643; Score =4.7; E_value=41; Accession=PF00560.24; Description=Leucine Rich Repeat
  Pfam annotation: Domain name=LRR_1; Domain location=646-668; Score =5.8; E_value=26; Accession=PF00560.24; Description=Leucine Rich Repeat
  Pfam annotation: Domain name=LRR_1; Domain location=672-695; Score =9.1; E_value=6.3; Accession=PF00560.24; Description=Leucine Rich Repeat
  Pfam annotation: Domain name=LRR_1; Domain location=698-720; Score =4.9; E_value=38; Accession=PF00560.24; Description=Leucine Rich Repeat
  Pfam module annotation: Pfam domain module=F-box::LRR_1::LRR_1::LRR _1::LRR_1::LRR_1::LRR_1::LRR_1::LRR_1::LRR_1::LRR_1::LRR_1; Domain location=146-194::301-328::381-403::434-457::460-483::513-535::540 -562::593-616::...
  Pfam module annotation: Domain location=620-643::646-668::672 -695::698-720
MNPADPEGKGYELRQLGQLASRVRHHIKRRRHRALLPHPTTTSSPLPLTRPFRLIRHFFPVAVSDRVRRPSSKSALLRFDFSGVLGASFGFIDGVLGLLRLDMSPFQGYRGDAVLSGVRSRKRVFATAAAEPVTAAPKRQKRGDEMPLDALPDECLFEVLRRVQGTRARCASACVSRRWLALLAGIRASEAVLAPAAPAVPDLNQEYLSEDDEADLMDLDGDARERTLEGMEATDARLTAAAVAGRLAAVSVRGSHPARGVTDAGISALARGCPELRSLTLWDVPQVTDAGLAEVAAECHSLERLDISGCPMITDKGLAAVAQGCPELKSLTIEGCSGVANEGLKAVGRFCAKLQAVSIKNCALVDDQGVSGLVCSATASSLTKVRLQGLNITDASLAVIGYYGKSIKDLTLSRLPAVGERGFWVMANALGLQKLRRMTVVSCPGLTDLALASVAKFSPSLRLVNLKRCSKVSDGCLKEFAESSKVLENLQIEECSRVTLTGILAFLLNCSPKFKSLSLSKCVGIKDICSAPAQLPVCKSLRSLAIKDCPGFTDASLAVVGMICPQLENVNLSGLSAVTDSGFLPLIKSSNSGLVNVDLNGCENLTDAAVSALVKAHGASLAHLSLEGCSKITDASLFAISESCSQLAELDLSNCMVSDYGVAVLAAAKQLRLRVLSLSGCMKVTQKSVPFLGSMSSSLEGLNLQFNFIGNHNIASLEKQLWRCDILA

SEQ ID NO: 75490 - protein, 155 aa, Zea mays
  Coding DNA Sequence Number=SeqID_32115
  Homolog annotation: Hit_ID=Q6J9V9; Match level="QueryCoverage=63%, HitCoverage=34%, E-value=9e-43, Identity=89%"; Hit description =Putative uncharacterized protein
  Subcellular localization annotation: CTP_CleavageSite=58; ConfidenceScore=5.26e-01
MTTASKKGPGKGIFRKRILPSEGNGPRALLLIRGSKVAPFGVRQPPQSTRAPSPLLIRGSKAGPSEGFDSRPRARRVRDDPGYVRYMAEARATLPSIGRSRELRLARPQASASASTSRGVTTSPDPSLGLRRSLRLARPGPRTDYATWDASLPYS

SEQ ID NO: 75491 - protein, 97 aa, Zea mays
  Coding DNA Sequence Number=SeqID_32116
MALAAAACLAPRPERLWRCFWCHLLPPRRSAAARPLLGCRLRRARAGHVQVLLAPSAAPGDRATRRFKTALNEAVKNCKVLAEAAELAEGGRARGHV

SEQ ID NO: 75492 - protein, 170 aa, Zea mays
  Coding DNA Sequence Number=SeqID_32117
  Subcellular localization annotation: CTP_CleavageSite=18; ConfidenceScore=5.27e-01
ENSAACAAPTVVPPVRVRLTAAKTGLRRHRKLRLARPQGSDSTSTPDDGLRLARPQGSDSTSTSDDGLRLAQPQGSDSTSTSDDGLRLARSQGSDSTSTPDDGLRLAQPQGSDSASTSEDGLRLARPQGSDSTSTSDDGFRLARPPGLGLNLDLGGASASPDLGLGPTTS

SEQ ID NO: 75493 - protein, 381 aa, Zea mays
  Coding DNA Sequence Number=SeqID_32118
  Subcellular localization annotation: CTP_CleavageSite=19; ConfidenceScore=5.04e-01
MLDAPKSKGCAPLVRLHAACMAVRPFTRWSGRKWRSACNRWAVPGCIPSPVVTQDGDHQFDGGEKQARLRTLPRPQLQGCSSSVLGRGVHRVGACLRAGSGPLLPSVTGGKGARRSWRWQLPRVWLSGLSGFGAASGATSHRGSQKRFLCRRDSRCHPRTDLRLYGLGSLSSPLEWGCGRGPCRSSVCPEVIAAAVWPPGAEVVVAAAGAGGGEPPGVLSPRRPSNESLDSVGLAARGFSCLVKGTLGRSAMSQRQRCQHGQRLSWLEKKLRRPESGWVVRWRDQRRSRVAEAMSWADVLGGQLAEATERPVEPSTRAGFLEETLAAMAQARCRQDLFVGNRVICPSESYFSRKVMSEESLGSVGLAAYVYSVVFRIPLSK

SEQ ID NO: 75494 - protein, 225 aa, Zea mays
  Coding DNA Sequence Number=SeqID_32119
  Homolog annotation: Hit_ID=Q6Z9J0; Match level="QueryCoverage=22%, HitCoverage=49%, E-value=4e-18, Identity=86%"; Hit description =Putative uncharacterized protein P0524F03.13
MDTKLTGPWSYEREGVNQGPHRKGTCYGQRHRRAQRRMTRSTEETHAVISKVALPCCARDAKLYGNMISKLSRLEDTEDNDEWRTGLKALGADSISKLKKAFPELVQEVSRPSNFQDFYIYAFRYCLTEEVEMYRNTSCFRYCLTVSQTRSPAPFVADHCTTHAQQPTTVLACGRRRAAVGSRVAAEICIAVWGCVAIELHAKRRAGATHAPSRAVAGCRGSVAS

SEQ ID NO: 75495 - protein, 168 aa, Zea mays
  Coding DNA Sequence Number=SeqID_32120
MGVGKGRLDGWECLLNALRLFSDRGWKAPKRKREPTPPSDEFGDSEYSEEEFSSESEGSPAPVSPPASSDDSDDSQGIAAEVWTYIRAVERSGLEGSDESEYSSDEEDSDGGDEGEGDDDDDDDDDDGDGDGSGSGRGGGDGSRDSTKGGSSKGSTKGGGGGRGRASG

SEQ ID NO: 75496 - protein, 102 aa, Zea mays
  Coding DNA Sequence Number=SeqID_32121
  Subcellular localization annotation: CTP_CleavageSite=95; ConfidenceScore=5.00e-01
MVSRCVGYEALLLWLQLASLGEEASPSSDPNRRMSRDESQTGSNTPMTSNVPTSSPRRLVLPAPLLINAHSRGLQRAREGGEAPKSLVLEEVELRATEWSPY

SEQ ID NO: 75497 - protein, 337 aa, Zea mays
  Coding DNA Sequence Number=SeqID_32122
  Homolog annotation: Hit_ID=Q8S461; Match level="QueryCoverage=30%, HitCoverage=5%, E-value=2e-08, Identity=33%"; Hit description =Putative prpol
MGAAALLDKLPKVDTPSERITHQEIRDLGLAVRQQDESSMSRRHEPGINRCTASMTIVNDAMSQQPLELKESVAWVPPRRCLRPGRSARSAPDHGPEEEGHNKSGNTHRYNQCCGGRFDLDGDRSPSPPPLGLKHLAAASFEHQCRSDSACAWLENLRPGCIQNWADLVEIFVENFQGTQKVKRDKEPDGGSRGRPNKRKKDKRRRDEMLVATMGQKRKRPPTEEATDHFEKLLEAPCSNHRYPVRRAYKDCGLLRKFMSKGTPPEKGFESQQDGEQEKVGVSFPDEIGCLLIFDGSDYYMLRRHRKSERHEDTGNFRTETLTFKVVGFQGTYHAIL

SEQ ID NO: 75498 - protein, 141 aa, Zea mays
  Coding DNA Sequence Number=SeqID_32123
MSVEQRNEFNKKHREACQRKKGQNVMTNVSGDGDKKTPRWKEGKLEYIRKRRALQADTLNQGSIALDDPTYTSKVVRPTADATKLDGSAVTVCDWVISEFIGTPFLPSSTQTEDVSSPDMSTGPLRHEQHNKNPTSQQRGQ

SEQ ID NO: 75499 - protein, 67 aa, Zea mays
  Coding DNA Sequence Number=SeqID_32124
MKKASAPAGGGFGGSICGSELVAALLRRMRAGFIVDISPQIFHSIKDPNQTGIIRTSIKAHKYLYKD

SEQ ID NO: 75500 - protein, 78 aa, Zea mays
  Coding DNA Sequence Number=SeqID_32125
MGEPRVMELPEWVDIVKSVRFKGIPPYDPNCITFSKQQGIVRTKESSDKQPLVGYGVVLKKTKNIPKRSFRKTAPNNG

SEQ ID NO: 75501 - protein, 75 aa, Zea mays
  Coding DNA Sequence Number=SeqID_32126
MDSNTTGNGTSVPTLVKCTTPTMLVRRNLELMVFIFHVLCHPKKILESTNRSIVVDESEARQWLVEEVSWLTVEA

SEQ ID NO: 75502 - protein, 156 aa, Zea mays
  Coding DNA Sequence Number=SeqID_32127
  Homolog annotation: Hit_ID=A0EVH6; Match level="QueryCoverage=42%, HitCoverage=18%, E-value=1e-07, Identity=54%"; Hit description=Milt putative polyprotein
MAGSKDHTDISQTISFRLVVESLSVDEQQQYKDFMRQAKEKIFVTIHGGSSSEGCQTWRDRGRISSTFASKLQYSLHIQILPTARFSEKLLRKKLNQTGPMSNTSATNGDSQPQPSYGMPMNSYPGQIPPSSSLLGKSVPLDTIGPSEPLPRPSGP

SEQ ID NO: 75503 - protein, 305 aa, Zea mays
  Coding DNA Sequence Number=SeqID_32128
MAQRIVFFLADLNLAFRERPRRRGEILGLRAGGVAGKRKKAATSGKPKRPPSAFFVFISPQSPPKSSFGHGGAAMEGSVVWVQFLRGFNRYCARMTTSRSLASWSGLPLATLREKLPRFLQKCASSLTPSAHGSVASRSLEMAGEEERKQVLLSYVVPTVSSWNTTTSSTTGSGSRMGHKRSRSVWARSAEEEDCRPNRVYLWFVVVFTSRVYTTILQDLGTDFLINGQMAKREATVVDRTRSPWRNHLSNGEWKRMDPVCPRKPEKGPGTVKKKVLVRPCPPRILQTKKPVDVRNVDMRIAGNN

SEQ ID NO: 75504 - protein, 80 aa, Zea mays
  Coding DNA Sequence Number=SeqID_32129
  Homolog annotation: Hit_ID=A3CGV1; Match level="QueryCoverage=42%, HitCoverage=0%, E-value=4e-07, Identity=82%"; Hit description =Putative uncharacterized protein
MVAAAAAHRASFPLRLQQILAGSCTVSPVVKVESEPIQTSVDRSLASVDHVARRGCGAELRADPKSNDEEGVSVGRDKAR

SEQ ID NO: 75505 - protein, 241 aa, Zea mays
  Coding DNA Sequence Number=SeqID_32130
MKPMRPFLNSKGLLAICLVNLLRLRTISNVYYQCWSGLPTTMKHREVLDPKTTAKIHCIRPHYYVCRLLGANIKVIAPQNLVLTVRFASFLRQMSRGKMLERGRRSFLLMRCCPYPLFLVVLGISLTFIVFYDNFGSRTGGATLLLGSGLGLRRGSRFLSGGALGQCPVPRPGVVGFGVHQGATAALLVGELRSDCSLREVIGPPSALSDEGLEEMLECYDEVTSRVVHSLSMDDIVHSVH

SEQ ID NO: 75506 - protein, 72 aa, Zea mays
  Coding DNA Sequence Number=SeqID_32131
MATCANRSPLELKNDSNRSTGYTPYFMAYGAEAVLPHRPQVRCPEGSFMGGEVLWPGTYKLKDKKGRTLANV

SEQ ID NO: 75507 - protein, 132 aa, Zea mays
  Coding DNA Sequence Number=SeqID_32132
  Pfam annotation: Domain name=zf-CCHC; Domain location=74-91; Score =11.8; E_value=0.025; Accession=PF00098.14; Description=Zinc knuckle
MAHFLKGLRPELKTILASQDFRSFSHLSNKAIQVIPPKGQNFNKPAGSAPSCYNQPSQNSFHTQSVASNHPPANACWHCGDPSHFKNNYPQLKPAASAFSNSVNGLKNVPAPASKAPSTNSQVSKQQFHNRA

SEQ ID NO: 75508 - protein, 141 aa, Zea mays
  Coding DNA Sequence Number=SeqID_32133
  Subcellular localization annotation: CTP_CleavageSite=63; ConfidenceScore=5.64e-01
MPGTSPATTHPLQSSATPPWADHSKPPPTKLTSPLYSPAPTCASLPLRPTRTGATAENCRRTSSTAGFSPDPDRFTPSRGAITARPRRLPLPSLARGPVPTAPSPLARAVSPSMGRLGRLGRVSARPRSPSAGPKSLPRPA

SEQ ID NO: 75509 - protein, 72 aa, Zea mays
  Coding DNA Sequence Number=SeqID_32134
MAGWEDKVDVGNTDGGASTGEIRLHPCMQGPEGEPLGGVGASLATLEQAGRGGQETVGGSLRVKTFDNFSDE

SEQ ID NO: 75510 - protein, 282 aa, Zea mays
  Coding DNA Sequence Number=SeqID_32135
  Pfam annotation: Domain name=zf-CCHC; Domain location=31-48; Score =16.0; E_value=0.0057; Accession=PF00098.14; Description=Zinc knuckle
MRMILKINLMGVPLQVEDLLFNIDRKKQRKRLCFTCGEKGHFRDNYPTMAKPKKVRSKGKALTSVKTWDDSSIEHEPPRTHNHRSSSRSSRSSCKCLMARDASTSCFDLIDDSNSCNQVLAENIIVETCSDEVAKENEQLRQEVARIGKALYDKKGKAKQIRPPQDNTTTGVSKPMEGETMICRLCHKEGPKSFQGKAMTGDKQRQKLKQKPTSKISNTYIKKVDKKDTTLYLIKKKKNGKVIAIKANKQANKGKGAKRIWVSKEIISTMKSTKKVWIPKGK

SEQ ID NO: 75511 - protein, 100 aa, Zea mays
  Coding DNA Sequence Number=SeqID_32136
  Subcellular localization annotation: CTP_CleavageSite=39; ConfidenceScore=5.39e-01
MATGPAGPVIVYAPLVTRNGRGGAQPGAGSRRGRRSPRRDGAKQAVFLKRKGSEGWPASGSCATWEIKEKAGGGGGVKEEKEDAAAAPARGRRLGVTFDW

SEQ ID NO: 75512 - protein, 98 aa, Zea mays
  Coding DNA Sequence Number=SeqID_32137
MHEKVVAEKTPNGGETLKVTITTSNDGGQAQARNQGDTSSTRPIRHHSIQSSGPGPTRLSDHSAAKGRPIRQGAYVGGQIDRADGPVLRPDGLRSGRN

SEQ ID NO: 75513 - protein, 39 aa, Zea mays
  Coding DNA Sequence Number=SeqID_32138
MEALNVSWNELLALVLNVEDIPCIISDFPIPRVKKKEIG

SEQ ID NO: 75514 - protein, 125 aa, Zea mays
  Coding DNA Sequence Number=SeqID_32139
MGGYGAVSGLRTLGISAFLKSGTVGGDEKPNDETNVLCLSAENRKNRIGIVLARAVKTLLSLGAPDCPVRQAGSSELAALGNSPATYSYNSPDCQVCTGLSGKPTVGRANGRPRDLRGTRGRANG

SEQ ID NO: 75515 - protein, 449 aa, Zea mays
  Coding DNA Sequence Number=SeqID_32140
  Gene Ontology: Mol. function=cysteine-type peptidase activity; Biological process=proteolysis
  Homolog annotation: Hit_ID=Q5NKP7; Match level="QueryCoverage=99%, HitCoverage=53%, E-value=0.0, Identity=82%"; Hit description =Putative uncharacterized protein 9C20.3c
MMSSKINELPPRHRSKFTDKLAAYDLEVDKACIAIKDNIDKIIEKQYDIADKFIELIDEVLRAESDNLENETDEPQHSRNSADSAGHTVHTTQPTPDLSSQASQLETQLGGTQFEEIHERQQHIRRVLETCPDEVDIDTGNQVASQDDTLKGTTVSGTDPLLTELDCVHSLWDLLCSKDIDQSRVVIDYDEYSGNCIDIYESFAEGKCLENVFMQCFIECVRDDSKNHRRTMTSNRLVLDVNVGALLNFEEQERHSKNPQPFDQNVLQNCLHNTLPPLVNLDKCKSILVPMLSRGHWTLYVINLQHRCIHILDLNLYGIELGGTTWKDYHYDPIYLGGRKFPWARVIMSRLSKALQHVCPNASFPKFGNFPMDMPSNCPTMRTGSNDCGFYVMSYMKYYDHNAGVITSYTQPDNSRDLRAHALYQLTFHRMNKALPLPIDIQRFMFARK

SEQ ID NO: 75516 - protein, 312 aa, Zea mays
  Coding DNA Sequence Number=SeqID_32141
  Gene Ontology: Mol. function=adenylate dimethylallyltransferase activity; Cellular component=intracellular; Biological process=tRNA processing
  Homolog annotation: Hit_ID=A2XN83; Match level="QueryCoverage=84%, HitCoverage=74%, E-value=1e-117, Identity=79%"; Hit description =Putative uncharacterized protein
  Pfam annotation: Domain name=IPPT; Domain location=56-247; Score =10.8; E_value=1.4e-11; Accession=PF01715.8; Description=IPP transferase
  Pfam annotation: Domain name=IPT; Domain location=22-259; Score= -141.1; E_value=0.063; Accession=PF01745.7; Description=Isopentenyl transferase
  Pfam module annotation: Pfam domain module=IPPT::IPT; Domain location= 56-247::22-259
  Subcellular localization annotation: CTP_CleavageSite=28; ConfidenceScore=5.04e-01
MALPLQPSLPPPLLLVSANNRHKAVVVMGATGTGKSRLAVDLALQFGGEVINSDKIQLHAGLEVTTNKVTEEERAGVPHHLLGVAHPDVEFTAADFRREASRAAGAITARGRLPIIAGGSNSYVEELVDGDGRALREGYDCCFLWVDVQPAVLHGYVARRVDEMCARGLVDEVAAAFDPRRTDYSRGIWRAIGAPELDAYLRWSGDEGERARLLAAAIEDIKSNTRRLSCRQRAKIQRLAKLWGVRRVDATEVFRRRGDAADEAWQRLVATPCIDAVRSFLRDAAVVAAANDPPAAEVVPVFAPASAAVVAG

SEQ ID NO: 75517 - protein, 1264 aa, Zea mays
  Coding DNA Sequence Number=SeqID_32142
  Homolog annotation: Hit_ID=A2YJE1; Match level="QueryCoverage=91%, HitCoverage=92%, E-value=0.0, Identity=75%"; Hit description =Putative uncharacterized protein
MATSAPPPSSAPWLEWAAEYTKAAQAEARPPPEWAARVAAAAAAAGESEDVPWSAGLAEVLARALFPGGGGGGGGAAPAAAAWKYAEAALAARLASPALLLALLSTRVIPHRLSRPMEYRLYLELLKRHGFNFHHQMKAANFRKIMDIIERNLRLSKIFGISTCEPGVFVVHFILCIIWQLIDVVLDDEGLLELTPEKNAQWPTRPEDVSTFEGTFTEQRTEKIKKLQKMNTVTTMELIEHLLRDKVITRILSLARENMQSHWGAFTNRLHLLATNSSTLQNSAISLEPFQHLILGLVKALQAVNRSTWHDAFLALWVASLRLVQREREPIEGPVPHLDTRLCMLLSITTLAIADIIMEADSLCNETELNSHVNEKKAIGNLRNELMLSLQILGDYESLLVPPSCVIPAANQAATKAAMFISGISINNGYMDNVNGMNYTGNMRHLIVESCISRQLLDTSAYYWPGYIMNHANSTSHTLPSQLAGWSSFMKGAPLTQPLVNMLVSTPASSLAEVDKLFEVAVDGSDDDSISAATVLCGATLLRGWNFQEHTVRLVVKLLSPSDPIDNSGRESQLIKLGPMLNVILSGISAVDYAPIFSFHGLIPELAASLMAICEVFGCLSPSVSWTLRTGEEISAHTVFSNAFILLLRLWKFNHPPLEYCIMGDGAPVGSQLTPEYLLLLRNSQVLSSSSLSKQRNGQRQSQVSTSHPSSGNPIFMDSFPKLKLWYQQHQACLASTLSGLAHGTPVRNNVDSLLNQMFRKANKGGTSIGSLSGSSSISNSSSPGGDDSHLWPQLPAWEILEAVPFVVDAALTACSHGRLFPRELATGLKDLADFLPASLATIVSYFSAEVTRGVWKPASMNGSDWPSPSVNLSMVDEHIKKIVAATGVDVPKLVTGGSSSGTLPLPLAAFVSLTITYKLDKASECFLNLAGPALENLAASCPWPSMAIVAALWTQKVKRWSDFLIFSASRTVFHHNNDAVVQLLRSCFAATLGMSSTSVCSCGGVASLLGHGYCPGGFSPVAPGILYLRIFRCIKDCSILAEDILSLLMLSVKDIAETTVPRQRPDKLKKTKYGMRHGQVSLSAAMTQVKVAASLGATLVWLSGGTALVQSLIQEMLPSWFLSAQNLDQGGASGGVVYKLGGHALAYFAVYSGMLAWGIDQTPVSRRRERVMRSHLGFLASALAGKIFLGCDLSLWRAYVSGFLGLVVECTPCWVQEVDLRVLKRLSSGLRHWGEDELAVALLRRAGPEAMGTAAEMILGREL

SEQ ID NO: 75518 - protein, 416 aa, Zea mays
  Coding DNA Sequence Number=SeqID_32143
  Gene Ontology: Mol. function=protein serine/threonine phosphatase activity; Cellular component=protein serine/threonine phosphatase complex; Biological process=protein amino acid dephosphorylation
  Homolog annotation: Hit_ID=O49973; Match level="QueryCoverage=90%, HitCoverage=92%, E-value=1e-95, Identity=81%"; Hit description =Kinase associated protein phosphatase
  Pfam annotation: Domain name=FHA; Domain location=172-248; Score =51.3; E_value=3.3e-12; Accession=PF00498.17; Description=FHA domain
  Pfam annotation: Domain name=PP2C; Domain location=131-402; Score =88.2; E_value=2.7e-23; Accession=PF00481.12; Description=Protein phosphatase 2C
  Pfam module annotation: Pfam domain module=FHA::PP2C; Domain location= 172-248::131-402
MAAPPLVFVAAAIAALAIFVLVLVVFAFRRWWWWRRQRRPLQAAAEASTPVAVQEEDIDRPLLSENRDDHSRQRRTYPDECCATQGETHVINIENDTSEEFRLGSTLRRTSPAKLTTPAQKHRRVSGDDYHNGSVPLKDSTYHSSLDLEVIAGPSHGISCSRQSSRPSMLPITLGRVPPSDLVLKDSEVSGKHAQINWNAKTLKWELVDMGSLNGTFLNSQAVHHPDAESRHWGEPAELAHGTALLIWFDQNKDCFAQCANLGDSACVMSVNGKTIDMTEDHRVASATERARIARTGQPLKDGEVRLNGLNLARMFGDKFLKEQDSRFSSEPYLSQAVRITKACTAFAVIASDGLWDVISTKRAVQLVVEGTERYSGDSASAAKVANRVLDEARSLRTKDNTSLIFVDFDILRTDP

SEQ ID NO: 75519 - protein, 98 aa, Zea mays
  Coding DNA Sequence Number=SeqID_32144
  Subcellular localization annotation: CTP_CleavageSite=69; ConfidenceScore=5.65e-01
MQAACNHAKWAHFSDFQHAQHGGPGPRVMQPTRRMLRASNCTVTCATTAPPRLRNRYRDSRRPSARPSSASLARRDRERGIPRKGSFPVKEPGSEPPY

SEQ ID NO: 75520 - protein, 42 aa, Zea mays
  Coding DNA Sequence Number=SeqID_32145
MRLHTLREGSVIQPIVVVRGNEMVLVAHQGEWEVAAHPTSLS

SEQ ID NO: 75521 - protein, 358 aa, Zea mays
  Coding DNA Sequence Number=SeqID_32146
  Homolog annotation: Hit_ID=Q60DN1; Match level="QueryCoverage=9%, HitCoverage=12%, E-value=9e-08, Identity=79%"; Hit description =Putative uncharacterized protein OSJNBa0038E17.27
  Pfam annotation: Domain name=DUF761; Domain location=51-357; Score= -122.7; E_value=0.0058; Accession=PF05553.2; Description=Cotton fibre expressed protein
  Subcellular localization annotation: CTP_CleavageSite=72; ConfidenceScore=5.03e-01
MAPFAPPLDPPLHSGVQQDRQSTHHPAEPAQRPSHCHTDRGLVALASTKVRAMLGVVGTLPRRHRQAIARVSVSALVASLPLLYVSLLRPPPAALAGDTAFWFLMSNCVIAAIVATADDAGTLFFGSSNDDDDDPPRDEERDDGHVSSPVPFAAVNDEAAVVVTTMKGRSVQEEVVADSNPVDLLDLQPNHHMLVSALVRQRGERHEAAMERNTDDKNNTAVMMVVEGQGEEEVVEVGGGEIASPVLQASDDRVLAEPPETETEPWAPKLVTSKSLPDQEEAANQEWPRAPDELPRHGKGGGGRLRRSATDASKSAAEERESDYYWQLSDEELNRRVEDFIARFNRQMRLQIEQEAAI

SEQ ID NO: 75522 - protein, 289 aa, Zea mays
  Coding DNA Sequence Number=SeqID_32147
MDGSLDRLRRDNVFGCETVGAPYLTYTQWLNEFAQRSYGVAPTQQVWQRSGAPFGGAPNHPDVSGKLASCLELLMKLQVWQRTGAPFGGAPDHSGVSGKLASGLELLMKMRVWQRAGAPFGGAPGYSGVPGELASGLELLMKLHVSDAPFGGAPNHSGVPGKLASGLELLMKLQVWQRTGAPFGGAPNHSGVSGKLASGLELLMKLRVWQRVGAPDYSGVPGKLASGLELLMKLHVSDAPFGGAPNHSGVRGKLASGLELLMKLQCAGIEGIACVSLRLATTVHFTLIL

SEQ ID NO: 75523 - protein, 249 aa, Zea mays
  Coding DNA Sequence Number=SeqID_32148
MKLLEKLVQQARLSHPISSSLVLSFSTGTGDYKLTLEGPRDKVGLKKHRIAGRRPTGVRAPGPVSVVVDNQLMGGGVPKVEAVVDNTLKVPKDLLDRVEVWLTRIMHVEIDLLDNIRDVEHDEGEILKSISETVASNKVTNRGTVARELGLYYPINALSDTGRIRKYKYPVNSRITRVGYGYPTGSANPRAMPIPHDCKMLRVSHFIRPTHPLAPPYIAKVGLILVSVRAQGADRRATESEQLRVECSS

SEQ ID NO: 75524 - protein, 436 aa, Zea mays
  Coding DNA Sequence Number=SeqID_32149
  Gene Ontology: Mol. function=catalytic activity; Cellular component =chloroplast; Biological process=metabolic process
  Homolog annotation: Hit_ID=Q10G39; Match level="QueryCoverage=65%, HitCoverage=71%, E-value=1e-159, Identity=97%"; Hit description =Pyruvate dehydrogenase E1 component beta subunit, putative, expressed
  Pfam annotation: Domain name=Transket_pyr; Domain location=122-292; Score=155.5; E_value=1.5e-43; Accession=PF02779.15; Description =Transketolase, pyrimidine binding domain
  Pfam annotation: Domain name=Transketolase_C; Domain location=305 -427; Score=165.0; E_value=2e-46; Accession=PF02780.11; Description =Transketolase, C-terminal domain
  Pfam module annotation: Pfam domain module=Transket_pyr::Transketolase _C; Domain location=122-292::305-427
  Subcellular localization annotation: CTP_CleavageSite=63; ConfidenceScore=5.41e-01
MDLGGARAHLQSQRLWAVTSAAASSPLPVRPSRLVLSAIVAAASIPPPVHHRHLRPTKPNSISSDYKRNPPPLPRTSALRIPQTPDPPNGHRIFAARCGPGHRSPRRLPIHLRGEGRAHGIGTGGTRKAGKGGCAIEHVRRMLAITVVLTKVTKGLADTFGDLRVLDTPIAENSFTGMGVGAGMKGLRPVVEGMNMGFLLLAYNQISNNCGMLHYTSGGQFKIPLVIRGPGGVGRQLGAEHSQRLESYFQSIPGLQMVACSTPYNAKGLMKAAIRSENPVVLFEHVLLYNLKEKIPDEEYVLCLEEAEMVRPGEHVTILTYSRMRYHVMQAAKTLVNKGYDPEVIDIRSLKPFDLHTIGNSIKKTHRVLIVEECMRTGGIGASLRSAIVDNFWDYLDAPIMCLSSQDVPTPYAATLEDATVVQPAQIVAAVEQLCA

SEQ ID NO: 75525 - protein, 68 aa, Zea mays
  Coding DNA Sequence Number=SeqID_32150
MAKDELRSGSLCLRRRLQFPFNTPMTWFEIHLKNILVIAYERDMIKGFASSKVIARNNGLRQYTRLRR

SEQ ID NO: 75526 - protein, 400 aa, Zea mays
  Coding DNA Sequence Number=SeqID_32151
MEHTVSMRIRRMREVLHIVDDAMLEAFTVGQATALPPVHEIPERRVQVQNVHFCVLHGWTAVVPLPVVECGLAIASPSPPVPVVDVGSSASAPMDVDLEAPPHPPPTATAVTRRSPSPSAPVVVGTIAARRGQPPRAVDAPRGRIILTGHRPKWGGPIFLLQWEGLMALDPAATTAVWGEGVGKRLGPCAGSGGARSARRCSSTWSSGRAAAQQGPRSGLARRVRPSAGDGTGRRCVAAVAWPSRPQPPQRGWGRAAPLARAPWRPSTLARTGTAGPRASSSKARQAPWWSHGRAGKEPRRRLELAAPFWRLLLEGALHPGARSAPWLDEARKPGGLRPGGSWELLPLATARKALVVVAATGVASLAGPACRPPGRCLFGMAGRLGCFSEPKMVYIYPFF

SEQ ID NO: 75527 - protein, 54 aa, Zea mays
  Coding DNA Sequence Number=SeqID_32152
MPLVSMLHCRALHLMPGAACMTVLSARDPHNDIARIARNFIIKMNLFVRQITIR

SEQ ID NO: 75528 - protein, 471 aa, Zea mays
  Coding DNA Sequence Number=SeqID_32153
  Gene Ontology: Mol. function=protein serine/threonine kinase activity; Cellular component=cytoplasm; Biological process=protein amino acid phosphorylation
  Homolog annotation: Hit_ID=Q6ASU0; Match level="QueryCoverage=80%, HitCoverage=82%, E-value=1e-135, Identity=67%"; Hit description =Kinase domain containing protein
  Pfam annotation: Domain name=Pkinase; Domain location=109-433; Score =222.4; E_value=1e-63; Accession=PF00069.16; Description=Protein kinase domain
  Pfam annotation: Domain name=Pkinase_Tyr; Domain location=109-433; Score=-26.3; E_value=8.6e-11; Accession=PF07714.8; Description =Protein tyrosine kinase
  Pfam module annotation: Pfam domain module=Pkinase::Pkinase_Tyr; Domain location=109-433::109-433
  Subcellular localization annotation: CTP_CleavageSite=77; ConfidenceScore=5.83e-01
MAAPASSSTAAPASSPPHKPPNNAGSTMLEPQSPSPYPDAAAPVASSVSSASCCSSSSSGGSSQADRSSTFSVDSSSAATPSSSPPRPHRASDVAWAPIRGRALGPRDFTLLRRVGAGDIGTVYLCRLESQSQAPEGSACEYAMKVVDRRALAKKGKLARAAAEKRVLRRLDHPFLPTMFADFDAGTDLSCIVMEFCRGGDLHSLRHRMPGRRFPLASARFYGAEVLLALEYLHMMGIVYRDLKPENVLIRGDGHIMLTDFDLSLESTASPALEDARSVVGDKDDDVPEPAPTCLPIPELQLLRLRRWKRRAAPRPRFVAEPVDARSSSFVGTHEYVAPEVARGGGHGAAVDWWAYGVFLYELIYGRTPFVGESNEATLRNIVRRPLEFPAAATAHGDSAAARDLIARLLDKDPRTRLGSKRGAADVKAHGFFKGLNFALLRSTPPPVVPPPAAPHRCDKAADVQQLFDHF

SEQ ID NO: 75529 - protein, 104 aa, Zea mays
  Coding DNA Sequence Number=SeqID_32154
MEEPANAKGAFRHSDQPCVGEDAVGAIFDRHKRKVGHNEKSNEGVDRQSSAKGRRGRRQRVRRVDGSGKPDGKKASNRENHRPVRKSSSKPPCPNHLCQVSTCL

SEQ ID NO: 75530 - protein, 205 aa, Zea mays
  Coding DNA Sequence Number=SeqID_32155
  Homolog annotation: Hit_ID=Q109X3; Match level="QueryCoverage=76%, HitCoverage=80%, E-value=9e-40, Identity=57%"; Hit description =Expressed protein
MARRTTREPAAAVVLMLLLAAATAAAAAEEEALPMEAYFSAAELARIAGYGEEPVSSVSVSGQLTCELCLRPGSPLLALEMAGAKVAVTCDCESQHPIPSDEPDSLALVAATTDESGNFTIDLPARLHATPDLEKACAVKVLRLPAGSGSCRLRHRAGDAYRLRLASAEDGARAYTAGVIRLRDGDTPSDRCVGARGGPRVSGRR

SEQ ID NO: 75531 - protein, 289 aa, Zea mays
  Coding DNA Sequence Number=SeqID_32156
  Gene Ontology: Cellular component=extracellular region; Biological process=cell wall organization and biogenesis
  Homolog annotation: Hit_ID=A2XK27; Match level="QueryCoverage=94%, HitCoverage=72%, E-value=1e-87, Identity=58%"; Hit description =Putative uncharacterized protein
  Pfam annotation: Domain name=DPBB_1; Domain location=72-154; Score =115.5; E_value=1.6e-31; Accession=PF03330.9; Description=Rare lipoprotein A (RlpA)-like double
  Pfam annotation: Domain name=Pollen_allerg_1; Domain location=166 -235; Score=49.1; E_value=1.6e-11; Accession=PF01357.12; Description =Pollen allergen
  Pfam module annotation: Pfam domain module=DPBB_1::Pollen_allerg_1; Domain location=72-154::166-235
MASTLQLLFSIAITALAFFLHPCASTDEFHRELYGWSNGIATWYGAADGAGTDGGACGYQNAVDQPPFSSMIAAGCSSIYDSGKGCGSCYQAVCTGNDACSGNPVTVVITDECPDCPCPDEQVHFDMSGTAFGALAKPGQESQLRGAGAIQIQYTRVQCEWPGVDVTFSVEPGSQPELPGRADRTQGGTTGQWVPMQQSWGAVWKINSGSVLQGPFNIRLTFSSGRALVASNAIPAGWNAGVAYRSGGVAVTRARPRSGACRGYEAAGTLDGLVHRHLVVLLLLVLLTL

SEQ ID NO: 75532 - protein, 818 aa, Zea mays
  Coding DNA Sequence Number=SeqID_32157
MSSSSSSSDTTPPAAASSEETLSSVMVEELRAGDSVDFGVSRMTSARVEDMQRLGYFGGGFARAPGTEEVPEPEVAEEDADEGALRCAAGQSSGRDLVEEFVAYGVWPLAHVWVLGEVCPRQMPFHGGRVVRSPAFALNLRNRDPAAFVRDAEDGAVRLVGRYVPRTEGQRSFDIRGSNDRLNRVFELNQLPYDGYPGQDEADRRGKKPAVETGDDPAPAAAPPSKKRKLGTAMGGIGVSDSFARDLMRTCAAPGERMSSPELRESSARMLRVTGGCWPRNVPIPCAAEEDCFTSRMVHQWRVFPYGRNIGAVVWAVMDKDRQGVAQKRQATVRIHEARPKRQRGNAKAAASGGGKPPLAAKAGASAPSKAPEATAGAGGSRPTKVVPAASGVAEASKATRTSLPPGKRVADFGTDINVDDYLGGSDEGQLAIVAPAAAIATAAQAPKARGEILGARGEVPALALVRDEEGAATRRLKGVTEALSQATEALSQVADFTSRTASGALTAALSAEVERLRTQHADAVREKSASDSKCRNLTDKVAALEREKVDLRRQLAAERREANEAIAKEQAAQADAKLARAEGNLAKELAEQLQGRLTALEIRAKEAEAAMRAEAERTRTQLMDTYRELVGAGGAAGTSNRCGGWMSYASLVTCEGAMNTLSREGCRHFEAFDQVDEDFGRDIYKVEDPVVKESAGALYDQMWGLYGREVVRERAEAARAQAERGERVDDFGALDSALPDLGSTLAEAVTGVALEPTPETAAIATAAPPPAATGEGGADAPATAAPSAEGSAAEATAEPTAEPTAEASAAPGPSQVA

SEQ ID NO: 75533 - protein, 215 aa, Zea mays
  Coding DNA Sequence Number=SeqID_32158
MPVSPARARAYKASLGVDRTPPRTLDLTGARDHRRLPCKQRARGHPIPRHRRPACRALPSHARPSEETVHASVKLPEQGIGLCLAGEAGPGSPDFTRPPVNVDWIVVVKPEHPPPTRSPACARGPVDSGHHCRRAVPRCDRQDLSKPTPPLVGPLSPPHTYSYSLHSIDCNLADGEYVLVPEQGVAQEVAPDPAPEPAPEDLPAPALEGKPWFYA

SEQ ID NO: 75534 - protein, 257 aa, Zea mays
  Coding DNA Sequence Number=SeqID_32159
MGRSKPGCDLGPTLSFKDVHHPRWGGGRAEPELYLPRGFVGHPLLRRSRERALAGPAGGSDFDNAELVDGGRRQPQRVEIVGLAPGGPSCRKAAAAPCAREDRPRCRALLGRRSCSGAVLPLHRTDAGVDQLKPRVGLTSLEDGWPRPREPRTASPSEARSDLAEGVVDAEGAAAPSSVKTRACRIGLSCSVDVCASESCFSRKVMSEKVMSEPKHRVAHLEVSGPDPSGVVASQGLLALVLGEPYSRSVGKTASAP

SEQ ID NO: 75535 - protein, 53 aa, Zea mays
  Coding DNA Sequence Number=SeqID_32160
MAPKRKTANSSAAVIPAIDPNSQLPFAEHSAAEGQGLSGISLPRAGRLNPSYQ

SEQ ID NO: 75536 - protein, 145 aa, Zea mays
  Coding DNA Sequence Number=SeqID_32161
MGKNNKRKREPTPPSEEFGDSEYSEEEFSFEPEGSPAPASPPASSDDSDDSQGIAAEVWTYIRAVERAGLEGSDESEYSSDEEDSDGGDEGEDDDDDDDDGDGSGRGGGDGSRDSIKGDSSRGSTKGSSRGSTKGGGGGRGRASG

SEQ ID NO: 75537 - protein, 88 aa, Zea mays
  Coding DNA Sequence Number=SeqID_32162
  Homolog annotation: Hit_ID=Q6JB14; Match level="QueryCoverage=59%, HitCoverage=57%, E-value=9e-09, Identity=63%"; Hit description=MEG2
  Subcellular localization annotation: CTP_CleavageSite=66; ConfidenceScore=5.30e-01
MEYRKRVDALVFFSLLLLGYFAAHAHGKSVRTTTAPVVTGQPNKSLVQGRSSGTLMLKVVPEGAPSQETSQKGKEVAPNEGGSSEDRK

SEQ ID NO: 75538 - protein, 59 aa, Zea mays
  Coding DNA Sequence Number=SeqID_32163
MESVAHPKACLSRRARLNQVAGVNIKKAPIANLGETVRAKLQQLSMMNKFKKHGLHKGV

SEQ ID NO: 75539 - protein, 134 aa, Zea mays
  Coding DNA Sequence Number=SeqID_32164
  Homolog annotation: Hit_ID=Q6J9V9; Match level="QueryCoverage=76%, HitCoverage=35%, E-value=3e-32, Identity=72%"; Hit description =Putative uncharacterized protein
MGSCSSNSSKKKATQVHPIWGLGRWKSAMNAKRTGKGDIPKGILPSEGNGPRALLLIRGSKVAPSGVRQPPQSTRALCPLLIRGLKAGPSEGFDRRPRARRVRDDPGYVRYMAEARATLSRYPRTFSRPAGTIL

SEQ ID NO: 75540 - protein, 623 aa, Zea mays
  Coding DNA Sequence Number=SeqID_32165
  Gene Ontology: Mol. function=RNA binding; Cellular component =heterogeneous nuclear ribonucleoprotein complex; Biological process =gynoecium development
  Homolog annotation: Hit_ID=Q7G2G8; Match level="QueryCoverage=76%, HitCoverage=93%, E-value=2e-76, Identity=45%"; Hit description=KH domain containing protein, expressed
  Pfam annotation: Domain name=KH_1; Domain location=169-237; Score =47.5; E_value=4.7e-11; Accession=PF00013.20; Description=KH domain
  Pfam annotation: Domain name=KH_1; Domain location=536-598; Score =45.3; E_value=2.2e-10; Accession=PF00013.20; Description=KH domain
  Pfam annotation: Domain name=KH_1; Domain location=60-126; Score =46.7; E_value=8.4e-11; Accession=PF00013.20; Description=KH domain
  Pfam module annotation: Pfam domain module=KH_1::KH_1::KH_1; Domain location=169-237::536-598::60-126
MDFSLCGQKGTTRLILMDYDKSRRSNSKKRRHSNSDDGKRKRLSSRHDDTSMSSEPIETIYRILCPAKKIGSVLGRGGDIVKALREETKAKIRVADSIPGADERVIIIFNYQNQPELTDEAAEKQISDGLGNMKPHCFAQDALLKIHDKIVADEIYDEVAHDESSDDVTARILVQGNQVGCLLGKGGSIIQQLRSDTGAGIRVLSSENLPQCALQSDELVQLLGKVGANVRRVEQQTGARIKVQEIDKDASGERLIIVSSNEIPTEPISPTIEALILLHDKVAGPPAIARGALTEIASRLRTRTLRDTSTANNPPPFAPSDDPTVDMPSRKLTLYGGPTNDTPYGRPANDPLYGRPAIDPPFGRPTNDRPYGRPAIVPPFGRPTNDPPYGRPANDPPYERPTNDPPYGRPSSTIAYGRPNRSAPRDPSDAYPVDYFSKREHPSGGPMFTSNAPSAAYERYAAPTHFPTREPPSTFSHRSYRDHMPTDSYSSRGTQKLDITRDGNSDAYDYTEAAGQIHGLEDYRGLPSASGRFSSTIELRIPNSSLESIVGVGGVNLAEIRQISGARLRLHEAHAGSSESVVEIQGTLDQAKAAQSLLEGFISANSRQQQSHSSRMPLYPRWG

SEQ ID NO: 75541 - protein, 152 aa, Zea mays
  Coding DNA Sequence Number=SeqID_32166
  Gene Ontology: Mol. function=kinase activity; Cellular component =ornithine carbamoyltransferase complex; Biological process=amino acid metabolic process
  Homolog annotation: Hit_ID=Q6QP54; Match level="QueryCoverage=63%, HitCoverage=34%, E-value=4e-12, Identity=52%"; Hit description =Putative kinase
MAHRTVRGADIQSWRVQSRSPLGHRTLSGGIPDSPVNYSEASLRIPEGEELGVEFPGAPDSPPKVGRGGDSSEVEAKSEPWGRARQRPSFEVEVESEPWGQARRSLSSEVEAESEPWGRARRRPSSEVEAESEPWGRARRRPSFEVEIESEP

SEQ ID NO: 75542 - protein, 808 aa, Zea mays
  Coding DNA Sequence Number=SeqID_32167
  Gene Ontology: Mol. function=signal transducer activity; Cellular component=melanosome; Biological process=protein transport
  Homolog annotation: Hit_ID=A2Z8X6; Match level="QueryCoverage=100%, HitCoverage=100%, E-value=0.0, Identity=63%"; Hit description =Putative uncharacterized protein
  Pfam annotation: Domain name=BRO1; Domain location=10-398; Score =568.3; E_value=8.1e-168; Accession=PF03097.9; Description=BRO1-like domain
MASAAGSSNVMLAINEKKTITTDLYRPLRLYIASTYSEREAAAADDDLSVVCDLRAAVEKPSLPDPSSLEQRRDALLAYARALALVEPRFPISPDRAHVHSLTFTWHDAFKGNKKCALASIHLEKASVLFNLGAVYSQIALAADRSTDVGIRIACGAFQSAAGAFAWLRESGAAAKAVAAGTTTVDITPECAGMLEKLMLAQAQECFFEKVIGGGKPPALCSKVARQVGILYEEAYTALSASPLSQHFDKTWVSHVQLKAAQFYADACYRYSLDLHEKEEIAEEIARLKIGMSALADAKKTTKGVAAQLLDSVNKLESNMKTNLERAMKENDRVYLMRVPAAGSLGALPAASLVKPTSLAEVLDASKERLFSSLVPDGSMKALSKYTEMVDNSIRTQAEKLQQASEITRVRLKEMDLPDSILSLEGNITLPMDLKEDVEAVQISGGPAGLESELQQLRDLSRVNQELLVQTEELLQKEANEDAQISPIMSLDGNEDAIVGALKQSLRQLESLGAQRAGLEDMLKEMKRKCIEKIHFGQDDILPKLMVGVGSHDDLFKKEIAKYDPICADIADNIVAQEQLLLQIQAQNEQFAAVFNLEDYKAARERCYKQIAAAVVKYQEFKKNINEGLNFYVTLQEAIGKIKQQCSDFIMTRNIQCREMMEDVQRKLPGFRFSSSSRSSMQRNAASVPPDESSPSPPPPHAQAPYASPPGVDSRHGYSQPEARPAYSQPYPPSYGATPQQPTYGAQHPGQYQPPPGHDCGQPAYPGWRGPYPYYNAPQPQQSVPCPQAPYNATGAYPPHQSNYYRPQ

SEQ ID NO: 75543 - protein, 107 aa, Zea mays
  Coding DNA Sequence Number=SeqID_32168
MVVVSVVAKGFSDRHLFSDRPSVANIVYLATNRGFLYYRFSNQPCSRADHSQKHQSYTNASSSSKALRQPLQLLVSSYLKEVAISYLSWGKECTYISNSDRTLEPRE

SEQ ID NO: 75544 - protein, 191 aa, Zea mays
  Coding DNA Sequence Number=SeqID_32169
  Gene Ontology: Mol. function=nucleoside diphosphate kinase activity; Cellular component=mitochondrial intermembrane space; Biological process=CTP biosynthetic process
  Homolog annotation: Hit_ID=A2Y865; Match level="QueryCoverage=91%, HitCoverage=100%, E-value=5e-63, Identity=71%"; Hit description =Nucleoside diphosphate kinase
  Pfam annotation: Domain name=NDK; Domain location=63-176; Score =206.9; E_value=5e-59; Accession=PF00334.10; Description=Nucleoside diphosphate kinase
MSFLVPDKNGAGSLWYLPSVCLCSTTVLTLPFHHARLVFLLGVLADVVLGFDSLDPYQSTCASRFERKGYKLVAIKLIVPSKGFAEKHYHDLKERPFFNGLCDFLSSGLVLAMVLEGEGVIKYGRKLIGATDPHKSEPGTIRSDLGVVVGRNIIHGSDGPETAKDEIALWFEPKELVSYTSNAEKWVYGVN

SEQ ID NO: 75545 - protein, 160 aa, Zea mays
  Coding DNA Sequence Number=SeqID_32170
  Gene Ontology: Mol. function=transporter activity; Cellular component= mitochondrial inner membrane; Biological process=transport
  Homolog annotation: Hit_ID=A7PZS6; Match level="QueryCoverage=60%, HitCoverage=28%, E-value=1e-31, Identity=70%"; Hit description =Chromosome chr15 scaffold_40, whole genome shotgun sequence
  Pfam annotation: Domain name=Mito_carr; Domain location=66-160; Score= 61.9; E_value=2.2e-15; Accession=PF00153.18; Description =Mitochondrial carrier protein
MEIHGHLSSTFFVKLSHELSQHSRVRQATIGGVTIDGLLAPAARFSIGLAFVLIEFFTTQCAPDIHVVTRLECGAVAGTIGQTVAYPLDVISRRMHMVGWSHADSIVIGQVKEALQYNGMIDAFRKTVRHRVGALYKGLVPNSVKVVPLISIAFVTYEVV

SEQ ID NO: 75546 - protein, 108 aa, Zea mays
  Coding DNA Sequence Number=SeqID_32171
MVATHLHPLSCGSGTKSTSNISRHGVAPMNKACLPGRYGSFWKELDGVKQVWKNRKDLTVRTLGLRLYSRDQRGADLLVHQRGLADPTNNETQQGSVRKLPHLSVTEE

SEQ ID NO: 75547 - protein, 289 aa, Zea mays
  Coding DNA Sequence Number=SeqID_32172
  Gene Ontology: Mol. function=nucleotide binding; Cellular component =membrane; Biological process=response to stress
  Homolog annotation: Hit_ID=Q655N4; Match level="QueryCoverage=57%, HitCoverage=22%, E-value=7e-47, Identity=64%"; Hit description =Putative heat-shock protein
MSVVGFDVSNDTLVAVAAWQWGIDVLLNTESKRESPAAVAFSHNARLIGCHAASASSAHAPFSSVKRLLLGATGRNPDSSLFRDLPRLPFSVSDAAGGGAVVHVDHIGRIALSPTHLFSMLLAYLKQLTDANLGSTPVADCVISVPCYFTQAQRRAYLDAAAIVGLRLAKPSLPATWLLLHALFCATSMVVGFRFSRLIVFLLFLPTPPINPAEHLVLLVSSPDLIHHIVFVGRHPIRVRAWPHGDPSELLKAHCILAAVQNVQHSTKRRGTRPVRHVIAVTPTTTSAL

SEQ ID NO: 75548 - protein, 129 aa, Zea mays
  Coding DNA Sequence Number=SeqID_32173
  Gene Ontology: Mol. function=galactosylgalactosylxylosylprotein 3 -beta-glucuronosyltransferase activity; Cellular component=membrane
  Homolog annotation: Hit_ID=Q50HV3; Match level="QueryCoverage=62%, HitCoverage=19%, E-value=5e-29, Identity=80%"; Hit description =Glycosyltransferase
MASRLEWSGFVVNVWALWEDAKERPVWVCNLSATDDTDPRAASPLPLVTDAGRVEPLASCAQATLMWSSLRSDSEVKFPHEYNGGTSSCSGEGGGTSRAGQLRDGFGAQWFRGWWVGSRSGTVVWDQMV

SEQ ID NO: 75549 - protein, 85 aa, Zea mays
  Coding DNA Sequence Number=SeqID_32174
  Subcellular localization annotation: CTP_CleavageSite=44; ConfidenceScore=5.23e-01
MVDGGARSPASSYQPNNLATGALVRLTPNLIPPNYFPSINSRVRALNHTAHGDSARNGPTKMFPMIQWILAQLDGSESIKSTYEY

SEQ ID NO: 75550 - protein, 47 aa, Zea mays
  Coding DNA Sequence Number=SeqID_32175
MAEAIMDQVVNQLLNEAAEVVLREDGIRVDFSRFAFYLGGISVYFSL

SEQ ID NO: 75551 - protein, 278 aa, Zea mays
  Coding DNA Sequence Number=SeqID_32176
MTSHGSSDEGNAQSHTDGLAREGFPRILWEVLQGAGYTTPPQYAVQLFEKHRVPRCRPGWRSLDSESFGYRAEDTIEAIALHGLTTFCGFHPLELSTHPIGLFPAEKEDDPMWKDRVEHAKDIWAIYPSQTAHLTVRCMNALYRLQLMRGEAMSHLMALLEATKITLDNREELVVDLSTEMVEKDLQVEQLSNEIQELEELVGTRENTIEVLEYQLINTQQQLVEANQHLDMHHQEIQDMEANEDVDIEGGEEPASSLDTAGSGRPPSPESSVASFAH

SEQ ID NO: 75552 - protein, 130 aa, Zea mays
  Coding DNA Sequence Number=SeqID_32177
MGAHIQEIALDARRRPAPDFCQDSHACDLGELLNTGRRTLPRVRRALSTPAPDPACPAPHRAEPCPCPLPAPVPIKPPQASTTLLRACSTSPEPETTGVCPADSVPAATRSPATVDRPAEPFPAMPDPRK

SEQ ID NO: 75553 - protein, 235 aa, Zea mays
  Coding DNA Sequence Number=SeqID_32178
  Homolog annotation: Hit_ID=Q6QP51; Match level="QueryCoverage=57%, HitCoverage=60%, E-value=8e-26, Identity=51%"; Hit description =Putative growth-regulating factor 1
MVLGPFTNDLGSFHIRNKDLGYPHTSLGALVFAPNIFGNYFCLVCYRQGRSDRSHFALSLTDLTGKQRRSPYSDCCATHQGEADNSQVQPRSQQEAPPRPTLGLGLGRMSPPRSTPGLGLNLGLGRRSPPRPTPGLGLNLGLERKSRPRPTPASGEVSASPDLGLGPTAPRGIHHYPTPSLAQTTREQDRRPIWLARVTSNDGSPRATMTTVVLSPLRKLGDISRIPASPTAVLL

SEQ ID NO: 75554 - protein, 375 aa, Zea mays
  Coding DNA Sequence Number=SeqID_32179
MGSTRVAFVLLLLEERDLAGVLPALSAAQHIIRREGGTRVLGRSRSRSCGENGSEDLPVRFGATAACWCGVGGQVADVVGAEVVVAIGEAASAEAVASADETVSATCAPGLQLFGFNGWFSSPVRGRERGPSSGSVWPGPSLLLSSHLRRRSLPRCWCSGRRRATWSLLSRKPSGVEVVHTRGSGTEVGFVMNLRPLCDELEPEAAQRRLELGQVIRERDQPRSHAAEAMSWAEVPGGQLAEATEGPTEVSARAGAPAEIRAMRAQARCWRPPSRWRSFRPCRHPRPGQIPPKVETTSRVLLLRLPMSEPAGTVCLYREGMKVVLAEKFLSVRTRSIVESLIRATLLSKQSKSAKDVLAKDFSEENFDAEGVPPF

SEQ ID NO: 75555 - protein, 149 aa, Zea mays
  Coding DNA Sequence Number=SeqID_32180
  Homolog annotation: Hit_ID=Q6J9V9; Match level="QueryCoverage=46%, HitCoverage=24%, E-value=9e-12, Identity=57%"; Hit description =Putative uncharacterized protein
MTIGEGMQPGCMMKILEAERWLKGANPREVALLQQQQDEGNTGAPHPGARKGKRHLWQVKRASFHLCHDDRVKKGTEKGDISKGILLREGSGPRALLLIRGSKAGPSEGFDSHPRSLGLQALLLIRGLKAGPSEGFDNRPRAPGLRAHY

SEQ ID NO: 75556 - protein, 71 aa, Zea mays
  Coding DNA Sequence Number=SeqID_32181
MGIKEYLNKGPQCARLSRQKRTKAAKTNQGSQHECLLQLAAAATPTSKLQILYKKPAASAAAVLLAAVNMP

SEQ ID NO: 75557 - protein, 143 aa, Zea mays
  Coding DNA Sequence Number=SeqID_32182
MRCMSKRSPHLVTTGALMAIQSQGGKGKMSKKWSNQDLGTSQQEKVRIKDQAQVWRSSREIKPSRWKVHHNRVKVLNAKLTGFNTSKQTTDQTKDGSKKSFEVPSAREKVKETRNPKLGVKKETCGIRVDRVKKSYGASRNTT

SEQ ID NO: 75558 - protein, 73 aa, Zea mays
  Coding DNA Sequence Number=SeqID_32183
MARSSVTVRESETEREEEDRSTEASERRRRDEIARAAERSGRAGVARRHPLPVAQQAPWIGLDGSGNGQEGFF

SEQ ID NO: 75559 - protein, 609 aa, Zea mays
  Coding DNA Sequence Number=SeqID_32184
  Gene Ontology: Mol. function=binding
  Homolog annotation: Hit_ID=Q6Z4F2; Match level="QueryCoverage=91%, HitCoverage=89%, E-value=0.0, Identity=73%"; Hit description =Putative nodule-specific protein
  Pfam annotation: Domain name=MFS_1; Domain location=41-503; Score =2.9; E_value=0.015; Accession=PF07690.7; Description=Major Facilitator Superfamily
  Pfam annotation: Domain name=Nodulin-like; Domain location=35-289; Score=428.0; E_value=1.3e-125; Accession=PF06813.4; Description =Nodulin-like
  Pfam module annotation: Pfam domain module=MFS_1::Nodulin-like; Domain location=41-503::35-289
  Subcellular localization annotation: CTP_CleavageSite=46; ConfidenceScore=5.37e-01
MVFDASGSRSAAAASGNPLRVILTRGFARQVLAGRWLTVFASLLIMASSGATYIFGSYSGTLKSSLGYDQRTLNTVSFFKDLGANLGVFSGLINEVTPPWVVLAMGAAMNLSGYLMVYLAVSGRTAPPPLWLVCLYFFVGANSQSFANTGALVTCVKNFPDSRGVVLGILKGFVGLSGAVYTQLYLALYGGDDAESLILLVAWLPAAVSVVFVHTIRYMPYPRRRGGGRQETSSDSDPFFCFLYLSIALACFLLVMIVVQKQVPFSRAAYGVAATPLLILLLMPLGVVVKQEYKIYRERQLDAADPPPPTIISASATDASKKTEQQPAPAPPPTTSSFCGCVRTMFRPPARGEDYTILQALVSVDMLVLFVATICGVGGTLTAIDNMGQIGESLGYPARSVNTFVSLISIWNYAGRVTAGYASEAALARYRVPRPLLLTCVLALACAGHVLIALGAPRSLYAASVVVGFCFGAQWPLVFAIISEVFGLKYYSTLYNLGGMASPVGSYILNVRVAGRLYDAAAAQQRGRGRICLGVECYRRSFLIVTAATVVGALVSLVLVWRTWTFYRGDIYARFRDGDEGPGRDGRLPVDQKREEEEREKAAANGRKA

SEQ ID NO: 75560 - protein, 253 aa, Zea mays
  Coding DNA Sequence Number=SeqID_32185
  Gene Ontology: Mol. function=Rab GTPase activator activity; Cellular component=intracellular; Biological process=regulation of Rab GTPase activity
  Homolog annotation: Hit_ID=A2ZZB6; Match level="QueryCoverage=53%, HitCoverage=15%, E-value=3e-24, Identity=50%"; Hit description =Putative uncharacterized protein
  Pfam annotation: Domain name=SUI1; Domain location=76-137; Score= -2.1; E_value=0.0013; Accession=PF01253.13; Description=Translation initiation factor SUI1
MEQRAKGLRVWRDTNRLASRLYNFKRDTEPLVSLSEEQSNDLTDGDKNQEANCSNVDDMYHGLTVNSEIDSLPDPKDQGLNKEFSYNKNLIDLKKEFCCNGTVVQDPELGPAIQLQSDQRKNGLIKFSNFKGEVSRFGPQYARPKLKRSHLFRECFKDSEHYLTYQVQSVGTLEKENMILLSESTKKQSQLFFLLMLLILIRMACNCCTASYGWRSGNNCWYDQDPSTLISDDEATPNSRRGRTMAPSRGISG

SEQ ID NO: 75561 - protein, 188 aa, Zea mays
  Coding DNA Sequence Number=SeqID_32186
MAMATAKQPDQYMDMDVPDTLNVEASESALSALLLHQPPRGNFRLLLPRAGNCISRGRPLDPACFAAGIEAGGREVGVRWRVWRRRPGTISNRRRVTHRNRSSKRGSPSSSPESRHRQTTSSSADFVQGYRQKEEKLIAAVVFLFDSLHRARSAKTEPFNSPLVDELSRALVEIDDLAKDLEDVAVQT

SEQ ID NO: 75562 - protein, 339 aa, Zea mays
  Coding DNA Sequence Number=SeqID_32187
  Homolog annotation: Hit_ID=A2XFR6; Match level="QueryCoverage=54%, HitCoverage=53%, E-value=3e-28, Identity=39%"; Hit description =Putative uncharacterized protein
MGTYSWLRYLTQGATTIVFRNLSGLLRIKLVVEEVPVDLPHIRVENGVILEDSLEEQLLKPTSLAESLAFAARSSTSAPPASAVQAPAPGGDDPDDSGDDDDEDDDDDEGGDEHVNEEADYAQQDYFMGFGPVVEHYTSMFETGHFPNLLQEVLHALGTYVRPLYETRRVSEPPRACYYITRIHARAMDAGDRGFRTLSAHESLTPLSTYAVSVSDAACRTLWSRSHTYRQQLQNTRFRHLPQRLSGGSQTSIIPGEAGEDHLNTLAGVVAGLNTDLDSVTLDLSRVHLELENAHARIAALEAQLQGLDLPEAQVPAMALSPPRKRLRYGEPGSVTRLL

SEQ ID NO: 75563 - protein, 109 aa, Zea mays
  Coding DNA Sequence Number=SeqID_32188
  Subcellular localization annotation: CTP_CleavageSite=61; ConfidenceScore=5.48e-01
MKGKSNNLEAGVLDDCNSASGKPATQDVRSRSRQAVRRALVRRARRRGGALRSASGRRAVRSAAQVGVERSAWSTAAWALGAWRLGLGVLAGCCSLDVVGLKRRWESGR

SEQ ID NO: 75564 - protein, 165 aa, Zea mays
  Coding DNA Sequence Number=SeqID_32189
MEIQALQIRLSGQLKKLRHGTVNGEGISLLRPPYRVATVASDELTGDSRFMALRHVPGHIHRIAVTHFGRLIIAGLEFGLGQRRTSVLERFGRYTSSPELCVTPSAVRDSNPKLDGGSIMAMMGSTSEKMYLCQVRKRQTFVASVQRWYPKTSTKTRAAGGKALR

SEQ ID NO: 75565 - protein, 867 aa, Zea mays
  Coding DNA Sequence Number=SeqID_32190
  Gene Ontology: Mol. function=nucleic acid binding; Cellular component= cytoplasm; Biological process=multicellular organismal development
  Homolog annotation: Hit_ID=Q6Z4F1; Match level="QueryCoverage=94%, HitCoverage=78%, E-value=0.0, Identity=59%"; Hit description =Putative leaf development protein Argonaute
  Pfam annotation: Domain name=DUF1785; Domain location=166-217; Score =92.3; E_value=1.5e-24; Accession=PF08699.1; Description=Domain of unknown function (DUF1785)
  Pfam annotation: Domain name=PAZ; Domain location=218-354; Score =128.2; E_value=2.4e-35; Accession=PF02170.13; Description=PAZ domain
  Pfam annotation: Domain name=Piwi; Domain location=498-823; Score =417.5; E_value=2e-122; Accession=PF02171.8; Description=Piwi domain
  Pfam module annotation: Pfam domain module=DUF1785::PAZ::Piwi; Domain location=166-217::218-354::498-823
MANKHEACETGTKPVVWARPLFHAKRAGPTRLRTLRVGLEQRIEPVGLEGPVLINPEPKARKTNRMLLSELVKIHGATSLAHKTPAYDGSKSLYTAGELPFKSMEFVVKLGKAGREVDYKVTIRYAARPNVYQLKQLINSQLRNTPFDAIQALDVVLRESPSLNYVTLSRSFFSKKFGDDDIGGGLECWRGYYQSLRPTQMGLSLNIDTCSTSFYQPIDVVKFVADCLQLTNPGQPFLDRDRLKLKRALRGVLVETEHQQGKRSIYRITGITSVPLAQLSFSCNEGPQLTVVEYFAQRYNVQLRYTAWPCLQSGNDSKPIYLPMEVCKIIEGQKYPRKLSDTQVANILKATCKRPQDREENIIKMVRHNNYSADKMAQVFGITVANQMANVQARVLPPPMLKYHESGKEKTVAPSLGQWNMINKKMVNGGTIHSWTCLSFSRIPLRLVDEICHELVQKCNSIGMSFNPRPVTEVQKDSHNNIEAALRDVHRRAPNLQLLIVILPDVTGYYGEIKRMCETDLGIVSQCINPKKNRNKQYFENLALKINVKAGGRNTVLERASVPNGIPFVSDVPTIIFGADVTHPTAGEESSASVGAVSFLFSVTTVSFKCSGNLEVVASMDWPQVTTYKALVSAQAHREEIIQNLGGMIRELLISFYKRTGKKPKRIIFYRDGISEGQFNHVLLLEMDAIRKACASLEDGYLPPVTFVVIQKRHHTRLFPGVHGRRDVTDRSGNILPGTVVDTEICHPREFDFYLCSHAGIQGTSRPIHYHVLYDENRFSADGLQILTNSLCYTYARCTRAVSVVPPAYYAHLAAFRGRYYDEQGSSPAPDGTSVVGGDAAAAGDDPPACRRLPQIKENVKEVMFFC

SEQ ID NO: 75566 - protein, 264 aa, Zea mays
  Coding DNA Sequence Number=SeqID_32191
MGGRPQGYWGRAATLGCVPNGPNLIHDPLGQNRVTQHHGQKRQEMSRKAKHQKAFVKQVIKEGNQIQGSARRSSGEPLYRPIGAVTGAPERWTPNRGLPKHFPSLNCANGELPSSVRVNRMGGGQLIVFPKIGGGIIQLGGPAGRGEDVRAVAQTRFGENLELELTVARLGVILDDGEAVLGVKVPFKQKAQKQRPVSGGKSLIIPSIDSLKFPKAFSFGKKMAGEGPSTKFLGDFCQRQRPSGFKDVQRIDSIPRELFYEPPH

SEQ ID NO: 75567 - protein, 381 aa, Zea mays
  Coding DNA Sequence Number=SeqID_32192
MGGLGVSDGFARELMRTCAAPGERMSSPELRESSARMLKVTGGCWPRNVPIPRAASGDVFTSRMVRKWRVFPYGRNIVAVVSVVMDKDRQGAAQKRQAAVRLVEARPKRQRGSAKAAALGRGKPLLAAKSGVPASSKAPETAAGAGASKLAKAVPPPSRVAEAAKAARALPSAGKRVADFATDICVEDYLGGSDEGQLVVVAPAAATAVAAAAPKAKGRALSAGGEVAALATVRDEAGAASRRLKEVVESLSQVADFANRTASGAFTAVVSAEIERLRTQHADAVREKSAADSKCRKLADKVAALEGEKADLRRQLAGERRETNEALVKAQASQAEAKLARAEGNIATECAEQLQERLIALESRVERAEAAMRAEAERTRT

SEQ ID NO: 75568 - protein, 38 aa, Zea mays
  Coding DNA Sequence Number=SeqID_32193
MPRIMVNWYFLGGYGFWVDLAIHPATRYKNSQQNLDSN

SEQ ID NO: 75569 - protein, 145 aa, Zea mays
  Coding DNA Sequence Number=SeqID_32194
MATQFRDEGGASEVLFTEGWQRRGGVPRDVASPPRNLGHGEQFRRAGPGFPSRAATATFLPTRWIPGSLHRGPGRRYADGRSRRCFCPFGDGELREGVAAAHAKLRRREERGVYADAIVDITPQTITLNQRSKSDKYHKNKHSSV

SEQ ID NO: 75570 - protein, 97 aa, Zea mays
  Coding DNA Sequence Number=SeqID_32195
  Subcellular localization annotation: CTP_CleavageSite=69; ConfidenceScore=5.49e-01
MAGIPHRSSSGPPEASSTPFFPLCPWIRGLFPTTEFTMAFSPSLPNPGDPGATLARVGLNPGDLTTVERSSAARSCSSPPAPVFLQIEPWTFKYSQN

SEQ ID NO: 75571 - protein, 154 aa, Zea mays
  Coding DNA Sequence Number=SeqID_32196
MDPRAQQGNARGGEVACGRRVREGWATIYRVGAPEHASQSPTGSFDFKTKVCDQNKGQASSKDVAEGASAQHINNAEASDNKDQHWRPPPVNSSDHLRQASTFVMPLKKTSRPGAALQPLDVNQETLREARSQKRKATIPTPQEEGARPRDQGP

SEQ ID NO: 75572 - protein, 97 aa, Zea mays
  Coding DNA Sequence Number=SeqID_32197
MKLAKGYAGVLIQAVRSRSDDDFAHRAPAAAPSFQPDGSQGHSTEDRVDDCNLADGVYVLIPEQVVAQEEVQEPALEPATEDLPAASSFEGKPRFYA

SEQ ID NO: 75573 - protein, 180 aa, Zea mays
  Coding DNA Sequence Number=SeqID_32198
MTSPTPINGGETRFSFDHLSNEGFPSILWEVLCSAGYPTTPLHMVQLYEEHRVPRCRVWLTLESHPLQLGWRSLDFEPMGFRANDTTEAAALKALTTFCRYHLLEMVMHPLGLFPAEKRDDPMWCNRVSHVKDVWAMHPDQVGRITVQCMSALYRLQALQSNAIAHLTDVAHTTKITLDS

SEQ ID NO: 75574 - protein, 162 aa, Zea mays
  Coding DNA Sequence Number=SeqID_32199
MPWIWDRVSLNPAIPYMKRQSRTGSGEMARVACTLLAKDRLKGVKFHCKMLVCDLCLLNLAILVLSEVFETRTGACGPNNLGGSATLPTDFTRHLTSNAFSHASYGGYKCGRFTAATGENWSIVRQGRTLQDMVDAVTWPSTLPPGWTVEWDAASIGEDKEE

SEQ ID NO: 75575 - protein, 81 aa, Zea mays
  Coding DNA Sequence Number=SeqID_32200
  Subcellular localization annotation: CTP_CleavageSite=52; ConfidenceScore=5.05e-01
MATYEQRSTLTVNSAAQYTRQKSEQQVSPIHPPSRRISTTTQLVSLALITIELETRKKEEEKQSKRKNSNEHNFSLSLVTI

SEQ ID NO: 75576 - protein, 59 aa, Zea mays
  Coding DNA Sequence Number=SeqID_32201
MSRCGSPAVVTGGGLAACAGGRARRWCVLQRAQGGRVKSKCSGSFMGALEWIGSRICEI

SEQ ID NO: 75577 - protein, 161 aa, Zea mays
  Coding DNA Sequence Number=SeqID_32202
MARAHAYKAPRDLDRTPPHALDLTRAQTHRRLPVHGKVCHLFDLVLKVKENRKDCNLADGEYVLVPEQGAAQEVAPNPAPEPAPEDLPATALEGKPRRLPSSRDLRRGLPFRLWWVQVRSLHDNSRGSLEDMVAGVTWPSILPPGWTVEWDRASAEEEHEE

SEQ ID NO: 75578 - protein, 68 aa, Zea mays
  Coding DNA Sequence Number=SeqID_32203
MARLTGDGRGPAKGRVRSGGHVEVWDAGSGDRRWAGSVRRRSGSSAHLSGLDLGFARYEGAKLGLSLG

SEQ ID NO: 75579 - protein, 146 aa, Zea mays
  Coding DNA Sequence Number=SeqID_32204
MTTRDHATATQRGGKDTGPHGSECPRCGVSVKPVWDPRAREPPVGVESQIQTLTQIFWTNFYEIPKLGFWDVTNPTPLKNNLVLEISKQKGYTEVRREMVRVRLAYGKKNLVREDSVQGDVIVDITPQPITLNQRSKSNKYHKNKH

SEQ ID NO: 75580 - protein, 46 aa, Zea mays
  Coding DNA Sequence Number=SeqID_32205
MVRDSRIMLWIWFDYDDDVPRGGNGLREKGEAVEGDFQEFQDYDEF

SEQ ID NO: 75581 - protein, 188 aa, Zea mays
  Coding DNA Sequence Number=SeqID_32206
MNKTPVLKVPLQTELRFHLRRYEKPHTIGGPTEQQKADGWLAAARSNNDDDDFCSEGPNSSSDDLGANAAAIGPSPTSSLERQGRAEGRRVGGTGKGGYPERDPSPRRKWAPSPPTDQRFEGCPPEGFNSRLRALGLRAHYWSEVRRPAPRKGTTAALGHSGSAPTTDQGFVGWPSKGSQPPQTQSEG

SEQ ID NO: 75582 - protein, 155 aa, Zea mays
  Coding DNA Sequence Number=SeqID_32207
  Subcellular localization annotation: CTP_CleavageSite=41; ConfidenceScore=5.40e-01
MPSHSPHASRPSTLRAPGWGAPALLPSCCRWRNATSWKLVPFSHRSASRIFITQPGCIPLPMVTQDGDHQFDGGGKQSPGCGLCPTLSFKDLSSSLLGREGELSRELYLPRHGFVGPPFSFSTPGERGAHPALAEGADFDNAGPSGRKRRQLQHV

SEQ ID NO: 75583 - protein, 360 aa, Zea mays
  Coding DNA Sequence Number=SeqID_32208
  Gene Ontology: Mol. function=ribonuclease activity
  Homolog annotation: Hit_ID=A2WWV6; Match level="QueryCoverage=18%, HitCoverage=12%, E-value=1e-19, Identity=56%"; Hit description =Putative uncharacterized protein
MQLVSEMMILCGEVVVAFGSYNNLPLPYREMDFQKPIPHDVLGIPGYVQFISPIRRYVDLPAYYQMVTPISTKLQRPDGRNSGQGSVHSRDTISPRPSPASGKDSRPRRIHVSPEGLLKQRAYLRLARGPARAGFAEKQPWPDRHANRPYRRSIQCNDRLTPYPDARSSVDRAEENSAACPAPTVVPPDKVRLAAAKSSLGRHRKLRLARLQGSDSTSTPEYGLRLARPRGSDSTSTSDDGLRLARPRARTQPRPRTTDSASPDPGLGLSLDLGRRSPPRPTPGLGLSLDLGRRSPPRPTPGLRLSLDLGGVTVSPDLGLGLTTPQGPPTEARRRQQGPDSSDSCAPIGLKRSSDGHDIT

SEQ ID NO: 75584 - protein, 155 aa, Zea mays
  Coding DNA Sequence Number=SeqID_32209
  Homolog annotation: Hit_ID=O48967; Match level="QueryCoverage=100%, HitCoverage=33%, E-value=4e-48, Identity=65%"; Hit description =Putative uncharacterized protein
MVRIIEHRAKTSEDFVMEQEVVSSAPRVLDRPDSGTAAVHAVQQHTPTQASRTPSRAAPTALSAARELLRHSPSPTASPGAMKQWCDDIDRLLGMTHSTSTRSRPRSSWRQREATTSVRSPSIRGAQTDDLQAELNRRRTGEDARVSLERERERR

SEQ ID NO: 75585 - protein, 77 aa, Zea mays
  Coding DNA Sequence Number=SeqID_32210
MRCQAILALNAPAIRSVSVAIWPRLLLGEGWASGEPKLCADGGYKLRLGVLGVPLIMVPDNILAGTPMGSLSHRIFR

SEQ ID NO: 75586 - protein, 25 aa, Zea mays
  Coding DNA Sequence Number=SeqID_32211
MAFKVSYVFDLRDRDSHGKKQETSG

SEQ ID NO: 75587 - protein, 173 aa, Zea mays
  Coding DNA Sequence Number=SeqID_32212
  Pfam annotation: Domain name=GRP; Domain location=76-161; Score= -28.5; E_value=0.066; Accession=PF07172.2; Description=Glycine rich protein family
MGVVLRETASAAWRVFRRFELHIEFLRLFGGRGRRARKVVVLRIIPATSASASQLPLGGLRRLGVLGGGVSPPSPRALRLLPLPRRRLMIQTTPRGSPRVERAGLEGSDESEYSSDEENSSDPSEEGGSGDGGDGDDDGGDGDGGGDSGKGGDGSGKGGSGDGGSKGSNKASG

SEQ ID NO: 75588 - protein, 413 aa, Zea mays
  Coding DNA Sequence Number=SeqID_32213
  Gene Ontology: Mol. function=5'-3' exonuclease activity; Cellular component=nucleus; Biological process=nucleobase, nucleoside, nucleotide and nucleic acid metabolic process
  Homolog annotation: Hit_ID=A2WXH8; Match level="QueryCoverage=62%, HitCoverage=71%, E-value=1e-133, Identity=89%"; Hit description =Putative uncharacterized protein
  Pfam annotation: Domain name=5_3_exonuc; Domain location=233-339; Score=16.3; E_value=5.4e-06; Accession=PF01367.11; Description=5'-3' exonuclease, C-terminal SAM fold
  Pfam annotation: Domain name=5_3_exonuc_N; Domain location=78-231; Score=28.7; E_value=1.6e-11; Accession=PF02739.7; Description=5'-3' exonuclease, N-terminal resolvase-like domain
  Pfam module annotation: Pfam domain module=5_3_exonuc::5_3_exonuc_N; Domain location=233-339::78-231
  Subcellular localization annotation: CTP_CleavageSite=88; ConfidenceScore=5.79e-01
MLPLPTVGVGAVAASPATAAGVAAPIRFRPLRLVASRASTTPSSPSTSSSAISSASPAGHSREHLSGRDGSPSKTSKPRVFFLDVNPLCFRGSQRSLGAFARWLALFFAHVSIRDPVVAVLDGDGGNEYRRRLLPSYKAHRARGVGTGADTRVVDVLRQCNVAVVRVDGYEADDVVATLTEQVLQKGYRVAIASPDKDFKQLISDDVQLVVPIPEIGRWSFYTLRHYVAQYKCDPTADLSLRCFMGDEADGVPGIQHLVPGFGRKTAVKLLQKHGSLENLLNTAAIRTVGRGYAQDALTKHADYLRKNYQVLSLKRYGISNLQWLPAAPQVWQDLFVLAHRNSATLQASYGLQHAKCEVWAAISLQYSVAEDETVALARTDVRVCGSKNLSNCGHRLCEWNPMPDPSCLLGPL

SEQ ID NO: 75589 - protein, 149 aa, Zea mays
  Coding DNA Sequence Number=SeqID_32214
GLVQLNHRTIKDLPQEEEQICMGRQDLSVGRAGSAARLGFGTLPSLPRSRSADGGVDLSSDAMEAEVGGCLSTGMGGGGAGKLATRARERRSRERERKWSTVVADCAVCARLKLSDPSMRSLPEPNAALRMAGSSPAPPADGGSASSST

SEQ ID NO: 75590 - protein, 106 aa, Zea mays
  Coding DNA Sequence Number=SeqID_32215
  Gene Ontology: Mol. function=mannosyl-oligosaccharide 1,2-alpha -mannosidase activity; Cellular component=membrane; Biological process=protein transport
  Homolog annotation: Hit_ID=Q2QYK3; Match level="QueryCoverage=74%, HitCoverage=10%, E-value=3e-34, Identity=83%"; Hit description =Vacuolar sorting receptor 1, putative, expressed
MGSRFASAVLQLLVCATLLLGCCHGRFVVDKNNLKVTAPDDLKGTYECAIGNFEVPQYGDTMVGFVAYPKANRKACKSFEDFDINYKAKPGAFPTFLLVDRGGKAK

SEQ ID NO: 75591 - protein, 86 aa, Zea mays
  Coding DNA Sequence Number=SeqID_32216
MRIRLKKKRMKIKTMSHLKRRTLIKGEMKMIKTSKMIKKYKVNDRHTQESTKQFKEITPSTPYLVTFTSTTGNELENVGGKSSNLT

SEQ ID NO: 75592 - protein, 170 aa, Zea mays
  Coding DNA Sequence Number=SeqID_32217
  Homolog annotation: Hit_ID=Q6J9V2; Match level="QueryCoverage=52%, HitCoverage=31%, E-value=1e-21, Identity=65%"; Hit description =Putative uncharacterized protein
MDCDLLCSSFRNLDLALRSHFMLFSKIGSDIQMDTQEVELPLDQEESTYRLDEKRSHPWGSASASIVERIYKVGKGLLKDENAQKLALQHWLEAAALEEILYQFEEKLQAEREEAARKQEELQAQLQAQQAALEENQSLLRQAQEEVKGMHTKFEETNALLRAVLKLQKD

SEQ ID NO: 75593 - protein, 119 aa, Zea mays
  Coding DNA Sequence Number=SeqID_32218
MSLRYDRIYTPRALKIERPRLSVNVAILAKGRYLWTQVGITVDQNNTKVGTAPKVNSTPVLFGLTWHSLFASRLYYHLLPVEAFENKSPTEGKGEVEPRPRYWCGGAFGRLKAARARAD

SEQ ID NO: 75594 - protein, 158 aa, Zea mays
  Coding DNA Sequence Number=SeqID_32219
  Subcellular localization annotation: CTP_CleavageSite=27; ConfidenceScore=5.26e-01
MATVRLSWVNIRHATPAARRGRSTTARASAHETNALRSGLGRTRGMIRRETVVGRALLGLVGWGAWRGLSQGAEQGGATRIRSTVYRDRGLAMTHLRAVRRSSSELKTVALPTACPSRLGNGLPKPNMVHVTTMLHDKDNDFVQATTGMALSTSPPAV

SEQ ID NO: 75595 - protein, 30 aa, Zea mays
  Coding DNA Sequence Number=SeqID_32220
MAAAAAQARHHLVELRVEGRFVSALEVEIK

SEQ ID NO: 75596 - protein, 257 aa, Zea mays
  Coding DNA Sequence Number=SeqID_32221
  Gene Ontology: Mol. function=nucleic acid binding
  Homolog annotation: Hit_ID=Q5NKP8; Match level="QueryCoverage=50%, HitCoverage=65%, E-value=4e-14, Identity=50%"; Hit description =Putative uncharacterized protein 9C20.4c
MAGSGESPAMVGDGVHLDLETEGVVDGNSLVTPPPALLGPVIDDMSIGEEGEQRVRPPMSNISSREMDTPQILHSHKKNIDPTIVPTVGMTFKDVDDAYKFYKRGKDGVTKSYRQKMLLTKTMKVVRQACMSKAGYDKAMDVLDELDGVLCRLEPDIGCNESCDVSDDEENQEEELNNNNAGDGMEDDNTITCHKMDEDKTMTGCEHALTLITAGNQVDNMRIPPEVGDTSSPCHVAHEQMEHIGASSEAKKVSIEK

SEQ ID NO: 75597 - protein, 94 aa, Zea mays
  Coding DNA Sequence Number=SeqID_32222
  Subcellular localization annotation: CTP_CleavageSite=73; ConfidenceScore=5.50e-01
MAERRCSPCAQPRSLPSPSMVVPLFSLALVSLSSVRGHPDPARILVVAPSPDSSAPSCSGFLSLRRCSSASVLASVGPVSPLRDIGCELSLISP

SEQ ID NO: 75598 - protein, 233 aa, Zea mays
  Coding DNA Sequence Number=SeqID_32223
  Gene Ontology: Mol. function=cysteine-type peptidase activity; Biological process=proteolysis
  Homolog annotation: Hit_ID=Q8S456; Match level="QueryCoverage=63%, HitCoverage=18%, E-value=1e-70, Identity=88%"; Hit description =Putative uncharacterized protein 163K15.6
MAGAQQGGARTRFGKLGSREEKGPRGMAREELDRAPWGRARGREVQFIQCLIMRSVDCPPTNPKRLTIESSQEKLNIRCIPYDVIVSTWIMSDQQRDAVARLGFSSIFDLRTDALESISLIRWLMDKLDPHDMTIRPGAGKELEITKETVRLILGLPCARGGREFTDWYGEVDAAAKLRRDLKVGKEEFDVVKLQDKIVLGNDDELSIRCFFLILFNRLFFHLLHGALQTMRY

SEQ ID NO: 75599 - protein, 53 aa, Zea mays
  Coding DNA Sequence Number=SeqID_32224
MGTVDMCGDGVPRHVVCLGSLEDMVAGVTWPSILPPGWIVEWDPTSAEEEHEE

SEQ ID NO: 75600 - protein, 94 aa, Zea mays
  Coding DNA Sequence Number=SeqID_32225
  Gene Ontology: Mol. function=structural constituent of ribosome; Cellular component=ribonucleoprotein complex; Biological process =translation
  Homolog annotation: Hit_ID=Q96S84; Match level="QueryCoverage=75%, HitCoverage=34%, E-value=3e-20, Identity=71%"; Hit description =Ribosomal protein L15
  Pfam annotation: Domain name=Ribosomal_L15e; Domain location=12-94; Score=-66.2; E_value=0.0033; Accession=PF00827.8; Description =Ribosomal L15
MVPLAGPDCLSVSLCQVALQSEWSRRRCPSVRPGYVMYLVRVRHGGRKRPLPKCIVYGKPKHQGITQLKFQRYKRYVAEERAIRKLDGLRVLMS

SEQ ID NO: 75601 - protein, 162 aa, Zea mays
  Coding DNA Sequence Number=SeqID_32226
  Gene Ontology: Biological process=transport
  Homolog annotation: Hit_ID=A2XP89; Match level="QueryCoverage=35%, HitCoverage=6%, E-value=6e-22, Identity=86%"; Hit description =Putative uncharacterized protein
MGAAARLSLARGQGLGDRFSMGDPDCGDPDCGQAHGHIQIDALTTASPSAPSIQPAHTDTIGEEEVGERMILAVLFANSDGNILIERFHGVPVEERLHWRSFLVKLGSKNLKGSKNEELHVASHKHLPYEVMTPLQVAVAGVQKDLRLTIAADTHPMLAELL

SEQ ID NO: 75602 - protein, 90 aa, Zea mays
  Coding DNA Sequence Number=SeqID_32227
MSCSFDDYYIMDCGIISAPEVTQRRTDSNDQFVILPTVKAAFCAGLPLILFANTHTCFLFEQARMVAWGVLSNDETMKMVAYIEVCMILM

SEQ ID NO: 75603 - protein, 165 aa, Zea mays
  Coding DNA Sequence Number=SeqID_32228
MENLWEEGRKLGVQFIGEERERERGRGVAQLGGVHVAGGLGFASGAWRCFWARARPVLRADAARRASRRLRVGSWRWSVEQLGAGRSTTRVLGRVWRRRVRRLERCSIGSRGARAWLARRVPGGWKEQGEEGEGGMGLGGARAAGKKGTFPLVAAASRGGRHRSG

SEQ ID NO: 75604 - protein, 94 aa, Zea mays
  Coding DNA Sequence Number=SeqID_32229
MANLKDHNNVAPDMNIRLTNSPVAEDEKLENHIKRLDKEFQRQQAQLSKVAKKWYLSHFKVNHHQKVVKEKEGAGSRSYEEKKTTLCHHGLSVP

SEQ ID NO: 75605 - protein, 153 aa, Zea mays
  Coding DNA Sequence Number=SeqID_32230
CHLEFPGVVLRTFIARLTLSCVTLTSLRLLRAQCSIPYPGHVKVKTVNTRSIGGYRCLFAVDGFSRVKLKPQVPTLSLVCGVHRLDSKRRSTPHHRIPPQTQLATTDVEAGAKLGEDQGRKSLGEDVGKLGGGRHVEYPNIADDDAISDVIVA

SEQ ID NO: 75606 - protein, 46 aa, Zea mays
  Coding DNA Sequence Number=SeqID_32231
MAVMGSTSEKMYLCQVRKQQIFVAFVPRWYRRKKTRIETSGGSVLL

SEQ ID NO: 75607 - protein, 110 aa, Zea mays
  Coding DNA Sequence Number=SeqID_32232
MTTLARSIDIALRVASTIDDVAHVVSYVSRREETPRPATRLSGVPFSGHMTMQGITTLIPEKACLALWGFLPLHCWFIVGDGDILYPSVDEEDVGEVHSRVGEVDNKVCR

SEQ ID NO: 75608 - protein, 143 aa, Zea mays
  Coding DNA Sequence Number=SeqID_32233
  Gene Ontology: Mol. function=protein serine/threonine kinase activity; Cellular component=integral to membrane; Biological process=protein amino acid phosphorylation
  Homolog annotation: Hit_ID=Q2QMB2; Match level="QueryCoverage=60%, HitCoverage=33%, E-value=4e-26, Identity=69%"; Hit description =Receptor-like serine/threonine kinase, putative, expressed
MGERGYLAPEYTIQGQLNKKRDVYNFGVLLLEIVSGRSHTDPRLPVDEQFLLEKTLHEFDDLESIIDRTLKRDFDTEEALWLLKIGLVIMLEHCRTGPCWGFPRLKYKLLDMVIFSDINAYEVLVYHDLLRKLQHSHHAKANV

SEQ ID NO: 75609 - protein, 106 aa, Zea mays
  Coding DNA Sequence Number=SeqID_32234
MRNYIPDMDEVAVIEDFNHESNDSASSSELSSRKLQQPWSSSSEKQTSVSPSTSVLGTSSVNRIPHLWPQRRKPASNKTSAGTRGQEKKYMSWNRPRGSSPRRSSW

SEQ ID NO: 75610 - protein, 385 aa, Zea mays
  Coding DNA Sequence Number=SeqID_32235
  Homolog annotation: Hit_ID=Q6JAD6; Match level="QueryCoverage=72%, HitCoverage=64%, E-value=3e-44, Identity=52%"; Hit description =Putative uncharacterized protein
MRKSHHLPIFSKNYLAYDRKFEKFQNPLCLGSPDSPVRMVRTKNVSAPGGGDDEDPPRPFRQVKGKTIYLEQQEGHKKRCLDRAARAALAVAAAAEQERDETEVRPLAADPRLIDLQRATAARRDPAAADLFSTRIHESFFRAQMSAQIALRAHRLLDLPAFLLAAGADFEVHLSYLLGLLTLLTTSGKYVEEWVRVFYASVWIDPDHQWMRFHFEREDVTLHASQIRQLFGFNNSSSQLVLRAQQFLMMMMMMMLMLMMIDDFGILPLPPMPPCSHDHEAGSSSAAPAAPPAIDPTLTAILQTLTQQQAHLVAEQARQAAVQQQMSKIMLSMFQTIQDRQDTLQQHLLADWAETRAFMTLMLQHTGVQIHLVQLAPLQLFRQRL

SEQ ID NO: 75611 - protein, 46 aa, Zea mays
  Coding DNA Sequence Number=SeqID_32236
MVTGEKPATSQGKAPSKESGNKKMEKSPPNVKSHRSGDKKKQTTGF

SEQ ID NO: 75612 - protein, 114 aa, Zea mays
  Coding DNA Sequence Number=SeqID_32237
  Gene Ontology: Mol. function=protein serine/threonine kinase activity; Cellular component=integral to membrane; Biological process=protein amino acid phosphorylation
  Homolog annotation: Hit_ID=Q2QMB2; Match level="QueryCoverage=76%, HitCoverage=33%, E-value=7e-28, Identity=71%"; Hit description =Receptor-like serine/threonine kinase, putative, expressed
MGERGYLAPEYTIQGQLNKKRDVYNFGVLLLEIVSGRCHTDPRLPVDEQFLLEKTLYEFDDLESIIDRTLKRDFDTEEALWLLKIGLVIMLEHCRTGPCWGFPRLKYKLLDMVL

SEQ ID NO: 75613 - protein, 227 aa, Zea mays
  Coding DNA Sequence Number=SeqID_32238
  Gene Ontology: Mol. function=kinase activity; Cellular component =ornithine carbamoyltransferase complex; Biological process=amino acid metabolic process
  Homolog annotation: Hit_ID=Q6QP54; Match level="QueryCoverage=42%, HitCoverage=37%, E-value=4e-15, Identity=46%"; Hit description =Putative kinase
  Subcellular localization annotation: CTP_CleavageSite=82; ConfidenceScore=5.17e-01
MAPPVDVAGLRPRLGDVEAPPKPRSSPSPWFGLRRRPSAEARAESEPWGRAERSSSSSGAEPKSEPWVGRSGVRRLLGLSPSPSPGSGGAEFIVFWGLAPSPSPGSGGAEFAVFRGLARVRALGRAEQSITGSHLANKKDQVLDSTKEQMGNRRHLWSGGTGLSGAAPDSVRCTRGLQLELAAFGNFQRRSAIIHRTVRCTPDSVRCSKEQRPLDLASLGNSLQPLR

SEQ ID NO: 75614 - protein, 79 aa, Zea mays
  Coding DNA Sequence Number=SeqID_32239
MVSEFIISKRGIEANQEKTPAIVQHPEPLLGVPGGCTHLRERPLVTADILKPGTHKPVGGQGEVYGNAWNVRQLHCFYP

SEQ ID NO: 75615 - protein, 220 aa, Zea mays
  Coding DNA Sequence Number=SeqID_32240
  Pfam annotation: Domain name=zf-CCHC; Domain location=31-48; Score =24.3; E_value=0.00032; Accession=PF00098.14; Description=Zinc knuckle
MGMIHKINLMGVPLQVDDLLFNIDRKKQRKIGCFACGEKGHFRDSCPTMVEPTKGRSKGKALTSVETWDDSSSEDEPQRTRSHRSSSWSSCKCHMAKGKMSITSSSDDSSSDAEGEGKPSIDELAEDVKFFQDVCTKQKAQLKTLKNKLISPQNDYKGKMEILSIHNNELTTKLENIGSTPEVFLVEIPEIIKKDASTSWFDLIDDSNPSNEVLVKNVVI

SEQ ID NO: 75616 - protein, 191 aa, Zea mays
  Coding DNA Sequence Number=SeqID_32241
  Homolog annotation: Hit_ID=Q6QP54; Match level="QueryCoverage=20%, HitCoverage=13%, E-value=1e-07, Identity=76%"; Hit description =Putative kinase
MNMREVEIPRPSCSSRAQVGWCDAVAVGGVLEPGGGTAVGAVESLLTSSCFRKGAESRRRHRVCGAPSLPIWRSEPDGTPVLFPVARVSSGRVMMAPPVDVAGLRTRLGDVEAHPKSRSSLSPWFGRGGDRRLRPGRSPSPGVGRSGVRRLLGLSPSPSPGSGGAEFVVFWGLARVRALGRAERSSLSSGA

SEQ ID NO: 75617 - protein, 152 aa, Zea mays
  Coding DNA Sequence Number=SeqID_32242
  Subcellular localization annotation: CTP_CleavageSite=65; ConfidenceScore=5.20e-01
MMVIASVVTTLFAVLLLFSLPSCLHLRATPFSTEGTSSPYSSDTNPDTDSHSGYCTSTRTFHIMRAPSFSPSSDVPFVFPAFALFFLPNLLPPPTVAATSQSTLIDVGTGRVGHAPGLSLCLSSRRTWWRVSRLGYLGDEESRSEILNNQGS

SEQ ID NO: 75618 - protein, 335 aa, Zea mays
  Coding DNA Sequence Number=SeqID_32243
  Homolog annotation: Hit_ID=A3BUG6; Match level="QueryCoverage=87%, HitCoverage=98%, E-value=1e-61, Identity=44%"; Hit description =Putative uncharacterized protein
MEQVVMLLQTVGHKEKNGDIIFYALLKLLVDVLVKFSDTDMVGNSVMWQHLEVEDLLLYHKEKILLYYKEKIHESGRAFVLREVHHEECARRLNEKYGANFTWKQTYNKYHKLKGEWKVIMEAKSARGAGFDDVQKKITYDEIEVVKMKAKGDKKAKYYNVPIPLYDEMEFVFTGKHATGEFSVIEAPFDRSGRQEDDAVGNVNLDQEPADLNGDSSQHDFDTLAESDSPNPVGSKRRHEEKEKEKEKEWKWARQGVPIFMQALSEAVSFTHGGTDPYEGIYKAIEDMDEYPLPARLDLLTYLAQNRHIASMLKGRQEETFKQWVARWVAGHYPL

SEQ ID NO: 75619 - protein, 152 aa, Zea mays
  Coding DNA Sequence Number=SeqID_32244
MGKNNKRKREPSPPSEDFGDSEYSEEEFSSESEGSPAPVSPPASSDDSDDSQGIAAEVWTYIRAVERSGLEGSDESEYSSDEEDSDGGGEDEDDDDDGDDDDDGDGDGSGGGRGSGGGKDDDGSGSRGSDRGGSSKGSTKGGSGGGSNRASG

SEQ ID NO: 75620 - protein, 440 aa, Zea mays
  Coding DNA Sequence Number=SeqID_32245
  Gene Ontology: Mol. function=hydrolase activity, acting on acid anhydrides, catalyzing transmembrane movement of substances; Cellular component=integral to membrane; Biological process =metabolic process
  Homolog annotation: Hit_ID=Q8L6I0; Match level="QueryCoverage=100%, HitCoverage=45%, E-value=0.0, Identity=83%"; Hit description=Plasma membrane H+ ATPase
MITGDQLAIGKETGRRLGMGTNMYPSSSLLKDGDTGGLPVDELIEKADGFAGVFPEHKYEIVRRLQERKHICGMTGDGVNDAPALKKADIGIAVADATDAARGASDIVLTEPGLSVIISAVLTSRAIFQRMKNYTIYAVSITIRVVLGFLLLALIWRFDFAPFMVLIIAVLNDGTIMTISKDRVKPSPVPDAWRLQEIFATGVVLGTYQALATVLFFWAVRDTAFFTNTFGVHHIGDSTEELMAAVYLQVSIISQALIFVTRARSWFFVERPGLLLVAAFLAAQLVATLIAVYAHWPFAKIKGIGWGWGGVIWLFTIVTFFPLDVFKFAIRYFLSGKQWNNVFDNKTAFASELDYGRGKREAQWAIAQRSLHGLQQPEASGLFNSDNSNDFIELSEIAEQAKRRAEIARLRELHTLKGHVESVVKLKGLDINTIQHNYTV

SEQ ID NO: 75621 - protein, 289 aa, Zea mays
  Coding DNA Sequence Number=SeqID_32246
MAARRAGRAVLSSLARSLGLRKPKGQAGSGAKNRHRTLSGVYKDQGEDGSNVPPGPDAGFKNAKRNGRSSNGSRTCNGNPANYSPRRINSATGQAALLAGATGDASPSPKQPRRKRLGPPEGFQQPPQIRVGPDTHYWSEGSKAGPPEGFPRAASGYSGPSRPLLIRGSKGWAPEGFTVASDAERGMTRGDRVRQITHWYFWACLWAPSRPPTNGARTSTRITRLQLTGDTMFGAHQGGSGAALANLAPAKPLTASTYQPENLGPDRAPGLRPARMREQPDQPKHYARH

SEQ ID NO: 75622 - protein, 150 aa, Zea mays
  Coding DNA Sequence Number=SeqID_32247
MGKNNKRKREPTPPSEEFGDSEYSEEEFSSEPEGSPAPVSPPASSDDSDDSQGIAAEVWTYIRAVERAGLEGSDESEYSSDEEDSDGGEEGEDDDDDDDDDDDDGGSSGGGDGDGRGGTKGGSGGSGDSTRGSSRGSTRGGGGGRGRASG

SEQ ID NO: 75623 - protein, 351 aa, Zea mays
  Coding DNA Sequence Number=SeqID_32248
MTVADAREQRARRRPSSRPIRGQRESSLSRCEDNAPVIRSSNGSHTRNGCPANHSPRCINSAAGQVVLLATATSDASPSPKQPHQKRLAPEGFNSRLRSRGPYTHYWSEVRRPAPRRVPRPPQATRAPCPLLIRGSKAGPRRVHSRLRRRARDDQGYVRYITEARAALPRLGGCSRKPGSGRTVDSVNIPARELGPRPYTRATASSHEGTTRPAEALRKALRPRRSEITPPRPRGLHPAGALARTHRNQMQPRKAGPLAKKCDESLQASANTPFEARGLLSGTIIRGTLKTPNSQLVTPISIKLQRPDGARTRAKPRKTANSAPPDPGLGLGLSPGRRRTPLRPTKGSDSG

SEQ ID NO: 75624 - protein, 158 aa, Zea mays
  Coding DNA Sequence Number=SeqID_32249
  Gene Ontology: Mol. function=kinase activity; Cellular component =ornithine carbamoyltransferase complex; Biological process=amino acid metabolic process
  Homolog annotation: Hit_ID=Q6QP54; Match level="QueryCoverage=24%, HitCoverage=13%, E-value=3e-10, Identity=84%"; Hit description =Putative kinase
MALPVDVAGLCPRLGDVEAPPKPGSNLSSMAEAESEPLGRARRRSSAEAESEPLGSGEGGRSSAEAESEPLGRARRRSSAEAESEPLGRARRRSSAEAEFEPLGSGEAEFLRLFGGLAPNPNPLGGVEAEICRPSGGFYPSPKPWVGGKREFARLFGG

SEQ ID NO: 75625 - protein, 86 aa, Zea mays
  Coding DNA Sequence Number=SeqID_32250
MAPAVGAEAEAAREVPVTDGITATIRASGLRGNRPSRLLGPDSRKSPWTASPSEAGSDLAEGVVDAEGATAPFQREDPSLQDQIVL

SEQ ID NO: 75626 - protein, 80 aa, Zea mays
  Coding DNA Sequence Number=SeqID_32251
MEIPSLDGWTVILKVVFRVYRVTGVLLYLTSRRGKLKEKGRRVTPRVGEPGHIGEVQVNKSDYDNVTGALPYLKVNRKAN

SEQ ID NO: 75627 - protein, 204 aa, Zea mays
  Coding DNA Sequence Number=SeqID_32252
RHYGTGGYEIDGFGYDYGAGEEPGRARRVGTGAGAGVGAEAEGALRAPRRATTTGSGRRHGRAPRPRAPGRGQGRVSRAGTGNGTGAGERHGQAPPWPGLGTPRRVGEEPGQARRAGTGAGVGVRVGVRAEDEGARRAPRRATTPGSGHHAGAGEGAHRAGRGEGGAGRGQGSCARGEGIVRGGRERIWGRDDRRGPQGEAAEA

SEQ ID NO: 75628 - protein, 98 aa, Zea mays
  Coding DNA Sequence Number=SeqID_32253
  Gene Ontology: Mol. function=kinase activity; Cellular component =ornithine carbamoyltransferase complex; Biological process=amino acid metabolic process
  Homolog annotation: Hit_ID=Q6QP54; Match level="QueryCoverage=80%, HitCoverage=37%, E-value=4e-12, Identity=45%"; Hit description =Putative kinase
MAPPVAVAGLCPRSGDVEAPPKPRSSLSSMAEAEPELLGRARRRLFGRGQGGVRAPGSGEADPSPSPGSGEAEFAVFWGLARVRALGRAERSSPSSGA

SEQ ID NO: 75629 - protein, 338 aa, Zea mays
  Coding DNA Sequence Number=SeqID_32254
  Subcellular localization annotation: CTP_CleavageSite=68; ConfidenceScore=5.48e-01
MSSSSLKRRVFPSSKPPDGGYPPPFRLLVGGTQLHGSWYLSAIVRLQGFSSRSPVAPLHRRSPEMATSSLMVGESEPGWGLCPFLSLKDFHHQGWGGESAELGVPGLQPRVASGPLAASASATAAGRGSSAGAAAGTGHGLTSNFYGLLPVLASRVLARAGASLTAASTLRSALPLFGPPEQKSLSSPLLEQVTARRSSVSVAPQAFPLGVGLGNRLSRLLGPDSWRSPWTSAPPEAGSGFAVDVVDAEACAFCGRRGQKNTPLAALAKLRLFSSCFEHLDSVGNRDVCVSKSCFFAEGTSEKGTSEVSVSRRRRSPSARSALAAYVYLVVSRIRFPK

SEQ ID NO: 75630 - protein, 82 aa, Zea mays
  Coding DNA Sequence Number=SeqID_32255
MRWWPEGRKKLGARLRGLRRGKLLNADGMAQTNYGDTVDKLGHAAEDRRPEMGKKCDLRVRWQAYGGLRASDPIHNLTDRPT

SEQ ID NO: 75631 - protein, 97 aa, Zea mays
  Coding DNA Sequence Number=SeqID_32256
MSRGQGYRYQYEQRRSWLENGNLVGRSLAVLGNRTSRLLGPDSRRNPWTASPSEAGSDFAEDVVDAEDERVEQCRAVAGVLYVLARFVQVLQMQHLR

SEQ ID NO: 75632 - protein, 198 aa, Zea mays
  Coding DNA Sequence Number=SeqID_32257
  Subcellular localization annotation: CTP_CleavageSite=22; ConfidenceScore=5.06e-01
MGATIPVIKPRRSPSTMHSGPAAEYPDTMRRRTTPGPPQRQSGHGVEARPCPNLRRHGEDRYPRCACSPAARLKFNGGGDMSSAVALACKKGLVIYSGEALPSFGYRGGDRADASVPPVIQPGSKCVCSPRAVGERQGGRRFWHKGPLACVKRACRSGQRRMHRSSAPTHAIRRLKCGPTWPDAGSGARMTRKRVGAA

SEQ ID NO: 75633 - protein, 220 aa, Zea mays
  Coding DNA Sequence Number=SeqID_32258
  Subcellular localization annotation: CTP_CleavageSite=34; ConfidenceScore=5.42e-01
MTKLCPLKGHDLTSPEPQPRAGTVDPGRFTPRPRASSSNGRTFDSPEAQLGQASRRSNLGQDRLASRPDRRSIQCKDRLTPYSDVHSLVDRAEENSAACAAPTAVPPARVRLTAAKFGLRRHRKLRLARPQGSDSTSTSDDGLCLARPQGSDSTSTSDDGLRLARPQGSDSTSTSDDGLRLARPQGSDSTSTSDDGLRLARPQGSDSTSTSDDGLRLARP

SEQ ID NO: 75634 - protein, 227 aa, Zea mays
  Coding DNA Sequence Number=SeqID_32259
  Homolog annotation: Hit_ID=Q6J9V9; Match level="QueryCoverage=54%, HitCoverage=34%, E-value=6e-18, Identity=50%"; Hit description =Putative uncharacterized protein
  Subcellular localization annotation: CTP_CleavageSite=19; ConfidenceScore=5.06e-01
MQAACSRTTRMHPFDFDASSMAAQAHTSCNRRVGYYVRKTAPPLAPVPRLLDCGTGAAIRGNPAHGPTVQAKHVGHGSVSRGRRRDGRYGQKWADSNGGRTRKGDTPKGILLCEGSEPRALLLIRVSKAGPSEGFDSHPRALGLRAHYWSEVRRLAPRTGLTAASGHSGSTPTTDQGFVGWPPEGFDNRFRTRRARDDSGYVRYMAEAGATLPRYPRTFPIPAGTIL

SEQ ID NO: 75635 - protein, 418 aa, Zea mays
  Coding DNA Sequence Number=SeqID_32260
MHRALPPSEPPDGERPRCLRLAVVGGAQLRRSWHLSAIARLQGFLSGSPAASPHQWSPKTVTIGSMVGRSKPGCGLCPALSFKDLHHPCWGGGRAEPELYLPHGSVGHLLLQHSGERAPTGLAEGVDFDNAGLVGRERRQLQRVGLAGSAGSGSASGAPSRRRAECGYLAGVRAVVAPRVPGDRPRRRALLGRRSCSWVVLPVLRHDASAWRSVFARPGGLEWGSAGRQVAAIVGAEVVAAGEVLVADEIVGAICAPSLRVFGFDSLSSPLEWGRGRGPCRSSVCPEVIAAVVWPPGAEVVVAAAGVGGGEPPGNCRPAGPPMWGVVRTCGSGTRSSVCNGTLSVGVTSEVSVSRRRRSPSARSALPLKASLAQLRNPQLLCDEPEPEAAVSAWTEAELARKGTSSAQEQVASQAEEA

SEQ ID NO: 75636 - protein, 110 aa, Zea mays
  Coding DNA Sequence Number=SeqID_32261
MALHKGRCWLPNWSKENTEANKCPRSPHKHKINHQPSQEHLRQLSMMSNLKKMRNKFKIKSKLKMVAYIKRDMKKKIKRRRMSRRFRQQRHHTQKSIKQFKETTRQHDPR

SEQ ID NO: 75637 - protein, 139 aa, Zea mays
  Coding DNA Sequence Number=SeqID_32262
MGKNNKRKREPTPPSEEFGDSEYSEEEFSSEPEGSPAPVSPPASSDDSDDSQGIAAEVWTYIRAVERAGLEGSDESEYSSDEEDSDGGDEGEDDDNDDDDDDDDGDGSGRGGGDGRDSTKGSSRGSTKGGGGGRGRASG

SEQ ID NO: 75638 - protein, 316 aa, Zea mays
  Coding DNA Sequence Number=SeqID_32263
MTNAAHTSPSSLQDEGPRRSPSIPRPHSTWRPTWDSTHWDNPGVSGHKHPYIGTLGARTPINTPESKFQHLAPTVRATSKPPVMAPKRASSKAAPSIDEAAKAALLAKKKGKALVDTTHQEACEDDALSKRQRNDQPTPEGTLRTCSSGGQPQEPPPGFASLEGEDATEDDELIGISAEEQLQLRALRIKNRNLQKQEEILEAKRQRVSVQAKVRQMIRDEEQRAQDLEQEIALMQREGQHDLQHGPPLQQRAPVGDLFIPQRGPSSRTPQHSKASTTLMNGAPWRRNCKCHHGPPTSGQGPTPSTTAALSQHSTS

SEQ ID NO: 75639 - protein, 107 aa, Zea mays
  Coding DNA Sequence Number=SeqID_32264
  Gene Ontology: Mol. function=catalytic activity
  Homolog annotation: Hit_ID=A3B342; Match level="QueryCoverage=54%, HitCoverage=18%, E-value=4e-14, Identity=67%"; Hit description =Putative uncharacterized protein
MSRRHLRWCHSSMTRRSLATVSRPLEAVLRGRMRRYGYYLADEPGVHFVWQPNQESSVLVMSRAFDDYYIEDCGVILAPEVTQRRIDNSDQFVILATVRVAFVPTCL

SEQ ID NO: 75640 - protein, 669 aa, Zea mays
  Coding DNA Sequence Number=SeqID_32265
  Gene Ontology: Mol. function=protein phosphatase type 2A regulator activity; Cellular component=protein phosphatase type 2A complex; Biological process=signal transduction
  Homolog annotation: Hit_ID=Q6ER76; Match level="QueryCoverage=99%, HitCoverage=98%, E-value=0.0, Identity=52%"; Hit description=Rab11 binding protein-like
  Pfam annotation: Domain name=WD40; Domain location=236-274; Score =29.8; E_value=9.9e-06; Accession=PF00400.23; Description=WD domain, G-beta repeat
  Pfam annotation: Domain name=WD40; Domain location=324-361; Score =42.6; E_value=1.4e-09; Accession=PF00400.23; Description=WD domain, G-beta repeat
  Pfam annotation: Domain name=WD40; Domain location=365-403; Score =39.4; E_value=1.2e-08; Accession=PF00400.23; Description=WD domain, G-beta repeat
  Pfam annotation: Domain name=WD40; Domain location=456-537; Score =21.3; E_value=0.0037; Accession=PF00400.23; Description=WD domain, G- beta repeat
  Pfam annotation: Domain name=WD40; Domain location=623-661; Score =2.5; E_value=15; Accession=PF00400.23; Description=WD domain, G-beta repeat
  Pfam module annotation: Pfam domain module=WD40::WD40::WD40::WD40::WD4 0; Domain location=236-274::324-361::365-403::456-537::623-661
MSDFDEQDDIFLETSDDTRSSAYFSARCSTSEQLSASWGPEDELWTSELLSVNERRHRFLVRMGFAKPIPTGITFSQWQGEILADRAFRDLEDRINSICSSYRPSFSHGASAPDSTRNSVVLELDEIEHHELTGILDEVGTDRTMNTNQSDGFPSFPQLVHLFLQKGSGRSPARGMEIEFSEKQNDPKSFCGRFKRKEEEDIICMHDTRMKSLKSGTLFATKVDQQNKKWMDFSALYMCQEIHAHGGSISVMKFSTSGRYLASVGEDCVVRIWRIHEVESSPDLYIRETPVKSMDRNMGLKMKVGKGRGRALAIIPRKVFNIAETPLHEFHGHTSDILDMTWSKSNFLLTSSKDKTVRMWKVGCDDCLAVFKHRDYVTCIQFNPVDEGYFVSGSIDGKVRVWDVSERRVVDWADAKDIITAVGYQPDGQGLIVGIAAGRCRFYNHAGENVELEKVLKVTKKKSAGRQITSLQFSCGDPARILIASAGSKIRVSDGGAKINRKFEGRRGSKVLVPPSLTSDGQYLVSAGADSNVYIWDLDRPARGKSRTRGPRRVRSCEHFFSEGVTSVATWPGLAHQQEDLQSPEKGAAPTLCRDRELCSFGTWFSADGARGAATWPEEKLLPSLRYVNCAGMDDCRAKVSAAWNKVVVTGGSDGVIRCFHNYGLPVKL

SEQ ID NO: 75641 - protein, 496 aa, Zea mays
  Coding DNA Sequence Number=SeqID_32266
MGGPQVDLSCSALDFSDGLRFQDWISSKFNRPINLLPDWGIVLVQPLPEHEVNFHIFVDIIREYLVEVRRVQGSSIQRSHLGQALEVPQFIVFSVAEGFQEVSWTVQCDIVQQFMLGAQPQDEDPVPPYPLDGHQLPVEFFGIGQLVPNFQFDLNIPPMEGNNVEEDVAINDDAGWDPWPVQQAQPPEPVVNANNANVAINAEEQFSYQLSGLEDLPSDDLVGYFNNIIIPQGVQFQQEEALVPAEAVLALPAFPPENMILEGNNDQGEDDMQIEESINVGLMLHLEQSNPDPAFDEYMARKRSSSWADLFPDNDGSVSVPKVWVAFFMGLLIRPDSFDWARKFLLSGAISAVVMPNMDTISIKIPSKCLLPPSQDTHVEPQSPPRQRQLSRKGSLSWLTRQLEGVLGLGQRPRALKTALGLIKRIHDIIKKLGTEFCKVDPSKLNLEDLSRSKATGIAIQRLVAPPSSKDDEPRSSEDQAGDPLFADDDDAESSA

SEQ ID NO: 75642 - protein, 80 aa, Zea mays
  Coding DNA Sequence Number=SeqID_32267
MGALLANDQQPFDDLVRRKEEEVLRQLAEWREKTKEKYLPYFMALSHTTLVESYMAQSSKYNLEPLGPIANHLVCYAGSS

SEQ ID NO: 75643 - protein, 130 aa, Zea mays
  Coding DNA Sequence Number=SeqID_32268
MAENVEAVGSAESEEAEASAEKPVAHRTLSDALAKHLANWPLSGFLGARPLKFIGLSREPPDCPVRQRSNGQLRPMVDCADYRAVCSVEVSLQSQNTSDCPVPQEDRRLQRSTDPNPNGRLTWHSPDSEQ

SEQ ID NO: 75644 - protein, 507 aa, Zea mays
  Coding DNA Sequence Number=SeqID_32269
  Gene Ontology: Mol. function=cysteine-type peptidase activity; Biological process=proteolysis
  Homolog annotation: Hit_ID=Q5NKP7; Match level="QueryCoverage=100%, HitCoverage=62%, E-value=0.0, Identity=85%"; Hit description =Putative uncharacterized protein 9C20.3c
MKQVDRPPNNPKRITIQSSQECFSVDIPSAEQPNPCPEVENPPNVDSQNLTNEIVQIDSDEDDFMPALKKRNVSESHTRVLRKVVTKMIKHEELPRQTLNVRCNPQDVIASINILNERQREAIRSKGFSTILDMTVDALCSRSHLQWLMDKLDPKDMTIHPGPGKELKITKDIVHLILGVPNHGGGKPLGIDEAVAASNLRAKLGVAKDEFNVTFLQDRLRKGEDDDLSIRCFFLILFNRLLFPTASWGITYHEVLLTEEMHRFHEIDWCQLIFNDLCEAAKKWHNRFTTNVSTTIYGCSICCPSAAPQNKTGTPRIKFFDKNSIKALTKADKRKPECRTNIFDAPRPAPMPRPTFNIKLSSIKEMMSSKINDLPHRHRSKFTDILAAYDLEVDKTCVAIKDSIDKIIEKQYDIADTFIELIDEVLRAESENLENETDEPQQPGNSAHSAGHTVDATQPTPDMPSQASQLETQLGGTQFEEIHERQQHIRRVLETCPDESDVVSDQQ

SEQ ID NO: 75645 - protein, 481 aa, Zea mays
  Coding DNA Sequence Number=SeqID_32270
  Subcellular localization annotation: CTP_CleavageSite=51; ConfidenceScore=5.29e-01
MSSCSLMHRVLPPSKPPDGGYPPSFHLIVGGTQLRGSWYLSAIVRLQGFSSASPAVPLRRRSPETVTTSPSVGRSKPGCDLGPTLSFKDVHHPRWGGGQAEPELYLPRGFVGRPLLRCSRERALTGPVGGPDFDNAGLVDGGRRQPQRVGLVGLAPGASSRQKAAAAPAAFVFWGGPAFAPVRCLRAEVGAPLVREDLSGDLPEGLTAPVVGAEVEAAREVPVADGITATIRASGPPALCTCPRPSSVGVGEGKIAAASALRPSPLQFGHLGRWSLSLLPERATASRPSVLCCSAGLPPHRVGLFVPAEVGTRVPLVMALRMPESLGSVSLVARGFSCSVKGTPRPLFNEPRPGVAVSARTEAELARKEDLVGRSLAGSSVSGTDAGIDLPRPRVGLMSSGDSWPRPRGGQPSRLPELDSQRRPWRRRPGLGDDVVLQSGDPWTASPSEARSVLAEGVADAEGAAAPFKRQDLSLQDRIIL

SEQ ID NO: 75646 - protein, 36 aa, Zea mays
  Coding DNA Sequence Number=SeqID_32271
MADVGDAVVHVPSLSLAAGEPLAGYFALPVEIRGAH

SEQ ID NO: 75647 - protein, 340 aa, Zea mays
  Coding DNA Sequence Number=SeqID_32272
  Gene Ontology: Mol. function=metal ion binding; Cellular component =integral to membrane; Biological process=ubiquitin cycle
  Homolog annotation: Hit_ID=Q94IZ7; Match level="QueryCoverage=33%, HitCoverage=54%, E-value=6e-19, Identity=43%"; Hit description=Ring -H2 zinc finger protein-like
  Pfam annotation: Domain name=PHD; Domain location=264-309; Score= -7.4; E_value=0.096; Accession=PF00628.20; Description=PHD-finger
  Pfam annotation: Domain name=zf-C3HC4; Domain location=265-306; Score= 24.0; E_value=0.00017; Accession=PF00097.16; Description=Zinc finger, C3HC4 type (RING finger)
  Pfam module annotation: Pfam domain module=PHD::zf-C3HC4; Domain location=264-309::265-306
MALPVDVAGPRPRPGDVGAPPKLGSSLSSVAEAEPEPLGRARRRLFGRGQGGVRALGSGEAEFVVFWLYADGGYRLRIRRLEGTPNYGPRHYTDILTILDHQSEPHHYFPNPITILSSHQPGDHRTRACPRNARHGALLLLCRGIPHLAVVADNQSTSGMSAVDGSGSGTPPPPGHRGCCASGATLELVGAFTAVCLVLYGVILYMNYLYVRWSGRDGVHRTDSGLAGLPAQKRPAGGMDRAALAAMPVLRFRADAHGGESPAECAVCLSALQDGDAVRALPGCRHAFHAACVDAWLCARATCPVCRARPVLPPPQQAPKAGAKVVAGSSGRQLDLESQV

SEQ ID NO: 75648 - protein, 160 aa, Zea mays
  Coding DNA Sequence Number=SeqID_32273
MALPVDVAGPRPRPGDVGAPLKLGSSLSSVAEAEPEPLGRARRRLFGRGQGGVRALGSGEAEFVVFWVLARVRALGRAERSSPSSGPSPSPGSGGAEFAVFRVLARVRALGSGGAEFAVFRVLARVRALGSGGAEFAVFRVLAPVRALGRAERSSLSSGS

SEQ ID NO: 75649 - protein, 217 aa, Zea mays
  Coding DNA Sequence Number=SeqID_32274
  Gene Ontology: Mol. function=plastoquinol-plastocyanin reductase activity; Cellular component=integral to membrane; Biological process=electron transport
  Homolog annotation: Hit_ID=Q69S39; Match level="QueryCoverage=98%, HitCoverage=99%, E-value=5e-99, Identity=78%"; Hit description =Cytochrome b6-f complex iron-sulfur subunit, chloroplast precursor
  Pfam annotation: Domain name=CytB6-F_Fe-S; Domain location=55-93; Score=81.5; E_value=2.7e-21; Accession=PF08802.1; Description =Cytochrome B6-F complex Fe-S subunit
  Pfam annotation: Domain name=Rieske; Domain location=103-193; Score =53.5; E_value=7.3e-13; Accession=PF00355.17; Description=Rieske [2Fe- 2S] domain
  Pfam module annotation: Pfam domain module=CytB6-F_Fe-S::Rieske; Domain location=55-93::103-193
  Subcellular localization annotation: CTP_CleavageSite=45; ConfidenceScore=5.34e-01
MATSAALSTAANPTQLCRSRAALGKPVKGLGLGMGRERASQRSITCQAASSIPADRVPDMEKRKLMNLLLLGAISLPTVGMVVPYGAFFVPAGSGNGGGGTYAKDKLGNDITVEEWLNTHGPNDRTLAQGLKDKTLATYGINAVCTHLGCVVPWNGAENKFICPCHGSQYNNQGKVVRGPAPLSLALVHADVDDGKVLFVPWVETDFRTGQDPWWSA

SEQ ID NO: 75650 - protein, 104 aa, Zea mays
  Coding DNA Sequence Number=SeqID_32275
  Subcellular localization annotation: CTP_CleavageSite=27; ConfidenceScore=5.11e-01
MMVIASVAATSFAILLLFSLLSCLRLRATPFSAEDMGSMHLSPYSSDTSPDTDPRSDYCTSTRTFHSMRTPSFSPSLDVSFIFPAFALFFLPNLLPPSTVAAAS

SEQ ID NO: 75651 - protein, 43 aa, Zea mays
  Coding DNA Sequence Number=SeqID_32276
  Gene Ontology: Mol. function=nucleic acid binding
  Homolog annotation: Hit_ID=Q5NKQ1; Match level="QueryCoverage=72%, HitCoverage=3%, E-value=2e-10, Identity=96%"; Hit description =Putative uncharacterized protein 9C20.4a
MEFLSVMQESRIPQHCIMDFVSEMHGGPENVQEESATKRKKCQ

SEQ ID NO: 75652 - protein, 112 aa, Zea mays
  Coding DNA Sequence Number=SeqID_32277
  Subcellular localization annotation: CTP_CleavageSite=63; ConfidenceScore=5.27e-01
MVPSPSWWPTPPLSLLLATTGRHVPRSSWDPSPATSTTSYEDTDSAALDAGTGTRPDGRTAPRASATPPTPRPRSRRCVRAQRTGRPAPEHKGQVDGDGSVCRGDVDDNASS

SEQ ID NO: 75653 - protein, 198 aa, Zea mays
  Coding DNA Sequence Number=SeqID_32278
MGNSPAETREMRGRGARELEDRRDVRNRGASKNAAQELGAGVGDRFGRARAARREAERERQGRPSREEGEREGREHREKLGCAMAETFKSGARKPKMTPVDSVQAMCTRNRRLHATSSEVREPGERRWRASTRKRGWDEDKGGGSGLHGCAQLDLYPGPAEQIKARDSGGLENKSKEGAVAIRKKKIFSPFFRKLQIF

SEQ ID NO: 75654 - protein, 96 aa, Zea mays
  Coding DNA Sequence Number=SeqID_32279
MTPVDSVQAMCTRNRRLHATSSEVRVPVERRWRASTRKRGRDEDKGGGSGLHGCAQLDLYPGPAERIKARDSGGLQNKSEEGAVAIRKKKIFSPFF

SEQ ID NO: 75655 - protein, 261 aa, Zea mays
  Coding DNA Sequence Number=SeqID_32280
  Gene Ontology: Mol. function=nucleic acid binding
  Homolog annotation: Hit_ID=Q5NKQ1; Match level="QueryCoverage=88%, HitCoverage=30%, E-value=6e-75, Identity=57%"; Hit description =Putative uncharacterized protein 9C20.4a
MADADARKFACECKHWEHTEIHLLCYTRCDFSRDDKNLKGKDGETKSYRKKMLLKKAMKVVHHASLSRAGHDRALEMMDELLLLLSRLEPDIEGDDSTSDGEGIHGEGDDVRDMPGEIQLVPSIHEGGVCDTQCAMPLQVLEQKLDFNVSGVSLRRPDNAKPKGRTISDTEKRVIKLGAKGVKKKNRKCQRCGIADGHNSRTCLSVEENMLRLASLTGRKRGRPLGSRTRVHLMLQVGMRHALQKNITGVSQTMIHLVGSR

SEQ ID NO: 75656 - protein, 265 aa, Zea mays
  Coding DNA Sequence Number=SeqID_32281
  Homolog annotation: Hit_ID=Q6K546; Match level="QueryCoverage=46%, HitCoverage=54%, E-value=2e-10, Identity=35%"; Hit description=Dual specificity phosphatase-like
VGNIKSNCALMEASIPSFESMPILCGMKEMETSQTSNLGIHQELGPEISQNPMGNHINPEKETNETPGSEVNQELVEICQGAVVETDMSQENQAVPEAGLEVNEETMETCQETAAESDVNPEKQTSDPGVIYRCRKCRRMLATQEFVVTHEWKKDMLRTSSFAWDAKLIWDSSTGLSAATDWHVGFTKLQQLKLGSIMWAFSLLISPVAIGFMLFPFVRGILFPMVFMQQTYVGNNTELDDESDGENPCGIQKGFEAMVFHPRTS

SEQ ID NO: 75657 - protein, 114 aa, Zea mays
  Coding DNA Sequence Number=SeqID_32282
MATSGLMVGESEPGCGLCPSLNLKDFHHQGWGGECAELRPARAIASAGLNSNSTAFCPSLPHEFWRGRGPPGSSIRPEVSAAAVRPPGAEVVVVAAAGAGMFVWARVASRGRDE

SEQ ID NO: 75658 - protein, 221 aa, Zea mays
  Coding DNA Sequence Number=SeqID_32283
  Gene Ontology: Mol. function=metal ion binding
  Homolog annotation: Hit_ID=Q6K512; Match level="QueryCoverage=85%, HitCoverage=92%, E-value=3e-40, Identity=42%"; Hit description =Putative RING finger
  Pfam annotation: Domain name=zf-C3HC4; Domain location=143-184; Score= 22.7; E_value=0.00024; Accession=PF00097.16; Description=Zinc finger, C3HC4 type (RING finger)
MLNLYPRQQLQARNADEDDAVEADGYNPFYGIAVVCLSIFLFCALAASVDVWKALAMAALAALLLGVGGCFAPKGWLRRPTGRRGASASAELVVVTVRATGPARPGYAWPRVDAPPAFAFQCPLKADGGSVPAAAAASSSVVCSVCLDDVRGSEMVRQVPACGHIFHVGCIDMWLHSHRTCPMCRCMVSLSPPPPKAVASSRAAAEAPPESSAGDAELLPV

SEQ ID NO: 75659 - protein, 274 aa, Zea mays
  Coding DNA Sequence Number=SeqID_32284
MKETALFGRAGGLHTQISTSTGGSKSIDETWWLGAHAASWCSDELISKCSFRTARLNKEAAHCGFAGAPRPAHVMTAMGWPWRPQQSASPHEETVPSGMPGTLALSSEAATLLGIPSLSSPCSVGEGGWEGVAAADGAAAGGGEGWAAGGGEDNLELIPGVMDLRSMGIAVFSGEVIPLCRRLGSRSPQITTEEPLWFLSILRLLKGGILPQYLPMISLNVFLRYLFSTQGPFYLILILYHPMEICVMDFCNIKIDTGNSIDKTACSNKAWTMK

SEQ ID NO: 75660 - protein, 63 aa, Zea mays
  Coding DNA Sequence Number=SeqID_32285
  Gene Ontology: Mol. function=N-acetyltransferase activity; Biological process=metabolic process
  Homolog annotation: Hit_ID=A2X8Z2; Match level="QueryCoverage=63%, HitCoverage=23%, E-value=6e-14, Identity=82%"; Hit description =Putative uncharacterized protein
MTTNTKHAYKLQEFVAHSSNVNCLKISRDAGCYKVILDCTPELRAYYAKCGFVEKGVQMVVYF

SEQ ID NO: 75661 - protein, 223 aa, Zea mays
  Coding DNA Sequence Number=SeqID_32286
  Homolog annotation: Hit_ID=Q84KJ3; Match level="QueryCoverage=91%, HitCoverage=36%, E-value=7e-48, Identity=52%"; Hit description=UV -damaged DNA binding protein 2
MYNMQMKQNCNPRHGITTSPFYLLEENKHYSTSVFTYDSSQNNFSSSEDEDNLNRIISGNFPYPVDQHHLDNPHVKANLLFQDYNETVAVIGRYISENYNGVALHPIDFIDTSSGKLLAEVMDPDIITISPVNKLHPQDDILATGSSRSIFIWKPKTEDELTEERAKQKAKEYVYGSSSRKKPNGKHDNSSDDDSGGDSGGKNKKAKKTRFTHAVKGKGKSNV

SEQ ID NO: 75662 - protein, 269 aa, Zea mays
  Coding DNA Sequence Number=SeqID_32287
  Subcellular localization annotation: CTP_CleavageSite=60; ConfidenceScore=5.05e-01
MEAYAPAGSYRPVCDTVVFVCLASASALIVFMVAVCFRNAFAANGYATAAVATNGAAGATAANGRSRCGLAPSRAVGDPRARLPPEGRRVGAVRDLPRLGAGRGDGAIAAGVRPPIPRRVHRPVAALSRNMPALPAWRRRGSRRKGTRMDPAPATVPTDRGCTQPPPTDLAHNRARARMNPAPAAVPAEIASLNRAWTQPPRHALALRDAGSPRALSRFSASSLGAGRGGRSCAGPQRRIRARAIERAVLVLNWICSESNEQAPEKIKL

SEQ ID NO: 75663 - protein, 199 aa, Zea mays
  Coding DNA Sequence Number=SeqID_32288
  Homolog annotation: Hit_ID=A2WJL5; Match level="QueryCoverage=30%, HitCoverage=19%, E-value=2e-22, Identity=80%"; Hit description =Putative uncharacterized protein
  Pfam annotation: Domain name=DUF1664; Domain location=134-199; Score =38.9; E_value=1.1e-08; Accession=PF07889.3; Description=Protein of unknown function (DUF1664)
MDKICRFGPLRDEQHKAVHEVVEVVLRSMQQDAGAEGDWFDNWGYEEPKTIILTSSDAHQSEQPRHAYLAFSRTIQEVWCIKRISVVPHVENLQRLTCWAPKLQCSSIPQSKFTMPTNHSLLLRFTIPICTKMPQGPGAYGITAVIIGAIGYLFIRWKGWKLSDMMFVTKRGLSDACNVVGKQVDQVSESVNVLRCTLQ

SEQ ID NO: 75664 - protein, 141 aa, Zea mays
  Coding DNA Sequence Number=SeqID_32289
MCERTCATIVVGAEDWQGAAANSETTDQAKDGGKKSFEVPSAREKVKEAEEPKAKGEEEGLQSQGQGSSVWHTGLSGGAPDSVRCARLNSVELDALGNSPATYGYNSPDCPVCTGLSGEQTVGRANGRPRDLRGTRGRANG

SEQ ID NO: 75665 - protein, 86 aa, Zea mays
  Coding DNA Sequence Number=SeqID_32290
MESDYLFEVNPGKGGSSKGGFHWNEMGYLDVTSGHILSYFILHPLPPVSGLEVQTVFEPKDSLVICPEVRELFLAGFLHKPCRLWV

SEQ ID NO: 75666 - protein, 101 aa, Zea mays
  Coding DNA Sequence Number=SeqID_32291
MNVCELTLAVSHPPQVKNSNKNTPTWRKRLHALSGGDPTEDDPTIVYMAGYLHTLDNYYDELSSHCTHLKRPDPLGLKCDTITSPRRLVITFITSNSTESE

SEQ ID NO: 75667 - protein, 684 aa, Zea mays
  Coding DNA Sequence Number=SeqID_32292
  Homolog annotation: Hit_ID=Q10PX0; Match level="QueryCoverage=98%, HitCoverage=51%, E-value=1e-107, Identity=37%"; Hit description =Expressed protein
KPRKHSAGINEVEEGELSPVAEPKARPAAVEHRKQVESSRVKEKGLEQGKAKKLNSGVQANLGARANGSSSASDPNNAAREEGKKRDDILVAEAMDEVREKSSTMVTEEVVSGGHQVQALHAATTDSSEFGLTTSPMQQGVLQEEVKPQEETTNSVDMVGENTSSTMLKEGIQEEATTRDKTNNDTDEVRESASSNFSQAVQEEVTALHKTGNAAIEVGKNISPLMQQEVLQDAVVELDDTAHAVDEVVKSASSDMLKEVIQEEVVQHNGSADVVDMVDTDTSDLPWEAMQEKTVILDGNDHNFDTVEPVSYSGMLKEAMHEGELTRDETAINTIVAGQGNSTDMVDEVMLGKAAVREVISSAVYSVGESNMSTGLQGEVMVSQNQQAPESKEFEKITVMAEMDEPAEDITPQPVEVELEIHHCKERGTSEETLVVEKDASAMHENVEKEVKGFDIEAKADRAFMFHKPMKEHAGGSKEEVANTNLMTRDLTEDKRNGIEFDVLSKKVKVDHSCSLGRGLDSTLQRGVEPTQTSKSASTTVVKTEHDTIKLEKLDLSLSLSVCLQNSESKSSIPKTASLVHAAFSQPLSSSSFHTNSDGFPTSIPLTNSETLDHNPSCSLTQQSLDNYEHSVGSKPFFMGVDQMSNHTRRQAQLSSESTQKGSATPLLQRVLQMAIWQILALLR

SEQ ID NO: 75668 - protein, 199 aa, Zea mays
  Coding DNA Sequence Number=SeqID_32293
GRAAFFPNGTGPAAQHTGDRRPSNSVYQTDNGKAIHDAEVEAKRLVKFLPGFEEGRVREEGGNTITRGFRLVATNSVENDIGEGDFQAEDSVAGGARRCNRFPKKRRRIWCVEIDPGPLASETVKKKKKRGRKWAGGVLFSPAGAVKARKGEDGPETDISAQVTVYRGLRDLSAIVLAQLFEGFSSNALVSVWEAVPDE

SEQ ID NO: 75669 - protein, 258 aa, Zea mays
  Coding DNA Sequence Number=SeqID_32294
ASTTGAAELFLLAPQEIESVRSCSPVLPLEPPPAPPLGAPASGVAAGGDPDDGDGDDSSSHDTDFSANPEPEGWVARPITRDAARGCHFHDALDTLLRRAFDRHTWSVEVRRPVQSTILSLSGTQLRQPCKTLHGVRFRTTARFFGGAADGLDLKYYPRRPSGSTGGVIVSPVGEGNPRLSSTVNLAAVLNTELDHALDELSRARAEIAQLRAERAERRHLDGGSPAPVGIQHPYRSPQRGHQSYGNPDCKTKITLEP

SEQ ID NO: 75670 - protein, 546 aa, Zea mays
  Coding DNA Sequence Number=SeqID_32295
  Gene Ontology: Mol. function=nucleotide binding; Cellular component =endoplasmic reticulum lumen; Biological process=response to stress
  Homolog annotation: Hit_ID=Q10PW8; Match level="QueryCoverage=100%, HitCoverage=100%, E-value=0.0, Identity=81%"; Hit description=DnaK protein, expressed
  Pfam annotation: Domain name=HSP70; Domain location=28-546; Score= -7.6; E_value=1.3e-13; Accession=PF00012.11; Description=Hsp70 protein
MAEQFYTVASDSETTGEDKSQASFPDVAVGIDIGTSKCSVAIWNGHQVELLKNTRNQKGMRSYVMFKDDTLSAGVTGGAAKENAHEERDILSGSAIFNMKRLIGRMDTDEVVQASKTLPFLVQTLGIGVRPFIAALVNNMWRSTTPEEVLAIFLLELKALVEMHLKHPVRNAVLTIPVAFSRFQQTRIERACAMAGLHVLKQQQQLVHDNMGSGIEKIALIFNMGAGYCDVAVAATAGGVSQIRALSGCTAGGEDILQNIMRHVLPNFDGIYAGQTMDRIKSMSLLRIATQDAIHRLVSQESVEINIDLGNGHMVSKVLDHSEFEQVNRAIFDKCEKIINQCLADAKLVPEDINDVILVGGCSKIPRIRSLVLGLCKKEVSYKNIDALEAAVSGAALEGAIASGVNDPSGSLDLLTIQATPMNLGIRADGDSFAAIIPRNTTVPARRDMLRGERAEDNHLLGYFKITGIPAAPKGAVDISVCMDIDAANVLRVFAGVVKPQGPAIPPFIEVRMPTLDDGHGWCGQALAKMYGRILDLAVLPKKLQP

SEQ ID NO: 75671 - protein, 178 aa, Zea mays
  Coding DNA Sequence Number=SeqID_32296
  Gene Ontology: Mol. function=nucleic acid binding
  Homolog annotation: Hit_ID=Q2QU58; Match level="QueryCoverage=47%, HitCoverage=20%, E-value=7e-07, Identity=30%"; Hit description=Zinc knuckle family protein
  Pfam annotation: Domain name=zf-CCHC; Domain location=12-29; Score =22.5; E_value=0.0006; Accession=PF00098.14; Description=Zinc knuckle
  Pfam annotation: Domain name=zf-CCHC; Domain location=37-54; Score =11.1; E_value=0.032; Accession=PF00098.14; Description=Zinc knuckle
  Pfam annotation: Domain name=zf-CCHC; Domain location=83-100; Score =23.8; E_value=0.00038; Accession=PF00098.14; Description=Zinc knuckle
  Pfam module annotation: Pfam domain module=zf-CCHC::zf-CCHC::zf-CCHC; Domain location=12-29::37-54::83-100
MSFKHKKGRGKRRCFKCKEIGHLIASCPYKNKDEGTRSCFGCNNKDHTITSCPVMKNQGCASSKVTLTKESDTQQASCQVERRFCYKCGKQGHISKVCYKVSRWKREDKQEMEQSGLGYLSLETTDQAKDGGKKSFKVPSAREKVKEAEEPKAKVEEEGLQVKGDRVENSYGTSRITT

SEQ ID NO: 75672 - protein, 605 aa, Zea mays
  Coding DNA Sequence Number=SeqID_32297
  Gene Ontology: Mol. function=catalytic activity; Biological process =cellular metabolic process
  Homolog annotation: Hit_ID=Q10PY3; Match level="QueryCoverage=33%, HitCoverage=57%, E-value=7e-65, Identity=68%"; Hit description =Expressed protein
  Subcellular localization annotation: CTP_CleavageSite=78; ConfidenceScore=5.80e-01
MSARRAAKSQHAAATPRTINLNLARRPGGGRPSRGAGRAQTRPAPPQPARQVQVNLGALFEMERRVRGLESAPPSPAPASQSQEDAEEREEKWQFQAEILRAECNFLRMEREVALRKLDRPPRPDGGRAQGRKKVDGKGDVGVAAALDEGIEDLEEMMEELRVEKESGRRAMGGARELQRSRGRNFDRQASSLRRRLEKMPPANPDPLVKDIREIALPVPAPPPPPPAAEQSGDDERVHGANTSDVEMLRMKMEGMSKGMRERMAEYSRRLEAVASGDNAGCQSRKCGNRHSRKASAGSQRSWSGGSTASNGNAPSALDAGPHARSRQNVAAEKRQQQHVFISLFTTLASIFLAFSGSKIRSTKGMRIADLGVLLIDRSWLGLQFLMAIQYYALTVKLVGEAIHSNLKQLIMSGECKLVGSASCRDCREIMWKIMEQVNAESDQWTEMQDMLEQVRLEMQELQSSRDTWQHRAMASDISLRSLNSQNRRTDGEIVELLEWKNRGQAYEQRAEELHRKISELESKLHTSKAHLPAPAVIPNQNQWSDACKMEHPRGNPQHQPSKEPGKEEIKKHVLICRVKHSPSSVLPKRSPFQEIGNIRLPRHR

SEQ ID NO: 75673 - protein, 78 aa, Zea mays
  Coding DNA Sequence Number=SeqID_32298
MGRFTTGVFRAYATAEPRLGCRSGLGNSTRVERGAHGWCCGHPSSIGSPRVVPISHRVRFAAVVGSCVVGRLPPYLKS

SEQ ID NO: 75674 - protein, 110 aa, Zea mays
  Coding DNA Sequence Number=SeqID_32299
MELARGLGWMGQGIAAGFMLQEGRVREEGGNTITCADLPEESRSRRKVRGLFEGDETDDPGPLASDTVKKKKKRGRKWAGGVLFSPAGAVKARKGEDGPETDISAQVTFS

SEQ ID NO: 75675 - protein, 187 aa, Zea mays
  Coding DNA Sequence Number=SeqID_32300
  Pfam annotation: Domain name=zf-CCHC; Domain location=29-46; Score =10.3; E_value=0.042; Accession=PF00098.14; Description=Zinc knuckle
MKNQGCASSKMTLTKENDEQQASCQVERRFCYKCGEQGHISKSLGGKEKISKKWSNLDLGTSQQEKVRIKNQAQVWRSSQEINYFQDGKYTTSCIMVRFLPKCILKSAKGYIMDITSKMNIAKVRLGCVARRQLIKPRTEARRASRYQVHGRRSRRLRNPKPRVKKKACKVKGDQVENSYGTSRITT

SEQ ID NO: 75676 - protein, 787 aa, Zea mays
  Coding DNA Sequence Number=SeqID_32301
  Gene Ontology: Mol. function=hydrolase activity, hydrolyzing O -glycosyl compounds; Cellular component=endoplasmic reticulum; Biological process=carbohydrate metabolic process
  Homolog annotation: Hit_ID=A2XDZ1; Match level="QueryCoverage=85%, HitCoverage=79%, E-value=0.0, Identity=87%"; Hit description =Putative uncharacterized protein
  Pfam annotation: Domain name=Glyco_hydro_31; Domain location=330-698; Score=451.7; E_value=9.9e-133; Accession=PF01055.17; Description =Glycosyl hydrolases family 31
MDPPPRRLAAPLLLLLLAAASPAARAWKKDEFRNCNQTPFCKRARTRAPHSLEAPLSLAAGSLAVSPDGSISAELSHPSRPRPLVLRLSVLPPHALRLQIDEDYSTATPPHRRFQVPDVLLPDLEARTLHLPEPKTAAGVSTVALSSDLDVVVKHDPFELTLRRAGSGDPVLSFNSHGLFDFEPMRESKPENETWEEHFRSHTDKRPRGPQSITFDLSFYGADFVYGLPEHGSTSLALRPTRGPGVEESEPYRLFNLDVFEYLHESPFGLYGSIPFMIGHGSRSSSGFFWLNAAEMQIDVLAPGWDGATAQDNGRIDTLWMAEAGVVDAFFFVGSEPKDVIKQYISVSGTPSMPQQFAIAYHQCRWNYRDEADVDSVDAGFDEHDIPYDVLWLDIEHTDGKRYFTWDHSAFPNPEEMQRKIADKGRKMVTIVDPHIKRDSSFHLHQEATDKGYYVKDANGNDYDGWCWPGSSSYPDMLNPEIREWWADKFSYENYKGSTPTLYIWNDMNEPSVFNGPEVTMPRDAMHYGDVEHRELHNAYGYYFHMATADGLLKRDKGKHRPFVLSRAFFAGSQRYGAVWTGDNSADWDHLKSSIPMVLILGLTGVTLTMTPRDVSHGYLEFPEDKETYNNGEAFMVGPSLLAQGIYEEGQKSVSVYLPGKESWYDLRNGSPYKGSVTHKLQVLEDSIPSFQRAGCRAGSRCHNALTCNAHEREATEATSTLDSTHATGILDEGHGQPPLLPQNVGSMSDLVVYFDTDWTNYPDACKFISGYAVFLGDNLVFWSYKC

SEQ ID NO: 75677 - protein, 449 aa, Zea mays
  Coding DNA Sequence Number=SeqID_32302
  Gene Ontology: Mol. function=hydrolase activity, acting on glycosyl bonds; Cellular component=extracellular region; Biological process =cell wall organization and biogenesis
  Homolog annotation: Hit_ID=Q10PY4; Match level="QueryCoverage=77%, HitCoverage=89%, E-value=1e-124, Identity=60%"; Hit description =Polygalacturonase, putative, expressed
  Pfam annotation: Domain name=Glyco_hydro_28; Domain location=125-424; Score=277.4; E_value=2.8e-80; Accession=PF00295.8; Description =Glycosyl hydrolases family 28
  Subcellular localization annotation: CTP_CleavageSite=48; ConfidenceScore=5.47e-01
MPLLSPKKLGANAVMLVPSSPLLSSSPPLHSPEPPPHLRMGGSTTTVVVMLIVVLHYYMLLVDGASWDEVSSEADGPAPAEGPDDELWLPRAGPPPRVVNVDDYGAADAGVDAAEAFLAAWSEACNSSAGRSVFLVPEGKAYLLMPVSFRGPCRAASVAAMIKGTLEAPSDRSVWLERGLQEWITFEGVDRLRVLGGGTLDGNGMQWWINSCKLNRSAALYLRRCTRLVVEELQVRDSMQMHVAIAYSRDVAVSRLSITAPAWSPNTDGIHVSNSREVSISRCTIATGDDCVSIVTGSTFVRVTSIFCGPGHGISIGSLGANNSWAHVSDVLVEKATLLGTTNGVRIKTWQGGYGYAERISFRDISMRNVTNPIIIDQNYCDSARTTTPSSCHDQDVYLVGEGRYATCSYRNATVVQSGTNTCVPRMIMQTTIAVMPDRQPIQNRLAGW

SEQ ID NO: 75678 - protein, 105 aa, Zea mays
  Coding DNA Sequence Number=SeqID_32303
METYRTPKNRVLDDDINLAEKPSRGIPVPTGSRGGEIRGRAVGAPGHRAIANSLYPKASTTQSKSVAGASDVARRWEVMAARSSLSGAVRHLSRQGQGRRGRAAR

SEQ ID NO: 75679 - protein, 275 aa, Zea mays
  Coding DNA Sequence Number=SeqID_32304
  Subcellular localization annotation: CTP_CleavageSite=51; ConfidenceScore=5.20e-01
MSSRSLMHRVFPPSKPPDGGYPPSFCLIVGGTQLRGSWYLSAIVRLQGFSSCSPAAPPHQRSPKMVTSNLMVGESEPGCGLCPSLSLKDFHHQGWGGDCTVPGSRTQVASEPLAAPASATAAGRGSSAGEIAKAGHGPTSNSTAFCPSLPHEFGHGRGPPGSSIRPEVSAAAVRPPGAEVVVVVAAGAGDGAPFVGLLLLRRPTPIEWGYSPVDYLNRFTKHESPRVKVTSESGDPRTASPSEARSNLAEGVVDAEGATAPFQRQDPSLQDQSVL

SEQ ID NO: 75680 - protein, 94 aa, Zea mays
  Coding DNA Sequence Number=SeqID_32305
  Homolog annotation: Hit_ID=Q10QQ8; Match level="QueryCoverage=56%, HitCoverage=6%, E-value=3e-11, Identity=66%"; Hit description =Expressed protein
MPNLVVKQPIWIQSSLAKGSSLPVEVMMVDGLYGRKEQEGLLKCLQGMELSHPFDCAVATSGIDNTIKLWTPDANAYIYGLLGPELDVLSAIEK

SEQ ID NO: 75681 - protein, 39 aa, Zea mays
  Coding DNA Sequence Number=SeqID_32306
MASVLDAVMESSKVQTPASAPDRKGEIPKKSSEAGLNPK

SEQ ID NO: 75682 - protein, 96 aa, Zea mays
  Coding DNA Sequence Number=SeqID_32307
MNVVVTSHLLVCLYSAAGEKVNRQGLPHQTNSHPHSLNGGPQAFENKSPTHSIREQGPTLAPTVGELNRPPSASIDFRNAAEEDNGARECPTATGH

SEQ ID NO: 75683 - protein, 432 aa, Zea mays
  Coding DNA Sequence Number=SeqID_32308
  Gene Ontology: Mol. function=protein binding; Cellular component =cytoplasm
  Homolog annotation: Hit_ID=Q10QQ8; Match level="QueryCoverage=51%, HitCoverage=29%, E-value=5e-99, Identity=77%"; Hit description =Expressed protein
  Pfam annotation: Domain name=WD40; Domain location=124-163; Score =18.4; E_value=0.027; Accession=PF00400.23; Description=WD domain, G -beta repeat
  Pfam annotation: Domain name=WD40; Domain location=199-238; Score =10.9; E_value=1.4; Accession=PF00400.23; Description=WD domain, G -beta repeat
  Pfam annotation: Domain name=WD40; Domain location=27-65; Score=36.0; E_value=1.4e-07; Accession=PF00400.23; Description=WD domain, G-beta repeat
  Pfam annotation: Domain name=WD40; Domain location=70-110; Score =19.2; E_value=0.015; Accession=PF00400.23; Description=WD domain, G -beta repeat
  Pfam module annotation: Pfam domain module=WD40::WD40::WD40::WD40; Domain location=124-163::199-238::27-65::70-110
MSWLWFKPKYNDIKKKAQFHSSLVQKLALEKEMEGHVGCVNAIAWNSSGSLLVSGSDDTRINLWNYNNRELVHDIDTGHSANIFCTKFVPETCDEVVVSGAGDAEVRVFNMSRLSGRRPREISMEPTMVYQCHSKRVKKLAVELGNPNVVWSASEDGTLRQHDFRECSSCPRAGSANQECHNVLFFENFLELDLRCGAKKSLADLPKHPLALKSCDISSVCPHQIIVGGSDAFARLYDRRMLPPLSSCQTKTKPPPCSCLAGLQDCMNCTSATAIVLGLGQVDNTNFRKMTSTLLRRLLFSSAVAQQSSEAQLKRRPRQAQYCSLSEQRTEQPKYQSNCRLKRSSSRSLNSKQRSGRLLTYSAAEQTTEEDGSTLEGASADYSRRAMEGRSCCSSRGPPKHNMEASEEGGDDGEGVAALGKSAHATLHIVLV

SEQ ID NO: 75684 - protein, 323 aa, Zea mays
  Coding DNA Sequence Number=SeqID_32309
  Subcellular localization annotation: CTP_CleavageSite=21; ConfidenceScore=5.43e-01
MAQGHISLSKLRSARPRARTRARSRKTANSAPPDPGLGLGLGPGRRRTPLRPTPGLGLGLSPGRRRTPLRPTLGLGLGLSPRRRRTPLRPTQGSDSGSAPEDDKLRFARPQGSDSALASAKRPPPRPTQGLGLGLGHGRQTRPRLRRSLHDAQPRAQASHGVLGPLNVADAAGFCKGRFTLPSAAGTLNVEGSGSALSALFVHQPPPGKFPAFVPRAGDCFFRARALDPARFAAGIEAGGGEAAVRRRVCRRRARTPCNRGRATPRNRRSKPGSTCSSPESRHRQKASSSADFVEGSRQKEENLLAAVVFVFDSVHRGRSTNS

SEQ ID NO: 75685 - protein, 159 aa, Zea mays
  Coding DNA Sequence Number=SeqID_32310
MPPKALGEIPGVCCSTGPYGGAVEAAGVQEIGDAAVRKGPPHLLRRVHLQLALAASPASPAARFRTIAGGWMGDASGNLDTARSFGGRWSGTEGLRSGFQEREGWKGSGDRERAPPGRSGGVGGSRSETRGATADQGVGSQNTLKDSVLYIFSVSSSVL

SEQ ID NO: 75686 - protein, 114 aa, Zea mays
  Coding DNA Sequence Number=SeqID_32311
MAKPTSASRIPDLEPPIPTVTTERGEERCRRGGILSRAAVRASCGVRDLHQDQGKDLCSIAVWISPCSHGNSSPEFPSTSAPPHTVVRVIITVSLGKTTSMWFTVTVALIGTGF

SEQ ID NO: 75687 - protein, 143 aa, Zea mays
  Coding DNA Sequence Number=SeqID_32312
MGKNNKRKREPTPPSEDFGDSEYSEEEFSSESEGSPAPIPLRESSDDSDDSQGLAAEVWTYIRAVERSGLAGSDESEYSSDEEDSSGEDGGGDGDDDDDDDGDDDDEGGGGDDGDGGGRGSSGSGKGDDGGRGSSKGSNKTSG

SEQ ID NO: 75688 - protein, 77 aa, Zea mays
  Coding DNA Sequence Number=SeqID_32313
  Gene Ontology: Mol. function=ion channel activity; Cellular component= integral to membrane; Biological process=ion transport
  Homolog annotation: Hit_ID=Q4VDM4; Match level="QueryCoverage=75%, HitCoverage=11%, E-value=4e-14, Identity=61%"; Hit description =Cyclic nucleotide-gated ion channel 2
MDGLASAVTALQTCTDVAHLTHVLLQFCLAWCGKLVRDARVVTAHYACSVKGLCFNLFIIRGGIRAFHACWRITNGF

SEQ ID NO: 75689 - protein, 98 aa, Zea mays
  Coding DNA Sequence Number=SeqID_32314
  Homolog annotation: Hit_ID=Q5NKP3; Match level="QueryCoverage=72%, HitCoverage=40%, E-value=1e-17, Identity=53%"; Hit description =Putative uncharacterized protein 9C20.7
MYDKLRRSPRLDTVQSGCSALSIVKQGTSWSSPTQESSVLGMSRAFDDYYIEDCGVILAPEVTQGRTDNNDQFVILTTVGPRGLRGWADLGPPPTGEG

SEQ ID NO: 75690 - protein, 77 aa, Zea mays
  Coding DNA Sequence Number=SeqID_32315
MQIQSCVVSFHELLFGPLMVAGSRRGTSSLRSACGESAASGINLFLEQLNPGDCTIKGNLDAFSWKHTMTTFGFQQT

SEQ ID NO: 75691 - protein, 108 aa, Zea mays
  Coding DNA Sequence Number=SeqID_32316
MARLGASRGAHRRRPWTERWASLLVGVEEATVDGEVGESGGKPITMQSYNLSIYNSDQQLKPAVKLAVSKNAAVIANYAVLHHGHRDNLEHVILMVILAQNSDTKLLT

SEQ ID NO: 75692 - protein, 279 aa, Zea mays
  Coding DNA Sequence Number=SeqID_32317
MWRLGDVRYPGESSASRGGEKSERAVVPSLATSIHLGEGASRRGSSAEPGKLGSKRPCSSGSGGGPLSVVGGKEVAREETEIQGSGATVGVRRRRTAIAKKLRRSTQPTKEGAQKRKRISSPPSSSSSTSSGAPHPKRKRSRVYGYANTHSMLVGFIEQLTMDSENAKLRRALAHLIRVVEERCADIVDVVHGAFQPVSGPVLNEMNRALVQIEDLANDLDQLALEKDWEMEHMTPTPIAESSQTEDELLIDYDSELNNDDIVGYDDGRDYSTDDTYPY

SEQ ID NO: 75693 - protein, 293 aa, Zea mays
  Coding DNA Sequence Number=SeqID_32318
  Gene Ontology: Mol. function=transcription regulator activity; Cellular component=nucleus; Biological process=regulation of transcription
  Homolog annotation: Hit_ID=Q8S0C6; Match level="QueryCoverage=38%, HitCoverage=29%, E-value=6e-16, Identity=44%"; Hit description=Basic helix-loop-helix (BHLH) family protein-like
  Pfam annotation: Domain name=HLH; Domain location=228-267; Score =12.3; E_value=0.0076; Accession=PF00010.17; Description=Helix-loop -helix DNA-binding domain
MDEVWCGLDLQLQADGIHAGPDLHGHDHDPFWSALAECAASFLASDADDTGGLVASAGDVVHAKADGMDTSSFFADNDHHGLTQRRDEQQQQQPVHSSSSLSSKRSLSIDSGGSSSSTLIPPLDGAAAAAFSPAPPQPQDPFAGDDEAIMLAMMAVISSASPSSSESSSPPHRAAGAGAVQPRVHLHGGDDSAGHVTVRTSSLAVAPTSAAARQQDDACMAAGSNNSSQVYHMISERKRREKLNDSFHTLRSLLPPCSKDPYIHTIKILAYNTYADITIPRRRGEGSTAVATT

SEQ ID NO: 75694 - protein, 75 aa, Zea mays
  Coding DNA Sequence Number=SeqID_32319
MAWRRVLTQVRWWPQIFDLGVSGRDRGLRCWALRIRTTPAYILSVHMAILGAACEDVSATDFGQTMIQFAFCHRY

SEQ ID NO: 75695 - protein, 175 aa, Zea mays
  Coding DNA Sequence Number=SeqID_32320
  Homolog annotation: Hit_ID=A2ZUM2; Match level="QueryCoverage=42%, HitCoverage=25%, E-value=2e-26, Identity=77%"; Hit description =Putative uncharacterized protein
  Pfam annotation: Domain name=Hin1; Domain location=53-169; Score =39.8; E_value=9.7e-09; Accession=PF07320.4; Description=Harpin -induced protein 1 (Hin1)
MYRPKPAQARPPAPRRHLPRRSGRGWCCACCLWLALALAGLALLGGVAAGAFYVAYRPRPPRFAVTSLRLAALNVSDSDALTSRVDFTVTARNPNDNLAFRYGDIAASFASDGADLGHAVVPGFLHPAGQHHGRPRRRGRRRQHLHRRPRQAAALRSGGSHVVSAQMDAGFAQID

SEQ ID NO: 75696 - protein, 658 aa, Zea mays
  Coding DNA Sequence Number=SeqID_32321
  Gene Ontology: Mol. function=nucleotide binding; Cellular component =endoplasmic reticulum; Biological process=membrane organization and biogenesis
  Homolog annotation: Hit_ID=A2WRP2; Match level="QueryCoverage=96%, HitCoverage=86%, E-value=0.0, Identity=83%"; Hit description =Putative uncharacterized protein
  Pfam annotation: Domain name=RHD3; Domain location=1-634; Score =827.9; E_value=5.7e-246; Accession=PF05879.3; Description=Root hair defective 3 GTP-binding protein (RHD3)
VMMRLFSPRKTTLLFVIRDKSRTPLENLEPILREDIQKIWDAVPKPHAHKETPLSEFFDVQVVALSSYEEKEELFKQQVSDLRDRFQYSIAPGGLAGDRRGVVPASGFSFSSQQFWKVIKENKDLDLPAHKVMVATVRCEEIGNEKVGSFTSDEEWQQLEEAVQHDFVPGFGKKISSLLDRCLSEYDMEAIYFDEGVRSSKRQQLESKLLQLVNPAYQSLLGHLRTRTLEAFNESFDKALEKEGFAAAARNCTQTFLEKFDKGSEDAAIQQVNWDTSKVKDKLRRDIEAHVASVRAAKLSELCAKYEAQLTKALAEPVESLLDSASEDTWPAIRKLLQRETKTAVSGLQSAVSAFELDEATEKELLVKLEKHGRSVVESKAKEEAGRVLIRMKDRFSMLFSRDADSMPRVWTGKEDIKAITKTARSASMKLLSTMAAIRLEEDGDNIENTLSVALVDTSKPGTTDRSIQLTDPLASSSWERVGEEKTLITPVQCKNLWRQFKAETEYTVTQALAAQEANKRNNNWLPPPWALAAMAILGFNEFMTLLRNPLYLFAIFVIYLVGKAIWVQSEIGREFQHGFLPAILSLSTKFVPTVMNILKRLADEGQAPAAAPERQREMELQPKPTRNGSSYTNATSAGSSSVTTSEIGPEYSSPVAQ

SEQ ID NO: 75697 - protein, 195 aa, Zea mays
  Coding DNA Sequence Number=SeqID_32322
  Gene Ontology: Mol. function=transcription regulator activity; Cellular component=nucleus; Biological process=regulation of transcription
  Homolog annotation: Hit_ID=Q8S0C6; Match level="QueryCoverage=76%, HitCoverage=32%, E-value=2e-34, Identity=56%"; Hit description=Basic helix-loop-helix (BHLH) family protein-like
MAWSWKLQLIPRESTKVLVYTCTDRNSQKDKTTVLTNAASYLKALEAQVSELEEKNAKLERHVPRDDGGGGTAATAAAVAHRRARVHVARAAPGEPQVSVTVMVMVECDIVDLVLRVLECLRWMGGVVSVLSVDADTYSPQAMLKALANIKLHIVDGDCWNEALFHEAMTKAVHDATSPSSSPSCAAVAPLVAAA

SEQ ID NO: 75698 - protein, 142 aa, Zea mays
  Coding DNA Sequence Number=SeqID_32323
  Gene Ontology: Mol. function=phosphogluconate dehydrogenase (decarboxylating) activity; Biological process=valine metabolic process
  Homolog annotation: Hit_ID=Q656T5; Match level="QueryCoverage=33%, HitCoverage=14%, E-value=2e-19, Identity=91%"; Hit description =Oxidoreductase-like
  Subcellular localization annotation: CTP_CleavageSite=26; ConfidenceScore=5.52e-01
MPAAAFFSAALPPPSRTLSRRLVVSRAAAAAASASASSSSGWQGGGGVEFQGKVGVPGARDHGRAHGIQPHQGRVITPFPSLCFPSCSHGRPLCDVTVWNRTKSKCDPLLSLGAKYEPTPAQVASSCDVTFAMLADPQSAVN

SEQ ID NO: 75699 - protein, 116 aa, Zea mays
  Coding DNA Sequence Number=SeqID_32324
  Subcellular localization annotation: CTP_CleavageSite=61; ConfidenceScore=5.36e-01
MKLWKETSRSSKTTTSSRCGLAATPSRLPVKAAVIYVSFPHFDLFASGAGPASGGGRRDSRAPTPSSTPRDPTPTPSDVIAPTPTDGQGTGTTNTDAVEIDEDVRVGSKRKLKSDV

SEQ ID NO: 75700 - protein, 33 aa, Zea mays
  Coding DNA Sequence Number=SeqID_32325
MEFSIISSSATSDQLSKVELTYGRAQQWGKTNA

SEQ ID NO: 75701 - protein, 343 aa, Zea mays
  Coding DNA Sequence Number=SeqID_32326
  Gene Ontology: Mol. function=adenyl-nucleotide exchange factor activity; Cellular component=chloroplast; Biological process=protein folding
  Homolog annotation: Hit_ID=Q6K635; Match level="QueryCoverage=91%, HitCoverage=90%, E-value=1e-101, Identity=66%"; Hit description =Putative co-chaperone CGE1 isoform b
  Pfam annotation: Domain name=GrpE; Domain location=134-305; Score =171.7; E_value=1.9e-48; Accession=PF01025.10; Description=GrpE
  Subcellular localization annotation: CTP_CleavageSite=32; ConfidenceScore=5.59e-01
MAALLRTAAALAPPPSSPPSAREPRGRCLRLACSRRAPVRPLRAWPLPTPHVFCLAGGRLRRLGATEADEAAQTATQVVLKRIEIPQCRTVLEDLETEVTGDSAADDSAGSTDETPSIIVTTLQSYREALINDDEAKAAEIESFLLSIEDEKNSLLNKITALDAELATQRERILRISADFDNFRKRTENEKLNMMENVQGELIESFLPVLDNFERAKVQIKVETEGEEKINNSYQSIYKQFIEILNSLGVEDVETVGKPFDPMLHEAIMREESSEFEEGIILQEFRKGFKLGERLLRPAMVKVSAGPGPEKFGDDDPTAVEGSVAPQKVDEVEDDGFGAGDAE

SEQ ID NO: 75702 - protein, 123 aa, Zea mays
  Coding DNA Sequence Number=SeqID_32327
MNGRIEAQRRGNGCREVARFGRCARSVSRCSAPGLRKVGSGAWCRGLVGAGGSGARDLRGLRGGSSTGARPALRLGQGGRGVLGAVRRREERGSWRLGEEEAGAAAALAGRGGRRLWVGPARE

SEQ ID NO: 75703 - protein, 158 aa, Zea mays
  Coding DNA Sequence Number=SeqID_32328
MILGASDGEAPPRRASSGALRRASGDGAPLGPSDGDAPEAGGQAALAHPYPVATMVARGAVYFDNIGGGHGRRGWHLRSCEARSSPARADTRGVVYFDNIGGGHGRRGWHHRSCEARAWVASASFDDQLLRSVALAASSSDDILQSFIYACSCWLSSY

SEQ ID NO: 75704 - protein, 184 aa, Zea mays
  Coding DNA Sequence Number=SeqID_32329
MPRGRAVWALRAVGVAVLGAWDAQGGVGRLVSRFGGRGRLRCARPARAPGRLEHRGSAGVAARAGWPRGARCSASERGARVLAAGGRGSRSGGGFSWERREAPVGGARARGVTQCKEKTGDKQEQELKPTNKISNTYINKTNKKAATPYLIKKKKNGKVVAIKANKQADKGKRAKFIWVSKEII

SEQ ID NO: 75705 - protein, 307 aa, Zea mays
  Coding DNA Sequence Number=SeqID_32330
MRDPAPESQGRALERVGEDSARGAWGRTNATPWELVPLSHRSASRIFITQPGRTPSPAVTRDGDLRLDGGGKRAGLRPLPLPQPQGFSSPRLGRGECRVGGRPLRGRWPAPSLSDGGEKRVLPVAPGSCSVPGLQPRVASGPLAAPASATAAGRGSSAGAAAGTGHGLTSNFSAFCPSLPHKFWHGRGPPSSGIDPEVSAAAVRPPGAEVVVVAAAGAGDGAPFVGLPLLRRPSPSEWGRSCLRRGNRSSVRNGTSNASVFCSLRLSGPEHESLGPFGLVVWGSSSLVKETPRLPFGGPRPGVAISV

SEQ ID NO: 75706 - protein, 171 aa, Zea mays
  Coding DNA Sequence Number=SeqID_32331
  Gene Ontology: Mol. function=N-methyltransferase activity; Biological process=phospholipid metabolic process
  Homolog annotation: Hit_ID=A2X749; Match level="QueryCoverage=95%, HitCoverage=95%, E-value=3e-54, Identity=62%"; Hit description =Putative uncharacterized protein
MAAAAAAVGVLLPFPFYYVLWTHPQRWVDLCGRSADPCRRMAQVSHAIKALQLLALASVSSFSWPPPLYCPHPPRRRPVSQLQVSSSVRVYQLLGEPGTYYGVRFGKTIPWVTEFPFGYIKDPQYVGSMLSLVALLCWVPLQYVLLWCLGYVFMMWVEHKEDSASRAKVIS

SEQ ID NO: 75707 - protein, 289 aa, Zea mays
  Coding DNA Sequence Number=SeqID_32332
  Homolog annotation: Hit_ID=A3C0Z8; Match level="QueryCoverage=16%, HitCoverage=22%, E-value=4e-08, Identity=53%"; Hit description =Putative uncharacterized protein
  Pfam annotation: Domain name=zf-C3HC4; Domain location=166-207; Score= 28.6; E_value=2.2e-05; Accession=PF00097.16; Description=Zinc finger, C3HC4 type (RING finger)
MAARYTYTYGDGPGGSSCLRIGLTALPCSGVALRLSAVIDCTPGKDRMPPVTVDFLKNLPLQQREAEAPAAVAAQVTTGRFTCSSGDFLLVSQIQRVEAMVAAAGLPRECALSVEEFFRLSASNAVNTFYKAMAITVEAGALGSIVVDEHQHEHEELPPGAVVGECAICYNEYLVGGATSVKLLCGHTFHRRCMDRWTAVNRTCPYCRAPVPEEKQDCWDEDDYCDDSVSEYDEEDDGASTVPGPTAVARNSRPLRLTRLWRRTSVSQLLFILWRRTSVSKAFSGKKET

SEQ ID NO: 75708 - protein, 235 aa, Zea mays
  Coding DNA Sequence Number=SeqID_32333
  Gene Ontology: Mol. function=nucleic acid binding; Cellular component= nucleus; Biological process=positive regulation of RNA export from nucleus
  Homolog annotation: Hit_ID=Q84L14; Match level="QueryCoverage=65%, HitCoverage=90%, E-value=3e-32, Identity=43%"; Hit description=Cap -binding protein CBP20
MEQELEGPTLGVQKPPKGSEGPGGTLGACGVVGPHGWQGGHMVQPKLASGLARAISGGFPCCLQDPSKLSAYRDRRFKGTQEEYEAALLASTTLYIGNMSFYTTEEQAYELFSRAGEIKKIIMGLDKNSKTPCVVWYMHIYGKAMGTDRATPQQNAMGDGACLCYERSERKRGHGDSHRNDRGDYQRKRYRNDDRSAPEESKRAPDSDPAEKNPRFREKGDSDEEEDDYDGKRRR

SEQ ID NO: 75709 - protein, 158 aa, Zea mays
  Coding DNA Sequence Number=SeqID_32334
MAVRPCTVRPWPWEKSPSCPSMASAHDINSRTPNATNPPAKTDDTGMATETTGLVSGPLYTIPHDTWVGLPCTFCHTDRYFNHYVSVVSSTRWARVHIRAPDPGLGSLFGQNTGYRRGHPPPKQRQQPGQGPSQWPYFYMLEICPRDNHRDEHISLYP

SEQ ID NO: 75710 - protein, 44 aa, Zea mays
  Coding DNA Sequence Number=SeqID_32335
MYGLQVVMRMMVLVMPMVMVVCAATTTQVKMKLWRGGLPGVPRV

SEQ ID NO: 75711 - protein, 112 aa, Zea mays
  Coding DNA Sequence Number=SeqID_32336
MKLPEPGIKLYLAGDTGSTSPDFTRSSAYVDRAPRKKYCNLADGEYILVPEQGVAQEVAQEPAPEPAIEDLPAPALEGSLEDMVAGVTWPSILPPGWTVEWAPTSAEEEHEE

SEQ ID NO: 75712 - protein, 294 aa, Zea mays
  Coding DNA Sequence Number=SeqID_32337
MTSHESSEGGNTHSHTDGLAREGFPRILWEVLQGAGYTTPSQYAVQLFEEHRVPRCRVRMTLEPHPLQPGWHSLDSESFGYSAEDTIEAIALHGLTTFCGFHPLELSTHPIGLFPAEKEDDPMWKDRVEHAKDVWALYPGQTAHLTVRCMNALYRLQAVRGEAMSQLMGLVEATKITLDNREDLVVDLSTELVEKDLQVEQMATQIQELEEQIGARENTIEVLEDQLLNTQQQLGEANQHLDMHHLEIQDMEAEGADEDVDIEGGEEPKPAFSLDTAGSGRPPSPESSVASFAH

SEQ ID NO: 75713 - protein, 241 aa, Zea mays
  Coding DNA Sequence Number=SeqID_32338
MGFCKKLASAGPVIELGIHFSKHFCKTESLIIEKPYLDSHITSIPLRVFSLVGLTTRKSTGPIGVPRHQLAPRHESSSSGSNDPIGDLEARVSRLQAALQHRTDAWVADGDRINELRRDIRHLQDQLADRDLALDWAVQSRLLMCAKEARAQARVKELSSTVDDLQVYCNTLHEEVHILYSQLHPSEPAQPAEAEAGPSHVAGRALGGELDLFEPPPSLRLVDVWTPTPDDEAAKTDGKQE

SEQ ID NO: 75714 - protein, 149 aa, Zea mays
  Coding DNA Sequence Number=SeqID_32339
MNSGEQVALGRSLATIGYNSPDCPVVHRTVRSEQTEEGVEIDSKPSSYVCTSLLTCGDIQILFPGQRELSFMSHAAEEVEAAYYKKKSNEAETEDELFSQAADEAEANYYKRTVDKCDAGQCSKWNEVVVEDCATDDSKDELLIDCDSD

SEQ ID NO: 75715 - protein, 349 aa, Zea mays
  Coding DNA Sequence Number=SeqID_32340
MEKVKSEEHLYTKNTIVNKKFGSTSPINVGLDVCRGEAAWGARGGGGARGQDGKRRRRSSLAAEEPAAAEDGRGEGRRLGAKIYGAELGDTSASTSTQTPVATSELGAIGYDAKLCYLGAITYGTKQREWDEPRRSRALLGHGPAPSHRAVARPFTTEVAVGGSVPRLPALALGPTAAVPRRAAGDAPALRECRAPKKLPQAADARACAPAASRTARGRHGQIRASGSRPGRRGACLRALAREPRARRSRLAPPGRCPHRGRHGRSHARAVPWLASPRLAAHHWGRRCHHGRICHTRVAGVRHDCSSSSGSGSACMAGTGRLRSLMPGRSLYHVRAVTRGETAGVDFLV

SEQ ID NO: 75716 - protein, 140 aa, Zea mays
  Coding DNA Sequence Number=SeqID_32341
MESHDLRAEWESRLVGGYEIDDSGYDYGAGKWYSFRLERVIKEGNQIQGSAENQRNNLFPTTHGSLVQLDGSRSCPGLQFIEGLGDGTQFDRAMLAAGDREEHWCSGFVSTVVATSPATIRQLLESYGDATEVYKFDVVT

SEQ ID NO: 75717 - protein, 46 aa, Zea mays
  Coding DNA Sequence Number=SeqID_32342
MNWMKNKSRKRSSLHGFGSISQDLECEIKTIAEAMNAMEVDDDVAT

SEQ ID NO: 75718 - protein, 247 aa, Zea mays
  Coding DNA Sequence Number=SeqID_32343
MPMLTLRRLVKKLRRAVIREFIRACHLGVLDDDRIGFAIQSAIMQMSADGFNGVWLPTLRRTARREPPRRGSMPRRARAPAVAVVPPSSTPVEATPTSNPYPPGYCPVHGYGQCVLRDAGILDTTIISALRQAAVAATSTARPTPTQAAEERPRWRPPTPAPPGFGRRPTMAARTGCPPFFSNAVVNSPPPSALPMPSPTLLPPRRHAGVAAARRPGLRPVKDEADLPNGSDSGWFSSDEEKADSIS

SEQ ID NO: 75719 - protein, 382 aa, Zea mays
  Coding DNA Sequence Number=SeqID_32344
  Gene Ontology: Mol. function=protein binding; Cellular component =integral to membrane; Biological process=vesicle-mediated transport
  Homolog annotation: Hit_ID=Q84NP4; Match level="QueryCoverage=51%, HitCoverage=17%, E-value=2e-55, Identity=61%"; Hit description =Putative uncharacterized protein P0034A04.133
MPRASSGPLPLTDKRHPPAYQYDFLLLSIYRGIFIAGSSLVGVAIKAPRIMSKNFIRARFTVVVDSFIKTGSRFGEAFLESASFLAIRPLFELVSGSHRLPVIVLHWSVGSEVHSKKGGHLFVYGGDDMGSKEVLTVLSQESTAGLESKRCMSRTDLKLVGSFADMILIPDTRVPDKRRTSALFILTNPGQLNFYDGGSLFSVQNSKEGNPLPEAQKFPVAIPTLDPNITVTGLYSLTESEFPNISVKVHIYKLREHTEGSSFHFVSVNLSKKALSNGKPTVVEFYANWCGFYRYLFYLGKIRTIQLEYTDAKESLLQAARKAPTTAHGFRIQCNKWVIIVRLLLGEIPERAVFMQKGINALNHIMIKYDLYGISFFIVSTL

SEQ ID NO: 75720 - protein, 69 aa, Zea mays
  Coding DNA Sequence Number=SeqID_32345
  Subcellular localization annotation: CTP_CleavageSite=44; ConfidenceScore=5.19e-01
MGCSSSRQQLGALRSSRLACRQVARRQAGLVTTNAMLDRSVSCRAQLDGSPKAGGTGQQQPAETGAAAA

SEQ ID NO: 75721 - protein, 408 aa, Zea mays
  Coding DNA Sequence Number=SeqID_32346
  Gene Ontology: Mol. function=hydrolase activity, hydrolyzing O -glycosyl compounds; Cellular component=cell wall; Biological process= carbohydrate metabolic process
  Homolog annotation: Hit_ID=A2YGL2; Match level="QueryCoverage=66%, HitCoverage=93%, E-value=1e-134, Identity=81%"; Hit description =Putative uncharacterized protein
  Pfam annotation: Domain name=Glyco_hydro_16; Domain location=28-209; Score=365.1; E_value=1.1e-106; Accession=PF00722.12; Description =Glycosyl hydrolases family 16
  Pfam annotation: Domain name=XET_C; Domain location=248-293; Score =75.0; E_value=2.4e-19; Accession=PF06955.3; Description=Xyloglucan endo-transglycosylase (XET)
  Pfam module annotation: Pfam domain module=Glyco_hydro_16::XET_C; Domain location=28-209::248-293
MATSSRRVPLLLLCLGVLVSCSFAAGSLDQELDITWGDGRGKVLDNGRLLTLSLDRTSGSGFQSRHEYLFGKIDMQLRLVPGNSAGTVTAYYLSSQGGAHDEIDFEFLGNVSGEPYTLHTNVFTRGQGQREQQFRLWFDPTADFHTYSILWNPKHVIFMVDDMPIRDFRNLESKGVAFPKSQPMRLYSSLWNADDWATQGGRVKTDWSHAPFSASYRGFKADACVAVAGGRTRCGATVGTEGTGAPASAAGAGDWYNQELDLTLQQRMRWVQRKYMIYNYCTDPKRYQQGLPADLLVLAHPVGTCTVYVVCRRALFVFVVSRLSSPSHLPQPPSFATPAAAFASPIASPAAALVVFAEGCDRGSATSSTNPTGSFKPRLVPPSNLSSSQISPSSRVIRLRIQDQLQAR

SEQ ID NO: 75722 - protein, 101 aa, Zea mays
  Coding DNA Sequence Number=SeqID_32347
MFKEFDYTNTLQFVSDYFKEFVDSSSDDDSEDEVDTMFVLQALTNWALEVQGGVVGPLLCLVKFQMQRPLFLRILRGVQQKVSTALRVLAYGLQVAYGRSR

SEQ ID NO: 75723 - protein, 196 aa, Zea mays
  Coding DNA Sequence Number=SeqID_32348
MALLAAPLPPTLVYATALLYLRNIGSGVSVSRGENGSGTRTGYRIRILIRDVFSDTDTGNFIFGTDTGTTRIESSRIRDEQYPVNTRQPRADTGTRLPGTRAMDVDDICDNNVSHEDEIHGSREDVNGNNSEHMVEDHVPAPSEEEKEKKGVGCVQPEGCFGLEHRTVRWCTGQCPVPQAASAEEAALGNLLTAYG

SEQ ID NO: 75724 - protein, 132 aa, Zea mays
  Coding DNA Sequence Number=SeqID_32349
  Subcellular localization annotation: CTP_CleavageSite=24; ConfidenceScore=5.40e-01
MRGKANCCSLARVQLSVLHPGDGRAARGPATSRSSSHRQLRRGSSSTSYAARAILVFWDGLGEDGSEDLPPPEVEVVVSAAAEVVSEPLGVRYPTGPLVLEVVHTHRNGTGVSFVRGYTRFLPEQNVTTSRT

SEQ ID NO: 75725 - protein, 46 aa, Zea mays
  Coding DNA Sequence Number=SeqID_32350
MAVMGSTSKKMYLCQVRKQQTFVVSVPRWFQKKKSKNEAAGGRVPP

SEQ ID NO: 75726 - protein, 63 aa, Zea mays
  Coding DNA Sequence Number=SeqID_32351
MEVAVAASGAPKKDFAEKARLVVASLLAPARTKMVRSMGRTRERDDTLLEGARGRRVDIVENP

SEQ ID NO: 75727 - protein, 339 aa, Zea mays
  Coding DNA Sequence Number=SeqID_32352
MEVRCQTSFCQNEDGFPKLLRACTVRLGIRSQPEYDGREFVEHGTEKCVVTIYIGSSPYHVEWSVTAGGHRFKDTCQVVACKALRALCQIYEEEVADTPLRFFPPFQRDRPAWMARMRALEEEQLLEDDPTVVYLTAYLLTLDAQYDFLARHHRQMIARAEDAEKLNHKLHVDLTSAQAHVAALESHEAIAVEALKQAKDEHVQKLMEATWRAEDPQILEGHPVSIRGEKKAWELPEGAIVLEGIPVFSQAMDKQGHPESSQDPLPELFEPLTRKKIPAPSREIKEEAESTPPAPPPSEELQEPVLLEEEFNPVLPSQSPPEEVINISSLLTHPGDVSD

SEQ ID NO: 75728 - protein, 181 aa, Zea mays
  Coding DNA Sequence Number=SeqID_32353
MARGGRVAGDGGEHWPPPAAVRPCRLPSSSEQALRECGLRQLSPAEPWLALRQLSCGPVARGPWATPVAGARSAELSKKAARCTAAELRYEGPGPMPGCPWACIRPWRQLSPAEPWLALRQLSCGPVARGRRRSPELSKKAARCTAAELRPRADARVSLGVHPPLYLVVFSCDVMVASWQS

SEQ ID NO: 75729 - protein, 331 aa, Zea mays
  Coding DNA Sequence Number=SeqID_32354
MQVACNCTKGAHPFDFDASSMGPRPTRHDRRHLWQAKQATLHLRHDDRVKKAASEHSGSAPTTSQRLAPEGFDSRLRARRARDDSGYVRYMAEARATLPRVRWTTAKSSLGCHRKLRLARPQSSDSTSTPDDGLRLTRPQSSDSTSTPDDGLCLARPQGSDSTSTMDDGLRLARPQGSDTTSTPDDGLRLAQPQGSDSTSTPDDGLRLAQPKGSDSTSTSDDGLRLARPQGSGSTSTSEESPPRPTSGSDRPRHRGGIIILPLASSGYGEQDRRPIWLAPVKHVMMAPRVLHDGGGSQPLTEARRRQQGPDNSDSCAPTWLRRSSDGHDIT

SEQ ID NO: 75730 - protein, 302 aa, Zea mays
  Coding DNA Sequence Number=SeqID_32355
  Gene Ontology: Mol. function=carbon-nitrogen ligase activity, with glutamine as amido-N-donor
  Homolog annotation: Hit_ID=A3ARG9; Match level="QueryCoverage=54%, HitCoverage=35%, E-value=2e-52, Identity=63%"; Hit description =Putative uncharacterized protein
MDLDIATNFTDLGNQEILLMAAEFKISINAYLSGLLYSPVRSLAQVIAFNEAHPVEERLKDFGQPDLIAAEKTNGIGTRERAAIRRLREISTNGLEKLMKERRLDAIVAPNSDASSVLAVGGYPGIAVPAGYDEQGVPFAICFGGLQGYEPRLIEIAYAFEQATKDPSEAAQSENAVDERYHDCKGAEPIPCEAITRASNQTIFRPDVLSPRLRTRVGYGVESGSRDSGTENAQALIKARRRSGADTCPDLIVYASVPRPGRAPMLPHKARRLSIPLVGGVPPLYLLSPVHSTGKAMCRLRI

SEQ ID NO: 75731 - protein, 63 aa, Zea mays
  Coding DNA Sequence Number=SeqID_32356
MECAAKGTGRGAVRRRRRRSAVRRLRSRRLLLPRPPEGFGGEEVGTDDLWNWSCSWILEIRRG

SEQ ID NO: 75732 - protein, 61 aa, Zea mays
  Coding DNA Sequence Number=SeqID_32357
GYHLRDRGTIAAPERYGFSRASVVIAEPSSYKEASGDDPDHITHVKAYLSKEFQMSDLGTL

SEQ ID NO: 75733 - protein, 146 aa, Zea mays
  Coding DNA Sequence Number=SeqID_32358
  Gene Ontology: Mol. function=metal ion binding
  Homolog annotation: Hit_ID=A7Q2K2; Match level="QueryCoverage=64%, HitCoverage=33%, E-value=1e-21, Identity=48%"; Hit description =Chromosome chr1 scaffold_46, whole genome shotgun sequence
MEQRNCSFTAAEEEDAGIVRITGEGGTRAESKVAGRRDEMMGVEAEWNLQSSLCPCAEPKNPVSSALASWEAYYQWRSLPLHSPVAVLLHWPLTLYHCVQLSRTQTPRYDGQDTLCIHYLGNTISSSMLALMFDILTLLPFLVECN

SEQ ID NO: 75734 - protein, 83 aa, Zea mays
  Coding DNA Sequence Number=SeqID_32359
MSKTPAEPLRARAASPPSSDVFGTRLLLREVSCNTLRNLELFVVYAKQSFIQHTWEMTKEQYANHMQQSRHRFSGKVQTHKRT

SEQ ID NO: 75735 - protein, 322 aa, Zea mays
  Coding DNA Sequence Number=SeqID_32360
  Homolog annotation: Hit_ID=A2XFR6; Match level="QueryCoverage=31%, HitCoverage=29%, E-value=3e-09, Identity=34%"; Hit description =Putative uncharacterized protein
MDLGTHMMVCTLQTTQVNTNYAPLPRQIPVYPVVVEEVPVDLPHIRVEHGVILEDSSEELLSTPTPLAESLAFAARSSTSTLLAPAVQAPAPGGDDPDDSGDDDDVDDNDNEDEEEQVNEEANYAQQDYFMGFGPVVKHYTSMFETGHFPNLLQDVLRALGTYVRPLYKTRRVSEPLRACYYITRVHVMVMDAGDRGFRTLSAHESLTPLSTYDASVSNAAKRTLWSLNHTYRQQLHDTRFRHLPLRLSGGSQTSIVPGGAGCTWSWRMPMPGLQPWKPNFKDGIRLKLRSLPWRCLLPARGFAIGSPDPSPGCSRNFKFML

SEQ ID NO: 75736 - protein, 58 aa, Zea mays
  Coding DNA Sequence Number=SeqID_32361
MGIGRLPQVETQGLTNEGWGAVRTWVDDAGSPAAQEMLRVFNPNSNQVSNSNQIKHVQ

SEQ ID NO: 75737 - protein, 132 aa, Zea mays
  Coding DNA Sequence Number=SeqID_32362
MDKRGKRVSKCAKHGSPSLGRICPGVSQLSDSPRCQEEVCAGLLQRFARLRPLATFEHWKKQTATCSTPSAAPEHARARAQAKPVPWSTSATIKRPGALAVPLRTRSSLTGAQFAAVCPYATCPRPPEPLPP

SEQ ID NO: 75738 - protein, 69 aa, Zea mays
  Coding DNA Sequence Number=SeqID_32363
MEWIGEEAEAFDEILSDRAELSPPPEPYDPEADPAIKAALETIRIIEEAVDEAANKLLNKAAEKILKED

SEQ ID NO: 75739 - protein, 120 aa, Zea mays
  Coding DNA Sequence Number=SeqID_32364
MEWAYIRSVERTGLGRSDDSEELDDSSDSEEGGDSEGVGDDDDGDNSDGGDDGSRGGDGSSRGGVGCSKGGDGSGRGGDGDSGEGSSRCGDGDVKGGGAVTTMAAAAMATLVAECHRLKY

SEQ ID NO: 75740 - protein, 251 aa, Zea mays
  Coding DNA Sequence Number=SeqID_32365
MTPDLIATVPEDPTAPILSNENAHGYPTQPKGVQAAAPPPPTAEVPPETYDTVPWCPIRNPGWSNTKLLTWVEYWSAIYLGEDGAVSCPRAQWFRMRQQEHGRAIGIVTVAEPPCLGHGRNPSDYTKHPESTLRPRAIAWASSTAAEPCPAAMAPMLLPMTATSRGWLSRGAQKSRDAEQFVEEGDKHDEWGPVASLQRMPALTVCEWRVGPVCSEADARARCVSDSRREGGCVRGSWAEGNEGKWAGSVI

SEQ ID NO: 75741 - protein, 503 aa, Zea mays
  Coding DNA Sequence Number=SeqID_32366
MPLIKVYNIDSDLYGLKASAESRFFLEDLRRRSIDPTLADKVAALEGEKTDLRRLLAGERRETNEALAKAQAAQAEANLARAEGNLARERAEQLQERLIALESRVERVEATTRAEAERTRKQLMDSYHELGAWTGDFEVPDREPGLRCLEWVQEELQALPTIVEGFMSYASLVTYEGAMNALSREGCRHFEVFDQADEDFERDIYKVEDPIVKESTGAIYDRMWGPHGREVVRERAETARAQAARGERVDDFGALNSALPDPEPTPAEAVSGAALEPPPETAEGAPDAPASATAGGDLPPETAEGAPDAPAAAAPSAEDPATVAAEATAEATAETTAEAPATAGSSQVQDFGPAHATATTKFLAASTVDGGNECDGSASEFSDFADSGSSVEWTEESSEEDLDYFAALDVAAAEASPHAVDTEDVPGPSTGRRRRRAVAKCRVSGAEGGRLRVSRAGRQELLSLPTAVSTGEGELRSLFAGEELRIMLFNYREMGIIPKVEPM

SEQ ID NO: 75742 - protein, 302 aa, Zea mays
  Coding DNA Sequence Number=SeqID_32367
MGVVEGARTNAGVRRGPGSTAAVLRLRKKCSGRERGQESSAEGASEQGEVGERGAGSKGARACGGGRGTRGRGRIHDEDMDWRLGTGRRVRPTGSERGSANGRSTLTERVHRAAGESGRERKGIGADRLTPQSSERERGREGVRRLAPTGGVRLSSAVVDLRTRRVLTAVQVSRSLPSSAPGAPNVPAPSSPAKFRHRLGWHHCWDAFTNQACNTRRPRRARYNGPDHTWASELDEAARWDDAVAGLRLVPNRAKGVPARFVSVRPPTSAKASSEGWRLCIRPNIFPPRGQFDKVTWCRRRR

SEQ ID NO: 75743 - protein, 319 aa, Zea mays
  Coding DNA Sequence Number=SeqID_32368
MAKRYQLPRSCVPPTTRQKDGGYPPSGGLEGGKTRCIREREDMVAFQGGHPPFKGDYPYLRPQPSRAESSPTHSKVLPCGAGAGSHMSCKPAQSRRSQTAVRGGASSRRSRRRFAFAIMTAPTKGPGKGDTPKRILPREGTRLRASLLIRGSKAGPPKGSTAASDRVGPTPTTGQRFEGRPPEGFHGRLRLLGLRAHYWSGVRRLAPEGFTAASDAERGMTMAHRRHHVRRPSRATWHFPPILLVKRRRRGVCKKAESVPDRPLALCGGLGAALANPALAEPLTASTYQPENLGPDRTPGLRPARMREQLDQPKHYARH

SEQ ID NO: 75744 - protein, 84 aa, Zea mays
  Coding DNA Sequence Number=SeqID_32369
MGIVVARTMMGDAETYYMPAPVEERTRKATVKRTIQAHCGPYRFPPRSYITVDPKSDGWVSLYINNLQYPLENSYNIRFPTDTE

SEQ ID NO: 75745 - protein, 127 aa, Zea mays
  Coding DNA Sequence Number=SeqID_32370
  Homolog annotation: Hit_ID=Q76SB0; Match level="QueryCoverage=77%, HitCoverage=8%, E-value=5e-07, Identity=28%"; Hit description=ORF 73
MESTKITLDNREDLVVDLFTELVEKDLRVEQMANHIHELEDQVEARDNTIEVLEDQLQNTQQQLEEANQHLDLHHQEIEAMEANEVNEDVDIEGGEEPEPASSLDTAGSTHPGGPPSLESSVASFVR

SEQ ID NO: 75746 - protein, 191 aa, Zea mays
  Coding DNA Sequence Number=SeqID_32371
  Subcellular localization annotation: CTP_CleavageSite=57; ConfidenceScore=5.11e-01
MQELMAQQNEIPRQLTQCQPLPQHYGVVITTSVPRQQQPTRSFSALSHRCSPGWKIRSMLTSGSGRPTTWLSGKNSRRHSEGIIYQQTSWTASSTSFWHSLREVIPCCSYHADTDEKKRDRFRRGLNTKLCDHLNIVRAHSYNELVNMAISNEDCIMAHQAEKKRKTPMGGPSAQPQRFRIVSNTQSRGPQ

SEQ ID NO: 75747 - protein, 74 aa, Zea mays
  Coding DNA Sequence Number=SeqID_32372
MAPPCLAVAPPCQAPGESAIPLPSIQDWTFGVMLISAIPYLFVLMRVDKQASEDPGVQQVETTEQELVEGKLCP

SEQ ID NO: 75748 - protein, 284 aa, Zea mays
  Coding DNA Sequence Number=SeqID_32373
  Subcellular localization annotation: CTP_CleavageSite=76; ConfidenceScore=5.09e-01
MQPSCTPPPVVTQDGDLQLDGGGKRAGLRPLPLPQPQGFSSPGLGRGGGAVVVRGAGSCTVPGSRTRVASEPLAAPASATAAGRGSSTGEIARTGHGPTSNSTTFCPSLPHEFGHGRGPLGSSIRPEVSAAAVRPPGAEVVVVAAAGAGDGAPFVGLLLLHRPSPIEWGYSPVGRLNRFTKRESPRVKVTSESGDPRTASPSEARSDLAEGVVDAEGAAAPFQRQDPSLDVCVSESCFSRKVMSEKVMSEKRSFFEENFNAEGVPPLLAPEGGSDFAEARPTLP

SEQ ID NO: 75749 - protein, 449 aa, Zea mays
  Coding DNA Sequence Number=SeqID_32374
  Gene Ontology: Mol. function=transferase activity, transferring hexosyl groups; Cellular component=integral to membrane; Biological process=carbohydrate biosynthetic process
  Homolog annotation: Hit_ID=Q6Z5N7; Match level="QueryCoverage=72%, HitCoverage=87%, E-value=1e-168, Identity=87%"; Hit description =Putative Avr9/Cf-9 rapidly elicited protein 231
  Pfam annotation: Domain name=Glyco_transf_8; Domain location=53-320; Score=255.0; E_value=1.6e-73; Accession=PF01501.11; Description =Glycosyl transferase family 8
MWAGLVLVALLAVSGPAVAAGLPRFAEAPEYRNGEGCPAPVAGAGVCDPGLVHIAMTLDAHYLRGSMAAIYSLLKHASCPESLFFHFLAAAEGGGAPAASGLRAVVAASFPSLSFEIYPFRADAVAGLISASVRAALEAPLNYARNHLAGLLPRCVPRAIYLDSDVLAVDDVRWLWETRLPAAAVVAAPEYCHANFSRYFTDAFWDDPVLGARVFAGRRRAPCYFNTGVMVIDLRRWRVGNYRQRIERWMEMQKEKRIYELGSLPPFLLVFAGEIEAVDHRWNQHGLGGDNVFGSCRPLHNGPVSLMHWSGKGKPWDRLDAGKPCPLDHTWKAYDLYIGENDSSSSGPSRPWVVGGCDYHELGRNYLIGGVQFLDRIQFYTLRFVDPSQTLANVRFLCSPAVELEMQINLSFTLPFTGDGSSGSRPQECSRKGTYHLKLKPEKNIKAVF

SEQ ID NO: 75750 - protein, 79 aa, Zea mays
  Coding DNA Sequence Number=SeqID_32375
MATPRGREALKFSGHAVGGSSIDSQRAGRRCGHHEPPGPGPLLPRKEVDGRRDYRTTSTEDGLDGSAAITGLLLLYPYF

SEQ ID NO: 75751 - protein, 125 aa, Zea mays
  Coding DNA Sequence Number=SeqID_32376
  Gene Ontology: Mol. function=metal ion binding; Cellular component =cytoplasm; Biological process=ubiquitin cycle
  Homolog annotation: Hit_ID=A7QT95; Match level="QueryCoverage=89%, HitCoverage=49%, E-value=2e-31, Identity=57%"; Hit description =Chromosome chr1 scaffold_166, whole genome shotgun sequence
  Pfam annotation: Domain name=zf-C3HC4; Domain location=75-115; Score =22.2; E_value=0.00027; Accession=PF00097.16; Description=Zinc finger, C3HC4 type (RING finger)
MDMRCQSLPCLGTSLTLRRNANSSGIEHLAAQKKRNNTENEGEYKVHRSESTKSLSAKAYSSSYAVVASEDEDVCPTCLEEYTPDNPKIITKCCHHFHLGCIYEWMERSDTCPICGKEMEFCESP

SEQ ID NO: 75752 - protein, 83 aa, Zea mays
  Coding DNA Sequence Number=SeqID_32377
MPMLTLRRLVKKLRRAVIRACHEGVLDDDRVGFAIHNDIMQMRADGSTDEGHEGRTFIISIFKYDYEHKYEWEYERILQNESQ

SEQ ID NO: 75753 - protein, 148 aa, Zea mays
  Coding DNA Sequence Number=SeqID_32378
MASPGLQTPRNIGGCSLGQLTIFCLSVILRAIYDTPSIVDGTHEAPSMLHANDDMRTRFDAKKSMIGITTSLHEVMAPGLSRQQLQLAAQPEDGRGSTSTTPLPETDTTTVDRKTRVEYRRLLHISGPFSGPLTSRSPTSTSTSLSRT

SEQ ID NO: 75754 - protein, 444 aa, Zea mays
  Coding DNA Sequence Number=SeqID_32379
  Gene Ontology: Mol. function=transcription factor activity; Cellular component=transcription factor complex; Biological process =regulation of transcription, DNA-dependent
  Homolog annotation: Hit_ID=Q6Z5N3; Match level="QueryCoverage=87%, HitCoverage=88%, E-value=1e-166, Identity=76%"; Hit description =Transcription factor-like
  Pfam annotation: Domain name=E2F_TDP; Domain location=203-283; Score =122.5; E_value=1.3e-33; Accession=PF02319.11; Description =Transcription factor E2Fdimerisation partner (TDP)
  Pfam annotation: Domain name=E2F_TDP; Domain location=59-124; Score =106.8; E_value=6.6e-29; Accession=PF02319.11; Description =Transcription factor E2Fdimerisation partner (TDP)
  Pfam module annotation: Pfam domain module=E2F_TDP::E2F_TDP; Domain location=203-283::59-124
MTASFSSVAEVAVPAAAAVMASALPQEQQQARPRPRPMHAGGGGGGGGGANGRHHAYSRKDKSLGLLCSNFVVLYNRDDVESIGLDEAAKCLGVERRRIYDIVNVLESVGILVRKAKNRYTWIGFGGVSISLRELKERALREKSGLAPLQTEQQSAATISEDEDDDTLANPGAYIETERLSQTVDKPSGKPGASGCRLRSDHRKEKSLGLLTQNFVKLFLTMEVDTISLDEAAKLLLGEGHEETNMRTKVRRLYDIANVLSSLNLIEKIHQGDSRKPAFRWLGRATLNTENGVTVAVPPPGKIASKKRAFGTELTNIDMHRSNLDSKNKKKAKLVQSSGDVLTNCKLAVRSRLGQGKQSGFVYGPFHPSGARKHGLDGGNKPGQRERAEDWESLSASFRPQYQNQALSDLFVHYVDAWKTWYSEFAQGSSIMQQHFGHPVNHFL

SEQ ID NO: 75755 - protein, 152 aa, Zea mays
  Coding DNA Sequence Number=SeqID_32380
MGKSKKGESSSHHSGDKWKREPSPPSEDFGDSEYSEEEFSSESEGSPAYASPPVSCDDSDDSQGIAAEVWTYIRAVERFGLEGSDESEITSDEEDSFDSSEEGSGGDGDDEGDGGDGGDDDGGGDSNSGKGNGGSGKGDGGSGRASGKAPPA

SEQ ID NO: 75756 - protein, 109 aa, Zea mays
  Coding DNA Sequence Number=SeqID_32381
  Subcellular localization annotation: CTP_CleavageSite=44; ConfidenceScore=5.49e-01
MAVAGKRKQPSNRQQAHAPSWDSERTLSHDVKTTRPCTVPRTARARTTAAPRTTRPVALTLRQDRRHLWQAKQTTLHLRHNDRVKKGTGKGDTPKGILLREGSGPRAPY

SEQ ID NO: 75757 - protein, 49 aa, Zea mays
  Coding DNA Sequence Number=SeqID_32382
MAGALWVGFTVAWLLDSRIAHRGVVFQSSAMAPPCWGKLPPASDRSGKG

SEQ ID NO: 75758 - protein, 119 aa, Zea mays
  Coding DNA Sequence Number=SeqID_32383
MKGTPWKGKRMDNIFKEILKSAKNGEFVKAKVTPPLMTKDIMPSSKSAKTGSSKKVDDTMKSDLALEKITTSKVYNIFDALKEKERVEAKDPKEGATMVAEEEPTEPREYIICHASGES

SEQ ID NO: 75759 - protein, 224 aa, Zea mays
  Coding DNA Sequence Number=SeqID_32384
  Gene Ontology: Mol. function=DNA binding; Cellular component=nucleus; Biological process=regulation of transcription, DNA-dependent
  Homolog annotation: Hit_ID=A2Y8E2; Match level="QueryCoverage=47%, HitCoverage=40%, E-value=9e-40, Identity=78%"; Hit description =Putative uncharacterized protein
  Pfam annotation: Domain name=B3; Domain location=27-133; Score=87.8; E_value=3.4e-23; Accession=PF02362.12; Description=B3 DNA binding domain
MALTTLALELESAAGDYSHSHSRRERMFEKVVTPSDVGKLNRLVVPKQFAERHLPLRGAAARSRGTVLCFHDDARGGEAWRFRYSYWSSSQSYVITKGWSRYVRDKRLATRDIVAFCRDGARLFIDCQRRRRTTTRRSGSEGAVVLPAPAIGAAVPPMCQLQMTVVFPDGQHQQAAVAMKKETAAAQEEDDKEAQRRCGRCLRLFGVNLLDELRTEPLLLDLQL

SEQ ID NO: 75760 - protein, 105 aa, Zea mays
  Coding DNA Sequence Number=SeqID_32385
MMLNERCLRVVIFRFFRQTAKSLVHPRHITSVWKMPPKSKKMPPKSKKSVKGLFKGLGLFQGSSSSSSRCRELLSADEQHTDEQHIEEEQHNEAEQHNEEVEHVT

SEQ ID NO: 75761 - protein, 65 aa, Zea mays
  Coding DNA Sequence Number=SeqID_32386
MAVVELLPRPLPRSGRSSVSALARAPAIGPDNEQPVVPECVAEGLPEQQPGEGKCPLTYYVLLTL

SEQ ID NO: 75762 - protein, 111 aa, Zea mays
  Coding DNA Sequence Number=SeqID_32387
MAHGSTGSRCGTTRGYGRGKDGGWAYIAKAQSPRVQLLRPPQNSQSCWHRVANGTKVLTRWDPRNGGLRRGCLRCAVEHLMSGPRQAVRRRVVRAAKWMQSGPHQSAGASA

SEQ ID NO: 75763 - protein, 33 aa, Zea mays
  Coding DNA Sequence Number=SeqID_32388
MAWGTRGRELGVLPTASRGPEAFHAISKELLTS

SEQ ID NO: 75764 - protein, 90 aa, Zea mays
  Coding DNA Sequence Number=SeqID_32389
MVARECNTPGVTQGVHPRATPFNPLLHEDLYGQSISNLEFKVLIKCKLSWISCPSLSCTSRVAPTTSDADVTVATSRTSLTTPPELYCRR

SEQ ID NO: 75765 - protein, 107 aa, Zea mays
  Coding DNA Sequence Number=SeqID_32390
MEAPLLGFLLPLDLPPRSKDREDEENVELKREIGSRRCSSPSLLEDFLGENPRLWIMRIKGLEEPFNPLADPKMKETLDIINMTESIDDEAVNKLLNEVAEKVLKEE

SEQ ID NO: 75766 - protein, 127 aa, Zea mays
  Coding DNA Sequence Number=SeqID_32391
MSLAHATNGQMGPRVSRRMRAPLREDSLPQPTTDCAGSAAIRLHVLLPLPLSKLKRARRESQQPPNRVLTPWTRALAPCQLPPWPSTRARLLQRLAGILATSSEPPRPSLRGSVHASTWGYRLRPSC

SEQ ID NO: 75767 - protein, 48 aa, Zea mays
  Coding DNA Sequence Number=SeqID_32392
MAAFTPGVSKGLANPGDMGYTTCGYRVQPLQSVKLELTGMISFGLSHD

SEQ ID NO: 75768 - protein, 72 aa, Zea mays
  Coding DNA Sequence Number=SeqID_32393
MVVELRLHGENSGEHGPDRPEGLGANRWVSRVADGEAELTEAMGAAQLNGGRRTDVGLWVFNSNSNQFSNSN

SEQ ID NO: 75769 - protein, 100 aa, Zea mays
  Coding DNA Sequence Number=SeqID_32394
MGKGLARVKAYARGALRDTGGVDEGTTSRAKACALRGNAREAARTRHGLAVRTSGPNVSRAQSRVPYARWAKLEALQGPTRPELCTAGRAGIRAGAIEHN

SEQ ID NO: 75770 - protein, 152 aa, Zea mays
  Coding DNA Sequence Number=SeqID_32395
MMSSTYVNIFLPTCPVSTVLVSLEKVDPAFLSPSGILMKQYGGGGCCLRHGRGSRISAAAAHAPDPYREFHFRGTGGDIPSDEGRQQRGAGWRCCALAVDCGRLARSLAAESSSTCGWTVEHPWASFGTQPCAEDVGAKATDSVVDSDLVID

SEQ ID NO: 75771 - protein, 371 aa, Zea mays
  Coding DNA Sequence Number=SeqID_32396
MESHDLRAEWESRLVGGYEIDGSGYDYGAGKWYSFRLERVVSIATTAQAKKKLWKETSRSSKTTTSSRRGLAATPSRLPVKVAVIYVSFPHFDLLWLDLDTLHESPSSPSYPPAALPSLGAPASGVAAGGDPDDGGGDDSSSHDTDFSANHEPEGWVARPITRDAARGCHFHDALDTLLRRALNRRTWSIEYRCVVYQHSRGVYPDRWEATCLVRRPENSLQGAEACSEHYSISERDSAEAAMQDAARRALSHYCSVLGGVADGLDLKYYPRRPSGSTGGVIVSPVGEGNPRLSSTVNLADVLNTELDHALDELSRARAEVALLRAERAERRHLDGGSPAPVGTQHPYRSPRRGHQPYGNPDCKTKINLEP

SEQ ID NO: 75772 - protein, 116 aa, Zea mays
  Coding DNA Sequence Number=SeqID_32397
  Homolog annotation: Hit_ID=Q5Z9P4; Match level="QueryCoverage=61%, HitCoverage=20%, E-value=4e-17, Identity=64%"; Hit description =Permease-like
  Pfam annotation: Domain name=DUF803; Domain location=23-116; Score= -143.3; E_value=0.015; Accession=PF05653.5; Description=Protein of unknown function (DUF803)
MGPVASDSIGAEARPPSDSGTRHARMALGCAVDADLKLDIQIFVYSNFIAYIFAPGVLVTPLGALSIIVSSVLAHFVLKERLEKLGVLGCVSCIVGSVVVVMHAPKEHMPNSVKEI

SEQ ID NO: 75773 - protein, 383 aa, Zea mays
  Coding DNA Sequence Number=SeqID_32398
  Gene Ontology: Mol. function=hydrolase activity, acting on ester bonds; Cellular component=nucleus; Biological process=lipid metabolic process
  Homolog annotation: Hit_ID=Q6ZCC3; Match level="QueryCoverage=91%, HitCoverage=86%, E-value=3e-99, Identity=55%"; Hit description =Putative GDSL-motif lipase/hydrolase protein
  Pfam annotation: Domain name=Lipase_GDSL; Domain location=35-364; Score=167.6; E_value=3.3e-47; Accession=PF00657.13; Description=GDSL- like LipaseAcylhydrolase
MAAAAGLPRWLLLLAVVPAVTAAATAGGEGRAPALFVFGDSLIDSGNNNNLASLAKANYFPYGIDFAGGPTGRFCNGYTIVDELGTYSRSVAHPLSLDRIMHATAACMEAVVIDAVVFVAELLGLPLVPPYSEASSVQHVLQGVNYASAAAGILDDSGGNFVGRIPFNQQIQNFETTVARIAGAAGAAAAADLVARSVLFVGMGSNDYLNNYLMPNYDTRRRYGPQQFADLLARQLAAQLARLHGAGGRRASRGGARAPWNDLVLPFNANVRALVDRLNGNAAAGLPGASLTYLDNFAVFRAILADPAAFGFAVVDRGCCGIGRNAGQVTCQPFMPPCDHREHYVFWDAYHPTAAVNVIVARLVLHGGADVVSPVNVRELAGM

SEQ ID NO: 75774 - protein, 113 aa, Zea mays
  Coding DNA Sequence Number=SeqID_32399
  Subcellular localization annotation: CTP_CleavageSite=49; ConfidenceScore=5.13e-01
MKMWKETSRSSKTTTSSRRGLAATPSRLPVKAAVIYVSFPHFDLFCSVVCLTADHHMGSRSMPYAVSHDYRDRGMAGVQSEGSSDLSSAGSIQGLDCCVTICKGRLICLPLPK

SEQ ID NO: 75775 - protein, 26 aa, Zea mays
  Coding DNA Sequence Number=SeqID_32400
MARDPRRVFQLRCARSIIFRGFKSKK

SEQ ID NO: 75776 - protein, 689 aa, Zea mays
  Coding DNA Sequence Number=SeqID_32401
  Gene Ontology: Mol. function=metal ion binding
  Homolog annotation: Hit_ID=A5AHW0; Match level="QueryCoverage=87%, HitCoverage=91%, E-value=1e-117, Identity=38%"; Hit description =Putative uncharacterized protein
  Pfam annotation: Domain name=PHD; Domain location=632-680; Score =42.4; E_value=1.6e-09; Accession=PF00628.20; Description=PHD-finger
  Subcellular localization annotation: CTP_CleavageSite=50; ConfidenceScore=5.72e-01
MPSRRALRRSPPPRQSPQAAADAKEAASPWLPSSSSTSSSSSSASALVRRSAAFSAAGPRGGSGTRVYPLRDFPGGDAAALGGAFRDNVRWLLKQWSCVPGSVSAWRALLSDERTGALVPVIAVEELAASSPLPLCDLCRCAGWSHHWVSKRKYHFIIPAVVDWDQPFRADGLLGHSEHLLHGLIHSNGFGHLLTLRGRVGGSTFLSGCQIMDIWDQLCTALRVRAVSVVDLTQKYSVDLRLLLGVAQSKTWFTRWGYCLAKGCFSVSRSTYTAALEALAALPVDCLRSRHVRRVVTIYRRLSSKPLVTVREFLLCLLDWKHREPPLSPPPVKASSRLMFLLPKSCMMKRPRQPCQRFEDVVDLLECRWSKKRLLSAANVVVAKLREHADGTKITRQAVRDAARGGIGDTGLLDFVIKSLNNTVVGNHIVRRVPDPENRVLHFSLEEYAEPEPQPQADHELEPVELDAENTPPAVRWPNAAEAERDLRAVYRAMVGARSEAAQAVLDCKHWVKWWGLRDESDDQLRFLVEWRPQPWEATELTRPMPPGDIVVVPLHASIGELLVEAEHALRDTYCFFENFQAESLDGITGDKWDPVMLGGAESGDTIGVHGHGADMETGLRCQGGADAWEVQCVCGAQDDDGERMVACDACNVWHHTRCVGIADGAPVPPLFLCISCSGALMAAGPISG

SEQ ID NO: 75777 - protein, 92 aa, Zea mays
  Coding DNA Sequence Number=SeqID_32402
MAGGCWEDDIGSYGCTSCPTEQGGVGEGRDKDHDDLAATTTLTTLSSRTLPWPAKTSTVRPDVSGGAGAVAGARHREEADTSIARERETIDV

SEQ ID NO: 75778 - protein, 208 aa, Zea mays
  Coding DNA Sequence Number=SeqID_32403
MSGAPEDSNSNSPPSGISRGTRAIIHRTVRCTPDNVRCAKEERPQELASFGKLQRLVRYNSPDMSGTPILAHRTMNRRCPVCTGHPGGPTSQKLQRSESNGSDDVAGAPDMSASETGSDPHTELLQVLLLLSCGRVVSYGFSLLAPGRRSPHWPTTAAFARQQVILENVQAETVHMAVTMHEQVNSTTDKTVAPSGGFALAAKAELRK

SEQ ID NO: 75779 - protein, 213 aa, Zea mays
  Coding DNA Sequence Number=SeqID_32404
MAQMEERLTDVLTGRGREQRLHPHQRRHRLYRGRRPPYSVTAAAEVDSLPNPNDDCIEEFSPGFDGEPIFDEEPNDSIAEFVDVSFHGGRISIGGIHHPASTMPRLHVSVVVDDCIEGFDVLDEDAASANAADFASTVGDATPQATETRLNVGWVRWLEGRTGPYNDIAAAQTLFSDFSDDDSARTCDVTDVPVVHSALKVFVKMLNGGSEHP

SEQ ID NO: 75780 - protein, 767 aa, Zea mays
  Coding DNA Sequence Number=SeqID_32405
  Gene Ontology: Mol. function=phosphotransferase activity, alcohol group as acceptor; Cellular component=cytoplasm; Biological process =metabolic process
  Homolog annotation: Hit_ID=Q6YX79; Match level="QueryCoverage=23%, HitCoverage=18%, E-value=1e-59, Identity=63%"; Hit description=GHMP kinase-like protein
  Pfam annotation: Domain name=DUF248; Domain location=8-272; Score= -329.0; E_value=6.3e-06; Accession=PF03141.7; Description=Putative methyltransferase
  Pfam annotation: Domain name=zf-C3HC4; Domain location=261-294; Score= 1.6; E_value=0.06; Accession=PF00097.16; Description=Zinc finger, C3HC4 type (RING finger)
  Pfam module annotation: Pfam domain module=DUF248::zf-C3HC4; Domain location=8-272::261-294
MSWLHTRVPCSVQTPSLRGVVGITQTSGGPDARSLMDSSRSWIFTDDIGKLVPSRDGSVHTTLDIGCGVMSWGAYLLTWDILAMAFALQDSHEAQVQFTLEHGVPAMMSVLVGKEVVEGGVVLRKDEERPKVPHDGFGDEGLNTLPTRCLTNCVNLIQNCFSHSCSCRWDSVLHKQPWPPPVQPVQFVIPGDGVQVWLPPWPPPVWEFWLSLKITGPQMMHSVGYFGLPVMPATCITISEIVSGSSEQIFPETFLQSLHECRVCLSENTGRSLLQLPCHHLFCLMWLKSNCRIHVIEGNLTQVWLREDAVAYFKNMFDGGLRPTSNAFNKVIDGWVKVDMLNEAHGFFDMMPEKDIDDVTVAIFYFGGQHVGWEMKTEWLSNGWLCLVCGASDTQELPLHFIKLAKDTYTSDCMFGKIGYGTVSEALVYILSLLFVRRDYCNEEPFFRNVLEHYQCGIEMIRRDLFTGHWKHYLQGAIPLQPCFDGLINVGKVAARTLQDTVVGNSCIVSRQPPWPPPTRHHFRTMHAETVANWNHLFSWCFANSDLGELLTLNCPADRAMVLLMHQIELRLLNWAWADECVFNLCPLRLHSVVHSSLANAYKSWLITVIHRTHSIGQDHVWHNVDRGVVCGIKDRCCARLAKLVLSATLTQDSGKLSQLELHHPLLLNTQSSGLRTSRISSGGECQHTIFSSSQRWYQKNTNNAATTTMTIHGVYEDRGIAGKGTGAPGERARCLMKASVRLAWAGVGLVNVGRLIGRVDRVIVWL

SEQ ID NO: 75781 - protein, 69 aa, Zea mays
  Coding DNA Sequence Number=SeqID_32406
MAHRTVRCPLPRHHCRWILTVGASDLWARLGVRCTPDRFYVKRLPENQTNKLCVWYLKPAFGGKKRPRS

SEQ ID NO: 75782 - protein, 103 aa, Zea mays
  Coding DNA Sequence Number=SeqID_32407
MVRERRTRISTMNKNTRDTRFIPRFGHTTKVPYFLVEAPTKSRVSFNPNPPFADHKGQAHTIIFAQTSGRLAEKSEQCKNRLNRFPPDKNRLSVRLSQYFEKG

SEQ ID NO: 75783 - protein, 179 aa, Zea mays
  Coding DNA Sequence Number=SeqID_32408
MPPGRMAGARTRTDIGEEPITEYEKERALKVMRNNKMLSSLGITGFTSLIRSSNTRKNSIAQEDFDPLYEPDHSEDNGHHVSDKAMQDVPYNCERRNTNMSTGSGGTKGSKRVIAPNAEDQVGRVTRQKTKEQSSVEKDVRGSTTNTEEQALISANCPAQHDDEIQICDEGKKMVKQMP

SEQ ID NO: 75784 - protein, 98 aa, Zea mays
  Coding DNA Sequence Number=SeqID_32409
MQAACNRAKWTRFSDPRHASVEAQGPGKGDTPKRILPREGTRLRASLLIRGSKAGPPKGSTAASDRVGPTPTTGQRFEGRPPEGFHGRLRLPGLRAHY

SEQ ID NO: 75785 - protein, 290 aa, Zea mays
  Coding DNA Sequence Number=SeqID_32410
  Gene Ontology: Mol. function=transferase activity, transferring phosphorus-containing groups; Cellular component=membrane; Biological process=two-component signal transduction system (phosphorelay)
  Homolog annotation: Hit_ID=Q76H00; Match level="QueryCoverage=99%, HitCoverage=28%, E-value=1e-136, Identity=87%"; Hit description =Histidine kinase 2
  Pfam annotation: Domain name=CHASE; Domain location=134-290; Score =65.8; E_value=1.4e-16; Accession=PF03924.4; Description=CHASE domain
SAGKSGGTGIEEKGEAPGLDFLEPRQDANSSTHRSTQPKKLSARALRTHLFTNYRMRKVRDSSSWLIPLWVLFWVLLASVICLWMSNQAVAKRRESLASMCDERARMLQDQFNVSVNHLQALAILVSTFHHSKTPSAIDQTTFARYAERTAFERPLTSGVAYGVRVTHAEREQFERQQGWSIKKMYSSKTKKQSQGPGNAEDAEVREPAEEYAPVIFAQDAYKHVISFDLLSGADDRDNVLRARESGKGVLTAPFKLLNNRLGVISTYAVYKYELPPNARPQERIQAAIG

SEQ ID NO: 75786 - protein, 290 aa, Zea mays
  Coding DNA Sequence Number=SeqID_32411
  Homolog annotation: Hit_ID=Q6BTJ4; Match level="QueryCoverage=76%, HitCoverage=27%, E-value=7e-09, Identity=28%"; Hit description =Similar to CA1621|CaIFF6 Candida albicans CaIFF6 unknown function
MSSLKHGSYSRKTPKILLSHILPITLLFILSQTFHSSLFSPTVNFTVLHHIHPAINTPSYPLPLHTHSTPSAKANTPPTQLLRSAGYAHSVASSPVHPTEDSAACAAPTAVPLDRVRLTAAKSGLRRHRKLRFTRPQGSDSGSAPEDDELRIARPQGSDSGSAPEDDELRFARPQGSDSGSAPEDDELRFAQPQGSDSGSAPEDDELRFARPQGSDSALASADGLCLARPRGSDSTSASEDRLDLDLGGASTSPNPGLGPTTSQEAPSLPYPKLTQATGNKTGVPSGSPQ

SEQ ID NO: 75787 - protein, 229 aa, Zea mays
  Coding DNA Sequence Number=SeqID_32412
  Homolog annotation: Hit_ID=Q60EP7; Match level="QueryCoverage=95%, HitCoverage=27%, E-value=3e-18, Identity=32%"; Hit description =Unknow protein
TDEPGGSANVAPKKRRRKDASSTYLETNHLAPVDYFDIGYVPGKSSARGTAKVGKQLASSNIGSYGQYHEDNRVVKNKTSGPGGAPRRKSSEFSVGDAAARAKVIKDVSDAPLELRDLEKQKAAPPPVSYAHKSKTSEAFDYAYPADRDKGTSAQLGFQQRKHPVVGRAGSCIKPKGTRLERGIRDLQKIAAEYRPPTIDINEVDPNGQAAVKRRLPPEVKQKVARLSV

SEQ ID NO: 75788 - protein, 67 aa, Zea mays
  Coding DNA Sequence Number=SeqID_32413
MAALKYKNEYSYSGEVLALAGDGEPYQVHVIGAKILYGERALGLYLAKHNNKESTEHFSSEFLSLNN

SEQ ID NO: 75789 - protein, 38 aa, Zea mays
  Coding DNA Sequence Number=SeqID_32414
RYFGTGGYEIDSFDHGYGAGEDEAVEGDFQEFQDYDEF

SEQ ID NO: 75790 - protein, 115 aa, Zea mays
  Coding DNA Sequence Number=SeqID_32415
MNRCAVCRAPRVNDRPPVAPPVFLFPRVFPLGHAARLYALLGLQRRGNFFCSVGGGSNRDDGEAVELTIVDSYGDLDQSIGCLELMYREATSWDLGGEERRRRISMTGTMKSSTG

SEQ ID NO: 75791 - protein, 122 aa, Zea mays
  Coding DNA Sequence Number=SeqID_32416
MASDLESKGFRINRTKTEYMRCDSGTTISEDGDISLGGQSYGLKVSWIVLESKMPFIDERSEEDYTTASKRARETSSSGIPDDGNRNIGEIKKKRKPEYDVVDTQANLPKAPLPHGREAKAF

SEQ ID NO: 75792 - protein, 136 aa, Zea mays
  Coding DNA Sequence Number=SeqID_32417
MAGGRLLRRAGGWFLPPEAGRGGGQPTRAGGRAPPSWAESSPTRSKVLPLRRGGWVPHVMQTGSEQKKPKRRAWCVQPPSGYKRLSTFAQTSGRKGGQPCRRHATTPSGSTSPTSNAPGLEDQAHASCNRCAGCYV

SEQ ID NO: 75793 - protein, 218 aa, Zea mays
  Coding DNA Sequence Number=SeqID_32418
  Gene Ontology: Mol. function=protein serine/threonine kinase activity; Biological process=protein amino acid phosphorylation
  Homolog annotation: Hit_ID=A3BT82; Match level="QueryCoverage=19%, HitCoverage=6%, E-value=4e-12, Identity=83%"; Hit description =Putative uncharacterized protein
MEVCDLRKVWEIHELKAKLDAAGAQATFDRVASQVVLFDQRYIGMTWEENTLNILLEFVPGGSIQSLLGRLGSFPEAVLSLEYKLFIPFRYGGARSPAWLHENSNLASEQRQRKLLVQSCIIVTRVSNLSWNPMYLRHCRQTSNQVQVQMHTQKRYEPVLLIFRVFSVGHANKTSYNCFPAIIRHNQPEVCAFCLGNGYVGLKDALGSNDSRLQRLFS

SEQ ID NO: 75794 - protein, 833 aa, Zea mays
  Coding DNA Sequence Number=SeqID_32419
  Gene Ontology: Mol. function=metal ion binding; Cellular component =Golgi apparatus
  Homolog annotation: Hit_ID=Q9FMJ2; Match level="QueryCoverage=95%, HitCoverage=99%, E-value=0.0, Identity=57%"; Hit description=Ankyrin- like protein
  Pfam annotation: Domain name=DUF248; Domain location=316-821; Score =1189.2; E_value=0; Accession=PF03141.7; Description=Putative methyltransferase
  Pfam annotation: Domain name=Methyltransf_11; Domain location=435 -530; Score=21.3; E_value=0.00085; Accession=PF08241.3; Description =Methyltransferase domain
  Pfam module annotation: Pfam domain module=DUF248::Methyltransf_11; Domain location=316-821::435-530
  Subcellular localization annotation: CTP_CleavageSite=95; ConfidenceScore=5.82e-01
MPTPTPATTDKRTPGSGVHAPGSLRRGPAPPNSGRCRAVALMAFGRGGKMDGRRPSSSSSSSSFCTTTTVVLFVALCLVGAWMMTSSTVFPLEISSNKKPVVKQQPAPVNFGASQEASPGIAGEGSEKFEDTDNNDATVPEEPNKQDASEQENFNEKPEEKELEVPVEKAETKDMFDDANGKSEGLSDETKNDDGEKSVEKKDNEITNESGDEKTDGESKDGQEEKPDGDAAQEEQPKIEENVEENGEKDQSSNSNEVFPDGAQSELLKESNTQNGSFPTQAAESKNEKEVQALPKSSGDATSYTWKLCNSSASTDYIPCLDNEKAIKKLRTTKHYEHRERHCPEEPPTCLVPLPEGYKRPIEWPKSRDKVWYSNVPHTRLAEYKGHQNWVKVSGDYLLFPGGGTQFKNGALHYIDTIQQALPDIAWGKRSRVILDVGCGVASFGGYMFDRDALTMSFAPKDEHEAQVQFALERGIPAISAVMGTKRLPYPSRVFDVIHCARCRVPWHIEGGMLLLELNRLLRPGGYFVWSATPVYQKLPEDVEIWNAMSTLTKSMCWKMVNKTKDKLNQVGMVIYQKPMDNICYEKRSENSPPLCKESDDADAAWNVPLEACMHKLPGGSKVRGSKWPELWPQRLEKTPFWIDGSKVGVYGKPANEDFEADNAHWKRVVSKSYVNGMGIDWSKVRNVMDMRAVYGGFAAALRDQKVWVMNIVPIDSPDTLPIIYERGLFGMYHDWCESFSTYPRTYDLLHADHLFSKLRKRCKLAAVFAEVDRVLRPQGKLIVRDTADTINELESMAKSVQWEVRMTYTKGSEGLLCVEKSMWRPKELDAST

SEQ ID NO: 75795 - protein, 352 aa, Zea mays
  Coding DNA Sequence Number=SeqID_32420
  Homolog annotation: Hit_ID=A2WXP6; Match level="QueryCoverage=100%, HitCoverage=100%, E-value=1e-128, Identity=62%"; Hit description =Putative uncharacterized protein
MPLTRVAADAFGVLTIGLLALLAALGLFCIFQSVYFRCQIRRGPSFLPLGYFNGPWVTRVALVLITIWWGVGEKKELGTLNQRWNWKSMAYTLVFCVPVFSVQAVLVFVVGPRLVRDSNHDLGRRKIAKYFVRTHTPVGDTSVCTYPLLGTIFLGLVDAFLMSYVSYVGSRALSLVINKSLRRRVYLLMLSVLCFLPTRVLLLGFSVLPRPGDAAFEGIVFLSFLTMLSCTAVGILLLVYYPVADSLALRDMGQRDTAAEMVPYDDYYCYEGASLVANRSFRELERNSDTSTKPGSISFRTMIREDQLQQDGAADEIGFSSRSGAHIGSPSPAGSSPSAAMPMLPVKEIPRY

SEQ ID NO: 75796 - protein, 243 aa, Zea mays
  Coding DNA Sequence Number=SeqID_32421
  Subcellular localization annotation: CTP_CleavageSite=73; ConfidenceScore=5.05e-01
MACVRGAGFWISKSMAIPFNASSKLSLAYALHVCLLKLAEKTNLHCTSFLRKSSTVDELGRGPRRQNNRGACRSAAHRLLFFPTQKPRVWYWRTAIVIADWNVECTLESTDVDATLRKSLPGAPERGARQARGRGDGLGAGEGGRAAEGVAAAFAGTGSHSPTGKSPLPSLAGPLVMPAAAPIRVFKNLRVRDDCHQDGCQGVRQRDYFEGCELLPPRAGNGPIKFKFKDRIDLELGSSSIHF

SEQ ID NO: 75797 - protein, 482 aa, Zea mays
  Coding DNA Sequence Number=SeqID_32422
  Subcellular localization annotation: CTP_CleavageSite=45; ConfidenceScore=5.28e-01
MAGSARPPGRALAARPPALAARPPARPPAWPPQPAWPRAPGRAPLAARPWSRALAARPAAPPPLRRAGGYEIDGFDHGYGAGCQHCNHCSGEDEAVEGDFQEFKTTTSSRCGLAATPSRLPVKAALSTFLFRTLIYCKTYMDVSDMARLRHTARKSVIPFLPSRLAERPLRRPVAGQSSHLERLHHRLREEQERRRQEQQSSFFSLQQEIESVRSFSPVLPLEAPPAPPLGAPASGVAAGGDPDDGDGDDSSSHDTDFSANPEPEGWVARPITRDAARGCHFHDALDTLLRRAFDRHTWSVEYRCVVYQHSRGVYPDRWEATCLVRCPENSLQGAEACSEHYSISERDSAEAAMQDAARRALSHYCSVFGGAADGLDLKYYPRRPSGSTGCVIVSPVGEGNPRLSSTVNLAVVLNTELDHALDELSRARAEIALLRAERAERRHLDGGSPAPVGTQHPYRSPQRGHQSYGNPDCKTKITLEP

SEQ ID NO: 75798 - protein, 129 aa, Zea mays
  Coding DNA Sequence Number=SeqID_32423
  Homolog annotation: Hit_ID=Q60EP7; Match level="QueryCoverage=50%, HitCoverage=9%, E-value=4e-09, Identity=50%"; Hit description=Unknow protein
  Subcellular localization annotation: CTP_CleavageSite=50; ConfidenceScore=5.60e-01
MEDPVAAPSSSSAAPAASAAARISAAAAAAVTSAVTSAPPALAPLQPSGTAAAVPEAASTCRRQLFTVELRPGESTIVSWKKLLKEAGHTATAPPVAPEPKFAAHAGPSGAVPVLYLPEMFYSEYQFLL

SEQ ID NO: 75799 - protein, 113 aa, Zea mays
  Coding DNA Sequence Number=SeqID_32424
MVHSLQDYIFITRCLIATNIFISLVLVSKYRLAKYIPDSHAEGFKDDKKVRVIPSRTWIMYHPAPLNRNLVLEICKERLCGAGGGGSGRLGEHRYPATLYVGYKLNRLWLNGV

SEQ ID NO: 75800 - protein, 196 aa, Zea mays
  Coding DNA Sequence Number=SeqID_32425
  Homolog annotation: Hit_ID=Q8RU34; Match level="QueryCoverage=62%, HitCoverage=14%, E-value=1e-21, Identity=51%"; Hit description=Bzip transcription factor-like
  Pfam annotation: Domain name=DUF630; Domain location=36-85; Score =48.3; E_value=2.7e-11; Accession=PF04783.3; Description=Protein of unknown function (DUF630)
  Subcellular localization annotation: CTP_CleavageSite=22; ConfidenceScore=5.39e-01
MGCTTSHDAVAAAVTSSSSRPRARRSSASDPSPRRGDPAALCRERVALIHAATDRRYALATAHAAYFRSLAAVGDALRRFVASSLAPAHAWVLAGAHAPRLPPAKLVAAASASLPTWPLSTVSSLSHSLAEKRRIFREAALKGSARERTQSRTQATVAHSCIRIRFRVHAHTCQRRIRDAPVKCGRGFKRGEVLIT

SEQ ID NO: 75801 - protein, 97 aa, Zea mays
  Coding DNA Sequence Number=SeqID_32426
MNQLDSFDSSDDEETEYDLSTRLGTQVEAAPILDRVGNTLRRSVEDIDRQLLTVGDSSMRSFLQPEGFWHPVRVVSWPSEERWSLAEGQLSGLSSPC

SEQ ID NO: 75802 - protein, 238 aa, Zea mays
  Coding DNA Sequence Number=SeqID_32427
  Homolog annotation: Hit_ID=Q6J9V9; Match level="QueryCoverage=27%, HitCoverage=33%, E-value=8e-08, Identity=45%"; Hit description =Putative uncharacterized protein
MAERYQLPRSCVPPTTRRKDCGYPPSGGSEGGKTRCIREREDMIAFQGGHPPFKGDSPYLRPQPSWAESSPTRSKVLPLWRGGRVPRVMQAGQGQKKPNRRARWMQPSSGYKRPSTFAQTSGGTSGASGRGSERRFASAIMTASKKGPRKGDTPKRILLREGNKLRASLLIRGSKAGPSEGFNSRLRARGLHTHYWSEVRRSAPRKGSTTASGHSGSAPTTDQGFEGWPSKGSQPPQT

SEQ ID NO: 75803 - protein, 54 aa, Zea mays
  Coding DNA Sequence Number=SeqID_32428
MAHGRLVLLVGPRSHPWGRDLRVLRVNRVGKPPKTDLDDVESNRGGGRYAESYN

SEQ ID NO: 75804 - protein, 262 aa, Zea mays
  Coding DNA Sequence Number=SeqID_32429
MARPSLERLLWASNSTRPPPRGRFRGRHVAIKDDILQGISNESRPHGKVPDSCIYKSRAPGIVQDLHVGKPDLSDGTRTPLYGVRAAHSGVPRFWDREYPGLNQGQAGVRSRHVSGPYRIRFRSPPRRRPDAATWPTARDVSQRAEPDVRPLGHAASVFIADKARRLSIPLAGDVPPRHLMSPVHSIGRQCAASAFNEPCPLYWRAVTRPSRRRRACPFHWLAAHPYCLMHYTHHDSHVTEEATATYQYCMDYGCYGAQEIA

SEQ ID NO: 75805 - protein, 354 aa, Zea mays
  Coding DNA Sequence Number=SeqID_32430
  Gene Ontology: Mol. function=tRNA isopentenyltransferase activity; Cellular component=intracellular; Biological process=tRNA processing
  Homolog annotation: Hit_ID=Q5N7L0; Match level="QueryCoverage=92%, HitCoverage=92%, E-value=2e-88, Identity=59%"; Hit description =Cytokinin synthase-like
  Pfam annotation: Domain name=IPPT; Domain location=88-292; Score =12.2; E_value=1.1e-11; Accession=PF01715.8; Description=IPP transferase
  Pfam annotation: Domain name=IPT; Domain location=54-284; Score= -109.5; E_value=0.00045; Accession=PF01745.7; Description=Isopentenyl transferase
  Pfam module annotation: Pfam domain module=IPPT::IPT; Domain location= 88-292::54-284
  Subcellular localization annotation: CTP_CleavageSite=29; ConfidenceScore=5.27e-01
MAAAAVAGIVSNDAPRKRPRRPPSGVRMEAMSRGGGCCCSSSDKKLEAAEPATTRLVVIVGATGTGKTKLSIDAAVALGGEVVNADKIQLYAGLDVTTNKVPHADRRGVPHHLLGAVRADAGELPAPSYRALAAEAAASVAARGRVPVVAGGSNSLIHALLAADSLGAGDPFKVDDGYRPSLRFPCCLLWVDVDGAVLDEYLDRRVDDMVREGMVEELREYFASAPPASHAAGLGKAIGVPELGAHFAGRKSLAAAIDEIKANTRVLAAAQVRKIRRMAGAWGWPVRRLDATPTVRARLAGAGRAAEAAAWERDVRGPGLAAMRQFLDGHEQQERPPNFGGAERALVDVGAVGP

SEQ ID NO: 75806 - protein, 1038 aa, Zea mays
  Coding DNA Sequence Number=SeqID_32431
  Gene Ontology: Mol. function=metal ion binding
  Homolog annotation: Hit_ID=A2Y772; Match level="QueryCoverage=99%, HitCoverage=99%, E-value=0.0, Identity=61%"; Hit description =Putative uncharacterized protein
  Pfam annotation: Domain name=Hemerythrin; Domain location=106-167; Score=14.1; E_value=0.51; Accession=PF01814.14; Description =Hemerythrin
  Pfam annotation: Domain name=Hemerythrin; Domain location=324-386; Score=27.3; E_value=5.7e-05; Accession=PF01814.14; Description =Hemerythrin
  Pfam annotation: Domain name=Hemerythrin; Domain location=37-98; Score=29.8; E_value=9.8e-06; Accession=PF01814.14; Description =Hemerythrin
  Pfam annotation: Domain name=Hemerythrin; Domain location=551-612; Score=30.6; E_value=5.7e-06; Accession=PF01814.14; Description =Hemerythrin
  Pfam annotation: Domain name=Hemerythrin; Domain location=622-713; Score=24.5; E_value=0.00039; Accession=PF01814.14; Description =Hemerythrin
  Pfam annotation: Domain name=zf-CHY; Domain location=895-968; Score =56.6; E_value=8.7e-14; Accession=PF05495.3; Description=CHY zinc finger
  Pfam module annotation: Pfam domain module=Hemerythrin::Hemerythrin::H emerythrin::Hemerythrin::Hemerythrin::zf-CHY; Domain location=106 -167::324-386::37-98::551-612::622-713::895-968
MATPTPMPGGEGTLAAVMPRSPSPTPAEAGTSATETPVLIFLYFHKAIRAELEALHGAAVLLATERTGDVEMLAKRCRFFFNIYKHHCDAEDAVIFPALDIRVKNVAGTYSLEHKGESDLFSQLFDLLQLDIHNDDGLRRELASCTGAIQTCLSQHMSKEEEQNSIQSAAMMHIKDEVDLRGKGARGRAGVLAVVFPLLTKKFSCEEQADLVWQFLCNIPVNMVAEFLPWLSTSVTSDEHQDIRNCLCKVVPDEKLLQQVVFTWMEGKATREVAESIAAGISARNNSVEDVPDQGKIHICLHHNSKLGSKNCGESNGPQADKHPIDDILYWHNAIRMELRDIKEETRRVQQSGDFSDISAFNERLQFIADVCIYHSIAEDQVVFPAVDSELSFVQEHAEEECRFNNFRCLIQQIQIAGAESTALDFYSKLCSHADKILEAIEKHFCNEETKLHTENDSRPGKRGKDAVSFSHTNGIYCSQTADIEAIPCSKKPCCIPGLRVESSNLGIGSLASAKSFHSLSYNSTAPSLYSSLFSWETDTSLSCSDSISRPIDTIFKFHKAIRKDLEYLDVESGKLIDGNESCLRQFIGRFRLLWGLYRAHSNAEDEIVFPALESRETLHNVSHSYTLDHKQEEQLFEDISNVLFQLSQLHDSQGHAQTEVNEVKKSCFHSSNDVDFARKYNELATKLQGMCKSIRVALTNHVHREELELWPLFDKHFSVEEQDKLVGRIIGSTGAEVLQSMLPWVTSVLTQEEQNKMLDMWKQATKNTMFGEWLNEWWKGAGTASDSSAEASSAPEDSHLQDKLEQNDQMFKPGWKDIFRMNQSELEAEVRKVSRDSTLDPRRKAYLIQNLMTSRWIAAQQKLPEPNSEECNHDASIPGCAPSYRDQEKQIYGCEHYKRNCKLVAACCNKLFTCRFCHDKVSDHTMERKYNEPTHLDVSRKATQEMMCMAYTCSHYTCPICCKSLGDMAVYFGMLDALLAAEELPEEYRDRCQDILCNDCERKGRCRFHWLYHKCGSCGSYNTRVIKTATADCSTPN

SEQ ID NO: 75807 - protein, 172 aa, Zea mays
  Coding DNA Sequence Number=SeqID_32432
  Homolog annotation: Hit_ID=Q8SA97; Match level="QueryCoverage=62%, HitCoverage=20%, E-value=2e-07, Identity=35%"; Hit description =Ornithine carbamoyltransferase
  Subcellular localization annotation: CTP_CleavageSite=94; ConfidenceScore=5.05e-01
MEPGGGTSVGAVESLLTSSCFRKGAESRRRHRVRGAPSLPIWRSEPDGTPVLSPVARVSSGLGDVEAPPRPRSSLSSMVEVESEPLVQARRRPSAEARAESEPWGRAERSSSSSGAEPKSEPWVERSGVRRLPGLSPSPSLGSGGAEFVVFRDLARVRALGRAERSSPSSGT

SEQ ID NO: 75808 - protein, 336 aa, Zea mays
  Coding DNA Sequence Number=SeqID_32433
MAEKYQLPRSCVPPTTRWKDGGYPPSGGLEGGKTRCIREREDMVVFQGGHPPFKGDSPYLHPQSSRAESSPTRSKVLPCGAGAGSHTSCKPAQSRRSQTAMRGAHDRPAVTSDSPLLPRPTGERGGQPCRRHATAPSGRASPTPNTPSMEAQAHASCNRRAECFVHATAPPLAPPPHLLDCGTNTATRGDLAHDPAAPAWRDGQCSQKQAGSNGGGRRAGAAVTRSGRRFAFAIMTASEKGPGKGDTPKRILPREGTRLRASLLIRGSKAGPSKGFDSRLRSCGPYTHYWSEVRRPAPRKGSTTASGYSGSAPTTDQGFEGWPPKGSQPPQTQSEG

SEQ ID NO: 75809 - protein, 232 aa, Zea mays
  Coding DNA Sequence Number=SeqID_32434
MARVCFGLGDRKKHTLQDNPILQDRILTLEGSSSTLGVDNTFGEGLPRESGSGRRLGWSPRGLGRLSAADIGPTRGLGRSIPASVPLTGNPARLRPTRSSFRANSASVHADTATPRPRLIEGRPRGTNNPTRWGGPAEQQKTDERRAAARSSSGDDDDFCSGGPNSGSDDLRADAAARRPPPMPKLVRQGRAEGRRVGEDGAESGSEATRVRRPGTRQPPVPRTTTALPPDH

SEQ ID NO: 75810 - protein, 360 aa, Zea mays
  Coding DNA Sequence Number=SeqID_32435
  Gene Ontology: Mol. function=hydrolase activity; Biological process =proteolysis
  Homolog annotation: Hit_ID=A7P389; Match level="QueryCoverage=82%, HitCoverage=81%, E-value=3e-87, Identity=52%"; Hit description =Chromosome chr1 scaffold_5, whole genome shotgun sequence
  Pfam annotation: Domain name=Abhydrolase_1; Domain location=142-350; Score=6.3; E_value=0.0016; Accession=PF00561.11; Description =alphabeta hydrolase fold
  Subcellular localization annotation: CTP_CleavageSite=76; ConfidenceScore=5.07e-01
RSNTCAEVTAPIDKPAKQPHMPPHMAAISHRIAGSGPRVAVVAPPRPRGRAAVVAGAAAKGAHRERTLEGASDDLRAAAAQCLDWAPARRRVRAAFAPVLPTLDHCLFKMAHNEIQMEELSGLKNLMKAQKRIAKRIAAAGYAVYAMDYPGFGMSYGLHGYIASFDGMVDHVIEQYARIRGMKEVCELPHFLLGQSMGGAVALKVHLKQQQEWDEDVTPPAPVLKALSILSCLLPEAKLFPQKDIGDLAFRDPRKRKVAEYNAISYSDQMRLRTAVELLKATKDIESQLEKISSPLLILHGAADMVTDPQVSKFLYEKASTKDKTLKLYEGSYHSILEGEPDDRISTAINDIISWLDSHC

SEQ ID NO: 75811 - protein, 272 aa, Zea mays
  Coding DNA Sequence Number=SeqID_32436
  Pfam annotation: Domain name=DUF1639; Domain location=193-267; Score =7.5; E_value=0.0058; Accession=PF07797.5; Description=Protein of unknown function (DUF1639)
  Subcellular localization annotation: CTP_CleavageSite=67; ConfidenceScore=5.80e-01
MAATADPRAKPPPAASHHLKPWAPQPRPRARRVPPLPGPVVTGGGGARDRRRSSSSSSSSSSHRRLSADAGTVQMELPCDGQIKDPRAKLMGHLRPLPPPPPPPPPPKPQPRPPGPEPAAPLPQPTPSQPEEAAAARPWNLRDRKCRRPTARGAAAAAAAALDASHARDAAGAGAEKARLPVPLERAPFAVALTAEEVEDDVYALTGAPAAAASPEASSRRAAAARCKANSPYCPSCSTYNHFMLHEKEKNALFPGLWLTEITADAYKVPDE

SEQ ID NO: 75812 - protein, 326 aa, Zea mays
  Coding DNA Sequence Number=SeqID_32437
  Gene Ontology: Mol. function=ubiquitin thiolesterase activity; Cellular component=nucleus; Biological process=ubiquitin-dependent protein catabolic process
  Homolog annotation: Hit_ID=A7QK71; Match level="QueryCoverage=65%, HitCoverage=36%, E-value=3e-56, Identity=54%"; Hit description =Ubiquitin carboxyl-terminal hydrolase
  Pfam annotation: Domain name=UCH; Domain location=64-316; Score= -49.0; E_value=0.00038; Accession=PF00443.20; Description=Ubiquitin carboxyl-terminal hydrolase
MASGENRAEFGPCSAQGGGDRRGGSRGRRGALRSQSGSESSSAYMEISNEHHCAGRSRTSTIARTGRDLSNERSDIMQRKGGWFLVCLLVGKKVSPNRDKECAFCVLERQIARLLRADAGALDSPAKVIRCMPLFAEHFRWGRQEDAHEFLRYVVDACHTAGLRTRKLLLAKGANGNCGEDGRGQGACLVMRETFGGALLSQVKCLVCNRESNKTDEIMDISLDLPGSSSVADALARFFKPEILEGANKYSCERCKTLTSAQKQMFMLRAPKVLVIQLKRFEGINGGKINRNIEFKETLGISDCMYNKSQACKLLWMQKLSVKPII

SEQ ID NO: 75813 - protein, 170 aa, Zea mays
  Coding DNA Sequence Number=SeqID_32438
  Gene Ontology: Mol. function=ubiquitin thiolesterase activity; Biological process=ubiquitin-dependent protein catabolic process
MGLPHPLSNIPNDEEERLAPLGIEARGLEGPQSRAEEVPHQEELRDRTLGLSNGSLAFCLCRVGKGSVMISLGCVRSPVQREHPRAGGLLSQLLLSFGCLYGWMMSIILCARKKRRRLLSSDVTQDFDAMRKQLVSDSAAIFRSKVPESLMENLIKRLRSYFEGKHSPHE

SEQ ID NO: 75814 - protein, 160 aa, Zea mays
  Coding DNA Sequence Number=SeqID_32439
  Subcellular localization annotation: CTP_CleavageSite=61; ConfidenceScore=5.13e-01
MDGDATALASPSAGSFPDKRVRSEYSVERAPGDSTATATPPEKVAVVPRTAPNPFYWSGRRAAEVVVAADPPACFVERPPRRSVRRRHRRSSLSAGFASAGRRSTGVRRFAERSTLTRSASLELQGPSLFVKWKGQARSANKPFPDLEATSDFICSTGDT

SEQ ID NO: 75815 - protein, 275 aa, Zea mays
  Coding DNA Sequence Number=SeqID_32440
MVKYSDGSGERYPLPYLAALFSLTPDAGDDCSRPLASFARTEPAAPDYGNFSVHLASPRPVHGRAILRGDAAAGLPSAGGVGPGPPRLRRRGTRIRDHAVPLVTEDEEESNPLPARYVATDSLASVSDHRRRHQIHTETLRFGVLRPRSPLLKEMQTAPTIYQFTRTCQWNQAHLIMASSPEDKMKASMKVLVDCTEDATKSLGGLVDHALDHMHDEEILARTLFAMKEKLELLQHDALEAKVQAFPEIAKYEWDDISVDPPSPSPPPTVTDPSV

SEQ ID NO: 75816 - protein, 285 aa, Zea mays
  Coding DNA Sequence Number=SeqID_32441
  Gene Ontology: Mol. function=kinase activity
  Homolog annotation: Hit_ID=Q6QP54; Match level="QueryCoverage=37%, HitCoverage=38%, E-value=2e-19, Identity=54%"; Hit description =Putative kinase
  Subcellular localization annotation: CTP_CleavageSite=19; ConfidenceScore=5.37e-01
MSNASSGQQFPPPHPLWPTGYMQQSGMDCNFMGNLNFPNPGQGPTTMWAPMQTGHSTSQSTMIPASQSAMYWNHYLNFVRNHLGSAEVNPFPDSIPPSNTSTPLQSSNTIHSLPVNLDSDVEHSVHDINSPEKNAPPVQKPKKSKEQNFTGPEDLLLCTTWLQISSDPIVHTGQRREGLWARIVSAFRDRRVPGPTTSQMGRRSGSLWPESARGRVMMAPLVDETGLRPRLSDAEAPPKPRSSLSSVVEAESEPLGRARRRSSAEARAESEPWGRAKRSSSSSGT

SEQ ID NO: 75817 - protein, 356 aa, Zea mays
  Coding DNA Sequence Number=SeqID_32442
  Gene Ontology: Mol. function=transcription factor activity; Cellular component=transcription factor complex; Biological process =regulation of transcription, DNA-dependent
  Homolog annotation: Hit_ID=Q2QXF8; Match level="QueryCoverage=46%, HitCoverage=36%, E-value=5e-59, Identity=75%"; Hit description =Transcription factor E2F/dimerisation partner family protein, expressed
  Pfam annotation: Domain name=E2F_TDP; Domain location=271-335; Score =123.6; E_value=5.9e-34; Accession=PF02319.11; Description =Transcription factor E2Fdimerisation partner (TDP)
MEGGRQEREYEMTLKRMLQSICLLTVHANTTTSVVLQNLSVERFACITETEEKNCHKTSTFTYFPTDMQDAQGSLDRRDVFSLDTHSPSVCLLIQLEKAATEEGGVTPSVYSHKEPVHLAEKEKQKLQVWSRIMPCKESFAWAMIPLFEGNHAGGLSDAAHKYYISNLFQSITRYHLHVTPYLALILTRTFLLQLKRKHNDRTENEAAESNDWMSPGYANAGSSPVPTPPSGKGLKASTKPKATKGQKSGPETPLGFGSPGNLSTPVGGCRYDSSLGLLTKFLNLLKGAPGGIVDLNNAAETLEVQKRRIYDITNVLEGIGLIEKKLKNNIRWKGVDDSRPEEVSDDMSILQMLHA

SEQ ID NO: 75818 - protein, 315 aa, Zea mays
  Coding DNA Sequence Number=SeqID_32443
MNKTPAFKVPLKTELRFRPRGYEQPPHRGSPRGDKLQATHQRPLQQQLWSQDGRGHRKALVRVPSQGTRTRQQSQRAGGRSVDGADGPDGGESPPGCYHVSTDGGVRLSINAAPANAGRSKAHRQDASSAELEDGFHHQKLEEEVASRPMREVKPRLASLSAPARMMNILEAEGGTKIAARLASPHPGAGGHRLGAEEAKPPRAVHATAQRLEAFLHNHPDQRGQGKGDTPKGILLREGNRPRASLLIRGSKAGPSEGFNSRLRVFGLRAHYWSEVRRPAPRKGSTAASGHSGSTPTTDQGFVGWPSKGSQPPQT

SEQ ID NO: 75819 - protein, 154 aa, Zea mays
  Coding DNA Sequence Number=SeqID_32444
MGKSNKRKREPTPPSEDFGDSEYSEEEFSSESEGSPAPVSPPGSSDDSDDSQGIAAEVWTYIRAVERSGLEGSDELEFSSDEEDSDGGEDEDDDDDDGDDDDGGDGDGDGSGSGGSSDGKGSTRGGSSTGSTRGGGGNGSTRGGGGGSSSKASG

SEQ ID NO: 75820 - protein, 577 aa, Zea mays
  Coding DNA Sequence Number=SeqID_32445
  Gene Ontology: Mol. function=pyridoxal phosphate binding; Cellular component=cellular_component; Biological process=amino acid and derivative metabolic process
  Homolog annotation: Hit_ID=A2Y6E8; Match level="QueryCoverage=92%, HitCoverage=88%, E-value=0.0, Identity=68%"; Hit description =Putative uncharacterized protein
  Pfam annotation: Domain name=Pyridoxal_deC; Domain location=72-459; Score=527.7; E_value=1.3e-155; Accession=PF00282.10; Description =Pyridoxal-dependent decarboxylase con
MAILNRADTSHTTTASNGSATPAAPVAIAMPSLPHPPLDADEFRRQGRLVVDFIADYYARIDGYPVRPAVAPGFLIRQLPEAAPARPEPDALAAALRDVRDLILPGVTHWQSPRHFAHFAATASNVGALGEALAAGLNVNPFTWAASPAATELEVVVTDWLGKALHLPESLLFSGGGGGTLLGTSCEAMLCTIVAARDRKLAEVGEERIGDLVVYCSDQTHFSFQKAARIAGIRRGNCREIPTSRESGFTLSPKALAAAVRADEAAGRVPLFLCATVGTTPTAAVDPLRELCAAVAGHDVWVHVDAAYAGAACVCPEFSHVVAGVEAAESFSTNPHKWLLANMDCCALWVRRPAALTAALGTDHDVILKDPAAAQAQAQQQQCSDGGVVDYKDWQVALSRRFRALKLWLVLRCHGVEGLRGLVRAHVRMAAAFEAMVRGDARFEVHVPRQFALVCFRLRAVAVAVAGEKRAGDYDGVAAGNELNRRLLEAVNATGRVYMSSAVVGGAYILRCAIGNSLTEERHVREAWSVVQEQATAILSAATATARTNGLTVRRARCDAEADVSDVPTPQQPLPLG

SEQ ID NO: 75821 - protein, 175 aa, Zea mays
  Coding DNA Sequence Number=SeqID_32446
  Subcellular localization annotation: CTP_CleavageSite=21; ConfidenceScore=5.37e-01
MAPPMTWSVRALGRARRRLLRGRGRVCLPRPRSSPSPWVGRGGDRRLRPGLSPSPGVGRSGVRCLPGLSPSPSPWGRAKQSSSSSGAEPESEPWGRAKRSSSSSGAEPESEPWGRAKRSFLWRLRPDLAVVSLTLSSGTTVGAAQAALSSCQAGQWSGEVTTVTSAMSTEGRASG

SEQ ID NO: 75822 - protein, 178 aa, Zea mays
  Coding DNA Sequence Number=SeqID_32447
MNNLHTGEPAGRQAPCDSPATSAAAAMVPGRTQPPEGSRGADGVDGGEASSSCHHVSTDGGVRLSTNAAPASAGRSKAHRQDASSAELEDGFHHQKLEEEVASRPAREVEPRLTPLSAPARMMRILEAEGGTKIAARLASPHPGAGDQRVKGRAAMQSACNRAKWAHPFNSNAPSMEA

SEQ ID NO: 75823 - protein, 93 aa, Zea mays
  Coding DNA Sequence Number=SeqID_32448
MAEEAKYLETARADRSVWLMKCPPVVSRAWQAASASASSSDAANANPVVAKVVLSLDLLRPEERPEERPEEPTLQASTPNLLHPAGPFPVLRL

SEQ ID NO: 75824 - protein, 111 aa, Zea mays
  Coding DNA Sequence Number=SeqID_32449
  Gene Ontology: Mol. function=kinase activity; Cellular component =ornithine carbamoyltransferase complex; Biological process=amino acid metabolic process
  Homolog annotation: Hit_ID=Q6QP54; Match level="QueryCoverage=61%, HitCoverage=24%, E-value=6e-10, Identity=50%"; Hit description =Putative kinase
MAPPVDVAGLRPRLGDAEAPPKPRSSLSSVVEAESEPLGRARRRSSAEARAESEPWGRAKRIGVAQAALSFCLAGQWSGEVTAVTSALPGGARQDKGVRASEASRSSGTQM

SEQ ID NO: 75825 - protein, 225 aa, Zea mays
  Coding DNA Sequence Number=SeqID_32450
MTSHGSSDDGNALTRTDGLAREGFPRILWEVLQGAGYATPPQYVVQQFEKHRVPRCRVRMTLEPHPLQPGWRSLDSESFGYRAEDTIEAIALHGLTTFCNVPSDGAAGGTKITLDNREELVVDLSQEMVEKDLQVEQLSTDIQELEELVGTRENTIEVLEDQLINTQQQLAEANEHLDMHHQEIQDQEANEDVDIEGGDEPASSVDTAGSGRPPSPESSVASFAH

SEQ ID NO: 75826 - protein, 107 aa, Zea mays
  Coding DNA Sequence Number=SeqID_32451
MARRVLIPRLGTFVSFFLVIRVHSFVGEVDNGVLWGFRPSVCEGSSSSELWAVVSLAVLLWLPSGSLRKAFSQAEFPSLFIRYARDGSKAEHSSGVKGDLALEGDGH

SEQ ID NO: 75827 - protein, 81 aa, Zea mays
  Coding DNA Sequence Number=SeqID_32452
MAITFKNKITLRPGAMFRFGTISWEIGVSTLLRRSAYHAKGRNLPSVRPDDGETDARTCGDIMKPGNGIRHSLCPKTKASE

SEQ ID NO: 75828 - protein, 74 aa, Zea mays
  Coding DNA Sequence Number=SeqID_32453
MPPINFGSRGVAAAAAAAVLPPLQSQNSWWWQRWGLGWGIAGGWDLASWALMRWLLWPLMAGDITCGSLLQKLQ

SEQ ID NO: 75829 - protein, 751 aa, Zea mays
  Coding DNA Sequence Number=SeqID_32454
MSSSSFAASASSADPSSEDTLSDLVATELQPGHTVEFGTLRISSVHVQEMQQLGYFGEGSGGFAEDWQDFGGSRGNSPFCPEQVGAIGGTFGFMFLVGKLKVCLGLPAAIMCSHCYVAFPQFEVAEDDENERGPLLVRSPAFAVDLRGRNPASFVREVEAEAARIVGRYVPKTETLRSWDIHGSNVCLNRVFELNRLSYSGYPGDDDAAVGDRRGKKAIATVDEGPSRGAMPAAATKKRKLGTAAEGLGASDHFVVDLMGTCAAPGERMSSPRLQESSARMLKVTGECCCCCIDSDGKRIAKMRRRSDGRSRGSGTPRREVKMARGIAKSAAPGTSKPPLGAKSAAPGPSKPLPVVPVPEQRPASPRRTAETEVGGVEVSMDISVDDFLVGGVPMFDAHIGRGLVGSEAGQLAVVPALVAAGLVAVAKGYAQDPLAKFCASGEIASAATAKDVVGSVTQQLKHEELEVLPSIVTGLMSFASLITCGGAMNALSRDGCRHFEVFDRSDEDFDCEIFQVEDAVLKQSAGALYDRMWGPHGRDTVRERSDRAMEQMVNDEEVEDLGSLESANPLAEGVRAGTEEQPALPTGVGEDDPVVAAVLPEDTSVAAAPAVEDSAASMGPAQVLTSGPAQPTSTDGTNFVVAMNAVPANDNLSGSESGSFSSDGDVAAAESSPRLEMGEALDPPAGVRIERRQPKVVAKHSVGESSRSGRRRRMGLEQTRLHVDRGGQRDLLSSSFGTSIGERDLRNLLE

SEQ ID NO: 75830 - protein, 413 aa, Zea mays
  Coding DNA Sequence Number=SeqID_32455
MNKTPAFKVPLQTELRFHLRSSDDDDFCSEGPDSSSDDLRADAAAIRPSPMPSLERQGRAKGRRVGGQSMGGTSYLVGGETSSGCRGGRRRRKRLRSHSGQRAGRAAAASATNGERPSPRSLREGAGRRPRRDRPQLGALPSPALMMKILEAEGGAEAAARLASPHPGAGGHRLGAEEAKPPHAVHATAQRLEAFLHYRPDQRVKGRIAMQAACNRAKWAHPSDFQHTQHGGPGPHVMQPARRLLRASNYTATHATTAPPRLRTSTATRGNPAYNPTVPARRDGQYGQKWAGSNGGGRRTEAAVASSAKDRERGIPRKGSFSAKETGPRAPLLIRGSKAGPSEGFNSRLRALGLRAHYWSEVRRPAPRKGSTAASGHSGSAPTTDQGGNDRVTESHQREASSPRTPSKGDRVR

SEQ ID NO: 75831 - protein, 89 aa, Zea mays
  Coding DNA Sequence Number=SeqID_32456
MKRDASHHAYGHRGKRQHGTAQRADEELERGGGLDLEDDWEGCVQGAEAEVDMALGVGLKSITTSSSSTSRRITPSSSCNRITPSTSYL

SEQ ID NO: 75832 - protein, 111 aa, Zea mays
  Coding DNA Sequence Number=SeqID_32457
  Gene Ontology: Mol. function=binding
  Homolog annotation: Hit_ID=Q10N57; Match level="QueryCoverage=59%, HitCoverage=13%, E-value=8e-15, Identity=62%"; Hit description=HEAT repeat family protein, expressed
  Pfam annotation: Domain name=HEAT; Domain location=26-49; Score=5.2; E_value=4.6; Accession=PF02985.13; Description=HEAT repeat
  Pfam annotation: Domain name=HEAT; Domain location=50-86; Score=21.3; E_value=0.0036; Accession=PF02985.13; Description=HEAT repeat
  Pfam module annotation: Pfam domain module=HEAT::HEAT; Domain location=26-49::50-86
  Subcellular localization annotation: CTP_CleavageSite=35; ConfidenceScore=5.02e-01
MAIGDGFCRRAHRTVRCATGHCPVHQPRHPTVRVRRTACKSLGALAKFSTQYTEKALDLLMDMMNDDTEAVRLHALEALFRMATYGCLSVQEKHMHMVLTMNILRSQMHDR

SEQ ID NO: 75833 - protein, 338 aa, Zea mays
  Coding DNA Sequence Number=SeqID_32458
  Gene Ontology: Mol. function=calcium-dependent phospholipid binding; Cellular component=cytoplasm; Biological process=cell differentiation
  Homolog annotation: Hit_ID=Q5VNH3; Match level="QueryCoverage=96%, HitCoverage=92%, E-value=6e-94, Identity=59%"; Hit description =Putative calcium-binding protein annexin 6
  Pfam annotation: Domain name=Annexin; Domain location=105-171; Score =42.4; E_value=1.6e-09; Accession=PF00191.11; Description=Annexin
  Pfam annotation: Domain name=Annexin; Domain location=190-258; Score =14.4; E_value=0.0021; Accession=PF00191.11; Description=Annexin
  Pfam annotation: Domain name=Annexin; Domain location=268-335; Score =45.2; E_value=2.4e-10; Accession=PF00191.11; Description=Annexin
  Pfam annotation: Domain name=Annexin; Domain location=5-70; Score =48.0; E_value=3.3e-11; Accession=PF00191.11; Description=Annexin
  Pfam module annotation: Pfam domain module=Annexin::Annexin::Annexin:: Annexin; Domain location=105-171::190-258::268-335::5-70
MTDLRAVFHCGSLYSGWGTDEQAVIGILAHRDATQREQIALEYEHKYGESLVQRLQSELTGDFEVPITVLSSSGIISFFFLTSPELTNLRVQRAVYHWMLGPAERQAVMANAATECLQEECAVIVEIACANSSAELVAVKKAYHALYRRSLEEDVAARATAGNLRSLLLALVSTYRYDGADSVDMELARSEAKAVHEAVRDGGGAGGHEELIRVVGTRSKAQLRATFGCFKDEHRRSVAKALPRGTDPTGYLRALRAAVRCVADPSKYFAKVLRSATRESAGTDEDSLARVVLLHAEKDDMGAICAAFLKRASCTLEQAVAKETSGDYRSFLLALLGS

SEQ ID NO: 75834 - protein, 94 aa, Zea mays
  Coding DNA Sequence Number=SeqID_32459
  Homolog annotation: Hit_ID=A2WL17; Match level="QueryCoverage=59%, HitCoverage=17%, E-value=1e-19, Identity=82%"; Hit description =Putative uncharacterized protein
MGTLISLYAKSALLRDSLGIFFMTNCTLAFVTCDTVYRLERDAYPLFRTLRQKYKTSTDRDAVFQELLDEIAAKFYNIQRQNPLEGLFSEMFRI

SEQ ID NO: 75835 - protein, 96 aa, Zea mays
  Coding DNA Sequence Number=SeqID_32460
  Homolog annotation: Hit_ID=A2WL17; Match level="QueryCoverage=84%, HitCoverage=18%, E-value=2e-15, Identity=59%"; Hit description =Putative uncharacterized protein
MSRSLSMRGSMRSRRDLPPPGKTIERLESMVDGGNFYEAQQMYKSTSARLSRASVPGQQGPDYAARSHDGYIAVHKYSEALDILQSGALVQLKLGQ

SEQ ID NO: 75836 - protein, 159 aa, Zea mays
  Coding DNA Sequence Number=SeqID_32461
VPKVHNKPIKRPRKRVQTKEQRDNRRHPGLAHWTVRCATRQCPVHHRTVSGAPGDSKLNSSPSGILRGADCPVHHRTVSGSPRPSDSELASFENPLRYNSPDMSGVHRTVRCNGGATACLRQRSPATALNARQRAQRSRARAGGTPDSLQGMFGAPPDS

SEQ ID NO: 75837 - protein, 93 aa, Zea mays
  Coding DNA Sequence Number=SeqID_32462
  Gene Ontology: Mol. function=protein phosphatase type 2A regulator activity; Cellular component=protein phosphatase type 2A complex; Biological process=signal transduction
  Homolog annotation: Hit_ID=Q6I621; Match level="QueryCoverage=62%, HitCoverage=11%, E-value=1e-13, Identity=63%"; Hit description =Protein phosphatase 2A B'kappa subunit
MSGAPNGSRICNGRLRHLRKEIGHRTVSVLNLTVNVKKMLSKMDDDLFLSCVAKYKDKEEKHVSLEAKHKLTWEKLESAAACRKWVTPKRGVN

SEQ ID NO: 75838 - protein, 160 aa, Zea mays
  Coding DNA Sequence Number=SeqID_32463
MGKNNKRKREPTPPSEEFGDSEYSEEEFSSEPEGSPAPVSPPASSDDSDDSQGIAAEVWTYIRAVERAGLEGSDESEYSSDEEDSDGGDEGEDDDDDDDDDDDGGDGSGRGGGDGSRDSTKGSSRGSTKGGGGSGDSTKGSSRGSTKGGGGGRSRGRASG

SEQ ID NO: 75839 - protein, 326 aa, Zea mays
  Coding DNA Sequence Number=SeqID_32464
  Homolog annotation: Hit_ID=A2XFR6; Match level="QueryCoverage=44%, HitCoverage=41%, E-value=1e-29, Identity=47%"; Hit description =Putative uncharacterized protein
MALALVVSFICLVPSKPYLKYGQRVGAAVVAAHVNMGTYSWLRCVEMDLSTHMVCARFYALELGVTEVMVRTLQTIRVNTSYAPPPRQISVYLVVVEEVPMNLPHIRVENEVILEDNSEEQLSTPTPLTESLAFAARSSTSAPPAPAIQAPAPRGDDLDDSGTRMTTITRTKKNKSTRDRGFKTLSAHESLTPLSTYAASVTDAARRTLWSHSHTYRQQLHDTNFRHLPLRLSGGSQTSIVLGEASEDRLNTLAGVVADLNTDLDSATLDLSRVHLELEDAHAMIAALEAQLQGRDPPEAQVPAMALSPPRKRLRYGEPGSVTRLL

SEQ ID NO: 75840 - protein, 129 aa, Zea mays
  Coding DNA Sequence Number=SeqID_32465
MAKLIALEIAIGLDKQFPSFTFKANCLVQQSLEVREGNMMSAEVHLELLPGYGIRIRVMSNFFPITLSQSSASKGSTTWENVGGESLQKLHLGGDELFHVGVRCWWWYLLTTLVPVVVGFLASVHHLIG

SEQ ID NO: 75841 - protein, 144 aa, Zea mays
  Coding DNA Sequence Number=SeqID_32466
  Gene Ontology: Mol. function=two-component response regulator activity; Cellular component=nucleus; Biological process=two -component signal transduction system (phosphorelay)
  Homolog annotation: Hit_ID=Q9ZQW0; Match level="QueryCoverage=75%, HitCoverage=71%, E-value=5e-44, Identity=87%"; Hit description =Response regulator
  Pfam annotation: Domain name=Response_reg; Domain location=36-138; Score=18.8; E_value=0.00013; Accession=PF00072.15; Description =Response regulator receiver domain
MVAVAAAPASVAPSPAPKASDSRKAVVPVDASELEKHVLAVDDSSVDCAVIARILRGSRYRVTAVESATRALGLLPDVSMIITDYWMPWMTGYELLKRVKESAVLRGIPVVIMLLENVPTRITRFLEEFDPRLAEVLTPSSRIS

SEQ ID NO: 75842 - protein, 328 aa, Zea mays
  Coding DNA Sequence Number=SeqID_32467
  Gene Ontology: Mol. function=hydrolase activity
  Homolog annotation: Hit_ID=A9NP06; Match level="QueryCoverage=74%, HitCoverage=76%, E-value=3e-79, Identity=57%"; Hit description =Putative uncharacterized protein
  Pfam annotation: Domain name=Abhydrolase_4; Domain location=230-312; Score=-16.8; E_value=0.056; Accession=PF08386.1; Description=TAP -like protein
  Pfam annotation: Domain name=DLH; Domain location=111-326; Score =38.1; E_value=7.2e-10; Accession=PF01738.9; Description=Dienelactone hydrolase family
  Pfam annotation: Domain name=Peptidase_S9; Domain location=136-318; Score=-76.2; E_value=0.048; Accession=PF00326.12; Description=Prolyl oligopeptidase family
  Pfam module annotation: Pfam domain module=Abhydrolase_4::DLH::Peptida se_S9; Domain location=230-312::111-326::136-318
  Subcellular localization annotation: CTP_CleavageSite=51; ConfidenceScore=5.07e-01
ALDGARGRGCRSGEPGSAPSFNVPKGQTSQGPCLLVSVRWAERTLLSTCVLLFHVQKSGSAGHGHPRIRQLRGRPDCSRQAEVMGSTVDDDEACELVSGSDLVIGEGDDSVSAYLFKAVKNNNGTGILLLSDIFGFQDSATRDFAYRVACNGYNVLVPDLFRGNPWKLNVPFDGDSFERWRAGQAPGRVSGDIDACTRWLVDEFKAAGVSKKLGVIGFCYGGGRLVETLARDAESCFSAGVCFYGSRMDASLGDRVAAPVLFVCGDGDPLCPVETVRELEGRARGARAAVYAGRGHGFAHRPQSVEEDGDAEDAFNAMRGWLHDHLLA

SEQ ID NO: 75843 - protein, 514 aa, Zea mays
  Coding DNA Sequence Number=SeqID_32468
  Gene Ontology: Mol. function=phosphotransferase activity, alcohol group as acceptor; Cellular component=nucleus; Biological process =nucleobase, nucleoside, nucleotide and nucleic acid metabolic process
  Homolog annotation: Hit_ID=A3B4A0; Match level="QueryCoverage=64%, HitCoverage=52%, E-value=1e-169, Identity=87%"; Hit description =Putative uncharacterized protein
  Pfam annotation: Domain name=dNK; Domain location=305-452; Score =95.9; E_value=1.2e-25; Accession=PF01712.10; Description =Deoxynucleoside kinase
MAARCRILCKLLGLPPLLLLCACTIPWLPSLLLQFAGRVFAHLHGRGSPVPLCSPVATSSSSDSVLRAVSAPSPWTPQLFLHARIPVPCVARPGGCALPSASVIFAGRVTLLGNEYRVAGPAFSISLLLSFADTAAPALDELYRRSGDQPETEQQADEEDEEDEVEVVENATEPLYALLIACMHVQFFGKSSGQMVEFLQCSVGIVHKNHAESITSFIKESIDEELKDTDSSKPTQKKRLTFCVEGNISVGKTTFLQRIANETIELRDLVEIVPEPIDKWQDVGPDHFNILDAFYAEPHRYAYTFQNYVFVTRVMQERESQAGIKPLRLMERSVFSDRMVFVRAVHEANWMNEMEISIYDSWFDPVVSSLPGLIPDGFIYLRASPDTCHKRMMHRRRSEEGGVTLDYLQGLHEKHESWLLPSKGSGPGVLSVSQLPMHMEGSLPPEIRDRVFYLEGNHMHSSIQKVPALIMDCEPDIDFSKDIEAKRQYARQVAEFFEFVKEKAGTSSIWANKQ

SEQ ID NO: 75844 - protein, 101 aa, Zea mays
  Coding DNA Sequence Number=SeqID_32469
MAMVARPVASRGKPCPPPRALTPPQADDLDSDNFTLYTKTQEPIAQITGMTAPRHKASDQNMIRGHIQIRKLNVRVCLVGPWKKPVCTELLKILKPFSRTH

SEQ ID NO: 75845 - protein, 94 aa, Zea mays
  Coding DNA Sequence Number=SeqID_32470
MAREQRRRAGLNPSWSSWQPASREDLGNHGHGDERTHGQQTGAGVRHQRRHEGYGVWASGCCKDEEDDQRNLRRKRRGEKNDGLGERACLDPMN

SEQ ID NO: 75846 - protein, 45 aa, Zea mays
  Coding DNA Sequence Number=SeqID_32471
MARRRGDPRVATGVGPDHYVNWNMENHPGKQCYHRGLMGRPWLIN

SEQ ID NO: 75847 - protein, 926 aa, Zea mays
  Coding DNA Sequence Number=SeqID_32472
  Gene Ontology: Mol. function=transferase activity, transferring glycosyl groups; Cellular component=endoplasmic reticulum
  Homolog annotation: Hit_ID=Q5TKJ0; Match level="QueryCoverage=86%, HitCoverage=99%, E-value=0.0, Identity=79%"; Hit description =Putative anthranilate phosphoribosyltransferase
  Pfam annotation: Domain name=C2; Domain location=240-323; Score=62.1; E_value=1.8e-15; Accession=PF00168.21; Description=C2 domain
  Pfam annotation: Domain name=C2; Domain location=403-491; Score=92.0; E_value=1.8e-24; Accession=PF00168.21; Description=C2 domain
  Pfam annotation: Domain name=C2; Domain location=77-157; Score=36.5; E_value=9.4e-08; Accession=PF00168.21; Description=C2 domain
  Pfam annotation: Domain name=PRT_C; Domain location=654-806; Score =396.5; E_value=4e-116; Accession=PF08372.1; Description=Plant phosphoribosyltransferase C-ter
  Pfam module annotation: Pfam domain module=C2::C2::C2::PRT_C; Domain location=240-323::403-491::77-157::654-806
  Subcellular localization annotation: CTP_CleavageSite=8; ConfidenceScore=5.25e-01
MKGAMPPRQFMVPGPGGPMLPPQQQFGLVETRPPLAAVLRPRFNIPGLHPSAAAAAAASGAGKIASTYDLVEPMRFLYVHVVKARDLPAVSATGAIDPFVEVKLGNFKGTTPVRAASHNPSWQQSSPSPPRTSSPICSRSPSRPKDLAGDDLVGRVAFDLAEVPVRVPPDSPLAPQWYRLETKRGEKLPHGEIMLSVWLGTQADEAFPDAWHSDAHAAAGPAAVASTRAKVYFSPKLVYLRVAAIAAQDLIPHDTSRPMSACVKLQLAGQLRRTRPGAPPGTPNPIWNEEFMFVASEPFDEPLVVTVEDRVAPGRDEMLGRIFLPLAAAMPRHDHFGKPVEPRWYSLMRPSDDPDKKEVKFASKIQIRMSLDFGYHVLDESTYYSSDLQPSSKPARKPSIGMLELGVLGARNLVPMKPKDGRTTDAYCVAKYGPKWVRTRTILDTLNPQWNEQYTWEVFDPCTVITVVVFDNGQIGSKNGGGPDQRIGKVRIRLSTLETDRVYTHFYPLLVLNPSGLKKTGELHLAVRFTCTAWVNMMALYGRPLLPKMHYTQPIAVMQLDYLRHQAMQIVAARLSRAEPPLRREVVEYMLDVDSHMFSLRRSKANFHRITSLFFGFLAMLKWYDGIRSWWNSITTVLVHMLFLILICYPELILPTIFLYMFMIGLWNYRFRPRHPSHMDTKLSHAELTHPDELDEEFDTFPSSRPAEIVRMRYDRLRSIGGRVQTVVGDLATQGERAHALLSWRDPRATAIFVFLSLVVAVVLYVTPFQVLMVIGMLYLLRHPRFRSRMPSVPFNFYRRLPARSLGEEANWSCARKSGGDCYSPHQARPSAATLSSRDSPPPRLSLQPDLAALLRFDPRDIFLPEDALTGSNPSVAAKFLHGLLHPADSATAVPGDFTFRDRFLLRDPADALALPGLLILPSRSV

SEQ ID NO: 75848 - protein, 194 aa, Zea mays
  Coding DNA Sequence Number=SeqID_32473
  Homolog annotation: Hit_ID=Q6QP51; Match level="QueryCoverage=80%, HitCoverage=64%, E-value=9e-45, Identity=64%"; Hit description =Putative growth-regulating factor 1
MAAADKRKQRSNRLQGKRHLWQAKRASFHLRHDDRVKKAGPRKGSTAAPEHSGSKPITDQGFEGWPLGRVRQPPQSTRAPRSLLIGGSKAGPSEGFDSRPRARRVRDDSGYVRYMAEDRATLSRQWAHPRHARGPTWAGFVEKQPWPNRLSNRPYRRRIQCEDRLTPYPDTHPGKADNSKFSLGRNRKLRLARP

SEQ ID NO: 75849 - protein, 171 aa, Zea mays
  Coding DNA Sequence Number=SeqID_32474
  Homolog annotation: Hit_ID=A0EVG2; Match level="QueryCoverage=65%, HitCoverage=12%, E-value=2e-08, Identity=32%"; Hit description =Milt1a putative polyprotein
MVSIGANTLSKTQITTLESEIKREKEAEKIFNDTHSQFSPTTKEMETKGYCRYDRRLAPAVEPSRSKADSLCPAPKLSAHHQETYDISLVAMDQDGDNHDDLLEEDMVDYETSPEHTSIEFNKLGNQDNELIRTNMTLSGIASNSSIEAKGVTFVELTIGTKTLAVAFFVA

SEQ ID NO: 75850 - protein, 219 aa, Zea mays
  Coding DNA Sequence Number=SeqID_32475
MTLEPHPLQPGWRSLDSESSGYRAEDTIEAIALHGLTTFCGFHPLELATHPIGLFPAEKEDDPMWKDRVEHAKDIWAIYPGQTAHLTVMRGEAMSHLMALLEATKITLDNREELVVDLSQEMVEKDLQVEQLSGEIQELEELVGTRENTIEVLEDQLLNTQQQLAEANEHLDMHHQEIQDQEDDEDVDIEGGDEPASSVDTAGSGRPPSPESSVASFAH

SEQ ID NO: 75851 - protein, 311 aa, Zea mays
  Coding DNA Sequence Number=SeqID_32476
  Homolog annotation: Hit_ID=Q1HMI8; Match level="QueryCoverage=59%, HitCoverage=14%, E-value=8e-07, Identity=28%"; Hit description =Formin A
  Subcellular localization annotation: CTP_CleavageSite=23; ConfidenceScore=5.03e-01
MTASKRYATSFKFISLFLFPFLSLATGTRKGDTPKGILLREGSGPRALLLIRGSKAGPSEGFDSRLRALGLHAHYWSEENSVAYAAPTAVPLARVRLTAAKTGLKRHRKLRLARPLSSDSASTSEDGLRLARPLTSDSASTSEDGLYLARPQGSDSASTSKDGLRLARPPGLGLSLDAGRRSPPRLTPGLGLNLDAGRRSPPRPTPGLGLNLDLGQWSPPRPTPGLGLNLDAGRRSPPRPTLGLGLNLDLGQRSPPRPTPGLGLNLDAGRRSPPRPTLGLGLSLDLGGATTSPDLGLGPTTSQGGPSLPYS

SEQ ID NO: 75852 - protein, 56 aa, Zea mays
  Coding DNA Sequence Number=SeqID_32477
MAGMYCSARACLNWRMQPPAHTAMRTLLSPVGEGSGKGILRKGSFSVKEAGPEPPY

SEQ ID NO: 75853 - protein, 73 aa, Zea mays
  Coding DNA Sequence Number=SeqID_32478
MARARLRDLRREKKGQGGAHVACAVSLFMYGIAGFKLTLSHIQGMWPVKIVLDLQAYIRVTPGFWGTKTRART

SEQ ID NO: 75854 - protein, 240 aa, Zea mays
  Coding DNA Sequence Number=SeqID_32479
MADDDDVNPVTGNDDLRAAGLVPDDEDDIQADAAALLGIDLTSAPVDLSSNPTNAGGGPATSTDTPVGSTSIDGGTGTSSVAGWPGTKSGPEGRAWANGQARGFSRHGPLSPCARAGPLADGPCFPGPVPGRAGPACWPSIRSLPFTYVAYVWGPLSRIVISNQRGGLLYSKTDSVTNSCESRGLRLNSARAFRRARAMLGYISAGRRNIPTCIPPLVLEREGHGESFTGVDLGNAGLIT

SEQ ID NO: 75855 - protein, 45 aa, Zea mays
  Coding DNA Sequence Number=SeqID_32480
MELSRLENGVERAKLLRREGAGHSQAGSERVGKNYVEARCNTTWK

SEQ ID NO: 75856 - protein, 157 aa, Zea mays
  Coding DNA Sequence Number=SeqID_32481
NRGGRKGGGAYQRRDCSGEVVEDEGEVSGITTGGSRDAREDMSARNWTETHWIARSTRGGGRPKSGEVDLGPPVKSGRVRGLGKLHGLLAELAEALACPEDGWSGLATMAEALAAMAGGIELAGAKEKWSAGEEIWSQEIRSISLPKPEANPRFCRV

SEQ ID NO: 75857 - protein, 77 aa, Zea mays
  Coding DNA Sequence Number=SeqID_32482
MAGGIELAGAKERGLADEETNVLCLSAGNRKNQVEIKDGFIQPKSALSGCTRLSGGAPDSVRCARLAQANLLLSGSD

SEQ ID NO: 75858 - protein, 130 aa, Zea mays
  Coding DNA Sequence Number=SeqID_32483
MKAGEHRGDKEGECFVRFGHGGGLTPSGITVKVRTCEERKRFGIRVSRRLLGLVIVSHLSPRGLGRFKTAAAAEETPAAVPEKREKMPGKEKEPAEDASEEGNFNFQNIIGQELSKAKKEELKNIIRWCC

SEQ ID NO: 75859 - protein, 38 aa, Zea mays
  Coding DNA Sequence Number=SeqID_32484
MAGGIELAGAKERGWPVKGENLWFDVSEARVPMPSPGT

SEQ ID NO: 75860 - protein, 145 aa, Zea mays
  Coding DNA Sequence Number=SeqID_32485
MAGVGRSTRAGGDARRRRGVRPDHGEIEQLDGLERHPVKSGRVRGLGKLHGLLAELAEALARLEDGWSGLATVAEALAAMAGGIELAGAKERGWPVRVSAGRSEVPPRRLYRHGWARPRAWARGGLNRTPGARVPMPSSGTRQRG

SEQ ID NO: 75861 - protein, 245 aa, Zea mays
  Coding DNA Sequence Number=SeqID_32486
MASSARNARRPRRARYNGPDRTWASELDEAALWDDFIAGLRLVPIKRRVSLPVLSVRPAAAAKTSSEGWRLCLRPNICPPRDQFDKVTWFKILGLHAQPLLLNFWRLRPRKVVMNVVASASEFLDFADSGSSVEWTEESSEEDLDYFAALDVAAVEASPHAADAQDVPGPSTGRRRRRAVAKRRVSGEEGARLRVSRAGRQELLSLPAAASTGEAELRSLFAGEELRIMLFNYREMGIIPKVELM

SEQ ID NO: 75862 - protein, 124 aa, Zea mays
  Coding DNA Sequence Number=SeqID_32487
  Subcellular localization annotation: CTP_CleavageSite=7; ConfidenceScore=5.24e-01
MGFATIPAVTEPPKSLGPPTVVLVQRTSDNPAGAPDHLTSSVSEFLTFPRVFYPSRRHYKSSEMRFLRPDQVHANREHRYTTVQPLATEGTLYSRHLSMLIACYLILVLVCPRQSLPMTRHVTS

SEQ ID NO: 75863 - protein, 42 aa, Zea mays
  Coding DNA Sequence Number=SeqID_32488
MYGKRPCQRRSVGGVALDVKCDDLNGEEKMQQHEMVMDTEAQ

SEQ ID NO: 75864 - protein, 411 aa, Zea mays
  Coding DNA Sequence Number=SeqID_32489
  Gene Ontology: Mol. function=binding; Cellular component=nucleus; Biological process=mRNA modification
  Homolog annotation: Hit_ID=A5BSQ2; Match level="QueryCoverage=54%, HitCoverage=49%, E-value=3e-48, Identity=46%"; Hit description =Putative uncharacterized protein
  Pfam annotation: Domain name=PPR; Domain location=227-260; Score =26.2; E_value=0.00012; Accession=PF01535.11; Description=PPR repeat
LCYTPRCTPGSSPYDYKREDQGLLREGWPRGTEDGTGALLGPLASLTRVDACNPLTASAPDLGAGRTRRPRDFHLSHARLRPPRLSPLRARPRARPIWAGARSILTRRLRDPLSRNADKAAPRTTRTAPANLLEQPFALAQSPCLFNLYMDDDDVSPDARDVYVANANVSSYFAASDVASADRLFAEVSTDVADVVAWTTMVAGHVSSGGLGRARHFFDAMPERNVVFWNAMLRAYAHAGMLTEARDLFDAMPTRNAATWSCMISGLVLSGRCWEALHDQGLFGDMVRSSSIVPNEPALVSVVSACAQLQSLEHGAWVHAYAEQELQGTMSVVLASAIVDMSGNVGGIHSAIRVFAVMPMRNIYSWNAMIAGLAMNGGERQALSLSSCHGGLVFRQEHARGATPWLMGRTS

SEQ ID NO: 75865 - protein, 247 aa, Zea mays
  Coding DNA Sequence Number=SeqID_32490
  Homolog annotation: Hit_ID=Q0W1C5; Match level="QueryCoverage=87%, HitCoverage=26%, E-value=4e-07, Identity=30%"; Hit description =Putative uncharacterized protein
MALPVDVAVCALGRATWGAESEPWGRARRKSFGRGQGGVRALGSGEAEFRRLPARVRALGSGGAKFAVFRVLARVRALGSGGAEFAVFRVLARVRALGSGGAEFAVFRVLARVRALGSGGAEFAVFRVLARVRALGSGGAEFAVFRVLARVRALGSGGAEFATFRVLARVRALGSGGAEFAVAALSFCQTGQWSGGVTAVTSALPGARVRMKVFSNRGGIAAFVDVAALLAAAGLPRGGFVEVAAAA

SEQ ID NO: 75866 - protein, 145 aa, Zea mays
  Coding DNA Sequence Number=SeqID_32491
  Gene Ontology: Mol. function=structural molecule activity; Cellular component=protein storage vacuole; Biological process=lipid transport
  Homolog annotation: Hit_ID=A2YRC2; Match level="QueryCoverage=80%, HitCoverage=48%, E-value=3e-50, Identity=81%"; Hit description =Putative uncharacterized protein
  Pfam annotation: Domain name=Motile_Sperm; Domain location=9-116; Score=133.0; E_value=8.8e-37; Accession=PF00635.17; Description=MSP (Major sperm protein) domain
MSGGGSVSFLEIQPSELAFPFEIMRQSSCSMQLTNKTDHYVAFKVKTTNPKQYCVRPNIGVVLPGSTCNVTVTMQAQKASPPDMQCKDKFLVQSVVAENGVTAQDINAAMATSVISKLTEEKMSAVQQNQKLRQELVSFESFPFS

SEQ ID NO: 75867 - protein, 101 aa, Zea mays
  Coding DNA Sequence Number=SeqID_32492
  Gene Ontology: Mol. function=kinase activity; Cellular component =ornithine carbamoyltransferase complex; Biological process=amino acid metabolic process
  Homolog annotation: Hit_ID=Q6QP54; Match level="QueryCoverage=67%, HitCoverage=26%, E-value=9e-12, Identity=55%"; Hit description =Putative kinase
MAEAESEPLGRARWKSSAEARAVSEPWVGRSGPESEPWVGRSGVRRLPGLSPSPSPGSGGAEFAVFRGLSPSPSPGSGGAEFAVFRGLARVRALGRAELPM

SEQ ID NO: 75868 - protein, 696 aa, Zea mays
  Coding DNA Sequence Number=SeqID_32493
  Gene Ontology: Mol. function=serine-type endopeptidase activity; Cellular component=cytoplasm; Biological process=proteolysis
  Homolog annotation: Hit_ID=A7R4E5; Match level="QueryCoverage=81%, HitCoverage=75%, E-value=1e-179, Identity=54%"; Hit description =Chromosome undetermined scaffold_670, whole genome shotgun sequence
  Pfam annotation: Domain name=Peptidase_S9; Domain location=488-680; Score=-77.2; E_value=0.056; Accession=PF00326.12; Description=Prolyl oligopeptidase family
  Pfam annotation: Domain name=Peptidase_S9_N; Domain location=1-384; Score=-28.3; E_value=2.5e-10; Accession=PF02897.6; Description =Prolyl oligopeptidase, N-terminal beta-propeller domain
  Pfam module annotation: Pfam domain module=Peptidase_S9::Peptidase_S9_ N; Domain location=488-680::1-384
MRHMDLHMEAEEKYAEACLAACGADRLARKLQLEMASCLASDSCTPPVRWGPWLYYRRADEGKQYPVLCRRSAALHSEFVSYSDPSAGFDFTAGKRIEQKLVDYNKEAERFGGYSYEELSEVSPDHRFIAYTMYDKDKDSFTLMVRDLVTGTLHDKPCADRVSNISWAMDGKALVYIVTNEERRPYRLFCSMIGSNKDAILMLEEPDENIFLNIRHTKDFRYITLNVFSDTHSKVYLINASNPLSQMTLVWEGESQVHCIVEHHRGHLYLFTDAAREGVPVDSHYIMQSVVESSGPNSWKNVLVEEPGVILEDVDFCDTHMVLTLRQGRKLRLCSVKLPLTEDIKVPTHLSDLRPIDLPLPSDEGYNSRIVFSQTLAIEITQIHMKLCFRLSVSVLAQQSAFTVGVLSDLNVFPSLQQSSDKADFSNDDFVGCAWNELSEYYACEYYDVPSKDGVLVPLTLVYSRKHKQDGNPGLLHGHGAYGEILDKRWRSELKTLLDRGWVIAYADVSLLKLRHLVIYSLKHVYSGVVEVMAIIQENKLAGWGYSAGGLLVASAINCRPDLFRAAVLKALCEDISKPRSHWDVENTDVTNGYTLAHKVEINLNMHRAFVLDMIGGEIKCTDIITVDQGTLGQRVVEFMQQLTQPAGLSKALATARYSASTLDRETTLWRLEDQETRFSPMKTAYPEVDRRVSGQ

SEQ ID NO: 75869 - protein, 151 aa, Zea mays
  Coding DNA Sequence Number=SeqID_32494
  Gene Ontology: Mol. function=serine-type endopeptidase activity; Cellular component=integral to membrane; Biological process =proteolysis
  Homolog annotation: Hit_ID=A3BZH3; Match level="QueryCoverage=46%, HitCoverage=7%, E-value=1e-30, Identity=88%"; Hit description =Putative uncharacterized protein
MGVSGILLSLLGSVEMFGDLLEEVGLLFLLASLLLRGEKVVAHGGDEGGRQKVPFLDVCNTLLHPIVPLTAIDYEEFGYPVDYEEFLAIRKYSPYDNIQKDVPYPALFVTSSFNTREAVCEQHVSYYSESNPVGQIWEAEATMSVLSILGT

SEQ ID NO: 75870 - protein, 114 aa, Zea mays
  Coding DNA Sequence Number=SeqID_32495
  Subcellular localization annotation: CTP_CleavageSite=46; ConfidenceScore=5.33e-01
MGGPTGWSGWALAHPKPGPPGPHPVIRFGGRPTAVPTSISESPIVRLPTAPKRSILLRKTDVPSGWLPARPQAHNHKTIPSPARLFLATGLPARLTGCSGLPALVSSREIRSDT

SEQ ID NO: 75871 - protein, 236 aa, Zea mays
  Coding DNA Sequence Number=SeqID_32496
  Subcellular localization annotation: CTP_CleavageSite=9; ConfidenceScore=5.16e-01
MSSHSLMRRAFPPSKPPDGGRPPSFRLIVGGKQLRGSWYLLAIIRLQGFSSCNPVAPLRWRSPETVITSSWVGRSKPGCDLGPTLSFKDVHHPRWGGCRAEPALYLPRGSVGHPLPRHPRERALTGPAGGPDFDNAGLVDGKRRHLQRVGFVGLAPGGPFCRRAAAAPCRCPTCLGGFEWGSAGGLVGPDVGAEAEAAREESLGSVGLAVRGSSSLVKETPRPLFDEPRPGVAISV

SEQ ID NO: 75872 - protein, 74 aa, Zea mays
  Coding DNA Sequence Number=SeqID_32497
  Subcellular localization annotation: CTP_CleavageSite=60; ConfidenceScore=5.33e-01
MGSATVGALLLGSAPASGPSNSGGAPSIGLLAFKFALPRNPLGKVSSEDTGEEYGGPVVRAKRTRMGGDEDKLT

SEQ ID NO: 75873 - protein, 72 aa, Zea mays
  Coding DNA Sequence Number=SeqID_32498
MADRREQRGEERTGRRGLITTAGGKEKRDREWRLAGKRRRGEGRLSVGGGGAHRIRIWAWRERREASRGAVT

SEQ ID NO: 75874 - protein, 512 aa, Zea mays
  Coding DNA Sequence Number=SeqID_32499
  Gene Ontology: Mol. function=kinase activity; Cellular component =outer membrane-bounded periplasmic space; Biological process =proteolysis
  Homolog annotation: Hit_ID=A2Z1Z1; Match level="QueryCoverage=47%, HitCoverage=38%, E-value=1e-121, Identity=81%"; Hit description =Putative uncharacterized protein
  Pfam annotation: Domain name=MORN; Domain location=166-188; Score =20.3; E_value=0.0071; Accession=PF02493.11; Description=MORN repeat
  Pfam annotation: Domain name=MORN; Domain location=189-211; Score =33.3; E_value=8.6e-07; Accession=PF02493.11; Description=MORN repeat
  Pfam annotation: Domain name=MORN; Domain location=212-234; Score =34.5; E_value=3.8e-07; Accession=PF02493.11; Description=MORN repeat
  Pfam annotation: Domain name=MORN; Domain location=235-257; Score =24.8; E_value=0.00033; Accession=PF02493.11; Description=MORN repeat
  Pfam annotation: Domain name=MORN; Domain location=258-280; Score =33.6; E_value=7.4e-07; Accession=PF02493.11; Description=MORN repeat
  Pfam annotation: Domain name=MORN; Domain location=281-303; Score =32.1; E_value=2e-06; Accession=PF02493.11; Description=MORN repeat
  Pfam annotation: Domain name=MORN; Domain location=304-326; Score =36.3; E_value=1.1e-07; Accession=PF02493.11; Description=MORN repeat
  Pfam module annotation: Pfam domain module=MORN::MORN::MORN::MORN::MOR N::MORN::MORN; Domain location=166-188::189-211::212-234::235 -257::258-280::281-303::304-326
MDGHGGGAGAGKLTRTPSSLLRSPTVRNCSSFQAVVVDDPEPDDKKAQAHPKPPPHHLHPGGGPAHPRLVLALPLAFLLVLLLLRGGGDGHHLALLSASAAVALAAAAGAARLLRGRLRRSPGSGSVQWFIGDDDDKPQKRADKAAAPHGRVVREGVEFYSNGDCYEGEFHQGRCNGSGVYNFFGKGKYEGDWVDGKYDGYGIESWARGSRYRGQYRQGLRHGHGVYRFYSGDCYAGEWAGGQSHGIGAQTCSDGSSYVGEFKCGVKHGIGSYHFRNGDRYAGEYFGDKIHGFGVYRFANGHCYEGSWHEGKKQGFGMYTFRNGDRRSGDWDSGTLKTPLPPADPSVQRAVQAAQRAAENAFRLPRVDEQDSCGYLISLHVFVMGSIGIKYIGIRYRCTENSNPPTLAGINTPIHSLRPLERSSSSWDASAAATQASILLGLLLGRQCHRHPGLHPPRTPAAGAKSSLPSRVTNLLESVLSESRICPESVSLNLLEFISPKLRISGFGSSEF

SEQ ID NO: 75875 - protein, 227 aa, Zea mays
  Coding DNA Sequence Number=SeqID_32500
  Gene Ontology: Mol. function=transcription regulator activity; Cellular component=nucleus; Biological process=regulation of transcription
  Homolog annotation: Hit_ID=Q2QLR0; Match level="QueryCoverage=95%, HitCoverage=57%, E-value=5e-19, Identity=35%"; Hit description=Helix- loop-helix DNA-binding domain containing protein
  Pfam annotation: Domain name=HLH; Domain location=185-222; Score=2.2; E_value=0.091; Accession=PF00010.17; Description=Helix-loop-helix DNA- binding domain
MEDTSLLMEWAMDTLLQEEEEPAALYDSCGEAVAVFPSLQGLRDASHAAEMVRELMAAVETDDAANSWTTSGSGGEVTDGGSSGATDPAAPAAAEAADFYGGSGPPHSPNSFPSGKTNTSLPTVRVSWNFVTGSAAAQPRSDGVLEEGAVPIRRVPPELAHRRRSPPPPPRRAHHPTRGMGAASCTPEHIVAERKRREKINNRLIELSTVIPGLKKVLSQSQPIHMN

SEQ ID NO: 75876 - protein, 96 aa, Zea mays
  Coding DNA Sequence Number=SeqID_32501
MVQYPESDQTASAAASSPTTAPRRDSRHHRGIRVADDPIRPPENEEEIEVTEEKTPPPSESQAGSCFYFDICGSEPDSPTNEGKPRCILPPFLDVF

SEQ ID NO: 75877 - protein, 98 aa, Zea mays
  Coding DNA Sequence Number=SeqID_32502
MAPRMLYDDGGSQPPYGSKRTACRVPGGDDRDDDTNPFRLLFVALFVPLPHHLLLIAHYEVLKGLLVISRECLRCRLEDVGGGDLGVILGTKNLWANF

SEQ ID NO: 75878 - protein, 153 aa, Zea mays
  Coding DNA Sequence Number=SeqID_32503
  Gene Ontology: Cellular component=integral to membrane; Biological process=response to abscisic acid stimulus
  Homolog annotation: Hit_ID=B0FYH7; Match level="QueryCoverage=37%, HitCoverage=98%, E-value=8e-18, Identity=77%"; Hit description=Early drought induced protein
  Pfam annotation: Domain name=UPF0057; Domain location=101-151; Score =80.5; E_value=5.6e-21; Accession=PF01679.8; Description =Uncharacterized protein family UPF0057
MGKTWAAQEMELGDEKLYARDDVSSPLYARDTAKSCDPSHSCRHPIALPLVQGLPAYKVKVKPGKRQSERREGIRSIQAKPRQRRRRGGRRSIGSMSEGTANCVDILIAIILPPLGVFLKYGCGHEFWICLLLTFLGYIPGIIYAIYAITKNT

SEQ ID NO: 75879 - protein, 901 aa, Zea mays
  Coding DNA Sequence Number=SeqID_32504
MNSGDNRDTCSGANSSVNDEAVLRGDVTAGLRLVLNEAKGVPARFVFVKPATAANGDERRVASLPSPQHLPSEGPVRQSHLVPKTSLDGGDAALARSGSAGVFDVTVDGRRTVGLRVSRSAAPCRIAGFPKSRALPIKRGQGSVLFELCLPRTAKNPSRPPTCCSSARRASLIAGDLARVKQTARRRRRYVAMPSSSSSADTTPPAAASSEETLSSLVVEELRAGDSVDFGVSRMTSARVEDMQGLGYIAAESLALPGTEEVPEPEEEDADEGALRCAAGQSSGRDLVEEFVAYGVWPLAHGWALGEVCPRQMPFHGGRVVRSPAFALNLRNRDPAAFVRDAEDLAVRLVGRYVPRTEGQRSFDIRGSNDRLNRVFELNQLPYDDYPGQDEADRRGKKPAVETGDDPAPAAAPSSKKRKLGTAMGGLGVSDSFARELMRTCAAPGERMSSPELRESSARMLRVTGGCWLRNVPIPCAAEEDCFTSRMVHRWRVFPYGRNIGAVVWAVMDKDRQGAAQKHQATVRLHEARPKRPRGAPKAAASGGGKPPLAAKAGAAAPSKAPEAMAGAGVSKSMRVVPPASKVAEASKTAQALPLSGKRVADFGTDITVDDYLGGSDEGQLAMGAPGAEIATAAIVPKARGEALDAGGEVSAPPPWSGTRRGAATLRLKGVTEALSQATEALSQVADFASRTASGALTAAVSAEVERLRTQHADAVREKSASDSKCRKLTDRVAALEREKADLRRQLAAERREANEAVAKGQAAQAEAKLARAEGNLAKELAEHLQERLTALESHAKEAEAAMHAEAERTRTQLMDTYRELGARTGDFEVPDREPGLRCLQWVQEELLELPAVVGGLMSYASLVTYEGAMNALSREGCRHFEAFDQADEILIEISIRSKTP

SEQ ID NO: 75880 - protein, 245 aa, Zea mays
  Coding DNA Sequence Number=SeqID_32505
MGEHLCTAIAGTLNVEGSGSALSALFVHQPPPGNFPAFLPCAGDCIFRGRALDPARFAADIEAGGRETAVRRRVCRRRARTPWNRGRATPRNRRSKPASPCSSPESRHRQKALSSADFVEGSRQKEENLLAAVVFVFDSVHRGRSANSEPFNSPLLDELNRALVEIDDLAKDLEDVAVQTQWEVENMAKSEVKEHPQQEEAVEELLIQDGSEDELLINEESPIKYEDLVGYDDGRDYSTDDTYPY

SEQ ID NO: 75881 - protein, 152 aa, Zea mays
  Coding DNA Sequence Number=SeqID_32506
MLVPCRRDLPSLLPALRALLAHEQELKMVRTIEITRTNTNYIPPPRQVPVYLVVVKEILVDIPRIRVENRVILEDISEEFLPTPTPLVESLAFAAGSSSSAPPAPVVQAPAPGGDDLDDFGDDDEDDEEEEEEEENINEDANSEHQDHYVGL

SEQ ID NO: 75882 - protein, 278 aa, Zea mays
  Coding DNA Sequence Number=SeqID_32507
MVTTSSMVGRSKSGCGLCPTLSFKDLHHPCWGGGRGKSGLASAWAGDPLLPPASGGGRHPPALRRRCPPAMRGKANYCCLARVQHFVFRPGDCGRLHRGVTQHVVRREGGTRVLRRSRSRSRGENGSEDLPVRFGAAAACWCGVGGQVAAVVSAEVVAAGEGFSANDTVSATCALGLRLFGFNGWFSSPARGRERGPSSGSVRPGAIAAAVLPSETEVVAALLVQRSPASHPEFVVPQALRCGGCSYSREWNWSSICNGTLSTGVCSLWLSRPEHLCI

SEQ ID NO: 75883 - protein, 341 aa, Zea mays
  Coding DNA Sequence Number=SeqID_32508
  Homolog annotation: Hit_ID=Q6QP51; Match level="QueryCoverage=26%, HitCoverage=41%, E-value=7e-33, Identity=78%"; Hit description =Putative growth-regulating factor 1
MWVACNRTAEAHPFSFVTSSMEAQAHTSCNRRAGYYVREIALPLAPMSRLLDCETSAATQGNPAHAQQCQSSTSITGQSAAGGGAMVYMAKSGLAVMVTADERKQRLAPRKGSTAAPEHSSFRLITDQGFEGWPLGRVRQPPQSTRAPRPLLIRGSKAGLSEGFDSHPRARRAWDDSGYVRYMAKARATLPRRIQCEDRLTPYPDTRASVSKVEPQAQQEAPPRPTLGLGLRRRSPPRPTPGLGPRLSLGRWSLPRPTPGLGPHLGLGRWSPPRPTPGFSLNLSLGRWSTPRPTQGSASTSTSGGIASSPDPGLGLRRSLRLARHWAWTDRATEDASLPYP

SEQ ID NO: 75884 - protein, 265 aa, Zea mays
  Coding DNA Sequence Number=SeqID_32509
MDCTGTLLAGWPGRRLDRTAQRPYVRLCPLAYVIGNKPRGSIGSPPERGAQAHRIKPGHVSVPDLCLGQGIPCPRTSLWMARTLLGGIRTPSKGPWHAYLGVPDRIRGSGLCAQGSGASSRRSGPADCILGYIIYIWLHAPLEEPAPKEDNSSAQAPVPETGLSVSARAKRHTTAGGGALFTRRFAFSAHRNRRARLSECSTWYTACLDGMRRRSAERFASAPSIPVRGLVGAALFHRCLASRMFISLAVVESELSRGSAYHMGW

SEQ ID NO: 75885 - protein, 103 aa, Zea mays
  Coding DNA Sequence Number=SeqID_32510
MDYSAPAGSRWKLAPGGSPAAATSSAPDSLTSGSDHLCTDDLPAAATTYPSGSLPSGGDHLSVHAMAKRPSPPPSYGGEDKTIQAMELGARQQGGACGLAGTA

SEQ ID NO: 75886 - protein, 103 aa, Zea mays
  Coding DNA Sequence Number=SeqID_32511
MELGLRLKADVILLLFVRPTGRAYEGGPHRAGRTRMRFLVTKGRKFRTLGLAPMDRTYRDAPMPFLHGLVRSLDPWGVQKGFRGKVEAILSWVRLRTTSIHKI

SEQ ID NO: 75887 - protein, 81 aa, Zea mays
  Coding DNA Sequence Number=SeqID_32512
  Subcellular localization annotation: CTP_CleavageSite=52; ConfidenceScore=5.54e-01
MANDVHLDDGRSATSPSQVDGRQSGHSAPSSSAARSFHRGSLSALLGTFSVRRAEGVEQESFGVTAKSGTDLKMKRLFRPQ

SEQ ID NO: 75888 - protein, 121 aa, Zea mays
  Coding DNA Sequence Number=SeqID_32513
MDSSIYCTYLYPQTLTKREEEIEVTEEGIPPPSDSQASNCFYFDICGSEPDSPTNEGKPRRADRGPFNWSHASSWHTLESLFLSRVRKRQIFVAFAPRWYQMKKNKTKVREDLVLHIGSFA

SEQ ID NO: 75889 - protein, 124 aa, Zea mays
  Coding DNA Sequence Number=SeqID_32514
  Homolog annotation: Hit_ID=Q6QP51; Match level="QueryCoverage=52%, HitCoverage=29%, E-value=5e-17, Identity=63%"; Hit description =Putative growth-regulating factor 1
  Subcellular localization annotation: CTP_CleavageSite=96; ConfidenceScore=5.47e-01
MAGSSASPDLGPRPQEAVSASPDPRARPLPWPRKVVSASPDPRARPPPRPRKVVSASPDPRARPQPRKVVSASPDPRAQPQPRPWEESRPRPNPASASGGVSASPDLGLGPTAPQRMHHYPTPS

SEQ ID NO: 75890 - protein, 47 aa, Zea mays
  Coding DNA Sequence Number=SeqID_32515
MDKGLKPKEKKVAAETKLTEEEKLFEEKKTVDPYIAGFVESMTKTNT

SEQ ID NO: 75891 - protein, 91 aa, Zea mays
  Coding DNA Sequence Number=SeqID_32516
MEKRPQELFSFGKSQRLVHYNSPDMSGVHRTVRCDSNTTAIPRQRLPAEALNAPQRAQTSGAPDMSGVHRTVRCAIEQTGSPTATFWWLGL

SEQ ID NO: 75892 - protein, 387 aa, Zea mays
  Coding DNA Sequence Number=SeqID_32517
MGAEHGVSGELQAGPTRSEAAAEPFRGASLRTLISREARSLVPSRGRILFGLLWRRRSVACFSCQRRRLSRRGVNATGRVPPDGGYPPSFRLIVGGTQLRGSWYLSAIVRLQGFSSCSPAAPLRRRSSKTVTTSPWVGRSKPGCDLGPTLSFKDVHHPRWGGGQAEPEFYLPRGFVGHPLLRRSRERALTGPTGGSDFDNAGLVDGGRRQPQRVELVGLAPGRSCLCTGMASPRGGRCPTRPGGSEWGSAGGLTAPVVGAEVEAAREVPVTDGITATTRASGFRLFVLVLAPRASALARARLQQHPPWGLRCCSSATRSEGRCRCYSPAGCLNRFTKRESPRVKVTSEKVMSEKRSFFEENFDAEGVPPPLAPEGGSGFAEARLTLP

SEQ ID NO: 75893 - protein, 297 aa, Zea mays
  Coding DNA Sequence Number=SeqID_32518
  Gene Ontology: Mol. function=isomerase activity; Cellular component =endoplasmic reticulum; Biological process=cell redox homeostasis
  Homolog annotation: Hit_ID=Q5EUD7; Match level="QueryCoverage=100%, HitCoverage=100%, E-value=4e-90, Identity=72%"; Hit description =Protein disulfide isomerase
  Pfam annotation: Domain name=ERp29; Domain location=202-296; Score =168.1; E_value=2.3e-47; Accession=PF07749.3; Description=Endoplasmic reticulum protein ERp29, C-t
  Pfam annotation: Domain name=Thioredoxin; Domain location=32-137; Score=135.8; E_value=1.2e-37; Accession=PF00085.11; Description =Thioredoxin
  Pfam module annotation: Pfam domain module=ERp29::Thioredoxin; Domain location=202-296::32-137
MAISQISRIFLAILLLAAAFAAAPAALADGDDVVALTESTFEKEVGKDRGALVEFYAPWCGHCKKLAPEYERLGASFKKAKSVLIAKVDCDEHKSLCSKYGVSGYPTIQWFPKGSLEPKKCGHCKSLAPVSTWFSFEFLTHSIVVLLLYGVSGFPTLKFFPKGNKAGEDYDGDRDLVDFVKFINEKSGTSRDTKGQLTSEAGRIASLDVLAKEFLGASGDKRKEVLSSMEEEADKLSGSAARHGKVYVTIAKKILEKGNEYTEKETKRLDRILEKSISPSKADEFIIKKNVLSTFSS

SEQ ID NO: 75894 - protein, 318 aa, Zea mays
  Coding DNA Sequence Number=SeqID_32519
MNKTPALEVPLQTELRFRPRGYEQPPHRGACGATSSVRLASDLCSSSYGPRTDAATGRPSFASPLKGREPDIKAKEPEPSRAESSPTCSKVPPYDTGAGSHASCKMAQGRRSQTAARGACNCPAVTSIPPLLPDQRVKGRAAMQSACKRAKWAHPFDSNAPGMEAQAHTSCNRRAGCYVQATAPPLAPLRASSTAERVPRLEATLRMTQQCPPGASVTGQSAAGEGATVDAAKNAPTVMAVAGGRKQQSRRQPSSRPIQGQQGNPLSRRKDSALVFRSSNGSRTRNGCPANHSPRCINSAAGQAAPLAGEAGDASPSP

SEQ ID NO: 75895 - protein, 70 aa, Zea mays
  Coding DNA Sequence Number=SeqID_32520
MTLQELKHGSPRASPVGGLLLRRRSSRQKHLRQDNIKEAFENKDQQAPQPPLMSTSQPPRTFSMEIVFLP

SEQ ID NO: 75896 - protein, 76 aa, Zea mays
  Coding DNA Sequence Number=SeqID_32521
MELPLDAQSSGRRLDVDERAEQCRAVVGVLHVLARFVLVLQMQHLRGCLRCNLCSGKEEGVEADLQEFQGFDEFED

SEQ ID NO: 75897 - protein, 87 aa, Zea mays
  Coding DNA Sequence Number=SeqID_32522
MTRLETWRPRWNSFGQSYVTGIGHGRRTANMPSRTRAHDGAGASCGQEDTPNPPPVPPTLAEAIAALVNATADNTRFLREMAGNQFQ

SEQ ID NO: 75898 - protein, 52 aa, Zea mays
  Coding DNA Sequence Number=SeqID_32523
  Subcellular localization annotation: CTP_CleavageSite=42; ConfidenceScore=5.27e-01
MKGVIKGSFSPATFGMRFGSLTSGAAILQTNNGMSRRGNFFRAGPNRAKDSF

SEQ ID NO: 75899 - protein, 141 aa, Zea mays
  Coding DNA Sequence Number=SeqID_32524
MVGIARTGTSRRDRERESRMSHGLRRGTLLTAVGHGLSSGLRTEVALNTCRTARCTGGRIGRASTVPGKKGKGEGEKGVWARAHYGDERQGRTLVRWFRWRTPYVRQRWRGEDWATVLGATGVLAIGEMKEGRGEEVQTLG

SEQ ID NO: 75900 - protein, 77 aa, Zea mays
  Coding DNA Sequence Number=SeqID_32525
MTEDPLTGHMPRHGSGLKNPGGELTYARVKKQQTFVAFVQRWYQKKSTKTKSCGRKGPPLRKTFYYLFGRVFASHVL

SEQ ID NO: 75901 - protein, 150 aa, Zea mays
  Coding DNA Sequence Number=SeqID_32526
MSSGKSETALGCVVTAGGLRRSMTASLAEVGLGQIRTTSPAEDGLRRIGTVSPAKVGLERIETVSPAEVGLRRIRTVSPIEVGLRRVVTASANRGLGRVVAHNGRLIGWRSHPRKAIGDCSLPDALVDRRKLRSSSQGKEQRLRHPFEDM

SEQ ID NO: 75902 - protein, 217 aa, Zea mays
  Coding DNA Sequence Number=SeqID_32527
  Gene Ontology: Mol. function=catalytic activity; Biological process =cellular metabolic process
  Homolog annotation: Hit_ID=Q5VNM1; Match level="QueryCoverage=91%, HitCoverage=76%, E-value=1e-41, Identity=51%"; Hit description =Cinnamoyl CoA reductase-like
MGVLRSTQSLQAEVDELRAALLAGGGHEAAGGWRRSAGHADAKRSPGGDAGGAAARAVCVTGGISFVGFAVVDRLLRHGYTVRLALETQGIYPDVVLPHYYLGGTYPSASLSPGRSLSLPFAPSSGSGLWPWPWSGCQDMDKLREMEMFGDDGRDGVWTVMANVMDPESLHRAFDGCAGVFHTSAFVDPGGMSGYTVSTPNTSSESVASLTSRLSTQ

SEQ ID NO: 75903 - protein, 219 aa, Zea mays
  Coding DNA Sequence Number=SeqID_32528
MNWSCATCKGASSRAEVARAALVERGRRELCRGRSWTSREHTGHAAHKGSSATMHTRGEPVGEAATGPHEGAPGRHADWPRRAEPRNAGAKPHAPHAMPGTPRAGHVADAASLRVGSGRGGPPRRAATPGCPRWSHTPVPEPRRGRARAEVAPALRLRAHARAAPAPGAGRELAGGIEEGGDGWRGLPRRRQLLQARRVRLGRELWQGGLGGGIGGGRS

SEQ ID NO: 75904 - protein, 198 aa, Zea mays
  Coding DNA Sequence Number=SeqID_32529
MELSIGIETMFSSVGIAVRRRRCCRKRIKSKYFKSSCTASAPSIVCGTNLSKGEEERWRPNDESTSETGLSPTSYKCLVANNDSGDKSDDEEEYEDDSEDETKSTSSQGASSYIVLHASAYNDDMEEEIEDVKEKELRQFYGRLNMEDKVFLLKLLRMNKEQGKTLLRLQETLIKTNNQLEKTTKEHEGLMCSHDDLV

SEQ ID NO: 75905 - protein, 461 aa, Zea mays
  Coding DNA Sequence Number=SeqID_32530
  Gene Ontology: Mol. function=extracellular matrix structural constituent conferring compression resistance; Cellular component =proteinaceous extracellular matrix; Biological process=extracellular matrix organization and biogenesis
  Homolog annotation: Hit_ID=Q6BTJ4; Match level="QueryCoverage=58%, HitCoverage=30%, E-value=1e-11, Identity=31%"; Hit description =Similar to CA1621|CaIFF6 Candida albicans CaIFF6 unknown function
MANKHETRELRTKPAVWVWSEPGTTRFYAAKHGLRRHRKLRFARPQGSDSGSAPEDDELRIARPQGSDSGSAPEDDELRIARPQGSDSGSAPEDDELRIARPQGSDSGSAPEDDELRIARPQGSDSGSALEDDELRFARPQGSDSGSAPEDDELRFAQPQSSDLALASADGLRLARPRGSDSTSASKDRLDLDLGGASTSPNLGLGPTTSQEAPSLPYPKLTQATGNKTGVPSGSLRQTTLSPLTEARGRQQGPDSPDSCPSGRLQRSSDGHDTTRTGCQNLSGCHDGMALLQRVGRAGKDGTALAQGRSLPPVWTLVTPYCKRTRPGRGTNTKAAGFHLSRLSPSGFFPPSRSVSRRPIWAGARSDNLLVGPGTPRVRNADGARARPLAPSHMDACNPLLQAHPTWARDKHEGRGISPLTHVSLRLLPPFALRLAPTHLGWGTRRQFTGRSRDPPGLKRQ

SEQ ID NO: 75906 - protein, 65 aa, Zea mays
  Coding DNA Sequence Number=SeqID_32531
MAVSGMGAESQQERENHPPGVPVESLAQQGVECVVEVTTASGVTGDGSGDPSFRLLRLRGLRVVV

SEQ ID NO: 75907 - protein, 120 aa, Zea mays
  Coding DNA Sequence Number=SeqID_32532
MPQYSGIDDPDLHSSVPLVLIKIEVGVKVVTTLSFGSFMDKNLPLPLLKDVFMHEIGPLVPSLPPLPEGVSVKAERKRKRDVGKETLAARSKRLQAKKKKVSRPAHAERGGSVPLSSDLK

SEQ ID NO: 75908 - protein, 146 aa, Zea mays
  Coding DNA Sequence Number=SeqID_32533
MTASPEPIPVERDKTCGKPLEGHWGTAAFNVHSYQHKAAAPDGTCNMIEAQTSPQAQTPSRPTWSSPSGQTLSPVSATCFPTNPAEGHSFKLWHMSSNLRASSVTTSSGILPCLSPVLPSISVMEDAPNVIGHSGPDASLKKFFPY

SEQ ID NO: 75909 - protein, 84 aa, Zea mays
  Coding DNA Sequence Number=SeqID_32534
MGISSPRVERESRLMGKMVRDTRIMLWFWFDYDDDPNGTFAEYVDVYSSLLYHKTPGCPHCNHCSGEGEAVEGDFQEFQDYDEF

SEQ ID NO: 75910 - protein, 180 aa, Zea mays
  Coding DNA Sequence Number=SeqID_32535
MEKIIGAVAGQETGSKNSNALHLPSSTCAGGAERAGGARPRKPLRDGTVPHGVVARGPGEGCHGRVPGRERGGRAGSPDGTTSFAGEQGKGAEDLGSVEPCLFVMAQLPTTSSPMVWEKAARGAPGGATSFEAEQRSHLEASCTMETGSLRDGDAVSFGIEMPEKKDIYVESFDASVGSF

SEQ ID NO: 75911 - protein, 171 aa, Zea mays
  Coding DNA Sequence Number=SeqID_32536
MTVYNPPLWKYSGIIWVPEDITVLVLGRSTLGEGSTASREKGKALVDNTPQEACEDEALSKIHRNEQPTLEGTLRTCSSRGQPQAPPPGFAPLLEGEDAIEDGEVIDVSAEEQLQLRALRIKNRNLQKQKEILEAKRQCVFMQAKVRQMIRDEEQRARELEQEIVLMQREG

SEQ ID NO: 75912 - protein, 124 aa, Zea mays
  Coding DNA Sequence Number=SeqID_32537
  Homolog annotation: Hit_ID=Q6QP56; Match level="QueryCoverage=40%, HitCoverage=5%, E-value=1e-20, Identity=98%"; Hit description =Putative uncharacterized protein
MIEHDGSAKGIVFSQFTSFLDLIQSPSASNCESANTLNVNELSEKISQTNLHEVEHVIIPEHLRVPEYEQTKLSFGSFTSGLDSEQPRCCVICCLSYEASIHRSQGVTACQDRQPGARSHRANV

SEQ ID NO: 75913 - protein, 348 aa, Zea mays
  Coding DNA Sequence Number=SeqID_32538
  Gene Ontology: Mol. function=ubiquitin-protein ligase activity; Cellular component=ubiquitin ligase complex; Biological process =protein ubiquitination
  Homolog annotation: Hit_ID=Q6ZKH8; Match level="QueryCoverage=72%, HitCoverage=94%, E-value=2e-58, Identity=45%"; Hit description =Putative armadillo repeat containing protein
  Pfam annotation: Domain name=U-box; Domain location=107-162; Score= -12.5; E_value=0.012; Accession=PF04564.6; Description=U-box domain
  Subcellular localization annotation: CTP_CleavageSite=26; ConfidenceScore=5.35e-01
MSASRPRCHDVPPPPHAAPPPATSLPATAVGHRSLYVGVHNTTFCLGSMSALSTAATINAHADPPSSPPPPLQSTAWKVRHYRGRRHLVLRAGITASMEGLSPPPRPVAKITFERRSIQSWLDGGHLTCPVTNLPLPPSPPLIPNHALRRLIAAVSPSAAASLVPAEGGAHARQEAVSAAVPTRPASPMPALLGLAKSSATGRREVLESGNAAVLLRQAKVGDEAVARALLHLSLDGNDTRVGLVANGAVDALSAVEGREAATALYELCKLPENRRRRVVREGAVPALADFAVAGSARAVEVLGLLARCWEGWQELCRAFDLCEALVNDDNCKIAKNAVDLARTLEKA

SEQ ID NO: 75914 - protein, 430 aa, Zea mays
  Coding DNA Sequence Number=SeqID_32539
  Homolog annotation: Hit_ID=Q6QP51; Match level="QueryCoverage=30%, HitCoverage=67%, E-value=3e-30, Identity=54%"; Hit description =Putative growth-regulating factor 1
  Subcellular localization annotation: CTP_CleavageSite=52; ConfidenceScore=5.34e-01
MVAFQGGHPPFKGDSPYLRPQPSWAESSPTRSKVLPLRRGGWVPRVMQSWPRAEEAKPPRAVHATAQRLRAFLRFRPDQRAKGRAAMQAACNRAKWARPSDFQRTQRGGPRPRVMQPARRSLRASNCTATRTAATPPRPRNQYRGSRQPCVRPSSASQAQRERTLSHGVKTARPCSVPRTAHARATATPRTARSIALTPRWDRRRLRQEKQATLRLRHNDRVQKAASERVGSTPTTGQRFEGRPLGRVQRLPQATRAPRPLLIRGSKAGPRRVHSRLRHRARDDPGYVRYITEARATLPSRQSRSDRSHFAAPLTGLTEGQRCLRRSDCCATRQSEADRQSGPASGTIGNSAPLDPGLGLGLSPGRRRTPLRPTKGSDSGSAPEDGELRSTRPRARTRARPWKTVNSAPPGQGLGLRLSPGRRRTPLRPT

SEQ ID NO: 75915 - protein, 165 aa, Zea mays
  Coding DNA Sequence Number=SeqID_32540
MARVCLGLVDRRKRTLQDNPILQARILTVEGSGSTLGVDYTFGEGLLQESSSSRRLGWSPRGLGQLPPEDISPARGLGRSTPASVPLTDDPARLRPTKSSFRANSASVHADTATPGFGSSKSGRGVPLTKQEKPRTARPTEPRDSYASGIRIPHSSPLYGATHTW

SEQ ID NO: 75916 - protein, 71 aa, Zea mays
  Coding DNA Sequence Number=SeqID_32541
MAPEAGLGYCQSHPGGWHSSRSRAGSAVFLSDANILSSEFQRGKMSNMTEGTLYNIIEDICTFILREVILV

SEQ ID NO: 75917 - protein, 263 aa, Zea mays
  Coding DNA Sequence Number=SeqID_32542
  Gene Ontology: Mol. function=nucleic acid binding
  Homolog annotation: Hit_ID=Q5NKP8; Match level="QueryCoverage=89%, HitCoverage=36%, E-value=2e-39, Identity=40%"; Hit description =Putative uncharacterized protein 9C20.4c
MDDGLLCVHLLKDFMHLQIIEYQRRYEKALDMLDDLVQVLSTIEPDIGCDDSDDGIDCDENQEGDVFAGGMGSDGQTEQADQNVVGDENVGDKAGCEPGASNALVRVEHDVISKSNMLEGKPLLHGDIGIEDWGGCEIDKQSRKKLDFNIGGVSMDKPINAKPKGRTIRSDEIRTVKLGTKGEKKMNRRCKKCRVADGHNSRTCLSVEENRVRLVSLANPKKRGRPPGSRNINTSRAPEWNETTTSKKLAMSVEMTGESDSEI

SEQ ID NO: 75918 - protein, 244 aa, Zea mays
  Coding DNA Sequence Number=SeqID_32543
  Subcellular localization annotation: CTP_CleavageSite=69; ConfidenceScore=5.27e-01
MPSHSRHALRPFTFRAPGWGAPRCFRLAAVGGAQLHGSWYLSATARLQGFSSGSPAASPRRWSPKTVTTSFMVGRNKPGCGLCPALSFKDLHHPCWGGGRAEPELYLPYGPAGHLLLQHSGERALTGLAGGDFDNAGPIGRQHRQLQRARFAGLAGSGPASGATSYRWVECGYLPADLIIGNRIVYPSESYLLRKVMSEDPTIEVVERHERCSGRKTFFEENFDAEGVPKGFPHSSPRGRVKLC

SEQ ID NO: 75919 - protein, 102 aa, Zea mays
  Coding DNA Sequence Number=SeqID_32544
MEFALWGGCSRSDSSVLCRQAWFDQWSSLSGEGARAQIHTSPNMTCPTAPARGLLASIVPDAAASFARDLLPTTPFLFSSGAAPTSVPSISHPRSDDTPGRA

SEQ ID NO: 75920 - protein, 241 aa, Zea mays
  Coding DNA Sequence Number=SeqID_32545
  Gene Ontology: Mol. function=kinase activity; Cellular component =ornithine carbamoyltransferase complex; Biological process=amino acid metabolic process
  Homolog annotation: Hit_ID=Q6QP54; Match level="QueryCoverage=33%, HitCoverage=29%, E-value=1e-25, Identity=73%"; Hit description =Putative kinase
VGAPALPLRGRSAIVSHHGLPDSSPAHRQHGSIVSQLKEISKSVEISLIALAFGACDTTGDSWLNSLAADERAILSRRVEENGKALAKMRLEAMAREMENFGERPKSSELGKGLVGVSNPRGPWTDEVMMAPPVDVVGPCPGLSEVEAPPRLRSSLSSKAEVESEPLGQARRRPLADARAESEPWGRVKRGSSSFGAEPESEPWGRAKRSSSSSGAEPESEPWGRAKRSSSSSGAEPESEP

SEQ ID NO: 75921 - protein, 87 aa, Zea mays
  Coding DNA Sequence Number=SeqID_32546
  Homolog annotation: Hit_ID=A2WVS2; Match level="QueryCoverage=58%, HitCoverage=52%, E-value=9e-15, Identity=66%"; Hit description =Putative uncharacterized protein
  Pfam annotation: Domain name=LysM; Domain location=39-82; Score=19.0; E_value=0.0063; Accession=PF01476.11; Description=LysM domain
  Subcellular localization annotation: CTP_CleavageSite=20; ConfidenceScore=5.24e-01
MASRGSAALVVACLLVAVTVAAAVPPPVSVSQLFCRKVYGMHERETCFAVAQAAGLTLKQFLRFNPNVNCRKLFIGQWVCLDAILVS

SEQ ID NO: 75922 - protein, 54 aa, Zea mays
  Coding DNA Sequence Number=SeqID_32547
MEARGGAGIGRRSAAVGERVARGQGGARTGGSRAARGVIASGCIQYRECTQIFG

SEQ ID NO: 75923 - protein, 473 aa, Zea mays
  Coding DNA Sequence Number=SeqID_32548
  Gene Ontology: Mol. function=cysteine-type peptidase activity; Biological process=proteolysis
  Homolog annotation: Hit_ID=Q5NKQ2; Match level="QueryCoverage=94%, HitCoverage=55%, E-value=1e-165, Identity=60%"; Hit description =Putative uncharacterized protein 9C20.3a
MEAPTSNRPGARTAPYRPGTLYMKNVDRPPSNPKRIIIQSTQECFSVDIPHVPAETVRHKTRQAADEDDDFMPLSKKRNFDDSPPKVLKKIVTKQRKQRLNVRCNPQDVLVSIQILNDRQRQAIARRGFSSILDMRVDALGSRFHLAWLMEKLDHNDMTIRAGARKELKITKDTVHLILGLPNAGGGTTLGIDEAVAANNLRAELGLSKEDFGVVALQDRLRKGSDDDLSIRSFFLILFNKLLFPTASWGITNHEVLLTEEMDRFHQMDWCQLIFNDLCQAAKKWHTRSVTNVSTTIYGCSIIILLYYLDHLHDSAAPQNKRGTPRIKYFDRNIIQALTRADKGKIHKGQEPFGHCSHKTRTNTFDVPRPDPSGQHTIHIELPLIRDLISSKLNQLPSRHRLGFIEKLSHYDTEVGKACSVIKQTLQQIVEKQYNLSDVFGELIDEVLRAESGDNEDGYDVQKTTTKSDDILP

SEQ ID NO: 75924 - protein, 134 aa, Zea mays
  Coding DNA Sequence Number=SeqID_32549
  Subcellular localization annotation: CTP_CleavageSite=56; ConfidenceScore=5.22e-01
MSTPASQQDTQLTDTQGKHGDGGKNMPTNTNVTPKATPHTESSVPIFDVTPQIKVSVETDPATNTPQVDQASLDSEMQTMLALREYLCGTQSDTSSLETTDQAKDGGKKSFEVPSAREKVKEVEEPKAKGEEED

SEQ ID NO: 75925 - protein, 279 aa, Zea mays
  Coding DNA Sequence Number=SeqID_32550
  Homolog annotation: Hit_ID=Q851R4; Match level="QueryCoverage=16%, HitCoverage=13%, E-value=4e-11, Identity=80%"; Hit description =Putative uncharacterized protein OSJNBa0052F07.9
  Subcellular localization annotation: CTP_CleavageSite=41; ConfidenceScore=5.22e-01
MDSGLLFSPRHIHGRTRRLPHRACGRPLSSPGLPCSPRFLRRSRRPEDTVCGGGNRWRCGGGVHGARGARSDTLKRVALLALGCCTVAAALGAARAVAGDSIKASGFGLWVAELLRRLGWHDDTVVFALATPPVIELRGAIPLGIGCGAHPHCPSVANPTRVASTAHPRLPSSGLCRKPRTRRLHRTPRPSIVATAHSPSTPSSPQIAQLRHRWKSPRIRPCGRGPSCTICLPLHAWWFRLHLSSPHPLKANCIQMSRRPHVIFILVAPTTMCSKQRMR

SEQ ID NO: 75926 - protein, 424 aa, Zea mays
  Coding DNA Sequence Number=SeqID_32551
  Gene Ontology: Mol. function=diacylglycerol kinase activity; Cellular component=plasma membrane; Biological process=activation of protein kinase C
  Homolog annotation: Hit_ID=A2WVS4; Match level="QueryCoverage=98%, HitCoverage=74%, E-value=0.0, Identity=73%"; Hit description =Putative uncharacterized protein
  Pfam annotation: Domain name=DAGK_acc; Domain location=180-342; Score= 16.5; E_value=2.2e-08; Accession=PF00609.10; Description =Diacylglycerol kinase accessory domain
  Pfam annotation: Domain name=DAGK_cat; Domain location=37-179; Score =91.4; E_value=2.8e-24; Accession=PF00781.15; Description =Diacylglycerol kinase catalytic domain (pres
  Pfam module annotation: Pfam domain module=DAGK_acc::DAGK_cat; Domain location=180-342::37-179
MENDVEKNNMVKEFYIPTYIFVPESPVEHASQIPTCPVIVFVNTKSGGQLGRELIVTYRKLLNHAQVFDLLDEAPDNVLHRLYSNLERLKHGGDTLASEVYRRLRLIVAGGDGTAGWLLGVVSDLKLGHPPPVATVPLGTGNNLPYSFGWGKKNPGTDYDSVISFLQLEYSYTYRGGFWNYFSMGMDAQVSYAFHSQRKLHPEKFKNQLSNQKTYLKLACTQGWFCASLFHPMSRNIACLAKVKIMKKSGKWETMEIPQSFSGGLNPWGTPSKRKQRKRDLVMPPLVDDGLLEVVGFKDAWHGLVLLSPKGHGTRLAQAHRVRFEFLRGATDHAYMRMDGEPWKQPLPTDDGKVVVEISHAGQVKMLATKDCIAKGVHDHESCPAISTVHPESIYNDMNDDFEEERRNFGAALSFRYLSDVNKQ

SEQ ID NO: 75927 - protein, 55 aa, Zea mays
  Coding DNA Sequence Number=SeqID_32552
MNAAATPKPSPTSNSGSAENSAPPDVEAAPFANKCKRHVQERELYSGSWVGKRRE

SEQ ID NO: 75928 - protein, 148 aa, Zea mays
  Coding DNA Sequence Number=SeqID_32553
  Gene Ontology: Mol. function=calcium ion binding; Cellular component =flagellin-based flagellum; Biological process=ciliary or flagellar motility
  Homolog annotation: Hit_ID=A2WVS9; Match level="QueryCoverage=70%, HitCoverage=93%, E-value=3e-37, Identity=71%"; Hit description =Putative uncharacterized protein
  Pfam annotation: Domain name=efhand; Domain location=105-133; Score =27.4; E_value=5.3e-05; Accession=PF00036.23; Description=EF hand
MCAERPAERLSGLTQRTLSPMHQTAYRELGVLGFLAKIIVSWSGDALDLGDFLPMMVRKVGVEGLIQELCKGFQLLMEPRTGKITCQSLKQNAARFGLGELHGDELPEMIREGDLDGDGALDQMEFCILMVRLSPKLMEEEAHMMFQY

SEQ ID NO: 75929 - protein, 285 aa, Zea mays
  Coding DNA Sequence Number=SeqID_32554
MEGGGHPAHADEEPPKEKAPPPKEKAAQGNLFISEDEACSSCFKKDSDNFAGCSVKFSSPHCSQNYKTKDSSPYVDDHRDTVEEASGYIISRLSCLLLDMFDIVLSLYQLPIPSKLELLLLYILLNLIFLPSFSTFIEITTLEEFVLDQLHTYTYSTFSGTGIEFPCPIFVYLISSSLNILATKGLWVAFRGSYTHFCNFQNIRKKCTTLQKGKSSLLEMLFSLLEMAVLMVDQVHHALGEAGSGHWWNQRHRAVGCSIIAEQEHQVKVAPKRSRKGIILIWQVG

SEQ ID NO: 75930 - protein, 206 aa, Zea mays
  Coding DNA Sequence Number=SeqID_32555
MAERYQLPRSCVPPTTRRKDCGCPPSGGSEGGKTRCIREREDMVAFQGGHPPFKGDSPYLRPQPSWAESSPTRSKVLPLRRGGWVPRVMQAGLEQKKPNRRARCMQPPSGYEHSSAFAQTSGRKGGQPCRRHATAPEVQRLALRGVQQSPQIAWARHPLLVRGSKASPPKGSMATSGYSGSAPITNQGFEGWPPKGSQSPHTPSEG

SEQ ID NO: 75931 - protein, 448 aa, Zea mays
  Coding DNA Sequence Number=SeqID_32556
  Gene Ontology: Mol. function=transferase activity, transferring glycosyl groups; Cellular component=integral to membrane; Biological process=metabolic process
  Homolog annotation: Hit_ID=A2Y0Y2; Match level="QueryCoverage=79%, HitCoverage=73%, E-value=1e-81, Identity=43%"; Hit description =Putative uncharacterized protein
  Pfam annotation: Domain name=UDPGT; Domain location=1-433; Score= -118.0; E_value=0.00012; Accession=PF00201.9; Description=UDP -glucoronosyl and UDP-glucosyl transferase
  Subcellular localization annotation: CTP_CleavageSite=42; ConfidenceScore=5.02e-01
MSAASEARSSRSSRRPSTCPRLGRAPSDGALPIRFLPLRFPCAEAGLPEGCESLDALPGLGLLRNFNDACAMLRGPLVVLLRDREGDAPPASCVVSDACHPWTGGVARELGVPRFSFEGFCAFSSLCMRQMNLHRIFEGVDDDNTRPVRVPAFPIHVEISRARSPGNFTGPSMKEFGEEIMSESERANDLVVNSFAEMEPMFVDAYEAAMSKKVWTIGLCSWPPPCRWRRQQKTPTPSGVLVRSSLPQLVEIGHGLEATKRPFIWVVKPGNLAEFERWLSEDGFESRVGETGLVIRDWAPQKAILSHPATGAFVTHCGWNSVLECVTVGLPMVSCPHFAEQFMNEKLVVDVLRVGVPVGVKGAAQWCVEAEGVLATRQDVEGAVAAVMDCGEEGSARRARAAELGRKAREAVVHGGSSFRNVALLIQHVQQRTSTRNTWIEKKPSDRR

SEQ ID NO: 75932 - protein, 280 aa, Zea mays
  Coding DNA Sequence Number=SeqID_32557
  Gene Ontology: Mol. function=oxidoreductase activity; Biological process=amino acid metabolic process
  Homolog annotation: Hit_ID=A9NXM5; Match level="QueryCoverage=13%, HitCoverage=9%, E-value=1e-08, Identity=72%"; Hit description =Putative uncharacterized protein
  Subcellular localization annotation: CTP_CleavageSite=59; ConfidenceScore=5.36e-01
MGSISAKLFTTRSLALSLSLMISSPNSFMLGPVKFPGDRALDISTWMGKAGTRTGRVLSSSTPSKILWRFIWRIHKEEKAQNPSNEKRGTPSSLATPPVHGWQASETTQLAGGASPSLSLRSTTSGPRSMAQASLKLRRRPRPGSASRLSQPSGRPASAQGKRSGRKRMGSAPSLGARPRRGQVEGRRDERDERASPGEGASHVEHRAGVARGHHRDQHEVVWSLATLIEWVQNIQGFMWAEEKVDDELEKDMSSAFQHMKAMCKSLVLPKCVVTLELRV

SEQ ID NO: 75933 - protein, 408 aa, Zea mays
  Coding DNA Sequence Number=SeqID_32558
  Gene Ontology: Mol. function=transferase activity, transferring glycosyl groups; Cellular component=integral to membrane; Biological process=metabolic process
  Homolog annotation: Hit_ID=A3B0I3; Match level="QueryCoverage=55%, HitCoverage=64%, E-value=5e-27, Identity=32%"; Hit description =Putative uncharacterized protein
MEYFGLTALLVAPVSFSSFVLAGLPKIIGSSMFPLACPTFDWANTVVEDMHTDMAQVGMRVEVSMYVVAAPGQCRTVRDYAPDCPRCTEQGAAPGLFCAPAASVGGRDGALVTFVTTPLNLLRLGHAPGDGALPIRFPCAEAGLPEGCESADVLPGIDFLRNFHDTFCAFSSFYMRQMNIHSVFEGIGDQKHPMRVPSFHIHVEMLRARSPENFSSFGKVFADEVMAENAKKIWAVRPLFLQHNMSFLARSSQPQLVEIAHGLEASNHPFIWVVKPTNLAEFERWLSDSDNGFERGVGDKGLVKAILSHPATGAFVTHCGWNSLLECVAVGSFGLEPLTVRAPAVSTTRQLGDPVTRRGPSRCPTRRAEPKVLKVAEKWFLSHFRVDCYQKTVQEREINAEYMSTVLQ

SEQ ID NO: 75934 - protein, 159 aa, Zea mays
  Coding DNA Sequence Number=SeqID_32559
  Homolog annotation: Hit_ID=Q2QT42; Match level="QueryCoverage=67%, HitCoverage=27%, E-value=4e-15, Identity=43%"; Hit description =Pentatricopeptide, putative, expressed
MASAKSSRSRPTGHFRVFPLVDKLKIFKADNFDPDAYVQSKCHAMDEKCHPPLPSATAHWPRSSMPSLPPTDVLALPHSSSTSVTRRILVAGARPLPTTAAALLCSLPSATVALDMYHQIYTHSSPRSNHLLLPTVHTFNSLLLAFHHDGKCDEFKIVL

SEQ ID NO: 75935 - protein, 35 aa, Zea mays
  Coding DNA Sequence Number=SeqID_32560
MELVWGSARIEEDGGSATGVPQVTIDNFCNWSHSI

SEQ ID NO: 75936 - protein, 89 aa, Zea mays
  Coding DNA Sequence Number=SeqID_32561
  Gene Ontology: Mol. function=aspartic-type endopeptidase activity; Cellular component=chromatin; Biological process=chromatin assembly or disassembly
  Homolog annotation: Hit_ID=Q8SA91; Match level="QueryCoverage=100%, HitCoverage=3%, E-value=1e-08, Identity=38%"; Hit description =Putative gag-pol polyprotein
MALEVMKTEIDIWRPNLEKKVDDLALEVTYVGKFREREHYIAVFGKLGIFVLCESATRCPPVGFHLAGGPFGHHVNNYHREHESRRGFA

SEQ ID NO: 75937 - protein, 131 aa, Zea mays
  Coding DNA Sequence Number=SeqID_32562
  Subcellular localization annotation: CTP_CleavageSite=42; ConfidenceScore=5.15e-01
MASLAAAQAVLRRSSIRPRWRKEVGGGSRGGARFYIAKTQVRRRMESGRIARSSRRILGVTVDERATYESRTNPGGGVGVYSTMPWRDYLQQDGLVDWEYLIEYRKTRVFHRSISDCGQGHSRQHSLFINN

SEQ ID NO: 75938 - protein, 20 aa, Zea mays
  Coding DNA Sequence Number=SeqID_32563
MFVGLWKNLRDRFLHGGNEN

SEQ ID NO: 75939 - protein, 66 aa, Zea mays
  Coding DNA Sequence Number=SeqID_32564
MPQSVLNIFVTNDLRKVTQSELVRSNPRVMKAGEHQEDKEGECFVRFGHGGGLTPSGITVKKKEIG

SEQ ID NO: 75940 - protein, 66 aa, Zea mays
  Coding DNA Sequence Number=SeqID_32565
  Homolog annotation: Hit_ID=A3B342; Match level="QueryCoverage=81%, HitCoverage=16%, E-value=8e-07, Identity=53%"; Hit description =Putative uncharacterized protein
MSRAFDDYYIKDCGVISASEVTQRRIGSNDQFVILVVVGVWNVLSNDETMQIVAYIEVYMVLMVAI

SEQ ID NO: 75941 - protein, 150 aa, Zea mays
  Coding DNA Sequence Number=SeqID_32566
MPCLDALARCVMCAWKTTDALSGATSVSKISNKQVIKHLVKSVSQSQWYSRGPQVLACALRILDEPTIKGIPRSGYRIDADSSSKHVSQCLVNITMFDSHRQKSATKAASAHHQGVVETVSLKENVSAKTLVIVAENPDKFRVVALSAGF

SEQ ID NO: 75942 - protein, 129 aa, Zea mays
  Coding DNA Sequence Number=SeqID_32567
  Gene Ontology: Mol. function=zinc ion binding; Cellular component =intracellular
  Homolog annotation: Hit_ID=Q6H6E6; Match level="QueryCoverage=38%, HitCoverage=20%, E-value=6e-18, Identity=76%"; Hit description =Protein DEHYDRATION-INDUCED 19 homolog 4
  Pfam annotation: Domain name=Di19; Domain location=10-119; Score= -86.4; E_value=0.086; Accession=PF05605.3; Description=Drought induced 19 protein (Di19)
MDFLWRMYEMHPALSLKARGVTVLHDRFGYDDVEHKDVVCSDFPCPCCYEDHDVTSLCAHLEDEHPFESKIMVSPSPNYAIFTGYYQFGCDDIEPEDDVRSDFHALTAMKIMMLLLSVCPFGGWAPFCV

SEQ ID NO: 75943 - protein, 57 aa, Zea mays
  Coding DNA Sequence Number=SeqID_32568
MAVGRLLSHGAPDSPGAIGAMELPHLPQYDSFMGMRDGIGELLDALSDLIFGLDIAQ

SEQ ID NO: 75944 - protein, 672 aa, Zea mays
  Coding DNA Sequence Number=SeqID_32569
  Gene Ontology: Mol. function=transferase activity, transferring glycosyl groups; Cellular component=integral to membrane; Biological process=metabolic process
  Homolog annotation: Hit_ID=A3A4C7; Match level="QueryCoverage=44%, HitCoverage=63%, E-value=2e-91, Identity=59%"; Hit description =Putative uncharacterized protein
  Pfam annotation: Domain name=zf-DNL; Domain location=598-645; Score =14.0; E_value=4.6e-05; Accession=PF05180.3; Description=DNL zinc finger
MPVHVEVTKATAPGFFNSPGWEAVRGECVEAMRAADGAVVNTFVGLEGQFVSCYEAALGKPVWTLGPLCLRERDADAMSSRGADGGQQHSAVAAWLDSKETGSVVFVSFGSLARKLPKQLFEVGHGLEDSGRPFLWVVKLAEASPPEVREWLGALEARAAGRGLVVRGWAPQLAILSHRAVGGFVTHCGWNSLLESVAHGVPVVTWPHFADQFLNERLAVDVLGVGVPIGVTAPVMVFDDESVVVARGDVARAVSALMGEGKEAGERRRRAREYGEKAHGAMEKGGSSYENLTQLIESFGQVEARKAARSHPDPAGQTPNSSRPFFFLPRFHRRQSPDPAARPLPRRLEARGRWRSCSTSSFNSNGGSSRRRMTFGGVAAFPAALGHGQQVDYGEDAGGLGDSDAGGSEPEPLPERTRGGFGGGSKRSRAAEVHNLSEKVVPLSFLEIRVLSPCGERDCIQSPFTAKPDSWKNGCQQSEGYGIQDSICDDGHTETAKTKKKMDESLEPSGENNNCEQVEISSKDGKKVPMKLEVSSGVQTTSSIMEQEVHSGFVGVEVSVSHILTYIYITEYISLRVKSILLKTVPWSLLTKSPQWHMRVAFACSVCGQRTTRAINPHAYTNETVFVQATFDCPMKTYGFLTPEFWSHTKFSMTPFHQYTDLLAKATKGLVL

SEQ ID NO: 75945 - protein, 214 aa, Zea mays
  Coding DNA Sequence Number=SeqID_32570
MGVNFGPCLLAALMILPFEDGQDEFEKRTKKTKKKRKRYLHLFLLGINVNSVVEEQRCQDASRLLQNKWIIVRWSWDWNLLCIYREAIIDPAAIFEQLEKRKLIPQALAAKRVHFFTLIKKRHCKEAKAYAVTPSSTLLWCCQRSRLAEKNRHCKEVKACASDPLEHPATVLQAQPPRKLMLRLGKVLNPEESRGSTPKMAPVQAFHSHGRRDI

SEQ ID NO: 75946 - protein, 94 aa, Zea mays
  Coding DNA Sequence Number=SeqID_32571
MAWRLTRSTFVGERKESGEGDSGSPVRLCRVRGLGELHGFQAKLPEQLAQPGSGWSELAAVAEARVAWREVARHVQGKVRVRIPMPSSGMRKRG

SEQ ID NO: 75947 - protein, 358 aa, Zea mays
  Coding DNA Sequence Number=SeqID_32572
  Homolog annotation: Hit_ID=A2XFR6; Match level="QueryCoverage=50%, HitCoverage=52%, E-value=5e-33, Identity=42%"; Hit description =Putative uncharacterized protein
MDPGTHMVCARFYPLEPGVTEVMVRTFQTTRVNTSYAPQPRQIPVYPVVVEEAPANLPPVRVENVINLEDSSEEQLPTPTPLAESLAFAAGSSTSASSAPAFQAPAPGGNDPDDSGDGDDEDDDDEDDGEDGHINEEADYAQQDHFMGIGPVVEHYTSMFETGHFPNLLQAVLHELGAYARPLYETRRVSEPPRACYYITRIHVRVMDAGDRGFRTLSAHESLIPLSTYAASVSDAARRTLWSLSHTYRQQLQNTRFRHLPQRLRGESQTNIVPGEPGEDRLNTLAGVVAGLNTDLDSATLDLYSVHLELENAHARIAALEAQLQGLDPPEAQVPVVALSPPRKRMRYGEPGSVTRLL

SEQ ID NO: 75948 - protein, 81 aa, Zea mays
  Coding DNA Sequence Number=SeqID_32573
MTKSKPSSCIIKDEDACAPYHWAPFLNPATKSKEKKLKEGCSMWDECPSGQGVTLHKIVTTIGGGVSVAKVQHLWKAVVGP

SEQ ID NO: 75949 - protein, 50 aa, Zea mays
  Coding DNA Sequence Number=SeqID_32574
MRARIGMCTLDGKDECPSGQGVTLHKIVTAIGGGVSVAKAQRLWKAVVGP

SEQ ID NO: 75950 - protein, 115 aa, Zea mays
  Coding DNA Sequence Number=SeqID_32575
MEMGGFGAASRPSRGSCGPSPWVLGHVANWIVLGDPGRAEEATENKFQGSPSFEVKPVAEGVSPYPGGCVRRAVNGTNREMGGFGAASPPRRGRYEPPPWVLGHVADWIALGDPG

SEQ ID NO: 75951 - protein, 119 aa, Zea mays
  Coding DNA Sequence Number=SeqID_32576
MDALNFEYPDYERLDEGVRGAKKKRVVSILKMQAMQSIEEDQRASKKQKISAEPKDSAPKKRKSTKMAHAETKVQDVPEKTVGTSLSSSAGVIEILKVVDFRIILRDLPKLPVLDTCCE

SEQ ID NO: 75952 - protein, 944 aa, Zea mays
  Coding DNA Sequence Number=SeqID_32577
  Subcellular localization annotation: CTP_CleavageSite=19; ConfidenceScore=5.33e-01
MSSSSSSAAATPPTDSSPPAAASSEETLSSSMAEELRAGDSVDFGVSRMLSVRVQDMQRLGYFGGGVARAPGTEEVPEPEGELVVFKAFFAAGLPLACAPKRMIGDEVAQFGSSTFTPKTGKTTMQVVELVPCARNKWGNWNEFWFYVAEGTVKGHEGLPVSEMCSHFYSAYPPFEVAEEDVDEGALRCAAGLSSGRDLVEEFVSYGVWPLAHGWALGEVCLRQMPFHGGREVRSPAFALNLRNRDPTAFVREAEDGAVRLVGRYVPRTEGQRSFDIRGSNDRLNRVFELNQLPYDGYPGQDDADRRGKKPVVDAGDDPAPAAAPSSKRRKLGTAMGGLGVSDSFARELMRTCAAPGGRMSLPELRESSARMLRVTGGCWPRNVPIPRAAGEDLFTSRMVREWRVFPYGRNIAAVVSAVMDKDRQGAAQKRQAVVRLVEARPKRQRGSAKAAAPGGGKPPLAAKSGAPTSSRAPEATAGAGGSKSTKAVPPAGRVPEAAKAARSLPSAGKHIADFATDISVDDYLGGSDEGQLAIVAPTAVTTTTAVAPKAKGGALSSGGEVVALAVVRDEAGAASRRLKEVVESLSQVADFANRTASGAITGVVSAEVERLRTQHADAVREKSAADSKCRKLADKVAALEGEKADLRRQLAGERRETNEALAKALAAQAEANLARAEGNLARERAEQLQERLIALESRVERTEAAARAEAERTRTQLMDTYRELGAQTGDFEVPDREAGLRCLEWVQEELQALPTVVEGFMSYASLVTCEGAMNALSREGCRHFEVFDQADEDFERDIYKVEDPVVKDSAGAIYDRMWGPHGRQVVRERAETARAQAARGERVDDFGALNIALPDPEPTPAEAVPGVALEPTPETAENAPDAPASAVAGEDLLPKMAEGAPDAPAAAVPSAEDPAVVAAETTAEAAAEPTAEASATSGPSQVA

SEQ ID NO: 75953 - protein, 448 aa, Zea mays
  Coding DNA Sequence Number=SeqID_32578
  Subcellular localization annotation: CTP_CleavageSite=66; ConfidenceScore=5.34e-01
MAGSAAPAPCPVPARPRPPPWPVQPPWPQLARPFPRPGLARPYLRSPALANDPVEEPEELAGEAPEQQSVGGGKCPLTYLCPIHSLIHLPLYIFIPKVVMRLMVLVMTMVLMARLRHTARKSVIPFLPSRLAEHPLRCPVAGQSSHLERLHHRLHEEQERRRQEQQGSSFSLHQEIESVRSCSPVLPLEPPPAPPLGVPASGVAAGGDPDDGGGDDSSSHDTDFSANLEPEGWVARPITRDAARGCHFHDALDTLLRRAFDRHTWSVEYRCVVYQHSRGVYPDRWEATCLVRCPENSLQGAEVCSEHYSISERDSAEAAMQDAARRALSHYCSVFGGAADGLDLKYYPRCPSGSTGGVIVSPVGEGNPRLSSTVNLAAVLNTELDHALDELSRARAEIALLRAERAERRHLDGGSPAPVGTQHPYRSPQRGHQSYGNPDCKTKITLEP

SEQ ID NO: 75954 - protein, 73 aa, Zea mays
  Coding DNA Sequence Number=SeqID_32579
MGNQLEEKSLENVRVVCEYPDIFSEELPGPQGKNTFGKTVQRQHLRTSDQHWRPPPVNSLPQLRGWLRNTTKL

SEQ ID NO: 75955 - protein, 70 aa, Zea mays
  Coding DNA Sequence Number=SeqID_32580
MGAAGGQALVRDWERKRENAAAAGHHGGDDRLQEQRRETTTGYRKGVVEGSVAADVEGGPQLASRERPRA

SEQ ID NO: 75956 - protein, 172 aa, Zea mays
  Coding DNA Sequence Number=SeqID_32581
MAEPGIVVVSTMSESFGSMKCNLNGMLQCMRTVLSCNALCMCTCNCMEGILERYQHYSFEERVVLDPTIVDQNQLMFNSISELQKKVSYNIGSLVPRSLCREEDANCDNTRTVEQQQPSDDRQTVEHAPLQETDPGKETHVLEAKTLTADADGNLSSSQQTGEYNELLRQYY

SEQ ID NO: 75957 - protein, 214 aa, Zea mays
  Coding DNA Sequence Number=SeqID_32582
MAASAMAPSGRAEPSGGGATGRAGGQGGRRGEGRRGEEREEGEGGGGRGRRREGPHRRGGRRRRRGAAAARDAGEGAGEGAGRYITPPSSFSTHGLVNYGINNNNITRVSSLSRVNEIATSKQGLKPKFNQGMGWWRMFLRQWGSIVIQELLKIVCLKMKVVMIVTLVPKVSVVVLLVVMLFRRAKASSPALLQLLMDSFKVVDLVIKFLISWF

SEQ ID NO: 75958 - protein, 166 aa, Zea mays
  Coding DNA Sequence Number=SeqID_32583
MTDPQNKVSRVPLLVTTTSSYTFRTKEAEYHQSVLREQLEYQRQQSEYQRQQAEYQKKRDEYYASLQAQNQALLSQLAQQAGVPMPTYGMPPPDFALPMPMLAPPPPPPPPSQFPMGFQTPLASVAAPGDGSGQDDTTHSWVNNLFNTQSPAGGGGYSNHPDDGYD

SEQ ID NO: 75959 - protein, 201 aa, Zea mays
  Coding DNA Sequence Number=SeqID_32584
MNSPTPTSGGDTRFSSGFLSDDGFPSILWEVLNSAGYPTSPLYTVQLYEEHRVPRCRVWLTLEAHPLQPDWRSLDSETIGFRTDDTTEAAAMKTLTTFCGYHSLEMLVEKDLQVERLSQRIATLEQQVEIRDNTIDVLENQLHDMQRELEEANDHQDMHHLEMEANEARSEGEEAPEELGPTPGANGTTSMMPPSPASSVA

SEQ ID NO: 75960 - protein, 81 aa, Zea mays
  Coding DNA Sequence Number=SeqID_32585
MARTATDVIVVSVKAASQTLLPAEARGKSPAAPAPAPAPGIGAPAPRAGDDAVSLGGWTDLALCDAVDAPPGEKAKRGSQM

SEQ ID NO: 75961 - protein, 49 aa, Zea mays
  Coding DNA Sequence Number=SeqID_32586
MTSSFLFQDPIIGGSLLLTYTTGNVARLPTIASFARALQICVDTSYSSL

SEQ ID NO: 75962 - protein, 292 aa, Zea mays
  Coding DNA Sequence Number=SeqID_32587
  Subcellular localization annotation: CTP_CleavageSite=51; ConfidenceScore=5.16e-01
MPKEYDSWGWAPVSEARPLLSADMKRRTTAGGGVLLTRRFAFSAHGGRRPRSMTRGPGPRVRGWAAAFGGDEEAHYRRQWHAPHAAVRLLHTWRPTPKEYDSWPGPPCQRLAAMTLLDPPERLQPEVALNLVCNLLGWGVSAFAGKIRVGGHHRLSLQDVRGGDASSHFFLQHSEERMFTSHVKVEGGLSCASILRASISLALMPSVPPSMVTAGLAAEDATWEVVQDVVEMVAARFQRTLLMSNQQAGLMRTDLIGLAYTCTPGSAYFRHLEGSFPTGGEFVEPFSVQYSS

SEQ ID NO: 75963 - protein, 84 aa, Zea mays
  Coding DNA Sequence Number=SeqID_32588
MAQAAYQMWLVQVLIYTLGAPRIGGSRLSLTVAILAKGRIKDIYDEKGMIVTKVVVAPKLCTRELRLNHWKMNRLKGEKAIQSS

SEQ ID NO: 75964 - protein, 83 aa, Zea mays
  Coding DNA Sequence Number=SeqID_32589
MPKLPERYLRHVPSHYICFYADLPKVFLLEGPSATKQTPNTYDLENDPELKDVLAELKVVHKAIDEAVDKGLNEIVKKVLNED

SEQ ID NO: 75965 - protein, 171 aa, Zea mays
  Coding DNA Sequence Number=SeqID_32590
MPSHFPHVSRPSAFRAPGWGAPAAFPHQWAVWWGEASRAAASAPPSASRIFVIRAKAEEHTEWGVASAWAGNPFLPPAFGGERHPPAPRRLSSAMRGKVKRCFLDRGGLGEGGSEDLPVRFGEAGARWCGVGGQVDATVSAEVVAAGEGFSADEIANSACTPGPLSPGLNG

SEQ ID NO: 75966 - protein, 307 aa, Zea mays
  Coding DNA Sequence Number=SeqID_32591
MSGGLRNGSASKLEKVEVASTSSFGADVDPRAIDLAMRIDERMFLKMKEDEAKNKIEEEENDRWRPNDESTSSQGSSFKSTSHMCFVANGSDSESESEDEEEQESDSEDGEDLQQFFAQLSKKHRMSLLKLMKRVEEQKEMLHKQEDFLIRKIKDLEKLTKEHEKLKCSHDDLVQRYCRRFDPGGSLDRRPHPGGWHSSRSSAGGAVFLSGQSVEGQSDCGHFGLVDWRARVRIRWQAILALDAPAIRSAGEAIWPRLLLREACPNWASGESKLHPLLEETLGRGANLPWSTVPARGWARMRRDRVP

SEQ ID NO: 75967 - protein, 120 aa, Zea mays
  Coding DNA Sequence Number=SeqID_32592
  Homolog annotation: Hit_ID=Q6QP51; Match level="QueryCoverage=40%, HitCoverage=22%, E-value=1e-14, Identity=77%"; Hit description =Putative growth-regulating factor 1
MPVTMCEKLQRHLCQRRAFSTTEPVPRLEATLRMAQQCQPGTPVTGTGKGGYSERDPSPRRKRAPSPPTDQRFEDWPLRRVRQPPQSTRAPRPLLVRGSKAGPSEGFDSRLRPLGLRAHY

SEQ ID NO: 75968 - protein, 249 aa, Zea mays
  Coding DNA Sequence Number=SeqID_32593
  Gene Ontology: Mol. function=nucleic acid binding
  Homolog annotation: Hit_ID=Q2QTH9; Match level="QueryCoverage=33%, HitCoverage=33%, E-value=1e-14, Identity=38%"; Hit description =Putative uncharacterized protein
  Pfam annotation: Domain name=zf-CCHC; Domain location=168-185; Score =11.0; E_value=0.033; Accession=PF00098.14; Description=Zinc knuckle
MAPEAGLGCCQPHPGGWHNSRSSAGSAVFLLGQSVEGRSDCGHIGLVDWRARVRIRCQAILALNAPAIRSAGEAIWPRLLLREACLNWASGESKKIKELKEEVGRLRRSLTLLKGKCHAQPSQDNRDNMVKKLEKGTTVACTKPLQKNTKLSKKGMSKIHERSKISDRRCYGCKEKGHEIDSCPHMKNQDLALSRKMKAKGKCIARTSTTFATIAVKKVIYSRFVQRPHRKNEALENELKRFYLALERI

SEQ ID NO: 75969 - protein, 244 aa, Zea mays
  Coding DNA Sequence Number=SeqID_32594
  Gene Ontology: Mol. function=inositol trisphosphate 3-kinase activity
  Homolog annotation: Hit_ID=A2X5H5; Match level="QueryCoverage=45%, HitCoverage=37%, E-value=2e-36, Identity=68%"; Hit description =Putative uncharacterized protein
  Pfam annotation: Domain name=IPK; Domain location=1-226; Score=-47.1; E_value=2.7e-06; Accession=PF03770.7; Description=Inositol polyphosphate kinase
MSDLHPTGAPSRRPPRLRQQAGPAHRRLRPLLQPLQAGDCGEHEPGEPHPHLVLDDLLAGFEAPCVADIKIGAIMWPPSSPEPYNAKCLAKDRGTTSVLLGFRVSGVRVVGPEGAVWWTERPEVKAMDTVGVCRVLRRYVSSVADEGMDCVLAAASRLRFGHPSDAAHARKPPPPTLRERGSGLRQAKGTRRCCRASLSVPIAAQMDPSSKPVYMPVEPYDSGFLKVSDVHTIFFEQSENPQGH

SEQ ID NO: 75970 - protein, 294 aa, Zea mays
  Coding DNA Sequence Number=SeqID_32595
  Gene Ontology: Mol. function=transporter activity; Cellular component= intracellular; Biological process=transport
  Homolog annotation: Hit_ID=O24659; Match level="QueryCoverage=87%, HitCoverage=93%, E-value=4e-88, Identity=64%"; Hit description=Sec14 like protein
  Pfam annotation: Domain name=CRAL_TRIO; Domain location=129-292; Score=62.3; E_value=1.7e-15; Accession=PF00650.11; Description =CRALTRIO domain
  Pfam annotation: Domain name=CRAL_TRIO_N; Domain location=40-114; Score=12.5; E_value=0.0042; Accession=PF03765.6; Description =CRALTRIO, N-terminus
  Pfam module annotation: Pfam domain module=CRAL_TRIO::CRAL_TRIO_N; Domain location=129-292::40-114
AGAGQDQEDHYQEKLGGDMANAGGGAAGEGEWLKVAQLRALVQEDHRAKSSSVLDVQCEVGSLSIRGLRRPNNHEVDNLTLRRFLRARGHNVDKAAAMLLKFLRWRAEAAPGGGTVREEQVRGELEQDKIYMGGVDRTGRPIIVGLLAKHYSANRDMAEFKSFVVYFFDKICARIPRGQEKFLAIMDLKGWGYANCDVRAYIAAIEIMQNYYPERLGKALMINVPYIFLKVWKTMIYPFIDANTRDKFVFVDDKSLRETLRREIDESQLPEFLGGKMPLVSLKDYAQQPQPVCE

SEQ ID NO: 75971 - protein, 105 aa, Zea mays
  Coding DNA Sequence Number=SeqID_32596
  Gene Ontology: Mol. function=kinase activity; Cellular component =ornithine carbamoyltransferase complex; Biological process=amino acid metabolic process
  Homolog annotation: Hit_ID=Q6QP54; Match level="QueryCoverage=100%, HitCoverage=37%, E-value=7e-16, Identity=43%"; Hit description =Putative kinase
MAPPVDVADPRPRLGDAKAPPRLRSSPSSVAEVESEPLGRARRRPLAEARAEFESWGRAKRSSSSSGVEPKSEPWVGRSGIRRLLGLSPSPSPGSGGAEFVVFWG

SEQ ID NO: 75972 - protein, 59 aa, Zea mays
  Coding DNA Sequence Number=SeqID_32597
  Gene Ontology: Mol. function=prolyl aminopeptidase activity; Cellular component=cytoplasm; Biological process=proteolysis
  Homolog annotation: Hit_ID=P93732; Match level="QueryCoverage=66%, HitCoverage=10%, E-value=5e-09, Identity=71%"; Hit description =Proline iminopeptidase
RGACRSTPHDCLEQNTTWDLVADIEKLREHLGIIQAIIFFFNNTDYSLFSAGTQCFQPM

SEQ ID NO: 75973 - protein, 231 aa, Zea mays
  Coding DNA Sequence Number=SeqID_32598
MSPRTRRTARKHTGPIGVPCHQLAPRHEDSSSGSNDPIRDLEAQVNRFQAELRRRTDIWVADGDRINELRSDIRRLRDQLADQDLALDWVVQSRSLAWAKEAKARARVEELSSAIDNLQAYCNTLHEEVHMPSRTRAQDGASTSRGREATPNPPPVPPTLAEAIAALVNATADNTRFLREMVGQQLQQQGGRGYPQGPRETSYLDFSEMRPPLFVKAEDPLEANEWIRVIE

SEQ ID NO: 75974 - protein, 134 aa, Zea mays
  Coding DNA Sequence Number=SeqID_32599
  Gene Ontology: Mol. function=calcium ion binding
  Homolog annotation: Hit_ID=Q6YVG9; Match level="QueryCoverage=94%, HitCoverage=32%, E-value=1e-61, Identity=86%"; Hit description =Calcium-binding EF hand family protein-like
  Pfam annotation: Domain name=efhand; Domain location=3-31; Score=5.7; E_value=4.5; Accession=PF00036.23; Description=EF hand
  Pfam annotation: Domain name=efhand; Domain location=50-78; Score =20.2; E_value=0.0078; Accession=PF00036.23; Description=EF hand
  Pfam annotation: Domain name=efhand; Domain location=89-117; Score =12.0; E_value=0.94; Accession=PF00036.23; Description=EF hand
  Pfam module annotation: Pfam domain module=efhand::efhand::efhand; Domain location=3-31::50-78::89-117
MAYHLYQYRERDKDNDGKLNFQEFFNGLFYSIRHYDDEGLTDDTGGSDAPAKKSFSHLDLDNDGLLSADELKPVIGNLHPSEYFYAKQQADYVISQADTNKDGQLSMNEMIENPYVFYNALFTEDDYGFHDELR

SEQ ID NO: 75975 - protein, 135 aa, Zea mays
  Coding DNA Sequence Number=SeqID_32600
MGRRRRDMPDCCSDDGFFFVYWVCWLNLISWTSGGSRVLKEILRRSRPERRPRTPSDPVAALLWFVTRVGEEIADARDPFDSEGRREHGCAERLARWGPPAVARACNAEEKKKRLARGIEMGRGESGGVEVVGRN

SEQ ID NO: 75976 - protein, 72 aa, Zea mays
  Coding DNA Sequence Number=SeqID_32601
  Subcellular localization annotation: CTP_CleavageSite=35; ConfidenceScore=5.08e-01
MGGAAKPQRAMAGPLHVISTSSLGHNFGESLLSGVAAVVSGVHAVEAWSKGEEESTRTIGSLTDGGDLIPRC

SEQ ID NO: 75977 - protein, 174 aa, Zea mays
  Coding DNA Sequence Number=SeqID_32602
MARRPSRVSESCRHDWREGPRLKSEDEARNHAPVSLTNSEANKTRRGNNNRVVMRRQLKCVGLLLLLSLLLPALSPVVVVATARRELLPLMATGDEGRPQDVSSSGTWMPPGAAEEAVVRRKDEAMKTNGRRFRRTSSWNWKKMPAAASQVSFGGRIPFTADYHSVHRHPPTHN

SEQ ID NO: 75978 - protein, 108 aa, Zea mays
  Coding DNA Sequence Number=SeqID_32603
  Homolog annotation: Hit_ID=Q108Z7; Match level="QueryCoverage=53%, HitCoverage=2%, E-value=5e-12, Identity=58%"; Hit description =Transcriptional regulator, putative, expressed
  Pfam annotation: Domain name=KOW; Domain location=67-101; Score=28.3; E_value=2.8e-05; Accession=PF00467.20; Description=KOW motif
MSSYTNEKEPLRVALYSNLRNLIQNLMSGSETIEQLIHTLINDNLDLGCAIIEVVATRQARIIKFDVGNVVMVTGGRNTGRVGVIKNREKHKDSFETIHVLLGAFCYV

SEQ ID NO: 75979 - protein, 86 aa, Zea mays
  Coding DNA Sequence Number=SeqID_32604
  Pfam annotation: Domain name=zf-CCHC; Domain location=66-83; Score =17.6; E_value=0.0033; Accession=PF00098.14; Description=Zinc knuckle
MDELFNNIKSTEINHQTRVKIENPGAPTTTLEQVESHGDEELALVASWFTRFHNNHLNLWCGRSKDGCFNYGDPNHFIASCPKKGK

SEQ ID NO: 75980 - protein, 154 aa, Zea mays
  Coding DNA Sequence Number=SeqID_32605
MDVLMIRYLGEDQQGLRKGQGVEEEQQGRPQQEGDQVRLDCDSISGISLRGEVIRVTGDNQRSRGVVIARNRLLGVLDHQRRDLHSIKLSYLTEDRTASSIMECNFYEKRMEAEENMDPSATLPVTRPYTDDYMFRQNGPNIYVQLAYPFIYRH

SEQ ID NO: 75981 - protein, 144 aa, Zea mays
  Coding DNA Sequence Number=SeqID_32606
MDESCTQLLSSDPMINLNTTKWPKAHFPFNHDFDKLASSSSDEELERRFEEKLNGLCFIADTAGGLYTMALGDDAVGGDGKYIGDDSASEVSHSNDDLVTEVEELNAALENQDMLLKLAARERKEFKFKYESTLVNLSLLELQL

SEQ ID NO: 75982 - protein, 153 aa, Zea mays
  Coding DNA Sequence Number=SeqID_32607
MERPPGKTVLPQGWYGTLWGTDIPRYLHPQRRTERSSPQRQFHSTPASSSSEEEWNQLPSPTMNQPCQEKNLFSGNLADEGTDVEIFGDITKPESETRRNPCLEMRSQRWERLQKNGSSGKGGIPDDVIVGKLKSRLSRKQDNAERTLFSDET

SEQ ID NO: 75983 - protein, 230 aa, Zea mays
  Coding DNA Sequence Number=SeqID_32608
MSNYVIVVYMARIRCTARKSVISFLPSRLVGHPLHRMMAGQSSHVERLHRHLHEEQELRHQKQEQDQELQDSSPSPQQAVESERPPSPAPQPEMPPAPPQGIPAAGGDPDGDGDRDDDDAGGSSSHGTELSEDPEPGRWIARPITRDAARRCHFHDALDTLLRRAFDRHTWSIEYHCVVYQHLRGLYLDQWEATCLVRRPDDDLRGAEAFLEHYSITERDTAKAAMLDAA

SEQ ID NO: 75984 - protein, 87 aa, Zea mays
  Coding DNA Sequence Number=SeqID_32609
MVQCSVEDQTASVKNLTADDLFAGIRAAGVWKNEEESEVTEEKTPPPLESQAETWLYFDNCESEPDSPTNEGVLTEDPLTGHMPRHG

SEQ ID NO: 75985 - protein, 89 aa, Zea mays
  Coding DNA Sequence Number=SeqID_32610
MNVSELTLAVSHPTGQEQVSPIRGVRRFGVKGKLAPRYVVEEMSACARGAVASGRSGSPRRLDLHREANVDSGDCRQGHLEEHYQNVQS

SEQ ID NO: 75986 - protein, 289 aa, Zea mays
  Coding DNA Sequence Number=SeqID_32611
MTSHGSSDDGNALSHTDGLAREGFPRILWEVLQGAGYTTPPQYAVQQFEKHRVPHCRVRMTLEPHPLQPGWRSLDSESFGYRAEDTIEAIALHGLTTFCGFHPLELSTHPIGLFPMEKEDDPMWKDRVEHAKDIWAIYLGQTAHLTVRCMNALYRLQVMHGEAMSHLMALLEATKITLDNREELVVDLSTKMVEKDLQVEQLSNEIHELEELVGTRENTIEVLEDQLINTQQQLAEANEHLDMHHQEIQDMEANEDVDIEGGEEPASSLDTAGSGRPPSPESSVASFAH

SEQ ID NO: 75987 - protein, 144 aa, Zea mays
  Coding DNA Sequence Number=SeqID_32612
MGKSKKGGSSSHHSGDKRKRELTPPSEDFGDSEYSEEEFSSESEGSSVHASPPASSDDSDDSQGIAAEVWTYIRALERAGLEGSDESEVSSDEGNSSDSSEEGSDGDDSGEGDGDDGGDGDGDGDGSKGDGKGVGGSGSGKASG

SEQ ID NO: 75988 - protein, 69 aa, Zea mays
  Coding DNA Sequence Number=SeqID_32613
MEERAVRLTGGDLAPVKCPRRSGRSRRSRRWLARRWRWSESVGPRVQAGELVGGKELYMALGKLAEALD

SEQ ID NO: 75989 - protein, 89 aa, Zea mays
  Coding DNA Sequence Number=SeqID_32614
  Subcellular localization annotation: CTP_CleavageSite=47; ConfidenceScore=5.07e-01
MGKPVPSLLMLLLCRGLGFLPKKKGLRLGWPLKCFSRHSRGFAGLVRNSTSSDIKIARIFFLFVLRLRTGYDLRDQADLASARSLLTPF

SEQ ID NO: 75990 - protein, 151 aa, Zea mays
  Coding DNA Sequence Number=SeqID_32615
  Subcellular localization annotation: CTP_CleavageSite=43; ConfidenceScore=5.45e-01
PIKRSSFGFNKGAKRQPKALWSGSTGLSGVHRTVSGAPPDSVRCTRGLQLELATFGNFSGWRAIIHRTVRCTPDSVRCAKEERPQELASFGNLQRLVRYNSPDMSGVHRTVRCNSGATAIRRQRLPAAQLMRALRAQKSGAPILGAPDKEQ

SEQ ID NO: 75991 - protein, 333 aa, Zea mays
  Coding DNA Sequence Number=SeqID_32616
MKTLTTFCGYHPLEVVMHPLGLFPAEKKDDPMWCNHVSHVKDVWAMYPNLVGRVTIQGMSALYRLQAQQSDAMAHLANLAQTTKLPLDSREDFVVDLSSELVEKDLRVERLSQCITTWEQQVEIRDNTINVLENKLHDVQRELEEANDHLDMHHLEIEANEAGSEGEEAPEELGPAPGTNVAASAMPPSPASSVASTAQEDPLDADVWLPVMESKFPLLTGDCPDDTKTRFAIGHHIPAGILDRKLNEFLALNQGTHTVLHTKLREHLNIVWADSFNELVNLAISHKDCIVAHRAEKKRKAPMAAPSAQAQRFRIVSHNQSRGFQHSSRQADG

SEQ ID NO: 75992 - protein, 125 aa, Zea mays
  Coding DNA Sequence Number=SeqID_32617
MVPDAPRTAAPCTKGRRVTGGVKHFPQDGRKAIVERLSQCITTLEQQVEIRDNTIDVLENQLHDVQRELEEANDLDMHHLEMETNEAGSEEEEAPKELGPAPGANETTSAMPRSPASSVASTAQG

SEQ ID NO: 75993 - protein, 34 aa, Zea mays
  Coding DNA Sequence Number=SeqID_32618
MAGGKELAGAKEGRLAGNGEHEVRLAGFADWIKR

SEQ ID NO: 75994 - protein, 91 aa, Zea mays
  Coding DNA Sequence Number=SeqID_32619
MSSSTPVRGQSDSDHLQPLSDHRRVRQDLPDLRDPFAGARPPLRHNKKKLGNQLPNSSPKNLPLHPHLKASPGGDAGNIEDFEEFQDYDEF

SEQ ID NO: 75995 - protein, 60 aa, Zea mays
  Coding DNA Sequence Number=SeqID_32620
MSLQAIELLCGKASLCNVRASSREKWKLRLHNPEPHIGIQRVFRLGEQWWLGAQELLGSK

SEQ ID NO: 75996 - protein, 170 aa, Zea mays
  Coding DNA Sequence Number=SeqID_32621
  Gene Ontology: Mol. function=kinase activity; Cellular component =ornithine carbamoyltransferase complex; Biological process=amino acid metabolic process
  Homolog annotation: Hit_ID=Q6QP54; Match level="QueryCoverage=25%, HitCoverage=15%, E-value=5e-10, Identity=79%"; Hit description =Putative kinase
MALPVDMAGPRPRPGDVGAPPKLGSSLSSVAEAEPEPLGRARRRSFGGGQGGVRALGSGEAEFVVFRVLARVRALVGVAQAALSFCQTGQWSGEVTAVTSALPGGRASGQRCQATFALNAPATRSVGAAIQSGLLLSEGKASGEPEMCPPLKGGLGRDGNPSGSAALARG

SEQ ID NO: 75997 - protein, 126 aa, Zea mays
  Coding DNA Sequence Number=SeqID_32622
MAAELPLPRRDAMMSWGSGGAGSAGSCGGYGKAVAVGVRLKRPQGYVGEKLGKELLRVGSDEVGAWEKIYRTPGPSISGAMGSPHCSGARSSARVRDIIVDITPQLITPNQRSKSDKYHKNKQSSV

SEQ ID NO: 75998 - protein, 160 aa, Zea mays
  Coding DNA Sequence Number=SeqID_32623
  Subcellular localization annotation: CTP_CleavageSite=10; ConfidenceScore=5.12e-01
MQGSCLTAIAAKSTKDLPTLTTPLLPLPLSAIANYPSDSGVNKSSDSARQYTENQGASAKSTQDSSPTRGGRRVYYNKTEGLFRKKARAKRYRPIIAIGSIPTPRIKSKPPVNRKASVAAQIKINDPDYITTRSSSSRPLTDRWPGFHLAKPVRRRNPER

SEQ ID NO: 75999 - protein, 179 aa, Zea mays
  Coding DNA Sequence Number=SeqID_32624
MAAELPLPRRDAMMSWGKRWVYIVWGTRAGKVRSRESRQVRGRDGAIHDEGNSAAEEERGEEIAVTPKAPSAQVGARADTTCWRAPSSSLVTPEGARGGKRGWRRSDNSQWEKEVRAEEDVAPMILMGRFRRSWVHRFVRRVREGRCSGSSAEAPARIRLAKSSARSCYGWGAMKSGLL

SEQ ID NO: 76000 - protein, 202 aa, Zea mays
  Coding DNA Sequence Number=SeqID_32625
MSSEDFSNCLAYTHLKAGCKHLKVFTDLDFRVFADHVRRSIIEALEWSKKFLCDIWKKGGKENSIEESIKKEKAAEKALDIRQKLQGKKVEEVSTSQVIIDVKHTEAEARVAAIEAEEVADRAAKQATYDVVLKICEQIYDEVMNLGEDHQGLGKCKEVKEEKLGRSQQEKAKSDSTSSPPRIPRPVCTKMDVQDASELQLG

SEQ ID NO: 76001 - protein, 160 aa, Zea mays
  Coding DNA Sequence Number=SeqID_32626
MTHWIARSTHASGRPKSCEDDLGSPVKFYRVRALGKLHVPPAKLTKGQARLGSDWSGLATVAKAWAVMAGERELARAKEGRLASKTEVKDDKAEEPKVEKTVKMPKIMSPPAEANLSKVQKAPAATPKRRRMANVLDAVLETTKALSLASTMKIAKATKV

SEQ ID NO: 76002 - protein, 273 aa, Zea mays
  Coding DNA Sequence Number=SeqID_32627
MSAISKTVGGGDEQGKTEPRAIIYSHDKLVGEAALMDSEKRGTAGISRVARRRKGKGLMRQARVADDTTKAATLKDLTTFCGYHPLEMLMHPLGLFPAEKRDDPMLCNRVSHVKDVWAMHPNQVGRITVQCMSALYRLQALQSDAMTHLTGLAQIAKVTLDDREDFMVDLSSQLVEKDLQVEQMSNHIQALEQQVEILDNTIEVLENQLHDVQEELAEANTHQEMHHQEMNANEAGREEEEDPEEIEPASGPNTAYSGVPPTPVASVASTNQG

SEQ ID NO: 76003 - protein, 127 aa, Zea mays
  Coding DNA Sequence Number=SeqID_32628
TTDQAKDGGKKSFEVPSAREKVKETRNPKPMVKKKTCKVKVDRVKSYESNFDLKHAKLSKTMKKVNHGIVVTDINIVEGSICHSDKSEQTEEGVEIDSKPRVFKDWNFYSAATYSKGLSFHCDPAFE

SEQ ID NO: 76004 - protein, 477 aa, Zea mays
  Coding DNA Sequence Number=SeqID_32629
MSSSSSSAANMPTSEDTLSNVAATELYPGDTVEFSVSRISSVRVQDMQQLGYFGSRVGRIPGAEEVPEPEGELIVHQLTPNVVVALAKYVWAATSYGEDDEDEGALRSAARMSSGCDLVEEFIGYGRVRSPAFALDLQGRDPAAFVREAEDGAVRIVGRYVPRMEAQRIWDIRRSNARLNRVFELNRLLYGGYPGDDAVDRHGKRPMAVAEEDPSQEAAPATKKRKLAVEGRMSSPKLRESSARILEVSGGRWPKNVPIPRAAGEDFFTSRMARDLKVFPYGRNIAAVVSAVMEKDHQDAAQKRRVVVRIVDPMREANKALVSAKAAASGGSKPPLGGPAKGRVLPSPARRVADFGTNISVEDYFVGLGEGQLVVVPPPVATTSPTVVVGAKGVARDPWAAFCASGEILSAAAAKDVAGSMSQRLREASQQLPLQLKRHADAVREKSAAESKNHRLAEKVATMEAEKTDLRRHWRKR

SEQ ID NO: 76005 - protein, 305 aa, Zea mays
  Coding DNA Sequence Number=SeqID_32630
MGISTRFGRVESKARLRTASAWLRARQWPLRRAVRAWVLGHAAGNARIARLPGSGLAGPQPGSLVGCSRSAAALGTDAGLARSCARVKAENRLLRRRVGRRHNDSRRRRGRHRYVPSAAAGGLLHTGQISDEQEQGGQTSSERFEKAVRVFAERGKIKFKTRRPPSPFIHRARRFGKPANQQYGVNQRSCQKPPRNYFERGQRLRHLATSSAPDDLVELVPRRANVGAKAKTPPFAHGLRRPRCTKEEKTTGRLTLRLMRHRTKTCDEAVSSCDLVQHGGLRVIRPIDAGHSDTYTYPRTVPLRG

SEQ ID NO: 76006 - protein, 207 aa, Zea mays
  Coding DNA Sequence Number=SeqID_32631
MQYKESSSLISCEKQTIRIEFLTLQGLTALAYNAPLTPAAAVHNRGGRKGGGAYRWRDCSGEVVEDVGEVSGITTVCGSPSERGSQDAREDMGARNWSETHWIAQSTRGGGRPKSGEVDLGPPVKSGWVRGLGKLHGLLAELAEALARLEDGWSGLATMAEALAAMAGGIELAGAKERGLAGEEIWSQEIRSVSLPKPEANPRFCRV

SEQ ID NO: 76007 - protein, 25 aa, Zea mays
  Coding DNA Sequence Number=SeqID_32632
MGTNGHLDLDMGGCKFDKKSTSGTR

SEQ ID NO: 76008 - protein, 352 aa, Zea mays
  Coding DNA Sequence Number=SeqID_32633
  Homolog annotation: Hit_ID=A2XFR6; Match level="QueryCoverage=48%, HitCoverage=48%, E-value=4e-29, Identity=43%"; Hit description =Putative uncharacterized protein
MDPGTHMMVRTLQTTRVNTSYAPQPRQIPVYPVVVEEVPADLPPVRVENVINLEDSSEEQLPTPTPLAESLAFAAGSSTSASSAPAFQAPAPGGDDPDDSRDGDDEDDDDEDDFEGEHINEEADYAQQDNFMGFGPVVEHYTSMFETGHFPNLLQEVLHALGTYVHPLYETRQVSEPPRACYYITRIHFRVMDAVLDAGDRGFRTLSAHESLIPLSTYVASVSDAARRTLWSLSHTYRQQLQNTRFMHLSQRLRGESQTNIVPGEAGEDRLNTLAGVVAGLNTDLDSATLDLYRVHLELENAHARIAALEAQLQGLDPPEAQVPAMALSPPRKRLRYGEPGSVTRLLKSFES

SEQ ID NO: 76009 - protein, 174 aa, Zea mays
  Coding DNA Sequence Number=SeqID_32634
MPSRGGMQVRSPAFALDLHSRDPAAFVREAEDGAVQIVGRLPEARPKRLRGTAKAAAPGGSQPTLVAKSAAPGSTRVPEAVKAAAAGGTKSAPAGAAKARELPPPGKRVADFATDISVDDYLVGSGEGQLVVVPPEVATAAAAVVPRARGSALCDTPVSPRVSLKYQPKNHYFM

SEQ ID NO: 76010 - protein, 58 aa, Zea mays
  Coding DNA Sequence Number=SeqID_32635
MAGGIELAGAKERGLGPVRRYGARKSGLSPCPNPRQIQGFVVSRARVPMPSSGTRQRG

SEQ ID NO: 76011 - protein, 127 aa, Zea mays
  Coding DNA Sequence Number=SeqID_32636
MVGTSAVTARRQPGSVEHCTIQEMVDGVTWPTTLPSGWTVEWDVAPAGEEHKEYAGGEIPALTAVKDEAGAVSRRLKEALSQAADFADRVASEALMAVVSAKVERLRAQHADAVREKSAADSKTNQA

SEQ ID NO: 76012 - protein, 415 aa, Zea mays
  Coding DNA Sequence Number=SeqID_32637
MSSRSLMHRVFPPSEPPDGEHPQSFCLVVGGTQLRGSWYLSAIVRLQGFSSRSPAASPRRWSPKTVTTNPWVGRSKPGCGLCPSLSFKDVHHPCWGGERGEPGLYLPHGSAGHLLFQLLVVETILQLCGGGVLQPCQGGRTVAAQLGCNIPSSSSLSWQGRERGPAGALWSGPRSPRRLRTGLQLFGFNVRFVSLERGREREPSGGCVRPGTIAAAAEVADSPVGYLNRFTKRESPRAKVTSELNEPRPLFDEPKQEVAVSARTEAELARKEDLVGRSLAGSSTGGTDAGVELPRPRAGLMSPGDRWLRLRGGRPSRLLEPDSWRRPWRRWAGHGADVAIRSGDPPTASPSKARSDPVEGVDDAEGATAPFDCQGPSLQDRKVMSEKGFPPFSPRGRVGVCRGKADPSLMTKLCV

SEQ ID NO: 76013 - protein, 169 aa, Zea mays
  Coding DNA Sequence Number=SeqID_32638
  Subcellular localization annotation: CTP_CleavageSite=56; ConfidenceScore=5.37e-01
MQVACNCAKWAHPSDSNASSMKAQAHTSCNRRAGCYVRATAPPLAPLPRLLDCGTSAATRGNPAYDPTVPARHDGHYGQKWAGSNGGGRRAEAAVTSTGGTFGRRSGRRFAFAIMTASKKGPGKGDTPKGILLCEGNGPRAPLLIRCSKAGPSEGFNSRLRALGLRAHY

SEQ ID NO: 76014 - protein, 121 aa, Zea mays
  Coding DNA Sequence Number=SeqID_32639
  Subcellular localization annotation: CTP_CleavageSite=36; ConfidenceScore=5.31e-01
MAPLSIPAHTFGARGRVRHKAGLPKNLVGRRWKASRASKNRRHRGRIGEAGSFCVWGRASGIADRRTGQWARVASGGGADCGRGGADCGCGGAVGPDADARWEEAEPWCTDCERLRYCLIE

SEQ ID NO: 76015 - protein, 310 aa, Zea mays
  Coding DNA Sequence Number=SeqID_32640
  Gene Ontology: Mol. function=receptor activity; Cellular component =intracellular
  Homolog annotation: Hit_ID=A3AZK0; Match level="QueryCoverage=58%, HitCoverage=22%, E-value=1e-49, Identity=57%"; Hit description =Putative uncharacterized protein
  Subcellular localization annotation: CTP_CleavageSite=32; ConfidenceScore=5.31e-01
MLSGAISRLGARLRLHADPSPTSPRLRVLSTRRGKRSSPTLSPADCDDEGPLRCLFVLSHDPECPPWLLVVQPRLRPGSLLESKLAEALNLANSLEERRDGFYHSEFGTKGASPHLVWGQLRRIYNGPAPLADLAVGADHVAAYDASGKVVLWWRGGGRFPARADGAFRSLVSGDSFSYAVQANASAAVRCWGPQGSAVQEGLANASAAPYLAAGGTRACAVLASGAALCSGSDASADALPRDLFGYGLAVGDSHACALRRPGHTAVCWTLGGPTTTLYEPTMGISFGFLVADGNFTCSNSRKRRIQTCP

SEQ ID NO: 76016 - protein, 87 aa, Zea mays
  Coding DNA Sequence Number=SeqID_32641
  Gene Ontology: Mol. function=structural molecule activity; Cellular component=chloroplast; Biological process=response to abscisic acid stimulus
  Homolog annotation: Hit_ID=A7R260; Match level="QueryCoverage=100%, HitCoverage=28%, E-value=3e-19, Identity=54%"; Hit description =Chromosome undetermined scaffold_404, whole genome shotgun sequence
  Subcellular localization annotation: CTP_CleavageSite=33; ConfidenceScore=5.03e-01
MKVEEISQTIDSKNFTVQNCIKFSGPLATTSVSTNAKFEIRSPKRVQVHVQSDPAGCLVITGDPEQPDNPWGITPFKKVVVNLLKVA

SEQ ID NO: 76017 - protein, 166 aa, Zea mays
  Coding DNA Sequence Number=SeqID_32642
MEEAVESARRLRTPSTPTTSSISATLGGIFLATRGVSGGVLVGDVVHLLLIAAVSTGVWLRSPRPRAAGLWSIFGFPLRLNLALVELFGFGIFSKSCCLQSESLAKASVSGRYPWKLSRNLSRRLLQESMDSGGNLVNQVRAGPSRAMMKDFAIVASSPPEDATAT

SEQ ID NO: 76018 - protein, 47 aa, Zea mays
  Coding DNA Sequence Number=SeqID_32643
MEVRTVPHMADTDNVMVYAAASPALAVGRFSPIAGVAEGPKTISQAD

SEQ ID NO: 76019 - protein, 457 aa, Zea mays
  Coding DNA Sequence Number=SeqID_32644
  Gene Ontology: Mol. function=binding; Cellular component=cellular _component; Biological process=response to unfolded protein
  Homolog annotation: Hit_ID=Q6H660; Match level="QueryCoverage=100%, HitCoverage=100%, E-value=1e-178, Identity=55%"; Hit description =Putative stress-induced protein sti1
  Pfam annotation: Domain name=TPR_1; Domain location=112-145; Score =28.8; E_value=1.9e-05; Accession=PF00515.19; Description =Tetratricopeptide repeat
  Pfam annotation: Domain name=TPR_1; Domain location=153-190; Score =12.5; E_value=0.17; Accession=PF00515.19; Description=Tetratricopepti de repeat
  Pfam annotation: Domain name=TPR_1; Domain location=217-250; Score =33.5; E_value=7.8e-07; Accession=PF00515.19; Description =Tetratricopeptide repeat
  Pfam annotation: Domain name=TPR_1; Domain location=302-335; Score =31.7; E_value=2.7e-06; Accession=PF00515.19; Description =Tetratricopeptide repeat
  Pfam annotation: Domain name=TPR_1; Domain location=336-369; Score =33.5; E_value=7.8e-07; Accession=PF00515.19; Description =Tetratricopeptide repeat
  Pfam annotation: Domain name=TPR_1; Domain location=78-111; Score =30.3; E_value=7e-06; Accession=PF00515.19; Description =Tetratricopeptide repeat
  Pfam annotation: Domain name=TPR_2; Domain location=112-145; Score =20.7; E_value=0.0053; Accession=PF07719.8; Description =Tetratricopeptide repeat
  Pfam annotation: Domain name=TPR_2; Domain location=153-190; Score =4.2; E_value=9; Accession=PF07719.8; Description=Tetratricopeptide repeat
  Pfam annotation: Domain name=TPR_2; Domain location=217-250; Score =27.3; E_value=5.5e-05; Accession=PF07719.8; Description =Tetratricopeptide repeat
  Pfam annotation: Domain name=TPR_2; Domain location=302-335; Score =22.4; E_value=0.0017; Accession=PF07719.8; Description =Tetratricopeptide repeat
  Pfam annotation: Domain name=TPR_2; Domain location=336-369; Score =22.5; E_value=0.0016; Accession=PF07719.8; Description =Tetratricopeptide repeat
  Pfam annotation: Domain name=TPR_2; Domain location=78-111; Score =25.7; E_value=0.00018; Accession=PF07719.8; Description =Tetratricopeptide repeat
  Pfam module annotation: Pfam domain module=TPR_1::TPR_1::TPR_1::TPR _1::TPR_1::TPR_1::TPR_2::TPR_2::TPR_2::TPR_2::TPR_2::TPR_2; Domain location=112-145::153-190::217-250::302-335::336-369::78-111::112 -145::153-190::...
  Pfam module annotation: Domain location=217-250::302-335::336-369::78- 111
MYLSDPRMMQVLSLMLNVKIQRPEASEPSQSTPPPPPPQQQQTSPLQTKAREVEPEPEPEPMDFTDEEKERKERKAAAQKEKELGNTAYKKKDFEAAIQHYTKALEHDDEDISYLTNRAAVYIEMGKYDECIKDCDKAVERGRELRADFKMISRALTRKGTALVKLAKTSKDFDIAIETYQKALTEHRNPDTLKKLNEAERAKKELEQQEYYDPKLADEEREKGNEFFKEQKYPEAIKHYTEALKRNPKDPREVVAQASANVPRKTELPLSAAAPVENPAPPGLRSPSGGGTNMPRVVLAGCEVYSNRAACYTKLGAMPEGLKDAEKCLELDPTFTKGYTRKGAIQFFMKEYDKAMETYQAGLKHDPKNQELLDGVRRCIEQINKANRGEISQDELQERQNKAMQDPEIQNILTDPIMRQVLNDFQENPRAAQEHLKNPGVMQKIQKLVSAGIVQMR

SEQ ID NO: 76020 - protein, 311 aa, Zea mays
  Coding DNA Sequence Number=SeqID_32645
MGCGLQRARAEDAAVLGSIRELRAVLCDPQLPCRCRCHPPTRAAYCFLVVNVGPAAPAVPGRTPAKGQGHELFRRSSVNACRALERVALDSPFLEARRESRSTTGSAARTLLTSPCYRKGLRAISVRSHAGHNHYPSPGPGSGEDAIPPETGVEAEPRGRARRRPPPEAGAYCRSTFDHANRRACPAADRPVAIALNWHCWVMRRARMQCGSQPPCRGGRTLEVVSGDFARDTKGVQARSVALLLLSLEERGLVEIGIFQLSFGFKDFRRATRLLSLTNGQFGGEKRAGLRPPPRPQLQGSSSSLLRQRES

SEQ ID NO: 76021 - protein, 272 aa, Zea mays
  Coding DNA Sequence Number=SeqID_32646
  Gene Ontology: Mol. function=metal ion binding; Cellular component =integral to membrane; Biological process=ubiquitin cycle
  Homolog annotation: Hit_ID=A2X7S6; Match level="QueryCoverage=50%, HitCoverage=73%, E-value=2e-36, Identity=61%"; Hit description =Putative uncharacterized protein
  Pfam annotation: Domain name=zf-C3HC4; Domain location=221-263; Score= 29.6; E_value=1.1e-05; Accession=PF00097.16; Description=Zinc finger, C3HC4 type (RING finger)
MTGKLRTTSLSPNVNMKIEAFCSAVHGSVVRTQNVGGERRNNSSLQIEEKHAQERQAGSRFLSPPVANAVLPWAHAHGLESLPVLGSLAERSRQPWRAGPTTPPRQRRRQQQWSPPRRLPPRPPPPASAGAWGPYASSRAFFSNVATILIILACVSLLAFTLHAAARFLLRCLARRRAAREEAQAPGQQPKLPSGAAAASAAAGSERAGATGAGVWAEAECAICLSELLEGGERVRVLPACGHGFHGACVEGWLAARASCPTCRAPSRAGEP

SEQ ID NO: 76022 - protein, 240 aa, Zea mays
  Coding DNA Sequence Number=SeqID_32647
  Gene Ontology: Mol. function=transition metal ion binding; Cellular component=integral to membrane; Biological process=nitrogen fixation
  Homolog annotation: Hit_ID=Q6H658; Match level="QueryCoverage=71%, HitCoverage=73%, E-value=1e-38, Identity=54%"; Hit description =Nodulin-21-like
  Pfam annotation: Domain name=DUF125; Domain location=50-221; Score =148.7; E_value=1.7e-41; Accession=PF01988.10; Description=Integral membrane protein DUF125
MAPNLSPDGPKFPSKPRRGGEADDVEAAAPAAAVHRPPVGRVDYLARAQWLRAAVLGANDGLVSVASLMIGVGAVNDGAREMLVSGLAGLVAGACSMAIGEFVSVYAQYDIQVAHSERGARGGSDDDSSSSDGERLPSPTQAAAASALAFAVGAAVPLLSGGFVRPWAARVAAVCAASSLGLAGFGAAGAYLGGASVVRSGLRVLLGGWLAMAAHVHDPQLFWLGVQDARRVRITHVRMV

SEQ ID NO: 76023 - protein, 406 aa, Zea mays
  Coding DNA Sequence Number=SeqID_32648
  Homolog annotation: Hit_ID=A2X7R2; Match level="QueryCoverage=89%, HitCoverage=67%, E-value=1e-109, Identity=59%"; Hit description =Putative uncharacterized protein
MASLSDSAGAGSGGGGGAELMVPQFLLKVLHAILAARSPRPHAPPPPPPAASAFRRRDRWFHLPLHLPPAAEHLPEPSPAEPLVVDVYLAPSGGGPEEVLERWTVACEPWPSPAAAGEGLAVNRAYKRCITLLRSLYAMLRFLPAYRAFRALCASGQVYNYEMGHRVGSFSTPFSRAEEATMRTERLAPVETQLGRLVVSVQYLPSLAAFSFNATSLASAAIITDYVGSPAAEPMRAFPASLTEAAGSPSPQPSRRPNSWASPAPWPHTMRQPAKFSPPPAHYASPTPSPPMFGYLHSRFSGETAPMSIPQAGGGRGPMHQHHQNLSEPSRAFMFPPPSPKYLRGEAGRQESPTETNRSFKRADGIRMGDLYANLPSGYKMKTQGYAEVSYLNYFVLLSKTFYQFI

SEQ ID NO: 76024 - protein, 147 aa, Zea mays
  Coding DNA Sequence Number=SeqID_32649
  Gene Ontology: Mol. function=phosphotransferase activity, phosphate group as acceptor; Cellular component=chloroplast; Biological process=nucleobase, nucleoside, nucleotide and nucleic acid metabolic process
  Homolog annotation: Hit_ID=Q10S93; Match level="QueryCoverage=87%, HitCoverage=44%, E-value=1e-43, Identity=62%"; Hit description =Adenylate kinase, chloroplast, putative, expressed
  Pfam annotation: Domain name=ADK; Domain location=3-145; Score=7.1; E_ value=1.7e-08; Accession=PF00406.13; Description=Adenylate kinase
MSLIPLNLQQPLLEEDAWKREKKRGELGFILDGFPRTMRQAEILEGVTNIDLVINLKLREEVVVARCLGRRMCSQCGGNFNVASIDIEGENGGAPMHLPPLLPPPQCESKLITRADDTEEVVKNRLRVYHDLTEPVEGFYKARQKLL

SEQ ID NO: 76025 - protein, 238 aa, Zea mays
  Coding DNA Sequence Number=SeqID_32650
  Gene Ontology: Mol. function=phosphotransferase activity, phosphate group as acceptor; Cellular component=chloroplast; Biological process=nucleobase, nucleoside, nucleotide and nucleic acid metabolic process
  Homolog annotation: Hit_ID=Q10S93; Match level="QueryCoverage=99%, HitCoverage=83%, E-value=2e-69, Identity=57%"; Hit description =Adenylate kinase, chloroplast, putative, expressed
  Pfam annotation: Domain name=ADK; Domain location=55-238; Score =139.3; E_value=1.1e-38; Accession=PF00406.13; Description=Adenylate kinase
  Subcellular localization annotation: CTP_CleavageSite=34; ConfidenceScore=5.07e-01
MAGVSRAIRACAATSQRTLVAASAVALPKEARVKAATVGRRGRGPEDGRRVQWAFLGCPGVGKGTYASRLSQLLGVPHIATGDLVRDALASPGPFSKKLAEIVNQGKLVSDEIIINLLSRRLEEGEEKGELGFILDGFPRTMRQAEILEGVTNIDLVINLKLREEALVARCLGRRMCSQCGENFNVASIDIEGENGGAPMYLPPLLPPPQCESKLITRADDTEEVVKNRLRVYHDLIS

SEQ ID NO: 76026 - protein, 327 aa, Zea mays
  Coding DNA Sequence Number=SeqID_32651
  Subcellular localization annotation: CTP_CleavageSite=18; ConfidenceScore=5.29e-01
MQAACNRAKWTRFSDSQRASMEAQAHVSRNQRAGCCMQATAPPLAPPSRLFGCGTNAATRGDPARPSDASLARRSMRPKGPGKGDTPKGILPCEGTGLRAPPTDQRFEGWPSEGFNSRLRSCGPYTHYWSEVRRPAPRRVPRPPQATRAPRPLLIRGSKAGPRRVHSRLRRRARDDQGYVRYITKARAALPRARTRAKPRKTANSAPPDPGLGLGLSPGRRRTPLRPTQGLDSGSAPEDDELRFARPQGSDSALASAERPPPRPTQGLGLGLGNGRQTRPQLRRSPHVARPRARARHVNRERHHHPTPSRLGPQRTRPVSHLACSAR

SEQ ID NO: 76027 - protein, 301 aa, Zea mays
  Coding DNA Sequence Number=SeqID_32652
  Gene Ontology: Mol. function=phosphotransferase activity, phosphate group as acceptor; Cellular component=chloroplast; Biological process=nucleobase, nucleoside, nucleotide and nucleic acid metabolic process
  Homolog annotation: Hit_ID=Q10S93; Match level="QueryCoverage=100%, HitCoverage=100%, E-value=5e-85, Identity=54%"; Hit description =Adenylate kinase, chloroplast, putative, expressed
  Pfam annotation: Domain name=ADK; Domain location=55-267; Score =152.8; E_value=9.2e-43; Accession=PF00406.13; Description=Adenylate kinase
MAGISRAIRACAATSQRTLAAASAVTLPKEAGVKPATVGRRGRGPEDGRRVQWAFLGCPGVGKGTYASRLSQLLGVPHIATGDLVRDALASPGPFSKKLAEIVNQGKLVSDEIIINLLSRRLEEGEEKGELGFILDGFPRTMRQAEILEGVTNIDLVINLKLREEALVARCLGRRMCSQCGENFNVASIDIEGENGGAPMYLPPLLPPPQCESKLITRADDTEEVVKNRLRVYHDLMFGVVPSYILPSGLSSLQTEPVEGFYKARQKLLEFNIPGGIPESWRKLLEALNIEDSDNMRSAVA

SEQ ID NO: 76028 - protein, 477 aa, Zea mays
  Coding DNA Sequence Number=SeqID_32653
  Gene Ontology: Mol. function=structural constituent of ribosome; Cellular component=intracellular; Biological process=translation
  Homolog annotation: Hit_ID=A2XYT6; Match level="QueryCoverage=80%, HitCoverage=89%, E-value=1e-144, Identity=62%"; Hit description =Putative uncharacterized protein
  Pfam annotation: Domain name=UIM; Domain location=297-314; Score =20.5; E_value=0.0063; Accession=PF02809.11; Description=Ubiquitin interaction motif
MAGDPPTAAEKETLVSSFLEIAAGQTPETATQFLLMTSWHLEEALQLFYIDGESALTPAHPVAPPPTSAAASALAAAAGAEEAMRFAPPPAAALGDAMLHGFGVGEDDDVRAPLPVKRETLYGEGIVSVMRPNASAAFRNFEQEARQSAVWDSDQNATSSSGDNLASLYRPPFSLMFNGPFDKAKLEASSLDKWLLINLQSTAEFSSHMVYYDTSEGRKVCTYYHLVSMPAILLIDPVTGQKMHAWNGMVHPDRLLEDLLPYLDKGPKEHHAAQPQKRPRKVDPEASTGKQGKIAVEDEDEELARAVAASLEESKEVIEASDASDDMVEAEPEEENEPTLNTKPDYPPLPEEPTGSRDLLCRVAIRLPNNRRIQRNFLHTDPIKVTPPSHIKFSFRGPIFLAPILTGALSVIAALVVILRSSGRGRGEEGFPLRPGNSWGIPETGVGKRPNIQGSRAGQLDDQPLVGLSRPLSQPAL

SEQ ID NO: 76029 - protein, 156 aa, Zea mays
  Coding DNA Sequence Number=SeqID_32654
  Gene Ontology: Mol. function=phosphotransferase activity, phosphate group as acceptor; Cellular component=chloroplast; Biological process=nucleobase, nucleoside, nucleotide and nucleic acid metabolic process
  Homolog annotation: Hit_ID=A3ADS3; Match level="QueryCoverage=100%, HitCoverage=50%, E-value=1e-46, Identity=57%"; Hit description =Putative uncharacterized protein
EILEGVTNIDLVINLKLREEVVVARCLGRRMCSQCGGNFNVASIDIEGENGGAPMHLPPLLPPPQCESKLITRADDTEEVVKNRLRVYHDLMFGVVPSYILPSGLSSLQTEPVEGFYRARQKLLEFNIPGGIPESWRKLLEALNIEDSDNMRSAAA

SEQ ID NO: 76030 - protein, 295 aa, Zea mays
  Coding DNA Sequence Number=SeqID_32655
  Gene Ontology: Mol. function=peptidase activity; Cellular component =cellular_component; Biological process=electron transport
  Homolog annotation: Hit_ID=A2XYT2; Match level="QueryCoverage=81%, HitCoverage=61%, E-value=1e-106, Identity=75%"; Hit description =Putative uncharacterized protein
  Pfam annotation: Domain name=OTU; Domain location=50-163; Score =145.0; E_value=2.1e-40; Accession=PF02338.10; Description=OTU-like cysteine protease
  Pfam annotation: Domain name=UBA; Domain location=213-251; Score =18.8; E_value=0.02; Accession=PF00627.22; Description=UBATS-N domain
  Pfam module annotation: Pfam domain module=OTU::UBA; Domain location =50-163::213-251
MVQKKKKAAAAPKLRKLPKRDADKKLGKKGDMAEFRAQLDSLGLKIVQVTADGNCFFRAMGDQLEGDEEEHMKYRDMVVDYIVKHREEFEPFIEDEVPFEEYCNSMLKDGTWAGHMELQAASLLTRRNICIHMLNSPRWYINNFSGREATNMVHLSYHHGEHYNSVRLREDPCQGPAMPVVIKLQTDSNISNTNNNAQTKAKEVKKSSHRSTYDDTSVKLVMAGTGCSDIAIAEHVLGEMDGDVDAAIEYLIAERLAVSTDDAEVDLYINHAFNVAFLLKYGCWSKKIPWLYRVW

SEQ ID NO: 76031 - protein, 102 aa, Zea mays
  Coding DNA Sequence Number=SeqID_32656
MERSSLAMLRWSPELLRWPKRGGGGDDSVRLGPDGERCGPGGVCGGTQGDGAVGEEKRQRRCSVLGVAGEAPRWMWPQAGMPCGPAMVRGYARVFLLCGGMA

SEQ ID NO: 76032 - protein, 204 aa, Zea mays
  Coding DNA Sequence Number=SeqID_32657
  Gene Ontology: Mol. function=phosphotransferase activity, phosphate group as acceptor; Cellular component=chloroplast; Biological process=nucleobase, nucleoside, nucleotide and nucleic acid metabolic process
  Homolog annotation: Hit_ID=A3AYH7; Match level="QueryCoverage=41%, HitCoverage=36%, E-value=2e-15, Identity=55%"; Hit description =Putative uncharacterized protein
  Subcellular localization annotation: CTP_CleavageSite=34; ConfidenceScore=5.07e-01
MAGVSRAIRACAATSQRTLVAASAVALPKEARVKAATVGRRGRGPEDGRRVQWAFLGCPGVGKGTYASRLSQLLGVPHIATGDLDTVPPPLWSLRARDTARTLGHPTAEQENPSVPTDHCWPTWHPGLWPHPSRRLARHTQHAAPPLPLLLPHRTIALSTTAHAAGAASLPVRAQPNTVVASTSAFGPPQEFRAPLGFEIKSGQ

SEQ ID NO: 76033 - protein, 179 aa, Zea mays
  Coding DNA Sequence Number=SeqID_32658
  Gene Ontology: Mol. function=phosphatidate cytidylyltransferase activity; Cellular component=integral to membrane; Biological process=phospholipid biosynthetic process
  Homolog annotation: Hit_ID=Q2N2K4; Match level="QueryCoverage=63%, HitCoverage=27%, E-value=6e-20, Identity=55%"; Hit description =Probable phytol kinase, chloroplast precursor
  Subcellular localization annotation: CTP_CleavageSite=49; ConfidenceScore=5.72e-01
MAAAAAWTGAASPNSLLLSRSPPHAAALAPSPGSSMRRRLLLGVGTPAVAALAAAAPPAVLQDGAVTVLITAGAYSLVRVFDELTERRLIEKAELEQEGCARAIRRPVHVILAPVQVFPVPSMHRGSQIHNVSHCKATTKACSARSNSTEARYFAAVVPFLNSMRVLIYGLRLYTDQPL

SEQ ID NO: 76034 - protein, 39 aa, Zea mays
  Coding DNA Sequence Number=SeqID_32659
MASCRRRLGAPRVMVGAMRKCKGERLQVVEIPRKWDIVK

SEQ ID NO: 76035 - protein, 52 aa, Zea mays
  Coding DNA Sequence Number=SeqID_32660
MKAAVDLRLHCVSPPFKRPRALSQESEQAPEGAPDYPVAPLVRAPTVEPEST

SEQ ID NO: 76036 - protein, 149 aa, Zea mays
  Coding DNA Sequence Number=SeqID_32661
  Subcellular localization annotation: CTP_CleavageSite=69; ConfidenceScore=5.10e-01
MSKPDKTFPLLILPVLPSLHNPGVGPGQSFCSRLNQLSQHLRPSLNQGVPDHPTPKEKRLKKEKEKDLRSGGGREGADRGEVAELCDGSRRRWASGGDWGSRVVSQVRGGVAKLISLSNFSLNHQRERERRGKGLPEGKKTATLARLLG

SEQ ID NO: 76037 - protein, 179 aa, Zea mays
  Coding DNA Sequence Number=SeqID_32662
  Gene Ontology: Mol. function=phosphotransferase activity, phosphate group as acceptor; Cellular component=chloroplast; Biological process=nucleobase, nucleoside, nucleotide and nucleic acid metabolic process
  Homolog annotation: Hit_ID=A3AYH7; Match level="QueryCoverage=48%, HitCoverage=37%, E-value=9e-16, Identity=55%"; Hit description =Putative uncharacterized protein
MAGISRAIRACAATSQRTLAAASAVTLPKEAGVKPATVGRRGRGPEDGRRVQWAFLGCPGVGKGTYASRLSQLLGVPHIATGDLLRTGSIDSISGLPVVILAGCDWKKAVAGAAHVQQRFLVLFFCALTPVWCCSLIFVHRGLVFGLPTARCSSSRAGAEDVSLGSGSGSSISVNLPPC

SEQ ID NO: 76038 - protein, 123 aa, Zea mays
  Coding DNA Sequence Number=SeqID_32663
  Gene Ontology: Mol. function=DNA binding
  Homolog annotation: Hit_ID=Q60DC4; Match level="QueryCoverage=84%, HitCoverage=60%, E-value=2e-12, Identity=32%"; Hit description=BED zinc finger containing protein
MAGQTGGSEAVVPSTEPINIDPDIAVADAEEADTPTSSRVRNRASTSDVWNDFDKIYKVVDGVRVRSQAKCKVLLDWEYNADVARSEMCRLICRLDLPICLAESSAFKEYIKKAESRLEGEGE

SEQ ID NO: 76039 - protein, 105 aa, Zea mays
  Coding DNA Sequence Number=SeqID_32664
MVLGQPIWNDMEEFLPARAGSVLEDSLEKEQKAKDQAAVSKVEEVGTTAENADATGVGGIFSQLLALESTVEFNGAGSSEAVKQILKELAECFCPVASLESSSVA

SEQ ID NO: 76040 - protein, 217 aa, Zea mays
  Coding DNA Sequence Number=SeqID_32665
  Homolog annotation: Hit_ID=Q75HV8; Match level="QueryCoverage=30%, HitCoverage=11%, E-value=8e-19, Identity=73%"; Hit description =Putative uncharacterized protein OSJNBb0092G21.7
MEIPRVVPSRGQRTVAPRFAAREFRLTVVLLFRSWEGLKFSSSRFKYRAELRRIRLLFRPDNNAALLALETCRAADFSRDACRDGGRGSPRTTAARTSTQRGGTSARSTSATATEASAPAASGDAAGQSHPFPWQDAAISEPYYFLHLLAFFSYFAARSTTLSADDGGELHDHLLRREIQAVLVFLLLFESSYRRRPLPPLTPAMGCRPVAAMGRRP

SEQ ID NO: 76041 - protein, 303 aa, Zea mays
  Coding DNA Sequence Number=SeqID_32666
MGGIEEEEVNANNADDGWDVWPVQQVQPPEPVPNDNNVEDQFSYQLSGLEDLPSDMNLWVSSMTSLSHKRSTSLRWKPQNLWMQFLLCQPFPQRGEENMQVEENINVGFMQHLEQPNHDPAYEDYLARKRLSSWADLFPTNSELVPVPKVWDAFFMGLLLRPDSFEWAKKFLLSGAISAFVEPSMETVSIKIPSKCLPPPSQDSHVEPQSPLPAKPVKRKKQSILVDTEVRRSARLREKARGFKRCSGIGKKCSCCARISPPSIYHKIIKKLGAEFCKVDPSKLCPEQLQDFQHCHSKAKCFL

SEQ ID NO: 76042 - protein, 234 aa, Zea mays
  Coding DNA Sequence Number=SeqID_32667
MMAHSGNGTARQTVVMGWLRAGARGQGRKAPNLGGGIGRFHLLVRLVACGLYYKSHVKVVHGSEEGFRREALGGASCSSHGSPKEKHCLHRPNGSKEHTKDTSLGQSNVHVLAISYEDNEEIESAKPQPNAKSIKEIKTIALDSFVLDKKVTIENELLTNEETELIDFLHSNKDVFKRLSKVLEGINQNIIKHKLNIDQKKKIGKAKAKGKELGAGLSGDGGAALRLGCPRCPV

SEQ ID NO: 76043 - protein, 158 aa, Zea mays
  Coding DNA Sequence Number=SeqID_32668
MEARAITPCFLRSMSWKDGSLGPSLVTPLVDSTSIVARRTRIAGRLLAWCADWRITSGVQSGVAGGLNVNYYPPLDWQYWKCDYLTKLRAERVERLHEDYGSPASARTQHPYRSPPQGYHAYDDVSIAESKAHWAMQCLKKMAQQQSAPNALARLDAP

SEQ ID NO: 76044 - protein, 69 aa, Zea mays
  Coding DNA Sequence Number=SeqID_32669
MEVMSGRLTSRTPTSALGASWRYGQTEIVRVVISLNNKIDAIQMPTRGRSEPKAGRGGDSSEVEVESEP

SEQ ID NO: 76045 - protein, 96 aa, Zea mays
  Coding DNA Sequence Number=SeqID_32670
MYDTVTKDKRMVVHAGACRRRVQWHAEDAGCGGAVQGQDREEMKKDASIVPMLVAAMMKGSRGVADRGAPAVGARRAAAGTASSGEARGVSTTMGQ

SEQ ID NO: 76046 - protein, 169 aa, Zea mays
  Coding DNA Sequence Number=SeqID_32671
MARLCVEASTTTTVKDRGVDGKNAKRVAMVDMKPPMHVIRPSVYLYLSPLTDQVGWSAIALSPRRVRRHAARCEEEGLVASAQREEGAHFYQEERTAKHFMATLIFLSREEKFAKPAIIRSGFRLGMAVGKVPSGHTKPYPYPLGKIYPYPYPLPIMGTKLCHTHTHHG

SEQ ID NO: 76047 - protein, 48 aa, Zea mays
  Coding DNA Sequence Number=SeqID_32672
MAIIALLISNVADYLIEKQEVGLIDRKENLVLGERICMQPGVVWSKVC

SEQ ID NO: 76048 - protein, 132 aa, Zea mays
  Coding DNA Sequence Number=SeqID_32673
MDLHPTKSCFFQLNKYRVPCMSRATFEAILEELSAAIAGKDTMLCAGVYIYGAADADDHVMEAHGGGGRARMSVQQDYEYSSFNPVAYDIANISFSTLLICLFYVTDVDEQKCFVKPYLNISGNYKLIVDIL

SEQ ID NO: 76049 - protein, 507 aa, Zea mays
  Coding DNA Sequence Number=SeqID_32674
  Homolog annotation: Hit_ID=Q1EPC6; Match level="QueryCoverage=17%, HitCoverage=5%, E-value=3e-07, Identity=38%"; Hit description=DNA helicase homolog, putative
  Subcellular localization annotation: CTP_CleavageSite=83; ConfidenceScore=5.49e-01
MAPSSRLPLAMAPSNRSHSQLAATPTTSTPSADLAQLRATTLPACSRAHDQHAKRGSRPTPSNQMPPPCPRPHNRATPPQPLMAAWRPTADPTPSGQPRIPLGGDLADHVGRGSRPLLNSRRSRALPPRSAGSLTCSCRGLQGKGTGSFGNSASAGTRRTRLHPLRPPQLPPPQEHLLLLRLHRRPHPQVLFHWVTEGQASTSIEANQPISFDKGTLLVMDQIGYNAGRTPFTDISNTIITAFCKWVIYEEDVNTDQACEVVSFPDDYSTIDFTNLSTQDIAGGDEQVNLDAYDDNDWLHRNETFQANNIVTSEDLLTPAYYEKGRLLLVERYKNMTPVERESRRVRLRLYNKTPRRKDANKECNRKRRALQGDTLNQESITMEDPVYTPEVVRPTTYGIEPYGSSVTTCDWVIPEFIVTPFLPTSTQTKDVGSLDMSTEPLRRRHHVLSGTRPATLGHRNQQFEDDIGRNVATMTEDTICDAMEGDDWTQPHPTAEIHTNGNYNQF

SEQ ID NO: 76050 - protein, 58 aa, Zea mays
  Coding DNA Sequence Number=SeqID_32675
  Subcellular localization annotation: CTP_CleavageSite=26; ConfidenceScore=5.15e-01
MDEQSANQEQSQGAVSVWGTGLSPVVHRTVSGAPGCLGRTGRSREFADGVRLKFTGLS

SEQ ID NO: 76051 - protein, 270 aa, Zea mays
  Coding DNA Sequence Number=SeqID_32676
  Gene Ontology: Mol. function=helicase activity; Biological process =viral genome replication
  Homolog annotation: Hit_ID=Q1EPC6; Match level="QueryCoverage=100%, HitCoverage=17%, E-value=1e-131, Identity=81%"; Hit description=DNA helicase homolog, putative
MALVRKFGKPDIFLTMTCNPNKDEIRTELLPGQTPQDRPDLVVRVFHAKLQELKHRLTKHDILGKVWAYVYVMEFQKRALPHAHFLLIMQRKYKLACPEQYDLLISAEIPDKKYPELRKMVIKHMMHGSCGSLNHNCPCTKGHASCKNHYPRPFCDATLQGKDSYPVYRRRDDGRKEKVRGFELDNRWVVPYNPYLLRLFNCHINVEACGSIKAVKYLFKYIYKGHDRVSVVMRDASKANDDVDEIKQYRDARWVTPPKALWRIYGFELS

SEQ ID NO: 76052 - protein, 149 aa, Zea mays
  Coding DNA Sequence Number=SeqID_32677
MGKNNKRKREPTPPSEDFGDSEYSEEEFSSESEGSPAPIPLRESSDDSDDSQGLAAEVWTYIRAVERSGLAGSDESEYSSDEEDSSEEGSGGDGDDDDGGDDDDEGGGGDDGDGGGRGSSGGGKGDDGGSSRGGSGGGGSSKGSNKASG

SEQ ID NO: 76053 - protein, 49 aa, Zea mays
  Coding DNA Sequence Number=SeqID_32678
MYGLQVVMRRMVMIMPMVIVAFGAIYAQVKKKASRRISRSSRDFDEFED

SEQ ID NO: 76054 - protein, 38 aa, Zea mays
  Coding DNA Sequence Number=SeqID_32679
MGIDKGNTDNSYPYLGKANLIGEIISCFEKKGFNLKIL

SEQ ID NO: 76055 - protein, 203 aa, Zea mays
  Coding DNA Sequence Number=SeqID_32680
MSQVAVGAKSAARFNQPSVYYSHESLTLRITPGLILYLTRDPWLAGTVTGAKITAARLTGGSRALVGWSVTSGRSRRSRRCAGRRRRWLELLWPRAQAAEVVGGTCSSQTTAVGFNQGARGAPLGDVEAMRARNREMVQWITRSTCSGGVTNFGEHDLTVPVGLVLGSSLGKFHGLPRKLSAGSDRAEVGGNGLATAGALGRL

SEQ ID NO: 76056 - protein, 61 aa, Zea mays
  Coding DNA Sequence Number=SeqID_32681
MTLRTSPTFSTTSPEQSRLREYVLIPEQGAVHEEDQKQAPETAIADLPAAPAIEDKPRFYA

SEQ ID NO: 76057 - protein, 139 aa, Zea mays
  Coding DNA Sequence Number=SeqID_32682
MAHRIAWSTRGGGRLKSGEGESASPVRQCLGSSLEKLHDFTGKRSRGWGEAGGPTEGAGHNDRARAVMASGGACFPRRIPAISGSGGALGVRVQTAKASRGIYRRGRGADARGARCRGQSALGRHDTVSSTWLFASARV

SEQ ID NO: 76058 - protein, 106 aa, Zea mays
  Coding DNA Sequence Number=SeqID_32683
  Gene Ontology: Mol. function=protein binding; Biological process =regulation of transcription
  Homolog annotation: Hit_ID=A2ZLX0; Match level="QueryCoverage=100%, HitCoverage=15%, E-value=8e-29, Identity=53%"; Hit description =Putative uncharacterized protein
MDTIMPQENQNRLLAERWLAMCVMNIVVCEGVDWVLRPHNYKQWQVRSKRAGLRQLPLDPNIVQMFKDKVKEEYHKYIVINEDHEWLLTGWKGQVLSAFSTWTADD

SEQ ID NO: 76059 - protein, 115 aa, Zea mays
  Coding DNA Sequence Number=SeqID_32684
  Homolog annotation: Hit_ID=A2ZLX0; Match level="QueryCoverage=56%, HitCoverage=8%, E-value=2e-14, Identity=63%"; Hit description =Putative uncharacterized protein
MGQLCTGSSYHYRSAYKTRRKNMYMHSVGNSRMYLGKVSPTVKEQLTYLAKLEAVCAEDLDIDPDEVLVVISHFCFKNLMDESVTVDRPNPRDTVLKNIANMRPKVFIHDILNGS

SEQ ID NO: 76060 - protein, 174 aa, Zea mays
  Coding DNA Sequence Number=SeqID_32685
  Gene Ontology: Mol. function=helicase activity; Biological process =protein amino acid phosphorylation
  Homolog annotation: Hit_ID=Q1EPC6; Match level="QueryCoverage=70%, HitCoverage=7%, E-value=7e-47, Identity=69%"; Hit description=DNA helicase homolog, putative
  Pfam annotation: Domain name=DUF889; Domain location=60-174; Score= -61.5; E_value=2.6e-07; Accession=PF05970.5; Description=Eukaryotic protein of unknown function (DUF889)
MALYVASQSRVEPAELLRKSSLIIWDEASMTKRQAVEALDNSMRDIIGRPGLPFGGKTIVFGGDFRQVLSVIRKGSRAQVVASLLRMSYLWESMSHLKLVSNMRAKNDPWFAKYLLRVGGGTEVTNSDGDIRLPDEGLMGIRMANKAINEGEEVADMSSALAIEGECYEQLLYT

SEQ ID NO: 76061 - protein, 80 aa, Zea mays
  Coding DNA Sequence Number=SeqID_32686
  Homolog annotation: Hit_ID=Q1EPC6; Match level="QueryCoverage=67%, HitCoverage=3%, E-value=8e-07, Identity=51%"; Hit description=DNA helicase homolog, putative
MTVSLNVLFSRCHRRYDDFLQQYWCTSIGKDIKTFPLPPIIDAYDDVIGTAREVYEEESIELASADVVLKDSLNEEQMAA

SEQ ID NO: 76062 - protein, 274 aa, Zea mays
  Coding DNA Sequence Number=SeqID_32687
MWRLGDVRYPGKSSGSRGGEKSERAVLPSLATSIHLGEGASLRCSSAEPGKLGSKRPCSSGSGGGPLSVVGGKEVAREETKIQGSGATVGVRRRRTAIAKKLRRSTAPTKEGAQKRKRISSLPSSSSSTSSGAPDPKRKSHNISLPCVLTKTYRLTMDSENAKLRRALAHLIRVVEERCADIVDVVHSAFQPVSRPVLNEMNRALVQIEDLANDLDQLALEKDWEMEHMAPSLIAESSQTEDELLIDYDSELNNDDIVGYDDGRDYSTDDTYPY

SEQ ID NO: 76063 - protein, 224 aa, Zea mays
  Coding DNA Sequence Number=SeqID_32688
  Gene Ontology: Mol. function=carboxyl- or carbamoyltransferase activity; Cellular component=ornithine carbamoyltransferase complex; Biological process=amino acid metabolic process
  Homolog annotation: Hit_ID=Q8SA97; Match level="QueryCoverage=46%, HitCoverage=14%, E-value=1e-17, Identity=50%"; Hit description =Ornithine carbamoyltransferase
  Subcellular localization annotation: CTP_CleavageSite=66; ConfidenceScore=5.35e-01
MWRLLRGQGRVCLPWPWSSPSPWVGRGGDRRLRPGLSPSPGVGRSVFVVFWGCAQVRALGRAERCSSSSEAEPKSEPWVGRRGVRRLLWLSPSPSPGSGGAEFAVFRSLARVRALGRAERSSPSSGAEPKSEPWVGRSGVRRLPGLSPSPSPGSGGAEFPMVLEVGPDCLSASLCRAAQQSERRRRRCLSVRPLCADEGYQLRIRSLEGTPNYGPRQKETPRRM

SEQ ID NO: 76064 - protein, 270 aa, Zea mays
  Coding DNA Sequence Number=SeqID_32689
  Subcellular localization annotation: CTP_CleavageSite=18; ConfidenceScore=5.14e-01
MGDTFGRRSRRRFTSAVMTASKKGPGKGALQKVSFSAKEAGPEPSYWSEVRRLAPRKGSTAASEHSGSAPTTGQRLAPEGFDIRLRARRARDDPGYVQYITKARATLPSPLKGHDIASPEPDLGQRQPTPEDSRLARGSPQATDTSSTRPRHNSGFGPRLGLGRWTSPCPTPGLGLNHDLEDDELRLARPQGSDSTLAPEDDELRLARPQGSDSASAPEDDGLRLARPQGSDSASAPEDDELCLARPRARTQPRLRKMMDSASPDPRART

SEQ ID NO: 76065 - protein, 390 aa, Zea mays
  Coding DNA Sequence Number=SeqID_32690
  Homolog annotation: Hit_ID=Q6QP54; Match level="QueryCoverage=26%, HitCoverage=36%, E-value=3e-07, Identity=37%"; Hit description =Putative kinase
MAPLVDVVGPHPRLGDVEAPPRSRSSLSSEAEVESEPLGRARRRPSAEARAESEPWGRAKRSSSSLGAEPESEPWVGRSGVRRLRGLSPSPSPGSGGAEFVVFRGLARVRALGRAERSSPSSGAEPKFEPWVGRSGVRRLLGLSPSPSPGSGEAELPMAGHWSGEVTVVTSALSTEGRASGERCQATFALNAPTIWSVGVAIWSGLLLGEDRASGEPELCADGGYQLRIRSLEGTPNYGPRHGCARAYPPGVAPEASEEWFDSSEGLMPRAMLRLACPRASAQGKRTVRDRLDFFTYAPVSPFRKVEGGKAPCCPQRAPNMVFPVSCWQVIRADVRAPFVRGRLEAQRRAQKYLRVICRTRSPVDGVRGLDASLCRDSVTRSFPLVSEMS

SEQ ID NO: 76066 - protein, 126 aa, Zea mays
  Coding DNA Sequence Number=SeqID_32691
MKNGTECVADEANIVETYDTNEANSMKLPSMLLKLKEDKLRSLAALSPSASSRLIALLNMPGKKLLILCTRVPSLTLRISALLYGFDHVQLNLAYFDTKGLSSAWSTSVVAYAPAFRLWENISIVL

SEQ ID NO: 76067 - protein, 283 aa, Zea mays
  Coding DNA Sequence Number=SeqID_32692
  Gene Ontology: Mol. function=protein dimerization activity; Cellular component=nucleus; Biological process=regulation of transcription, DNA-dependent
  Homolog annotation: Hit_ID=P0C133; Match level="QueryCoverage=71%, HitCoverage=97%, E-value=4e-44, Identity=52%"; Hit description=Auxin- responsive protein IAA31
  Pfam annotation: Domain name=AUX_IAA; Domain location=23-222; Score =244.5; E_value=2.4e-70; Accession=PF02309.7; Description=AUXIAA family
MEVAAAASYSYYGLEAADDDVDNLRATELRLGLPGTEAAEEEEEARQAQKVAAPPPSTPRGKKRDGVSGGIDAAPPAAKAQVVGWPPVRSYRKSCFQQQQAGAKGKPAAADEGAPGPAGGGVFVKVSMDGAPYLRKVDLGTCGGYRQLREALEAMFLCFSGPGSGDASGGGGGGSPSDFAVTYEDKDGDLMLVGDVPFSMFIGTCKRLRIMKGSEARLGLGVHFVWQPNQESSVLVMSRAFDDYYIEDCGVNLAQEVTQRRIDNSDQFVILATVRVAFVSACL

SEQ ID NO: 76068 - protein, 436 aa, Zea mays
  Coding DNA Sequence Number=SeqID_32693
  Gene Ontology: Mol. function=binding; Cellular component=nucleus; Biological process=regulation of transcription, DNA-dependent
  Homolog annotation: Hit_ID=A3AUS2; Match level="QueryCoverage=38%, HitCoverage=34%, E-value=1e-58, Identity=66%"; Hit description =Putative uncharacterized protein
  Pfam annotation: Domain name=KNOX2; Domain location=286-337; Score =76.6; E_value=8.3e-20; Accession=PF03791.4; Description=KNOX2 domain
SAAVFGHVGTAARGAQLLEHLVGPTEFDAAVGLTALATREKAEAALEKGNADEATCRQISSAASETGSTSSGTPARGASARRGDTLPPPSPALLVVADDARCCPYAASLPTRRSFELTAIVLGSRCIGSSNGWIALSVVLFNGKTVFVLLNPIAAVEILLPPLIYESRWVSKVVFTPSPAKDDFAAAAICDIDRIAYVTAGARRWAVMDPVRLTCGDQLIDVVYTDKGKVYCLTKCGDVHVLRLPERRRRKPANADEAGSSEPEFSVLYRLSTLAVDVEMNSDDRQEHRRAADPELDRFMEIYCHMLVRYRQELTRPIQEADEFFRSMEAQIDAFLLLGDFDSLWISFSLIAGLTLGSGVTLPARSILVVPLHLVQMDASVWGDDADQFNPHRFLKRDIDLGGLLTALTPNIEVPVYVKGNILTLSFNCVLLHCEK

SEQ ID NO: 76069 - protein, 93 aa, Zea mays
  Coding DNA Sequence Number=SeqID_32694
  Subcellular localization annotation: CTP_CleavageSite=3; ConfidenceScore=5.09e-01
MAQAQLGPRGRGRRTAQLGPRGRRTVQARRPRLGDGDVGCRRRAAWGLSRAARGRPQGGTVGAAERGSELGACAAGGWVGRWRPGGWELGFGN

SEQ ID NO: 76070 - protein, 282 aa, Zea mays
  Coding DNA Sequence Number=SeqID_32695
  Gene Ontology: Mol. function=protein dimerization activity; Cellular component=nucleus; Biological process=regulation of transcription, DNA-dependent
  Homolog annotation: Hit_ID=Q2QMJ7; Match level="QueryCoverage=89%, HitCoverage=91%, E-value=2e-56, Identity=52%"; Hit description=BZIP transcription factor family protein, expressed
MAGGGAGDDDVVVVSCGGRGGGDPGAYAAVLKRKLDLYCAAVAKSMEAKSQEHSLGYPNSQASDASQLISQASFDGDIDGASLVTNSNVIEDDDFQGKPTNSGTSKELSDDDGDLEENTDPANAKKMRRLTSENASLLKRLADMTQKYKDASVDNKNLTVDVETMRRKVNIAEEAVRRLTGITLMLPTAFEKPTSSAPLSSCPSDAASASASAAIEDSVKHFLQAPLENSGIIPNAAVFQTKPASLHRVASLENLQKRIVGDAMYSETASTTFSDPEALADR

SEQ ID NO: 76071 - protein, 149 aa, Zea mays
  Coding DNA Sequence Number=SeqID_32696
MGKTTRRTRWRVYGHETGVREGKTAGGKLRAQIGKTKHGGGCLTSRQSSGSFGVASDELDDRHGGRGSSARVSGVGRARERAKLSEMGRGSECGRGRCSKKGMGAWASNVAEDSDVVRECARAGPRRGAGKAKVIGRPTAQCNTLNLGV

SEQ ID NO: 76072 - protein, 77 aa, Zea mays
  Coding DNA Sequence Number=SeqID_32697
MVVQGASLAEVQGKAASQTPPPVEVWGKSPAAPAPAPGVDAPAPCAGDDVVSLGGWTDLAPCDTVDAPPGEKAKRGS

SEQ ID NO: 76073 - protein, 42 aa, Zea mays
  Coding DNA Sequence Number=SeqID_32698
  Homolog annotation: Hit_ID=A2WUA8; Match level="QueryCoverage=78%, HitCoverage=19%, E-value=4e-09, Identity=93%"; Hit description =Putative uncharacterized protein
MTLAGDASLQVSLSAFAFLFSELVQYNQTQVDNITELERRLE

SEQ ID NO: 76074 - protein, 389 aa, Zea mays
  Coding DNA Sequence Number=SeqID_32699
  Gene Ontology: Mol. function=cyclin-dependent protein kinase regulator activity; Cellular component=nucleus; Biological process =cell division
  Homolog annotation: Hit_ID=Q0E474; Match level="QueryCoverage=77%, HitCoverage=65%, E-value=1e-110, Identity=65%"; Hit description =Cyclin-T1-1
  Pfam annotation: Domain name=Cyclin_N; Domain location=17-163; Score =37.8; E_value=3.8e-08; Accession=PF00134.14; Description=Cyclin, N -terminal domain
MGAARGEEDGEGRCGERCPSWYVSREEIESGSPSRRDGVSAAKEAELRATYCSFIRDVCIRLRLPQITMATAIMLCHRFYLRQSHAKNEWQTIATVCIFLGSKIEDTPCQLKHVVIVSYETMYHKNPDAAKRIHQEHEVLAKQKALILVGETLLLSTIRFDFNIHHPYEPLKLALKKLGIAETELRQSAMSLINDTLPSTLVIQFKPQYIAAASLWFAAKFHNVNLSQNGTIWWHVFDVAPDPLRVVVQQMSELFEKRAPCSVGPVTKPVPASSATDKHQIKPAPTHTPMDKHQIKQVPAPMNRHQIKPVPTPTPMDKHHIKQIPAPAPTCRHHIKPVPTPIPTPMDKQQNKLAPTPMDKQQNKLAPTPMDKQQNKPAAAPAPTDRCQR

SEQ ID NO: 76075 - protein, 151 aa, Zea mays
  Coding DNA Sequence Number=SeqID_32700
MPEGFGPEASRKSLSARTSFALFDCFDSGILKNDESTQRFSCLLDYIDNRILRTSKSARKRQGRPSRVTPTPPGYGYLTHHLPQKVQTSTEGAAAPSASFPPSAESGPASNDDTGGRISTSKEDASTALGPSPPRSPQGFRPERTPRLAAP

SEQ ID NO: 76076 - protein, 189 aa, Zea mays
  Coding DNA Sequence Number=SeqID_32701
  Homolog annotation: Hit_ID=Q6QP51; Match level="QueryCoverage=47%, HitCoverage=44%, E-value=2e-26, Identity=65%"; Hit description =Putative growth-regulating factor 1
MGKVFTDVLRGPPLRHGGWVPHVMQADPKQKKLNRRTRSVRAGYYVQETAPPLVPMPHLLDCGTDERKQRSNRLQARVPSWSGRASDTFGRRSGRRFTFAIMTTSKKAGPSEGFDSRPRARRARDDSGYVRYMAEARATLPSHFALSLTNLTGKQRRSPRSDCCASHPGKADNSKFSLRRNRKLRLARP

SEQ ID NO: 76077 - protein, 303 aa, Zea mays
  Coding DNA Sequence Number=SeqID_32702
  Subcellular localization annotation: CTP_CleavageSite=41; ConfidenceScore=5.56e-01
MPSHSPHASRTSIFRAPGWGAPALPSSCCRWRSTTSRGLAPFSHRSASRIFIMQPGCIPSPMVIQDDDHQFDGGEKQAGLRPLPRPQLQGSSSSLLRRRAGQVGACLRVGRRPASSSGILGRKASSSSAEEASSSHAGEGELLLPGQGATVRPPPGRRPCHAWAGYVQVLPVPSAAQHVVRREGGTRVLGWSRSRGCGENRSEDLSVRFWVAAARWGRERGPSIGSVFPGAIAVVVLPSETEVVVALLVQRSPASHPEFVVPQALWCGGCSYPWEWNRSSVCDGTLSMGVCSLWLSRPEHLGI

SEQ ID NO: 76078 - protein, 152 aa, Zea mays
  Coding DNA Sequence Number=SeqID_32703
MLSDEQQRPPRPSSPSLRSILLGRSPLPRDCRGLGFGGGGGAASSEDGWRQHLEVSGLAAGTTWLLRRGTRTGVELHLSRSGGGGDCCKSRASRVRRRRVGGEWEVAHDSRMRLAMLDMCGMWRMRMGREVGLRDIRPPAADADGARRTDDG

SEQ ID NO: 76079 - protein, 183 aa, Zea mays
  Coding DNA Sequence Number=SeqID_32704
  Gene Ontology: Biological process=DNA repair
  Homolog annotation: Hit_ID=Q6JDV7; Match level="QueryCoverage=34%, HitCoverage=7%, E-value=4e-10, Identity=53%"; Hit description=DNA -directed polymerase kappa
MAPQPLNYIDSKEDILVYATKLIKAEMPISLRLMDNYSKEAVLSDPLGGTKSDDVSYSAKHVKLAFHKVTPTTKLDEPDPLVSPKAVSSSSKPDQQSWIDGYICSICGFELPPGFEEERLEHSDFHLAETLQQEEAVDGTRHISNERSAGSSSPMAPPTSRYAAVVPPLADLVSSRNHEATTF

SEQ ID NO: 76080 - protein, 148 aa, Zea mays
  Coding DNA Sequence Number=SeqID_32705
MSDREVPEPCVHANVAVGEVLEPCVRGNVAVGEVPEPCRSTAIGAAGILLTSPCFQRGLRTTVVMDARGEPSLLGNDVSPMARSVRAQGRARRRLLSRPGSGEDAIPPEAEVEVEPWGRARRRPPSEAEVEAEPWGRARRRPPPEAEA

SEQ ID NO: 76081 - protein, 645 aa, Zea mays
  Coding DNA Sequence Number=SeqID_32706
  Gene Ontology: Mol. function=aspartate-tRNA ligase activity; Cellular component=cytoplasm; Biological process=tRNA aminoacylation for protein translation
  Homolog annotation: Hit_ID=A2X8E8; Match level="QueryCoverage=74%, HitCoverage=83%, E-value=0.0, Identity=88%"; Hit description =Putative uncharacterized protein
  Pfam annotation: Domain name=tRNA-synt_2; Domain location=220-529; Score=171.7; E_value=1.9e-48; Accession=PF00152.11; Description=tRNA synthetases class II (D, K and N)
  Pfam annotation: Domain name=tRNA_anti; Domain location=98-185; Score= 32.2; E_value=1.8e-06; Accession=PF01336.16; Description=OB-fold nucleic acid binding domain
  Pfam module annotation: Pfam domain module=tRNA-synt_2::tRNA_anti; Domain location=220-529::98-185
MSSEPPPASSAAAGEELAADLSAATLSKKQQKKDARKAEKAEQRQRQQQQQQQPADAEDPFAANYGEVPVEEIQSKAISGRSWSHVGDLDDSAAGRSVLIRGAAQAIRPVSKKMAFVVLRQSMSTVQCVLVASADAGVSTQMVRFATALSKESIVDVEGVVSLPKEPLKATTQQVEIQVRKIYCINRAIPTLPINLEDAARSEADFEKAELAGEKLVRVGQDTRLNYRAIDLRTPSNQAIFRIQCQVENKFRDFLLSKNFVGIHTPKLISGSSEGGAAVFKLLYNGQPACLAQSPQLYKQMAISGGFERVFEVGPVFRAENSNTHRHLCEFVGLDAEMEIKEHYFEVCDIIDGLFVSIFKHLSENCKKELESINRQYPFEPLKPTRLTNHFMQYLDKTLKLTYEEGIQMLKEAGTEIEPMGDLNTEAEKKLGRLVREKYDTDFFILYRYPLAVRPFYTMPCYDNPAYTNSFDVFIRGEEIISGAQRIHTPELLAKRATECGIDLWRAATRRFRGGFGEGGDAVLCPEQHQEDLPVPARPAEARAHKLQMGTIQVKASSTQGTRSRLARARPRAGTIVPDEVTSRPRASSGSGRTLGTPEAQLGQASSRSNLGQIASPTDRIAGVFNARIASHPILTRAPQSARSK

SEQ ID NO: 76082 - protein, 283 aa, Zea mays
  Coding DNA Sequence Number=SeqID_32707
  Gene Ontology: Mol. function=oxidoreductase activity; Cellular component=chloroplast; Biological process=metabolic process
  Homolog annotation: Hit_ID=Q6PLQ8; Match level="QueryCoverage=96%, HitCoverage=95%, E-value=6e-96, Identity=59%"; Hit description =Polyphenol oxidase
  Pfam annotation: Domain name=Tyrosinase; Domain location=1-142; Score= -60.0; E_value=6.5e-07; Accession=PF00264.11; Description=Common central domain of tyrosinase
METHVSALRQMISGAKKKELFFGMPYRQGDQPDPGAGTVESIPHNPVHFWSGDPRQPNGEDMGNFYSAARDPLFFAHHGNIDRMWSVWNGLRPGNSDFTDPSWLDASFLFYDEEARLVRVRVRDCLDTAALGYAYQDVALPWLNAKPAKEAGSPAPTAGALPATLNQTVRVAVTRPKTSRTRKEKDAKEEVLVVQGIEIADHSSRAGAACRRRRSARGAWALTPHAVRPGKGKGTVKTVARFGICDLLDDIGADGDKTIIVSLVPRCAGDMVTVGGVGIEYVG

SEQ ID NO: 76083 - protein, 251 aa, Zea mays
  Coding DNA Sequence Number=SeqID_32708
  Gene Ontology: Mol. function=endodeoxyribonuclease activity, producing 5'-phosphomonoesters; Cellular component=nucleus; Biological process=DNA catabolic process
  Homolog annotation: Hit_ID=Q6Z130; Match level="QueryCoverage=74%, HitCoverage=42%, E-value=5e-43, Identity=82%"; Hit description =Hydrolase, TatD family like protein
  Subcellular localization annotation: CTP_CleavageSite=55; ConfidenceScore=5.01e-01
MEAPDMSDAPTAPRLPTVGFPIEGKKSGTGLSGHFETGSSIPLQPTRRVFSFHCMLSLRVEFPGGVTHSFTDSTEDQDRLLSFEKMFIGVNGSSLKTNRNLEVLRGIPVERLMMETYSPYCDIINTHAGSQYVKSVWPSKKKEKYEPDSTVKGRNEPCLVRFKRDSGETPFSVGQAINSPKLVYFEKQFELAEAVKLPMFLHMRAVGEDLCEIMTQNLHRFPGGVTHSFTDSAEDRDRLLSFEKMFIEASK

SEQ ID NO: 76084 - protein, 188 aa, Zea mays
  Coding DNA Sequence Number=SeqID_32709
  Gene Ontology: Mol. function=kinase activity; Cellular component =ornithine carbamoyltransferase complex; Biological process=amino acid metabolic process
  Homolog annotation: Hit_ID=Q6QP54; Match level="QueryCoverage=56%, HitCoverage=50%, E-value=2e-30, Identity=58%"; Hit description =Putative kinase
YAERYRPGAKAARVILLLCESGEPSPPSHRGVPEPTSECAACPSPDGSSAWASAKGGSEAAGDGRERGGNPAAFVFVPRPGRLRATVVTGLAGRHHCLSGGAGQMGHRSCSLRPESARGRVMMALPVDVAGLCPRSGDVVAPPKPRSSLSSVAEAEPELLGRARRRSFGRGQGGVRALGSGEAEFVVF

SEQ ID NO: 76085 - protein, 266 aa, Zea mays
  Coding DNA Sequence Number=SeqID_32710
  Gene Ontology: Mol. function=aspartic-type endopeptidase activity; Cellular component=lysosome; Biological process=sphingolipid metabolic process
  Homolog annotation: Hit_ID=P42211; Match level="QueryCoverage=27%, HitCoverage=14%, E-value=1e-32, Identity=90%"; Hit description =Aspartic proteinase precursor
  Subcellular localization annotation: CTP_CleavageSite=17; ConfidenceScore=5.28e-01
MAGRTAPASLPSFSLTPDSLAAPLSWISSWTLPRPTIDIMSKFFKLMVVLQLMNDLNEVFKMPLSLVLRLIVCLRFFDLSIIPLRYWNKSTGLLIFFVPCVIKHEMLPVEYQCFIAVFLLVCPNVGKSALFNRIIASLRANQFCERLPSPNGESTVDCHQISKMPNLAFTIANKTFTLTPEQYIVKLEQAGQTICINGFMAFDVPPPRGPLCYAKHICTTLKCAMRASTEGITVPPLAPSTPAPVCIRPLRLPAMAASLPHVYDDN

SEQ ID NO: 76086 - protein, 99 aa, Zea mays
  Coding DNA Sequence Number=SeqID_32711
MSAGGAATAFGGGAAAELDASSSDEESSVEVDLWTAVRTGLRPSVKIRIASSSVLVLTQPAHQPLTTTAARKQASKRKKPKLPQMLNDSEGLSSYVGSI

SEQ ID NO: 76087 - protein, 598 aa, Zea mays
  Coding DNA Sequence Number=SeqID_32712
  Gene Ontology: Mol. function=nucleic acid binding; Cellular component= intracellular; Biological process=regulation of transcription
  Homolog annotation: Hit_ID=Q5UDB6; Match level="QueryCoverage=100%, HitCoverage=100%, E-value=0.0, Identity=63%"; Hit description =INDETERMINATE-related protein 9
  Pfam annotation: Domain name=RS4NT; Domain location=146-183; Score =12.0; E_value=0.062; Accession=PF08071.3; Description=RS4NT (NUC023) domain
  Pfam annotation: Domain name=zf-C2H2; Domain location=161-183; Score =20.0; E_value=0.0088; Accession=PF00096.17; Description=Zinc finger, C2H2 type
  Pfam annotation: Domain name=zf-C2H2; Domain location=188-209; Score =15.8; E_value=0.17; Accession=PF00096.17; Description=Zinc finger, C2H2 type
  Pfam annotation: Domain name=zf-C2H2; Domain location=84-106; Score =25.7; E_value=0.00017; Accession=PF00096.17; Description=Zinc finger, C2H2 type
  Pfam module annotation: Pfam domain module=RS4NT::zf-C2H2::zf -C2H2::zf-C2H2; Domain location=146-183::161-183::188-209::84-106
MASNSPAAAFFGVRDGDQQDHQIKPLISPQQQQQLAAALPSVASGQGAPTAAAQPPPKKKRTMPDPDAEVIALSPKTLMATNRFVCEVCSKGFQREQNLQLHRRGHNLPWKLKQKDPLQAQRRRVYLCPEPTCAHHDPARALGDLTGIKKHFSRKHGEKKWKCDKCSKRYAVQSDWKAHSKICGTREYRCDCGTLFSRRDSFITHRAFCDALAQESARLPPTSSLSNLTSHLYGAATNAGNMALSLSQVGSHLTSTLQDGHHHRPSPELLRLGATAGGGGGSSIAARLDHLLSPNGASAFRPAQPPSFFHNAGASVGQDFGDDAGNGPHSFLQLQANKPFHGLLMQLPDLQGNGAGGPGASGGPSSLFSLGFFANNGNSSSGSSHEHASQGLMNSDQFSGGGSEAQAAAGIFGGNFVSAGGDQVPPPGLYRDQASMLPQMSATALLQKAAQMGATTSANGASAASMFRGFAGSSPQHVRPATPHMEQSDANLNDLMNSLAGGGGLGAGGGMFGGGSNGAGHAGMFDPRQLCDMAEREGKFGFGQGGGGDITRDFLGVGGGGLVRGISTPRGDHQSSSDMSSMEAELKSASSFNGGRMP

SEQ ID NO: 76088 - protein, 223 aa, Zea mays
  Coding DNA Sequence Number=SeqID_32713
  Gene Ontology: Mol. function=nucleic acid binding; Cellular component= nucleus; Biological process=chromatin modification
  Homolog annotation: Hit_ID=Q9FF61; Match level="QueryCoverage=75%, HitCoverage=19%, E-value=5e-21, Identity=37%"; Hit description =Putative SWI/SNF-related matrix-associated actin-dependent regulator of chromatin subfamily A member 3-like 1
  Pfam annotation: Domain name=HIRAN; Domain location=23-116; Score =54.1; E_value=4.8e-13; Accession=PF08797.2; Description=HIRAN domain
MTASSSRGGAAAVADDDDEPYLLGFIISKIVGMLYYRGKVAGREPLNRYDNNAIAVFNARNDQVGHLPGVLAAVLAPLLDSHLLVAAQGIMPRSGSKFNPNAYSLPCQVHLFARPAAASVVEAALHEAGIDLIHVDHLEFILSQASAVMEQFKKPDRDRDVDKLFSLVGKEGKNQTQRMDPPGDVVHPSSSDTRRRRWGGWCTGRSLPTCRPSGKKVKMGGCR

SEQ ID NO: 76089 - protein, 1021 aa, Zea mays
  Coding DNA Sequence Number=SeqID_32714
  Gene Ontology: Mol. function=nucleic acid binding; Cellular component= cytoplasm; Biological process=multicellular organismal development
  Homolog annotation: Hit_ID=A2X870; Match level="QueryCoverage=83%, HitCoverage=81%, E-value=0.0, Identity=80%"; Hit description =Putative uncharacterized protein
  Pfam annotation: Domain name=PAZ; Domain location=384-521; Score =173.5; E_value=5.3e-49; Accession=PF02170.13; Description=PAZ domain
  Pfam annotation: Domain name=Piwi; Domain location=674-981; Score =474.7; E_value=1.2e-139; Accession=PF02171.8; Description=Piwi domain
  Pfam module annotation: Pfam domain module=PAZ::Piwi; Domain location= 384-521::674-981
MVRKKRTGPGGSGETSGESSGASGQGSSQQPERTQQPGGGRGWVPQQGGHGGGQHQGRDRHYQGRGGPGPHHLGSGAPEYHPREYQGRGGEYQGHGGEYQGRGGDYQGRGGGRSRGGMPQPYYGGHRGGNVGRNVPPGPSRTVPELHQAPYVQYPAPVVSPSPSGPGSSSQPMAEVSSGQVQQQFQQLADRGQSSTSQEIQVAPASSKSVRFPLRPGKGTYGDRCIVKANHFFAELPDKDLHQYDVSITPEVTSRGVNRAVMGELVTIYRQSHLGGRLPAYDGRKSLYTAGPLPFTSMAFEITLQDEEDSLGGRQGGHRRERVFRVVIKFAARADLHHLAMFLAGRQADAPQEALQVLDIVLRELPTARYSPVDMSSTAFIEPLPVIDFVAQLLNRDISVRPLSDSDRVKIKKALRGVKVEVTHRGNMRRKYRISGLTSQATRELSFPVDDRGTVKTVVQYFMETYGFSIQHTTLPCLQVGNQQRPNYLPMEVCKIVEGQRYSKRLNEKQITALLKVTCQRPQERELDILQTVHHNAYYEDPYALEFGIRIDERLAAVEARVLPPPRLKYHDSGREKDVLPRVGQWNMMNKKMVNGGRVSNWACINFSRNVQDSAARGFSHELAVMCQISGMDFALEPVLPPVTARPEHVERALKARYQDAMNILRPQGRELDLLIVILPDNNGSLYGDLKRICETELGLVSQCCLTKHVFKMSKQYLANVALKINVKVGGRNTVLLDALSRRIPLVSDRPTIIFGADVTHPHPGEDSSPSIAAVVASQDWPEVTKYAGLVSAQAHRQELIQDLFKVWQDPQRRTVTGGMIKELLISFKRATGQKPQRIIFYRDGVSEGQFYQVLLYELDAIRKACASLEPNYQPPVTFVVVQKRHHTRLFANNHSDQRTVDRSGNILPGTVVDSKICHPTEFDFYLCSHAGIQNKFTADELQTLTNNLCYTYARCTRSVSIVPPAYYAHLAAFRARFYMEPDTSDSGSLASGPFEEATFCFFACPMHQGPSFPGGPGSVL

SEQ ID NO: 76090 - protein, 160 aa, Zea mays
  Coding DNA Sequence Number=SeqID_32715
MMMKIINHQHHPPRTKKRSDASERSRIFSLTLTGKGKEREDASHAGRRATSGTTMQIWPNPQRGGAKTSVKTWDDSSSEDEPPRPRSHRSSSRSSWSSHKCLMARENFETFANFNYELTTKFEQLESNGPSSATDDILMKKNEKLKAKLASSQPGSVKMI

SEQ ID NO: 76091 - protein, 151 aa, Zea mays
  Coding DNA Sequence Number=SeqID_32716
AHEIEIAEERQQAEYHQSVLREQLEYQRQQSEYQRQQAEYQKKRDEYYASLQAQNQALLSQLAQQAGVPMPTYGMPPPDFALPMPMLAPPPPPPPTSQFPMGFQTPPASVAAPGDGSGQDDTTHSWVNNLFNTQSPAGGGGYSNHPDAGYD

SEQ ID NO: 76092 - protein, 55 aa, Zea mays
  Coding DNA Sequence Number=SeqID_32717
MSLCRSFMGDSFDTTFERICRRLPRAEDPKNTFPELVAEKRSQNFEREMVPPCSG

SEQ ID NO: 76093 - protein, 121 aa, Zea mays
  Coding DNA Sequence Number=SeqID_32718
MGNSAWLVGVTGHRAAGGRSVGEILAGGAGGSGRASRGRIRPVSSELGVVVGPRWVIRGIKPGVGFITVLCWSYSIFSKDMEYTPCTASSFVSHISLLEEVLGWRFCLYGDFLVISFVNCT

SEQ ID NO: 76094 - protein, 415 aa, Zea mays
  Coding DNA Sequence Number=SeqID_32719
  Homolog annotation: Hit_ID=A9XMT5; Match level="QueryCoverage=81%, HitCoverage=68%, E-value=1e-125, Identity=68%"; Hit description =CYCLOPS
MDNSYGPTGYGCAAPPLQDCETRSHEQAGMYLDGQWTEILEHQRGDLPQGSDGELNGSGSSATKHGDAGVQGHVARRRYAAMQTNMTPITIGSIEAINQLKQDFTTTTNSIPMSNTPVQTPNFASPSSSSTSHLDNPHMAAQDTVTSVVSMLKDTLERKKLGSHANKDTSVGHPFGFYDTQQFQQNILGGTDFFPIMTTAQAQDSLMLPKVERPMEPNNGSFVPSTNQVWFGAASREPSHSGSSTAMTTYSAGFEMCDELPPAGQAMSICESSRKNAANGTTIGRSKGKEYRERVQQDNLKDERKMSSTNTSGASKADNGDPMKKRRVERSRKMAEAKERSSTPVIPSDMQAVLKRCETLEKEVRSLKLNLSFMNRKDSEQTKQIEELQQKNEDLAEEKERLLEEIERIVSDPNT

SEQ ID NO: 76095 - protein, 186 aa, Zea mays
  Coding DNA Sequence Number=SeqID_32720
MDDLRLEVGKISKHWERAVVDKSTSMAGVLSHVPTANERPLVGSSANSPHGHHFETRWKDSYRSLLCAGSKTEPLRKSALQKFVGHANVNDILMAWLESLFFTIYQEVIITPEHNEEGIYTVRFYIQRFVDGLRDDLHTGVIVQRPSSLDSACAPSFLQEEVAGSFKRVEIWHPRVRLVEEWGSIE

SEQ ID NO: 76096 - protein, 140 aa, Zea mays
  Coding DNA Sequence Number=SeqID_32721
MVALHSITRGEETDGRRERFCRGRGAGRVARLGSPGLRAIVIGLLSADVGVVESRRLQARCCWRWVCAGVGASRVGMGWAWSARLAGVACSVLGASRWGEAWQGRARDRGGGRVGPLGSERKGREVEREEEMIFNIQKYL

SEQ ID NO: 76097 - protein, 129 aa, Zea mays
  Coding DNA Sequence Number=SeqID_32722
MAKAWHDEIGEAWTGFGHVSGEARRRAVVLLCERTWFLDVGRSSDEVLCEKSGDELDTAWAGAPGAVLLALGLCRHRGKSRGDGMGVVGVVGRGRVLGPRRVAEENIFFSPVMWFVHPLSMIQLEPPDA

SEQ ID NO: 76098 - protein, 95 aa, Zea mays
  Coding DNA Sequence Number=SeqID_32723
MASASMEGGVTAALKFLYTGEKTDGSASWHGRRAVELPSVCCGRGEAAGALGRSGSGYCAGIEACWRGASGSVGHVQGHWSRSRWFLARLAGEGA

SEQ ID NO: 76099 - protein, 146 aa, Zea mays
  Coding DNA Sequence Number=SeqID_32724
MFDHFQHLRNEDSREKPRSETPAIHLGSEYGWPVSGALHRSVRCVARCQEVESERPPSPAPQPEMPPAPPQGIPTAGGDPDGGRDDDNAGGSSSHDTELSEEQEPEGWIARPITRDTARGCHFHDALDTLLRRPSTDALGLSSTVV

SEQ ID NO: 76100 - protein, 149 aa, Zea mays
  Coding DNA Sequence Number=SeqID_32725
  Gene Ontology: Mol. function=structural constituent of nuclear pore; Cellular component=nuclear pore; Biological process=nucleocytoplasmic transport
  Homolog annotation: Hit_ID=A3BB16; Match level="QueryCoverage=75%, HitCoverage=8%, E-value=2e-52, Identity=91%"; Hit description =Putative uncharacterized protein
MGLMEVIFNRPVDILRKLFDGNTLRSQIEEFFNRFGAGEAAAMCLMIAAKLLYAEDSLISNSVSEKAVEAFEDPRLVGMPQIDGTTALSNTRTQAGGFSMGQVVQEAEPLFSLRGSFVFANSFQSSFANSQRVVVRSFCFGLILSPPLA

SEQ ID NO: 76101 - protein, 153 aa, Zea mays
  Coding DNA Sequence Number=SeqID_32726
MVALLSRVVTPQTGPYGEALRKQPDPPKGGLADSAMGITPAWEHQRALHTVAHLEMKHWSHGATAVAQGHDGATVAELRLHRKNSCERGPGGLEGLGANRGVFQVAGDRAELIRATDAARSSTATVERAANVGGRWQGSSHMRRARERARGFG

SEQ ID NO: 76102 - protein, 126 aa, Zea mays
  Coding DNA Sequence Number=SeqID_32727
MESAGSFDGAHPEIQRDSVDIAPAKVGMVVEDGPDILAPRRVVFNLGFSFMRRDERRRVGFDGQGTARSFVSVRVELRPGDVNDEYELRRVTTANSANYTARAREAREERSCSINADNLGSKLKTI

SEQ ID NO: 76103 - protein, 137 aa, Zea mays
  Coding DNA Sequence Number=SeqID_32728
MGKNNKRKREPTPPSEEFGDSEYSEEEFSSESEGSPLPSPCGLAAEVSTYIRAVERSGLEGSDESEYSSDEEDSDGGGEDEDEDDDDDDDSGRGGSKDGDRGGSRDGDGGGSRGSNRGGSSRGITRGGSGGSNRASG

SEQ ID NO: 76104 - protein, 299 aa, Zea mays
  Coding DNA Sequence Number=SeqID_32729
MHKGARRHGHLLGGHPPFKGDSPYLRPQPSRAESSPTRSKVLLLRREGWVPHVMQAGSEQKKPNRHARCVQPPSGYKRPSTFAQTSRRKRGQPCRQHATAPSGRTSPTPNTPGMGAQAHASCNRRAKCLVHATAPPLAPPLRLLDCGTNAATRGDPAHDPAAPAWRDDQCGQKWAGSNDGGRRAGAAVTSSAKLTSHPGAAREPSPTRDRRRPWQEKRATLRLRHNDRVKKGIGKGDTPKRILPREGTRLRASLLIRGSKAGPSEGFDSRLISRYSGSVPTTDQGFEGWPPKGSQPPQT

SEQ ID NO: 76105 - protein, 164 aa, Zea mays
  Coding DNA Sequence Number=SeqID_32730
MGRGKPGCDLGPTLSLEGVRHPRWGGERGEPGLCLPRGPAGHLFFQLLVVANILQLCGGDVLQPCRGRRTVAAQLGCNIPPSSLLSRRGRQRGPAGALGSGPLFGFNSWFASLEREREREPSGGRVRPGTMAAAAEVAGGSPGVRRPAGSRLFIPAGTEPEFRL

SEQ ID NO: 76106 - protein, 230 aa, Zea mays
  Coding DNA Sequence Number=SeqID_32731
  Subcellular localization annotation: CTP_CleavageSite=57; ConfidenceScore=5.46e-01
MWKLLRSRGRVCLPWPRSSPSPWVGRGEGRRLRPGRSPSPGSGGAEFAVFRDFARVRALGRAERSSPSSGAEPESEPWVRRSGVRRLSGLSPCPSPGSGGAEFAVFWDLALVRALGQAERSGAVLLSGRLVERRSDGGHFGSAGWGAHVRIKLYADGGYQLRIRSLEDRLTPYPDTRASVGKVEASASASASEEGLRLARPQDSASASASGGVTSSPYLGLGLRRSLRLA

SEQ ID NO: 76107 - protein, 264 aa, Zea mays
  Coding DNA Sequence Number=SeqID_32732
MEAEKTDLRRQLAEERREANQAIAEVQAAQAEAKVARAESSLASQRAEELEARFNALCNPVDKAEASTRSKVERTHTQFMEAYRELGARTTDFEVPDREAGLRFLEWLQEELLVLPTIMEGFMSFASLVTCEGAMNALSREGCRHYEVFNQSDENFEREIFKAEDPVVKQSAGALFDRMWGSHGREAVRERSDRAREQMARAEDVGDLGGLAGAPPEAVEVNPVPPLDAGEGSSAVPVPTVAGEDPVSAPAPMSEDAVRVVKVA

SEQ ID NO: 76108 - protein, 193 aa, Zea mays
  Coding DNA Sequence Number=SeqID_32733
MGAPDSVRVDRCTQIAVAPLAQRTVQGFGPAHATTTDNANFVAASTVVAEGDSDDSVSKCFESDDSRSSIVWTEESSEEDLEYFAALDVAAAETPSHVMGAEDLPGASVGRRRRRAVAKRRVGELSQSDRRHHGEMEGGRLRVDGAGKRELLSSPAGASVGEGELRSLFAGEELRIMLFNYREMGIIPNVEPM

SEQ ID NO: 76109 - protein, 98 aa, Zea mays
  Coding DNA Sequence Number=SeqID_32734
MTLSAETHYKDLKLLASTKLKPDEEPMALRLEASLISGDEPSRRAGSRAQGLTGDHGRWELNMGSTRSELGQRRGSREEQRWPAKTEKRRDHAGVGTW

SEQ ID NO: 76110 - protein, 98 aa, Zea mays
  Coding DNA Sequence Number=SeqID_32735
MTLSAETHYKDLKLLASTKLKPDEEPMALRLEASLISGDEPSRRAGSRAQGLTGDHGRWELNMGSTRSELGQRRGSREEQRWPAKTEKKRDHAGVGTW

SEQ ID NO: 76111 - protein, 43 aa, Zea mays
  Coding DNA Sequence Number=SeqID_32736
MGSTLEKMYLCQVRKRQTFVASVLRWYQRKNVRNEVREERILH

SEQ ID NO: 76112 - protein, 361 aa, Zea mays
  Coding DNA Sequence Number=SeqID_32737
  Pfam annotation: Domain name=Extensin_2; Domain location=1-361; Score= -137.6; E_value=0.065; Accession=PF04554.4; Description=Extensin-like region
MATCIDLTYGRAVSTALAVEAKYAGAGKSKGFGAAPLPPLFPPRSAHRAGPAPSAAPASSPPARATAARPSTTAPPRQPSARRAPSPSRALAAQRVCIARTQRVERPPPLLPSRARASESQRTLYFFLNWLREISENQPPDTQFLPPVAHFLATISPSDSPNRRRSLVSPGAPPSSPCALAKPAAQRLVVSPPRRVAELCSVGEKLPSLSSPAFFPVAVVPASLAPSRRGLVAARSPHAQHRPQASGHRSAAGAADRAQVSKPPRAQQPRALSSGQQEPPSPSADVAATPLRVAAESLRSLHAQLVPVPRYCYLARRCVDGTPSTFVYPRLPLNNSLLPPVYPSSNPVCVRVVRHRPRIAH

SEQ ID NO: 76113 - protein, 125 aa, Zea mays
  Coding DNA Sequence Number=SeqID_32738
MNCGLREQEGEKESARETSMAGGASSAIKGYGGLERQAHVREAVSHGPDRAIKIGRGKSDRGNRRLRATPLLSAAVRSPEWRGRGDIENYFGELDQAKSAGHRASTADCRGRALAKAKLDEHRAQ

SEQ ID NO: 76114 - protein, 94 aa, Zea mays
  Coding DNA Sequence Number=SeqID_32739
MVVAPWVRYLSQEYVPMLTWAANTYRSPSCPYFRVVFDLVFSFMRKDERRRARFDGQGMARLLVSVWAELRLGTRTCHKSTPLKKNLVLEIKKG

SEQ ID NO: 76115 - protein, 564 aa, Zea mays
  Coding DNA Sequence Number=SeqID_32740
  Homolog annotation: Hit_ID=Q9U459; Match level="QueryCoverage=67%, HitCoverage=48%, E-value=3e-08, Identity=21%"; Hit description =Erythrocyte membrane-associated giant protein antigen 332
  Subcellular localization annotation: CTP_CleavageSite=54; ConfidenceScore=5.08e-01
MAGVEDEDEFKDASVAADPPPCSPKPASKSMTATGSGGGLGRRLFASIPLPATLSAAIGRFSGPNPLATNVGLGLLLDAGPAASSDGPLASDAASGGSSLHLPSLPALQRQHGDDQVAGRGAGEWEEELGLLPAEEGWDTAEDSREKEGLAVDGRSANRNCFPTRGQEEGAQRQRPGDELGAAVAQDQEVVVKQQGATEDCAAVVEDESNYSAVEQCAGDETRAVKASNAVEINKRVIEQECAGGILDEAKYGVSLGLQEENAMVEEQGVDVISVQNQRVAMEQCAGDQLTTTTGGSAVQEVVVEQEGDTECYTAVEAVEQCTNHGSRADKDGNVVKRKEKAVEQEVSVGVRDAAKDCVTVEPQEENVVVVEHGEDGISVQDQHKAVEQCTSGQLRTTMDDTAAEGQRVVEQGGAIFYLDATAYDIAVEDQEKEMKESDGDESRSTRDRNPAEVKDKEVNQEDVVDRHNVIKDGSGVELLENNIVAIEQGEDGISLSDEDNMVELYTSDQLRATLDDHAAANRKVVEQEGDIVERVVTTDGISIEDYEKEVEQSTGFSQGQPRV

SEQ ID NO: 76116 - protein, 747 aa, Zea mays
  Coding DNA Sequence Number=SeqID_32741
  Homolog annotation: Hit_ID=Q9U459; Match level="QueryCoverage=40%, HitCoverage=47%, E-value=5e-09, Identity=22%"; Hit description =Erythrocyte membrane-associated giant protein antigen 332
QDKEMEQSAGDESRETEAENAVEYNKKVDQEDTINRQGTAKEDSGVEPQEENVVDPDQGVDDFSVLDEGNVVAQCTSDQLRTTMEDNAAEMQEVVEQEGAIFEKGVTSDGITVEDQDKEMEQSAGDESRVTKGENAVKDKKVYQEDAIDKQGAAEDGSGVKSQEDNMVVPGQCTDGLPVLDEGNVVPQYTSDQLRTTTDNNAAVDPELVEQEGVDSIVGAAKVGIAVEESREDIMVEKQVEGVLLQDQDEAVEQCTSDQLRTITDGNDVEDQEVHREKVGLSEGYPQKPEQVLDVQRHTATGWDDTNLQSSPHSKKSPEHKTMDDISSGSEVLPPNILRMLLPPQNVPPSTKEKEIRIKKDPDWASASDDSDGCCSADSSDGPLCKQEHEDYPERPECPFLLRFGHQHDTTLTVDIECPNNTGSGNPTREHKTAKGHRYQAKMQSIQQLRLSKAANRRTKQKADRQPEAKGLNKSSLPGSGTKQLRLPILTLCPASGFCPTFETFWTTKKGGTEKRSNSRRQSPGRDELQKRRLQEGSDVTVTPPSPVRDGPSFHPRKIALGCDALNRGSDAHGRHRRRDFRPRAPSTTSGRNLETQQAASAVADERRSRHCNSGRLRRPAGAPTPTSTPAHALARDQPAAASDGWHAEAANLARQIQPSARQRRSPWGRQIQPSAHQPPESRGGEAGADHADEQLTVTLAAVPAQIHQRETEMPRRRPPRKQPNLPAASSGSGAAGRGPRRGGGGY

SEQ ID NO: 76117 - protein, 198 aa, Zea mays
  Coding DNA Sequence Number=SeqID_32742
  Gene Ontology: Mol. function=transition metal ion binding; Cellular component=cytoplasm; Biological process=inositol metabolic process
  Homolog annotation: Hit_ID=Q10EZ2; Match level="QueryCoverage=99%, HitCoverage=10%, E-value=1e-15, Identity=84%"; Hit description =LOC495012 protein, putative, expressed
MVVMEGNGGAGRITIGVCVMEKKAFSSPMEQILERLRAFGEFEDTATTRPWPVRRTNGAGQWVGASGASVGRGLGRSGLGQVQPMGPGHNQNTWPDDAGGSHGVAMAGEVADQGGPGVGARLRQKRAGAGTKEEEKAMEEEVKTKRTGTRVIGVKIIIFGDKVILDDPIEIWPNCDCLIAFYSSGFPLQKVQAYAALR

SEQ ID NO: 76118 - protein, 152 aa, Zea mays
  Coding DNA Sequence Number=SeqID_32743
MGRLGSSGRLRNGGGKSEGRRRLGGSDMRRRASASGTTPFPPILLYLPLQAMIAGNGREGGRRGMGARSSRGDEGGSRGDEGDDIFGKEGRQVRWRRTVAGEGALMEMWRQNRAPYPVNGDLMVVANVGDSRVVLGTASDNGAVTPSSSSST

SEQ ID NO: 76119 - protein, 188 aa, Zea mays
  Coding DNA Sequence Number=SeqID_32744
  Gene Ontology: Mol. function=transition metal ion binding; Cellular component=cytosol; Biological process=inositol metabolic process
  Homolog annotation: Hit_ID=Q10EZ2; Match level="QueryCoverage=44%, HitCoverage=10%, E-value=2e-37, Identity=89%"; Hit description =LOC495012 protein, putative, expressed
MWGRSTRISINIALTELNIRTPERAQTNLLVGVGSKHRHSVYLSEHLEKYGIPVPSYALVNREYPDQELDYFIEQEDFVEVHGKRFLKPFVEKPVNGDDHRIMIYYPSSAGGGMKELFRKLCRPILAWLRCMGAPTRESRISVAVTRSTLWVVWVCTNPASCRSALLVVSLQAHERMTLRFTGPLGLS

SEQ ID NO: 76120 - protein, 116 aa, Zea mays
  Coding DNA Sequence Number=SeqID_32745
MREYAARPFLVNELEPQYLLHDRRKVYEFNSGHGKEYESAGHLAITNVGPPIASPKGGCHTLNAVHFATKLRRQLTTFQFHVFSLGNCGSTSCISLVCSPYVLSPTTSPLMIGGQD

SEQ ID NO: 76121 - protein, 261 aa, Zea mays
  Coding DNA Sequence Number=SeqID_32746
MGLGCPISQIWTRHRQDNLSMAGVIVSSSAARTEKSQEQDRLTRTRVDERQSARGCDRGRGQQVGEEEYGEGREDERDVRRWRNRWCVHDVKRPRGRAIATVRVGPGLVSDEYGKGAHAPTPSAENGVVRSWRHKGREKISRMATEMVATEARTIIIVRRGTGGATEHSAEVRPSEGVAGAVVRGRSSDQRGVSMADNEGTLDAVLKEAVDLVTAGLPLVGVGTVLGGTTLPLGIFAGSWISWLLRWCTILLLYYVLGFLR

SEQ ID NO: 76122 - protein, 378 aa, Zea mays
  Coding DNA Sequence Number=SeqID_32747
  Gene Ontology: Cellular component=mitochondrion
  Homolog annotation: Hit_ID=Q5NKR1; Match level="QueryCoverage=43%, HitCoverage=65%, E-value=6e-77, Identity=86%"; Hit description =Putative uncharacterized protein 5K14.3
  Subcellular localization annotation: CTP_CleavageSite=42; ConfidenceScore=5.57e-01
MAAAALRSSARRLLRLTPAPSSALFAASRPTARVAPLSRPIAALSGGNNPISWKLRRFFSSNEKHLPAISDPEIEAAFKDLLAASWNELPDSLVAEAKKAVSKATDDNAGQEALKNVFGAAEACEEFSGTLVTLRMALDDLCGLTGENVGPLPGYIEDAVKAAYNRYMTYLESFGPEENYLRKKVETELGTKMIHLKMRCSGIGSEWGKPSPVSGAIESSASPDPGLGLGLSPGRRRTPPRPTQGSDSGSAPEDDELRLARPRARTRAQPQKTTNSASPDPGLGLGLSPGRWRTPPRPTQGSDSGSAPEDGELRLARPQGSDSAMASADGLRLARPRGSDSTSASEDRLDLDLGGASASPNPGLGPTASQEGPSLPFP

SEQ ID NO: 76123 - protein, 134 aa, Zea mays
  Coding DNA Sequence Number=SeqID_32748
  Homolog annotation: Hit_ID=A2XMM2; Match level="QueryCoverage=66%, HitCoverage=16%, E-value=5e-23, Identity=62%"; Hit description =Putative uncharacterized protein
  Subcellular localization annotation: CTP_CleavageSite=38; ConfidenceScore=5.06e-01
MAGMRWGRWLGLVTVAWVQCISGNNYTLMSSSSPENCSSSSEWPDRAAASRSNRYLFDANAQARCAGYLDLMRLEVDAQLGRLRGGVTGLESYALPGNGRAIRGAHLGMSLDVMLIEIDERFNALKLLMGSVFR

SEQ ID NO: 76124 - protein, 239 aa, Zea mays
  Coding DNA Sequence Number=SeqID_32749
MGRFAVEWIYRQEGLQRPTRREEEFLGDGGGGCADAAAGGGRLADQMADDSPRARAWAMEAEVARMRQLAEVGWRIRWRMIPPGRELGRWRRRLRRCGSWRSRWLHVLGLGRHEEVRSRSSGGPPSPSTHHPRRPGSKAEANADLGARVGMRRERFLAPMTGATEAGGMGVACGDGERRADAEIGGGWGARARWRRYPGSRPTRHTTCGSLAPTRGGRGKRAVGACRNGGDVGGGATKL

SEQ ID NO: 76125 - protein, 185 aa, Zea mays
  Coding DNA Sequence Number=SeqID_32750
  Gene Ontology: Mol. function=carboxyl- or carbamoyltransferase activity; Cellular component=ornithine carbamoyltransferase complex; Biological process=amino acid metabolic process
  Homolog annotation: Hit_ID=Q8SA97; Match level="QueryCoverage=70%, HitCoverage=23%, E-value=1e-15, Identity=44%"; Hit description =Ornithine carbamoyltransferase
MALPVDVAGLCPRSGDVEAPPKPRSSLSSVAEAEPEPLGRARRGSFGTSQGGVRALGSGGAEVRRLPGLSPSPSPESGGAEFAVFRGLARVRALGRAEFPMAPLARPDCLPLQLYVDGGYQLRIRRLEGWPLRVREPFEERLFRFAFFESRVWSGRSAGNGLALVFIYPGEGLVTVLRSASCLFL

SEQ ID NO: 76126 - protein, 152 aa, Zea mays
  Coding DNA Sequence Number=SeqID_32751
MGKNNKRKREPTPPSEEFGDSEYSEEEFSSESEGSPAPIPLRESSDDSDDSQGLAAEVWTYIRAVERSGLEGSDESEYSSDEEDSDGGDEGEDDDDDDDDDDDDDDDGGSGSGRGGGDGSRDSTKGDSSRGGTKGSSRGSTKGGGGRGRASG

SEQ ID NO: 76127 - protein, 141 aa, Zea mays
  Coding DNA Sequence Number=SeqID_32752
MEHRPGLERLLETAHLELDGKLFVSTQQAPTWRANCRRLETGGSLSRRVGRRGGSSEAEVESVFRGRGRARAPGSGEVGVVRQRPGRSPSPGVGRSGVRRLPGPSLSPSPGSGGAEFAVFRGLARVRALGRAERSSPSSGA

SEQ ID NO: 76128 - protein, 100 aa, Zea mays
  Coding DNA Sequence Number=SeqID_32753
MAPLAGPDCMSVSLCQVALQSEWRRRRCPSVRPLYADGGYQLRIRRLEGTPNYGPRQDGFYLNVFQESYKGDMLSYRTSSEEYTYMSQTAGHSLWDLGNP

SEQ ID NO: 76129 - protein, 593 aa, Zea mays
  Coding DNA Sequence Number=SeqID_32754
  Gene Ontology: Mol. function=transferase activity, transferring hexosyl groups; Cellular component=Golgi apparatus; Biological process=carbohydrate biosynthetic process
  Homolog annotation: Hit_ID=A2YGX4; Match level="QueryCoverage=87%, HitCoverage=89%, E-value=0.0, Identity=94%"; Hit description =Putative uncharacterized protein
  Pfam annotation: Domain name=Glyco_transf_8; Domain location=251-567; Score=405.8; E_value=6.3e-119; Accession=PF01501.11; Description =Glycosyl transferase family 8
MAIRAGRSPLLHLLALAFLILAASPCLQVFCDAMWVGQIAFSIQSSDDSHPSISSSGPSQTDGPHLLGRSKEITHMKLRRVAVRKKMEVVQQDDEALVKLENAGIERSKAVDSAVLGKYSIWRRENENEKADSRVRLMRDQMIMARIYSVLAKSRDKLDLYQELLARLKESQRSLGEATADAELPKSASDRTKAMGQVLSKARDLLYDCKEITQRLRAMLQSADEQVRSLKKQSTFLSQLAAKTIPNGIHCLSMRLTIDYYLLSPEKRKFPNSENLENPDLYHYALFSDNVLAASVVVNSTIMNAKEPEKHVFHLVTDKLNFGAMNMWFLLNPPGDATIHVENVDDFKWLNSSYCPVLKQLESAAMKEYYFKADRPKTLSAGSSNLKYRNPKYLSMLNHLRFYLPQVYPKLNKILFLDDDIVVQRDLTGLWEVDLNGNVNGAVETCGESFHRFDKYLNFSNPNIAQNFDPNACGWAYGMNMFDLEEWKKKDITGIYHKWQNMNENRLLWKLGTLPPGLLTFYKLTHPLDKSWHVLGLGYNPTIERSEIDNAAVIHYNGNMKPWLEIAMIKYRPYWTKYINYQHSYIHGCKISQ

SEQ ID NO: 76130 - protein, 474 aa, Zea mays
  Coding DNA Sequence Number=SeqID_32755
  Subcellular localization annotation: CTP_CleavageSite=28; ConfidenceScore=5.03e-01
MQAACNRARWAHPFDSNAPSMEAQAHTSCNRRAGCYVRATAPPLAPLPRLLDCGTSTATRGNPAYDPTVPARHIGHGSVSCGKRRDRQYGQNWAGSNGSGRRAEAADRRHLWQEKRATLRLRHNDRVKKGIGKGDTPKGILPREGNGPRAPLLIRGSKAGPSEGFNSRLRALGIRAHYWSEVRRPAPQKGSTAASGHSGSAPTTDQGGNDLVTESHQREASSPRTPSKGDRVRQITRSSLETPCSAPSKGNMALSPLLLAERRRRGGSDSGSTPEDDELRLARPRARTRAQPRKTTNSASPDPGLGLGLSPGRRRTLPRPTLGLGLSPGLSRQSPPRPTQGLGLDLGLRRQTRPRPRRSLRVAQPRARTDRITGGAIITLPLASSGYGEQDRRPIWLAPVNKALLQKVGRAGKDGTVLATGKADGPNKIVIRGTKRKIDNDITDRLDISKPNGSASPSDYKTVLGVLGLRINSS

SEQ ID NO: 76131 - protein, 333 aa, Zea mays
  Coding DNA Sequence Number=SeqID_32756
  Gene Ontology: Mol. function=hydrolase activity; Cellular component =mitochondrial inner membrane; Biological process=metabolic process
  Homolog annotation: Hit_ID=Q850X1; Match level="QueryCoverage=37%, HitCoverage=71%, E-value=2e-51, Identity=71%"; Hit description =Putative isomerase
  Pfam annotation: Domain name=FAA_hydrolase; Domain location=30-156; Score=39.7; E_value=4.8e-11; Accession=PF01557.9; Description =Fumarylacetoacetate (FAA) hydrolase family
MAAAAAQKLLEASTKIIGVGRNYIAHAEELGNPIPKEPVLFLKPTSSFLHAGVATAAVEIPEPLESLHHEVELAVVISRRGRDIPEASAMDFVGGYALALDMTARGLQSVAKVPKSSVTNPDDLELWLKANRLKIAARVTLTRSSWTFTKAFGARFCRGSPPSMPAIGSDQYAISAPPVAEAAINAILPQSSPTALPAPSILLPTPPSILARALRTSPPSRSPPSSLLPPCRPPPLSDALTTVSDFSAAAPALSHPMDVLLPLQHAPSLPTPPSHAFGVHNVETWFIHRTTRMPFSQCSDFTPPPTFTIHSLEEEEETGAPMRFNAYERGCTM

SEQ ID NO: 76132 - protein, 48 aa, Zea mays
  Coding DNA Sequence Number=SeqID_32757
MGLGVCGSLCQGGDENDGFDYDYGNGKEEEEGVEADFQEFQDIDEFED

SEQ ID NO: 76133 - protein, 58 aa, Zea mays
  Coding DNA Sequence Number=SeqID_32758
MGLGVCGSLCQGGDENDGFDYDYGNGCLWCNLCSGKEEAEEGIEADFQEFQDIDEFED

SEQ ID NO: 76134 - protein, 98 aa, Zea mays
  Coding DNA Sequence Number=SeqID_32759
  Gene Ontology: Mol. function=protein binding
  Homolog annotation: Hit_ID=Q688N3; Match level="QueryCoverage=92%, HitCoverage=12%, E-value=9e-17, Identity=54%"; Hit description =Putative uncharacterized protein P0605G01.6
MALAHEVHEVDVLIHCISSWHHAGRATHVLTKLAKNKEVVNVIVEGSVVTALVCHLEEPVVAVQTQEEQQMQPFEHEVEKGSAFTPGLLAGKVPSLIP

SEQ ID NO: 76135 - protein, 242 aa, Zea mays
  Coding DNA Sequence Number=SeqID_32760
  Homolog annotation: Hit_ID=A2XGL5; Match level="QueryCoverage=58%, HitCoverage=41%, E-value=9e-28, Identity=54%"; Hit description=ATP -dependent Clp protease proteolytic subunit
  Subcellular localization annotation: CTP_CleavageSite=44; ConfidenceScore=5.85e-01
MTSASTFLSLRLPTPSHATSSLSFPPSLLRQARGGVASSTLVARAAGPTGAAGAPSPLFNPRGDPFLSTLAAASPEDLAAAAGGERRGEDHLPFLEIFQNTKLMASPAQVERSSSSYSQHRPRRPPPDLPSLLLHGRIVYIGMPRGKTPGGEVRQEGSCGEPRSNELFNFSEDVLLAFVHVQNVFPSDPVDHWLCHRHLQDLSLEVCHIISEGVQSRGVTVIDALASELKTTKSLARAWHTD

SEQ ID NO: 76136 - protein, 123 aa, Zea mays
  Coding DNA Sequence Number=SeqID_32761
MSFSFCHEVIVLGRREEYQEFEDAFRYNSPDCPVSQQSNGSLLIQRSTVEMSKRNSAAQKSEAHKSEGTGLSGVAPDCLVQLDDKGSNGQPASNPNSCADVARTGQRIGLSGAPIASSLHQRL

SEQ ID NO: 76137 - protein, 101 aa, Zea mays
  Coding DNA Sequence Number=SeqID_32762
MVESALGMQLCEEQLQEWPPMGFAGGSWPRPSSGMAEFFPRLRPTSDERPLTEAGLGVILLSETGSGEAETSVPRRGDLGRDEDFLKCCPRPREGSNEVEF

SEQ ID NO: 76138 - protein, 127 aa, Zea mays
  Coding DNA Sequence Number=SeqID_32763
MALSTEAWMVHGLAQRLGFLSNESDEVEIENKKTKVVFTQVAFFFPMLFTAASHPGFSSPRHPLHLCFGWHMETSHVTRAAVLLLPQPPGRAPHTTAGTEQQPHGSSFPVQRQVRGRTMSLLGALPT

SEQ ID NO: 76139 - protein, 104 aa, Zea mays
  Coding DNA Sequence Number=SeqID_32764
MASAVLSPRENSYTKKTMVLGRRRRRYPSLEAFANLTAPTETKRPTGPTLRPLHCKTKAYDEAAPYHVLTQPGGPRGIRHIVTGPARRICNPLLWEYSGDSPGA

SEQ ID NO: 76140 - protein, 99 aa, Zea mays
  Coding DNA Sequence Number=SeqID_32765
MTLSGVGTGSSIKAKGVTFVELTVRTKTLDAAFFVADLVGDEVEQVHVDASACIAVADAPVSLNGVKFAKQNDLAVGDYYNSMMNNIDEVTDKRVIALG

SEQ ID NO: 76141 - protein, 217 aa, Zea mays
  Coding DNA Sequence Number=SeqID_32766
  Homolog annotation: Hit_ID=A2XFR6; Match level="QueryCoverage=65%, HitCoverage=41%, E-value=9e-07, Identity=32%"; Hit description =Putative uncharacterized protein
QEIESVRSCSPVLPLEAPPAPPLSALAPGVAAGGDPDDGGGDNSSSHDTDFSASQEPEGWVARPITHDAAQVCSEHYSISERDSAEAAMQDAAWRALSHYCSVFGGVADGLNLKYYPRRPSGSTGGVIVSPVGEDNPRLSSTVNLAAVLNTELDHALDELSRARAEIAELRAQRAERRHLDDGSPAPVGTQHPYRSPRRGHQSYGNPDCKTKIDLGP

SEQ ID NO: 76142 - protein, 68 aa, Zea mays
  Coding DNA Sequence Number=SeqID_32767
MARPARGHGAATRLARARLENDLVEELEELTGEAPEQQSVGGGKCPLTYLCPIHSLIHLPHYTFIPKD

SEQ ID NO: 76143 - protein, 201 aa, Zea mays
  Coding DNA Sequence Number=SeqID_32768
MQAACNCTKGAHPFDFDASSMEAQAHTSCNRRAGYYVQKTAAPLAPAPCLLDYGTGAATRGNPAHDPTVPTRHAGHRTGHTFGRRSGRRFTSAIMTTLKKVRPNIQFRIIFLFPFLSLATDTGKGGYSETDPSPRRKQAPSPPTDQSSKAGPSEGFDSRLRALGLHARYWSEVRRLAPRKGSTAASGHSGSVPTTDQGFVG

SEQ ID NO: 76144 - protein, 258 aa, Zea mays
  Coding DNA Sequence Number=SeqID_32769
MGRRETETQGGKTGNDGPSLWRGRPKRGGDSSEVEVESKPGGQARRRPLSEVKVESEPWGRARRRSSSGVEVESEPGGRARRRPSSGVEVESEPEDRARRRPSSGVEVESEPWGRARRRFLWRPRLDLAAVSLTLAGGTAVGAAQVILALNAPTIRSAGEAIWPRLLLREACPNRASGESKLCADGGYQLRLGALGSGSEFSGLYVDAVNGLAGAGFARAAPEPLHRGAEHGVSSELLTGDLPDPVPFDRVRGLDASL

SEQ ID NO: 76145 - protein, 306 aa, Zea mays
  Coding DNA Sequence Number=SeqID_32770
  Gene Ontology: Mol. function=methionyl aminopeptidase activity; Cellular component=chloroplast; Biological process=proteolysis
  Homolog annotation: Hit_ID=Q6Z4B5; Match level="QueryCoverage=97%, HitCoverage=80%, E-value=5e-97, Identity=60%"; Hit description =Methionine aminopeptidase
  Pfam annotation: Domain name=Peptidase_M24; Domain location=143-306; Score=45.3; E_value=1.4e-12; Accession=PF00557.15; Description =metallopeptidase family M24
  Subcellular localization annotation: CTP_CleavageSite=38; ConfidenceScore=5.42e-01
MAAGLGARPSATFVAGRFRPLAAPLRPVRSGKFVVPKRCFIVSSRLAWVEDELMEIQKNSRYVPDTYPEVSEEYLYPIRYPTPKKKTAFETALPVQDDVLSGFESCRVFAVQVGGHIPRPSYVGAKGLPELCKGQLHDAQGITGMRAACKLAARVLDFAGTLVKPSITTNEIDAAVHNMIIEAGAYPSPLGYHGFPKSICTSVNECVCHGVPDSTQLQGYHGGTSRTFACGQVDDSIKHFLNAAEECLEKGISICRDGVNYRKIGKKISKLAYFYGYYVVERFVGHGIGTMYHSEPLILHHGGYHF

SEQ ID NO: 76146 - protein, 209 aa, Zea mays
  Coding DNA Sequence Number=SeqID_32771
MVIRPFIFEATNGREDKPPHKERATAPRLCASSFSPKPAVKKANRHTGSIQPPHGCAPPQLRCNRQSNMGARPTCHATGAPVNECGKSHRRLRQCRVPSGPPQKTEKISFQNQCNDSRHPTHGPTVTLSTKVTGQSAVGTGVAAGVAISGPAVIASTGAQEQQANRQSDSGPTCRLAPSPEASPRATVSTLNQGYPLLQYKDAARRTAS

SEQ ID NO: 76147 - protein, 265 aa, Zea mays
  Coding DNA Sequence Number=SeqID_32772
  Subcellular localization annotation: CTP_CleavageSite=33; ConfidenceScore=5.22e-01
MTTSFVVGRSKPGCGLPPHPQLQGCSSSLLGWKASRVRALPSAWAGDPLIPPAFGGEGCSLALRRRRILATRGRLAAGRQLQRVWPFGLDGFGAASDTASCRLAGAWLSIHRTGDGRIVRGFATSTASPARRPHWGVVQDAVRRGGGGRVLGWSCPHSRGRTGARTPSHVLRHPSSTSAEVAAVVGAEVVAAAGGQGRGPPRNGAHPEVVAAAGKPLGVEVVVAAGAEVVAVAGESSVQRWSPPPVRLLGAIFQRDCRRFDLGGP

SEQ ID NO: 76148 - protein, 332 aa, Zea mays
  Coding DNA Sequence Number=SeqID_32773
  Subcellular localization annotation: CTP_CleavageSite=84; ConfidenceScore=5.53e-01
MSLIRDYNGDSNIYGLKGHSTFMSVCKYRSFMKRNLRSSHTNSFSRKLLLPTRPSATKHSPNNSSRSGAGSAVLLSGRARVRIRCQATFALNAPAIRSVGVAAWPRLLLGEVWASGEPKGCLESRYWFRSRGGAVVARVAVRFLARSDRRAGCMTRGPGPPCWTRRSRKGAPLRCGCMPPAWRSALSPAGLGESGGMLVTAGQLRAPRAVVWLLLPWASLHDAWDPAPVSQGEDLGACWRRLSPRWLRTQVRRVAFKRGVTPLKGNHVFAFPLCIVSFHLPSPRMGDTRSLSTLSSEECNFAEVGTFQPSFGFKDFHQAARLHPLAGGHPRW

SEQ ID NO: 76149 - protein, 84 aa, Zea mays
  Coding DNA Sequence Number=SeqID_32774
MPHLTAGGSIGGGTKAIQAKEPDTRQLTAPAAGRPRVAEVRLLRKDGEHPSPPNDGGRSGSPAHTEGRTPTQLAFHPNEDDEHP

SEQ ID NO: 76150 - protein, 134 aa, Zea mays
  Coding DNA Sequence Number=SeqID_32775
MDAPADVLEVKKKRKLWHMLGMEPVPAQTKLAIGGDVVDDDLVDDVEGGGVVKTARYIVEEMGEDEEEEEVFPLVLHERHSKTRNDASSLASLVRMMEIQAPVLEGASAPEGVAVGSSPAISVEVQVGLCHTWF

SEQ ID NO: 76151 - protein, 137 aa, Zea mays
  Coding DNA Sequence Number=SeqID_32776
MELRGCRNNSLAADNAPGDALDGVRDGKLLVEGITQCAAWHGRTVCQQTQQARRLLDDLDAICQRMGRDTLNAERARRPLGPMAYVMGHKQRAFAYAMSGEQGLHTGPVTLYGGPVLLRHGAFPRHVAPFGPPIRWS

SEQ ID NO: 76152 - protein, 678 aa, Zea mays
  Coding DNA Sequence Number=SeqID_32777
  Homolog annotation: Hit_ID=Q6JAD6; Match level="QueryCoverage=91%, HitCoverage=88%, E-value=0.0, Identity=63%"; Hit description =Putative uncharacterized protein
MPRTKNVSAPVGGDDEDPRRPFRQVKGKTVYLEQQEGRKKRRTDRAARAAAAAAAAAAQAKLGDQPQTPSDQIAYRVRRLASRPRSSTHTSASTPPPTLPAPVTPVAPSTTTATPATSTTPASTAPPPPAPASAPPVPPPRFRERDETEVRPLAADPRLFDLQRATAARVRRFRYVPVESWLPAQRDPAAGDLFSTRIQESFFRAQMSAQIALRVHRLLDLPAFLLAAGDDSEAHLTYMPGLLTLLTTSGRYVEEWVRVFYASVWIDSDHHWMRFRFEREDVTITTSQIHQLFGFPESTTRLHSLCYGTSDPPRRPHGGVAPGTAHVAALFRPLDSRRSPADFTTAAKYLFELIRRTLLPRMGYREATTHIQLWLLGALVSHSEFDVVDFLICEIEDTVLDGIRARRQLPYAHYLCHIFAQLIQPPRFQGTLEASRLVFGSYRPAPEAPVPASAPVFDSQAEDAALRQFDTQGTAAAADDDDDDFEVPPPPPPPMPPRSHDHEAGSSSAAPAAPPAMDPALASILQSITQQQAHLAAEQARLSERMLSMFQNMQDRQDALQQQLLQDLAESRAFMALMLQQSGVSVPPVQSAPPPPLHAPVVPSILSGPPVGTSPLRPGHFGFHLSGSQLCLPAAASATSICCLHYCCGNICDHFSSNSSCSAASLRVSTSSSFYRRS

SEQ ID NO: 76153 - protein, 62 aa, Zea mays
  Coding DNA Sequence Number=SeqID_32778
MEGARRGRAGRLLRPGEHRARSTVPSPGVEEGRRGRRSGHERQGSWPMAWHGRARPEGAESH

SEQ ID NO: 76154 - protein, 166 aa, Zea mays
  Coding DNA Sequence Number=SeqID_32779
  Gene Ontology: Mol. function=structural constituent of ribosome; Cellular component=ribonucleoprotein complex; Biological process =translation
  Homolog annotation: Hit_ID=O81229; Match level="QueryCoverage=65%, HitCoverage=100%, E-value=3e-43, Identity=82%"; Hit description =Ribosomal protein L25
  Pfam annotation: Domain name=Ribosomal_L23; Domain location=84-163; Score=105.2; E_value=1.9e-28; Accession=PF00276.11; Description =Ribosomal protein L23
  Pfam annotation: Domain name=Ribosomal_L23eN; Domain location=25-78; Score=71.9; E_value=2.2e-18; Accession=PF03939.4; Description =Ribosomal protein L23, N-terminal domain
  Pfam module annotation: Pfam domain module=Ribosomal_L23::Ribosomal _L23eN; Domain location=84-163::25-78
MKRQGGSFEKLKWLLKAYSAPAKKGDAKAQALKVAKAVKSGAGKKKTKKIRTSVTFHQPKTLKKARDPKYPRISTTGRNKLDQYQILKYPLTTESAMKKIEDNNTLVFIVDLKADKKKIKAAVKKMYDIQAKKVNTLIRPDGKKKAYVKLTPDYDALDVANKIGII

SEQ ID NO: 76155 - protein, 122 aa, Zea mays
  Coding DNA Sequence Number=SeqID_32780
  Homolog annotation: Hit_ID=A7PRZ8; Match level="QueryCoverage=55%, HitCoverage=18%, E-value=4e-07, Identity=47%"; Hit description =Chromosome chr14 scaffold_27, whole genome shotgun sequence
MSRAFDDYYIKDCGIISALEVTQRRTDSNDQFVILATVEDLYVSHKLVSSENLTCAPNRAPMTRTMAEVEYQDDDEDGDEGGDGEGGSSSKGINDGGGGDDGGGQGDSGNGGNNPGGMAPLA

SEQ ID NO: 76156 - protein, 182 aa, Zea mays
  Coding DNA Sequence Number=SeqID_32781
MAFVLPCAQVRRGGGSSEVEVESEPGGRARRSSSSSRAEAESEPWGRARRSSSSSGAEAGSEPWGQARRSSSSSGAEAKSEPWGRARWSSSSSGAEAESEPWGRAKRSPSSSVEVEPEPWGRARRSFLWRPRLDLAAVSLTLLSGTAVGATQATLFSCQVGQWSGEVTAVTSALSTEEHTSG

SEQ ID NO: 76157 - protein, 45 aa, Zea mays
  Coding DNA Sequence Number=SeqID_32782
MVVDGLRLRLIGLLRPHTQSHASLTDQVRPFLAYVQIQPPFLAYS

SEQ ID NO: 76158 - protein, 94 aa, Zea mays
  Coding DNA Sequence Number=SeqID_32783
  Subcellular localization annotation: CTP_CleavageSite=48; ConfidenceScore=5.16e-01
MANAPNSFMPWLLRSPTVVLSLFLLNGGLLNMEALVASLPTLSTQDTAASAGQMPLPFSKLEDIVRPSEYTLVQECFFHFSAENTKRLKTKGGD

SEQ ID NO: 76159 - protein, 183 aa, Zea mays
  Coding DNA Sequence Number=SeqID_32784
AHRGERGRRGRTAWTNGERGVDERWALFFATAATGSLRGRRALFFAGGRGARQACRGEGRGDVGLGGVGVGLSRRAGARGAACRGGRRGARLPGRRAGVQHGVVGARELCGRRRGAGRGSSARGRRCVGVMGPGAELYEGLGGEAASWGPGVVGAGRGGVVGALHGGEGRGSSTVLACGGAAW

SEQ ID NO: 76160 - protein, 60 aa, Zea mays
  Coding DNA Sequence Number=SeqID_32785
MGLKTLSTECTFASLTCQRKRLSRICRPLGIKVSSESGYEYTRVRSGQSLSETEGDYDEG

SEQ ID NO: 76161 - protein, 119 aa, Zea mays
  Coding DNA Sequence Number=SeqID_32786
  Subcellular localization annotation: CTP_CleavageSite=90; ConfidenceScore=5.70e-01
MALAGADLRPGLPGLQPRSRPSHVHVRSTAPQSSLQPPAACLRPSRVSASVQPPLVVSGSRRLRLSPFRSWTRGRWPRKLPQARLRSWALAVSGRGLVGVSRLTVTPSPGSRRPALADS

SEQ ID NO: 76162 - protein, 200 aa, Zea mays
  Coding DNA Sequence Number=SeqID_32787
  Gene Ontology: Mol. function=carboxyl- or carbamoyltransferase activity; Cellular component=ornithine carbamoyltransferase complex; Biological process=amino acid metabolic process
  Homolog annotation: Hit_ID=Q8SA97; Match level="QueryCoverage=80%, HitCoverage=25%, E-value=1e-26, Identity=47%"; Hit description =Ornithine carbamoyltransferase
MAPPVDVAGLRPRLGDVEALPKPKSSLSSAAEAESEPLGWARWRPSAEARAESEPWGRAKRRAEPESEPWVGRSGVRRLPGLSLSLSPGSGGAEFAVFRDLARVRALGQAERIGVAQAALSFCQAGQWSGKVTALYADGGYQLRIRSLEGTPNYGPRQKDFGEFRDLAKLGCISLDASYWIKSIAKWVSKYFGPEFPIHD

SEQ ID NO: 76163 - protein, 282 aa, Zea mays
  Coding DNA Sequence Number=SeqID_32788
  Subcellular localization annotation: CTP_CleavageSite=26; ConfidenceScore=5.42e-01
MQAACNRTKWTPFSDSQHAQPGARARATAAPPTTRPVALTPRWDRRRLWQEKRATLRLRHNNHAKKGTGKGDTPKRILPREGIRLRASLLIRGSKAGPPEGFDSRLRSRGPYTHYWSELTGDTMFGAHRGQHGAFPPSSLRKGDAGAAQTRAKSRKTANSAPPDPGLGLGLSPRRRRTPLRPTQGSDSGSAPEDDELRFARPQGSDSALASADGLRLARPRGSDSASAVEDRLDFGFGGASTSPNLGRRPATSTGGAIITLPRADSGRREQDRRPIWLAPPR

SEQ ID NO: 76164 - protein, 160 aa, Zea mays
  Coding DNA Sequence Number=SeqID_32789
  Homolog annotation: Hit_ID=A2YCE4; Match level="QueryCoverage=70%, HitCoverage=69%, E-value=1e-18, Identity=46%"; Hit description =Putative uncharacterized protein
  Subcellular localization annotation: CTP_CleavageSite=75; ConfidenceScore=5.12e-01
MSDLKYSSYTRLGLRRWRRTARGVRLSPTRITVRRLRAKLWTLLGLLGRCVRNLRLLTKGRMAAAAGAVKASSPPAAATGSRRFLVAGQKRSLAGGKTGRQAAGDGGSSSSKPPRRPPCMRSNSFYARAVAECLEFIKGSNAPPASPSPLAAHGTPRRGT

SEQ ID NO: 76165 - protein, 331 aa, Zea mays
  Coding DNA Sequence Number=SeqID_32790
  Gene Ontology: Mol. function=sugar:hydrogen symporter activity; Cellular component=integral to membrane; Biological process =carbohydrate transport
  Homolog annotation: Hit_ID=Q2R0P8; Match level="QueryCoverage=100%, HitCoverage=66%, E-value=6e-64, Identity=65%"; Hit description=Sugar transporter family protein, expressed
  Pfam annotation: Domain name=Sugar_tr; Domain location=1-329; Score =18.0; E_value=1.1e-09; Accession=PF00083.15; Description=Sugar (and other) transporter
VFVNVGILLSYVSNYAFSGLPVHLGWRAMYAVGVVPPVFIAAGVLLVMPESPRWLAMRGRQSDARAVLLRTLDTPAEADLWLGEIKRAVADAEPPPPPAGRGAGASVSIWKQLLVRPSTNVRRILTCVLGLHFFVQASGVDAILLYSPLIFRAVGMASDSAILGATVAMGAVKSCFILVGMLFTDRLGRRPLLLASTAGVAVTATALAVTLYVGTSTTTSTSPATTAACLASVLAVVATYSVGYGSVVSAYSAEVLPLRLRAQGSSLAMAVNKLMAGVVSMTFISLADAITMPGCFFLYAAVTAAAFVFVYTRLPETKGRSLEDMEVLFHK

SEQ ID NO: 76166 - protein, 77 aa, Zea mays
  Coding DNA Sequence Number=SeqID_32791
  Subcellular localization annotation: CTP_CleavageSite=68; ConfidenceScore=5.22e-01
MGDLGAFVDPAARQRHHLSPELAAQPSVSCRPRSTWPPPTHCSGTASSRRRLIWPPAAYPLARLPSPSAGAHRTRYL

SEQ ID NO: 76167 - protein, 221 aa, Zea mays
  Coding DNA Sequence Number=SeqID_32792
MSGAPATSSYPLRFELVDRWRLCPHVAPDSPVSKGWLLPRFHHPCRSSAFLSEYSRLEDYPRATGWFSRSWWNGLASRLTSLHGKIKKLFVKAFLWPLLGDKQASKGQGMLPTRQWRRCPSRYNSKMAQYRMVQASRMRQLVVCVGPTGAYMGPSGCRPAADQVRAVSPNHRRRFDNMHVQVPANQVSGKCFAHVRSGSSSTLVEIAANLFCFNVVNIICQ

SEQ ID NO: 76168 - protein, 394 aa, Zea mays
  Coding DNA Sequence Number=SeqID_32793
  Gene Ontology: Mol. function=sugar:hydrogen symporter activity; Cellular component=integral to membrane; Biological process =carbohydrate transport
  Homolog annotation: Hit_ID=A3CD49; Match level="QueryCoverage=80%, HitCoverage=62%, E-value=1e-112, Identity=68%"; Hit description =Putative uncharacterized protein
  Pfam annotation: Domain name=MFS_1; Domain location=47-371; Score =34.6; E_value=3.6e-07; Accession=PF07690.7; Description=Major Facilitator Superfamily
  Pfam annotation: Domain name=Sugar_tr; Domain location=43-384; Score=- 27.1; E_value=6.3e-08; Accession=PF00083.15; Description=Sugar (and other) transporter
  Pfam module annotation: Pfam domain module=MFS_1::Sugar_tr; Domain location=47-371::43-384
  Subcellular localization annotation: CTP_CleavageSite=43; ConfidenceScore=5.47e-01
MAQAAGTADATDEAPLLLASSAAGSTPSPPGSAPRRNRFAFVCATLASVTTMLHGYNLTLMSGAELFMREDVGLTDGEVEVLAGSMNVFMLASILAAGWVADHLGRRRTLVLANAFLMAGALAMSLGTSFAALMAARFVTSVGSGFARVVAPVYNAEISQAATRGVLSSMLDIFINVGILLSYVSNYAFAGLPVHIGWRLMYAIGVIPPVLIAAGVLVIMPESPRWLAMQGRHADARAVLLRTSDSPADADFRLGEIKRAADAPSPAAAARHGGGGVWRELFVRPSTTTTSVRRILGCVLGLQFFVQASGVDAILLYSPLCWNLYCLGSIPKSLEYQSVTESKILMTCRSDLLRGTGKHTFVVVAIFIPSPCREAAGIRIRAAVGCRVSKHSDV

SEQ ID NO: 76169 - protein, 128 aa, Zea mays
  Coding DNA Sequence Number=SeqID_32794
MAAGPCCQGKLTTNRGLGERAIASCGWASDFRGRGLVNATTRVQGTFKERQQENKIGSSIVYSFFSSTLTLATSTCELVALTFRYLRPIDAILEDFLDLWVRTHTGFRCATLILLVDVDRIVSIGVSG

SEQ ID NO: 76170 - protein, 70 aa, Zea mays
  Coding DNA Sequence Number=SeqID_32795
MALIPLMSHPVLEANVPFGYSGLALCGVKVKQLLLVDQPELARPLFTPKVNGQGFTMKPLQRFPEAVAVR

SEQ ID NO: 76171 - protein, 77 aa, Zea mays
  Coding DNA Sequence Number=SeqID_32796
MNKNTRDTRFIPRFGHTTKVPYFLVEAPTKSRERKPQLNCPEASSAGLKKLNSAEVKCSWKAQLQLKKFSCFSARTL

SEQ ID NO: 76172 - protein, 191 aa, Zea mays
  Coding DNA Sequence Number=SeqID_32797
MARGSTRGEEGWGQPTAQAKDGGAGGSGSGFGTLGTGPWTCALTAEGAVNGEDEQGAVGRRWRGEVALRVCDVGAEGSGLATGARGHGCWALLPGAAHNQSRPRRARNRAVRLGERLPRAGLRERSGAGLGNAGLGAAGWAMRVGHRNRAAALGFGEGARGMGLVGPCGCAWEWAGVGKMACGPRGRLAGG

SEQ ID NO: 76173 - protein, 487 aa, Zea mays
  Coding DNA Sequence Number=SeqID_32798
  Gene Ontology: Mol. function=sugar:hydrogen symporter activity; Cellular component=integral to membrane; Biological process =carbohydrate transport
  Homolog annotation: Hit_ID=Q2R0P8; Match level="QueryCoverage=97%, HitCoverage=98%, E-value=0.0, Identity=71%"; Hit description=Sugar transporter family protein, expressed
  Pfam annotation: Domain name=MFS_1; Domain location=40-436; Score =104.5; E_value=3.3e-28; Accession=PF07690.7; Description=Major Facilitator Superfamily
  Pfam annotation: Domain name=Sugar_tr; Domain location=36-485; Score =329.8; E_value=5e-96; Accession=PF00083.15; Description=Sugar (and other) transporter
  Pfam module annotation: Pfam domain module=MFS_1::Sugar_tr; Domain location=40-436::36-485
  Subcellular localization annotation: CTP_CleavageSite=35; ConfidenceScore=5.41e-01
MAHADGTADDGATAPLLASSTKSGKPPRRNMYAFACATLASMTTILMGYNLALMSGAQLFIREDLGLSDAQIEVLAGSINVFMLMSILAAGWAADLLGRRGTLVLANVFLMAGALAMSLGASYPALMAARCITSVGSGFSIVVTSVYNAEISPASMRGFLSSFLDMFVSLGLLLSYVSNYAFAGLPVHLGWRTMYAVGVLPPVLLAVGVLAMPESPRWLAMRGRHADARAVLVRTSDTPAEADLRLEEIKQAVKEEPQPQGSSDSDGGNAWKELLVRPSASVRRILVCVVGVHFFQQASGIDAIVLYSPLVFRKAGMSSNKAILGATIGVGVVKMCFVLVATLFSDRLGRRPLLLASTAGVAASMASLGVTLCIGVASAASMAASVLSVLAFMAAFSIGFGPLAGTYSAEIMPLRLRAQGASLGMAVNRLTCALVSMTFISLADAITMPGCFFLYAVVGAAACVFVYARMPETKGRSLEDMDVLFAK

SEQ ID NO: 76174 - protein, 660 aa, Zea mays
  Coding DNA Sequence Number=SeqID_32799
  Homolog annotation: Hit_ID=Q6JAD6; Match level="QueryCoverage=97%, HitCoverage=97%, E-value=1e-122, Identity=55%"; Hit description =Putative uncharacterized protein
MPRTKNASASGGGDDEDPRRPFRQVKGKTVYLEQQEGRKKRRSDREARAAAAAVAAAAQAALGDQLDVPSDQIAFRARRLASRSRSSTHTSASTPSPTLPAPVTPIAPSTSTAIPTTSTTPASTASPAPRSRFSSSCPSHLASGSAMRLSVLLQPGYVGSGTYPVESWLPAQRDPAAGVLFSTRIQESFFRAQMSAQIALRVHRLLDLPAFLLAAGAESEAHLTYLPGLLSFLTISGRYVEEWILHVALTAVWLQGQLTSRLCSARPSQMGRDVLQQTSLPQRSAYMSSSDGHSLPRMGYREATTHIQLWLLGALVSHYEFDVVDFLICEIEDTVLDGIRARRQLPYAHYLCHIFAQLIQPPRFQSTLEASRLVFGSYRPAPEIPVPASASVFDSQAEDAALRQFDTQGTAAADDDDDDDFGVPLPPPPPMPPRSHDHEAGSSRAAPAPPPALDPALASILQTLTQQQQTLTQQQQTLTQQQALLAAEQARLSDRMLSMFQSMQDRQDALQQQLIQDRAESRAFMALMLQHSGISAPPVQSVPPPPLHAPVVPSILSGPPVGTSPLRPVTLAFTSPVLSSVCPQPPVPPASAVTTTAVAVSVTASVPVAPAALPASESVPAPASTADPGSETDSDPPSAFALLPRPRPDAPPPPPPASDV

SEQ ID NO: 76175 - protein, 98 aa, Zea mays
  Coding DNA Sequence Number=SeqID_32800
MARAAKVCSVWVHQASSSEVAALGNSPATYGYNSPDCPMSENRRRGGRRAQQEQTAQQDEAPQQQQLPPPPPMSIEQMFLIQTQAIQAIGQTLAAIQQ

SEQ ID NO: 76176 - protein, 269 aa, Zea mays
  Coding DNA Sequence Number=SeqID_32801
MAAPRLETACRFRPAPTRWHRRFSLPVFLDQCSFSSPWSKNDPVEEPEELAGEAPEQQSMARLRHIARKSVIPFLPSRLAERPLCCPVAGQSSHLERLHHRLHEEQERRRQEQQGSSFSLQQEIESVRSCSPVLPLEAPPAPPLSALAPGVAVGGDPDDGGGDSSSSHDTKFLLTRSRKDGLLDPITRDAARGCHFHDAVDTLLRWALDLHSRGVYPDRWEATCLVRRPENSLWGAEVCSEHYSISERDSAEAVKGKCALGPFLSILVI

SEQ ID NO: 76177 - protein, 43 aa, Zea mays
  Coding DNA Sequence Number=SeqID_32802
MGLGVCGSLCQDDDEDGYDYVYGKEEGVEVDLQEFQDVYEFED

SEQ ID NO: 76178 - protein, 99 aa, Zea mays
  Coding DNA Sequence Number=SeqID_32803
MKGSNHVLEKGDTRCRKHDVVDVEESRESEGEDDPNGGKIDNNPGGLIVVHSGTLSKAPKDPTNHVVIERAIRGELMAEDPLAGGYPVRASSSARAIKG

SEQ ID NO: 76179 - protein, 54 aa, Zea mays
  Coding DNA Sequence Number=SeqID_32804
MAPVLQRPARAPLPGSEGRAPYDDEEDGYDYAYGKEEGVEVDLQEFQDVYEFED

SEQ ID NO: 76180 - protein, 143 aa, Zea mays
  Coding DNA Sequence Number=SeqID_32805
MERERRSSGGTAEAAGSGNTVEAAGSGDARRERQRLGRSASENSGLGRSMTKGSGLGRGGPTAAAHAMVVRAISLWSTEVAEPELLYTAGAKYEPREDGRTATNFHKRRTKVGVLLRACDWDGEKGADNWAPLVGDQVHADED

SEQ ID NO: 76181 - protein, 506 aa, Zea mays
  Coding DNA Sequence Number=SeqID_32806
  Gene Ontology: Mol. function=sugar:hydrogen symporter activity; Cellular component=integral to membrane; Biological process =carbohydrate transport
  Homolog annotation: Hit_ID=Q2R0P8; Match level="QueryCoverage=90%, HitCoverage=95%, E-value=1e-150, Identity=62%"; Hit description =Sugar transporter family protein, expressed
  Pfam annotation: Domain name=MFS_1; Domain location=61-460; Score =91.2; E_value=3.4e-24; Accession=PF07690.7; Description=Major Facilitator Superfamily
  Pfam annotation: Domain name=Sugar_tr; Domain location=57-504; Score =261.9; E_value=1.3e-75; Accession=PF00083.15; Description=Sugar (and other) transporter
  Pfam annotation: Domain name=Voltage_CLC; Domain location=56-390; Score=-173.5; E_value=0.024; Accession=PF00654.11; Description =Voltage gated chloride channel
  Pfam module annotation: Pfam domain module=MFS_1::Sugar_tr::Voltage _CLC; Domain location=61-460::57-504::56-390
MKDLGPLHHFLRITIDDAAGTADATDEAPLLLASSAAGSTPSPPGSAPRRNRFAFVCATLASVTTMLHGYNLTLMSGAELFMREDVGLTDGEVEVLAGSMNVFMLASILAAGWVADHLGRRRTLVLANAFLMAGALAMSLGTSFAALMAARFVTSVGSGFARVVAPVYNAEISQAATRGVLSSMLDIFINVGILLSYVSNYAFAGLPVHIGWRLMYAIGVIPPVLIAAGVLVIMPESPRWLAMQGRHADARAVLLRTSDSPADADFRLGEIKRAADAPSPAAAARHGGGGVWRELFVRPSTTTTSVRRVLGCVLGLQFFVQASGVDAILLYSPLVFKAVGVASTSAVLGATVSIGAVKTCFVLVAMLFTDRLGRRPLLLASTAGVAVTATALAVTLCVGTASPATAAACLASVLAFVAAYSIGYGSVVSTYSAEVLPLRLRAQGSSLGVAVNRLTMTFISLADAITMPGCFFLYAAVTAAAFVFVYTRLPETKGRSLEDMEVLFRK

SEQ ID NO: 76182 - protein, 212 aa, Zea mays
  Coding DNA Sequence Number=SeqID_32807
NANIADGDTLADEVKLDRSPRATCADAARDCWTGCACEGTLAERRRRCRPAQCEVLEGSREDPVGHLVADRGSVVIEEHCLSVNRCGAGLAVGHTNMLQDIDDVPALVAAQALRPPLNDYPEKVVERTQVLHRELTMKGNNHVLEKGNTRCRQHDVVDVEEVDSVIVVSMDEQGCVRLGLDETKGDQAGGEATIPGSWGLLKTIQRAIHPAD

SEQ ID NO: 76183 - protein, 821 aa, Zea mays
  Coding DNA Sequence Number=SeqID_32808
  Gene Ontology: Mol. function=binding; Cellular component=integral to membrane
  Homolog annotation: Hit_ID=Q2QZL5; Match level="QueryCoverage=94%, HitCoverage=98%, E-value=0.0, Identity=45%"; Hit description =Putative uncharacterized protein
MAGSESSMEYQLKKYLLLLATLVATVTYAAGLNPPGGSWLEDDRAAGELAGDSILRDTNYVRYIIFYCFNAVSFAASLVVSLLLLLLHRDAAASLLKLTRAVMVVDLLALMGAYAAGTSHDRFTTVCASVLVIATAVYVIVAVPRFSISTSASAQTEQPQPPSPGDLEKHEILMVLAVFVATVAYVAGLNPPGGFWRTTLLDANGRLRHTAGDPVLQALHPIRYKFFFFSNSTAFIASLLAITFTVHYEKLKLKSIRVPLYGLVVVAILGIGGAYAAGSCRDSKHTIYVLCLVVAVLLCIFLQWFLVGSAFQLPCYGTGPTTRKGSGKGIDDDDDLDKIREFIQLLVILAATVAYQAGVDPPGGVWAENGEGHSAGDPIFLTTHPGRFKVFFYFNSAAFVASLVIMVMLQNEFLVRRHALEAVMILDLFCLIGAYAAGSCRDTSTSIYMLAMAGGVLVYVVIHIVFFTLDPNREKDNNKADDEGNATNSEQEKKRKKDRLEKKREVLLLLAILAATLTYQAGLTPPGGLWENDRFGHRAGFPVLQDKYPRRYKAFLYCNTASFMASVALIVLLLNPNLYGPGINCYALFVCMVAGMFSLIGAYAAGSSLHLRTSIVLLLLVLAVFAAVLYVTIKHRRHARENKDSSSPADRQEQKPRKPSGAAAMYLMLVGILAASVTYLTGLKPPGGLWMEDDGDGHSAGNPVLYDIDKHRYNAFFYNNSVSFMASVTVIVLLLPRMLRDNDDERNKRPLWPMHTAMFLGMLALLGAYAAGSARDWCTSKNVILLLLPIVGFVALLFFWKKGKASEGTQHGQSARLPSST

SEQ ID NO: 76184 - protein, 51 aa, Zea mays
  Coding DNA Sequence Number=SeqID_32809
MALKRGSEAAEVKQLQLVVPYPRLLPLASYIRMDEQEGLAASRSLIVHPRP

SEQ ID NO: 76185 - protein, 481 aa, Zea mays
  Coding DNA Sequence Number=SeqID_32810
  Gene Ontology: Mol. function=sugar:hydrogen symporter activity; Cellular component=integral to membrane; Biological process =carbohydrate transport
  Homolog annotation: Hit_ID=Q2R0P8; Match level="QueryCoverage=99%, HitCoverage=99%, E-value=1e-157, Identity=62%"; Hit description =Sugar transporter family protein, expressed
  Pfam annotation: Domain name=MFS_1; Domain location=35-429; Score =102.1; E_value=1.7e-27; Accession=PF07690.7; Description=Major Facilitator Superfamily
  Pfam annotation: Domain name=Sugar_tr; Domain location=31-478; Score =314.4; E_value=2.1e-91; Accession=PF00083.15; Description=Sugar (and other) transporter
  Pfam module annotation: Pfam domain module=MFS_1::Sugar_tr; Domain location=35-429::31-478
MADETETAAPLLRSAPLVADAPRRNRFAFVCATLASMTTILMGYNLALMSGAQLFIRQDLGLSDVQVEVLTGSMNLFMLVSILGAGWAADLLGRRGTLVLANAFLMAGALAMSAGGSYAALVAARFVTSVGVGFARVVAPVYNAEISPASTRGVLSSLLDMFINVGILLSYVSNYAFAGLPVHTGWRVMFAVGALPPVFLAAGVLAMPESPRWLVMRGRYGEARAVLLRTTPAEADLRLQEIKEAVEAPRAPADSGGGGGVGVWKEMLWRPTKTVRRILVCAIGVLFFQQASGIDAIVLYSPLVFQKSGMSSNSAILGATVAVGVVKTCFILVATLLSDCVGRRPLLLASAAGSAATLASVALTLCVGSTSTVSTAACVASVLAFVAAFSVGFGPLAPTYSSEIIPLRLRAQGTGLGTAVNRLTCALVTMTFISLADWLTMPGCFFLYAGVAAAAFVFVYLELPETSGRSLEDMHELFAAK

SEQ ID NO: 76186 - protein, 575 aa, Zea mays
  Coding DNA Sequence Number=SeqID_32811
  Gene Ontology: Mol. function=sugar:hydrogen symporter activity; Cellular component=integral to membrane; Biological process =carbohydrate transport
  Homolog annotation: Hit_ID=Q2R0P8; Match level="QueryCoverage=80%, HitCoverage=94%, E-value=1e-125, Identity=69%"; Hit description =Sugar transporter family protein, expressed
  Pfam annotation: Domain name=MFS_1; Domain location=45-447; Score =110.3; E_value=5.9e-30; Accession=PF07690.7; Description=Major Facilitator Superfamily
  Pfam annotation: Domain name=Sugar_tr; Domain location=41-496; Score =296.0; E_value=7.5e-86; Accession=PF00083.15; Description=Sugar (and other) transporter
  Pfam module annotation: Pfam domain module=MFS_1::Sugar_tr; Domain location=45-447::41-496
  Subcellular localization annotation: CTP_CleavageSite=41; ConfidenceScore=5.54e-01
MAQAAVGSNDGTEAPLLPSSAGGPTPPPAGAPRRNRFAFVCATLASVTTMLHGYNLTLMSGAELFMREDVGLTDAEVEVLAGSMNVFMLASTLAAGWVADHLGRRRTLVLANAFLMAGALAMSLGTSFAALMAARFVTSLGSGLARVVAPVYNAEISPASTRGALSSMLDVFVNVGILLSYGSNYAFSGLPVHLGWRAMYAVGVVPPVFIAAGVLLVMPESPRWLAMRGRQSDARAVLLRTLDTPAEADLWLGEIKRAVADAEPPPPPAGRGAGASVWKQLVVRPSTNVRRILTCVLGLHFFVQASGVDAILLYSPLIFRAVGMASDSAILGATVAMGAVKTCFILVGMLFTDRLGRRPLLLASTAGVAVTATALAVTLYVGTSTTSTSPATAAACLASVLAVVATYSVGYGSVVSAYSAEVLPLRLRAQGSSLAMAVNKLMAGVVSMTFISLADAITMPGCFFLYAAVTAAAFVFVYTRLPETKGRSLEDMEAARPNTESQTQTGSRRDVKTLLRRCRRTPAHVESPRRQDVVVDDDTRVAAACQPAGHSDSGAIGVGDRRSANAEVKTQPSTA

SEQ ID NO: 76187 - protein, 100 aa, Zea mays
  Coding DNA Sequence Number=SeqID_32812
  Gene Ontology: Mol. function=sugar:hydrogen symporter activity; Cellular component=integral to membrane; Biological process =carbohydrate transport
  Homolog annotation: Hit_ID=Q2QPX6; Match level="QueryCoverage=56%, HitCoverage=81%, E-value=1e-11, Identity=66%"; Hit description =Ribosome associated membrane protein RAMP4 containing protein, expressed
  Pfam annotation: Domain name=RAMP4; Domain location=40-97; Score =64.8; E_value=2.9e-16; Accession=PF06624.3; Description=Ribosome associated membrane protein RAMP4
MALLGTAERGLRIMKDRDADEDAGLSKKFLLVSAAGIAYLTTSRRLADRKTAKFQKNITRRGSVPETAVKKGKGNGYAAGPVVLGFFVFVVIGSCTSLGR

SEQ ID NO: 76188 - protein, 407 aa, Zea mays
  Coding DNA Sequence Number=SeqID_32813
  Gene Ontology: Mol. function=DNA binding; Cellular component=nucleus; Biological process=regulation of transcription, DNA-dependent
  Homolog annotation: Hit_ID=Q5VPG9; Match level="QueryCoverage=67%, HitCoverage=75%, E-value=3e-89, Identity=63%"; Hit description=DNA -binding bromodomain-containing protein-like
  Pfam annotation: Domain name=Bromodomain; Domain location=79-171; Score=108.0; E_value=2.9e-29; Accession=PF00439.16; Description =Bromodomain
MTPANGAPARAAEAGPHEVESEADAFRRQVDDLVSKTDVLERRVKEVADFYDGKKHGSGGRKGGGGGRYGASSRGMPDLMRQFGVLLKEITSHKDAWPFLEPVDVVTLQLPDYHNIITQPMDFSTIQKKMERKDGTCYTNVREICSDVRLIFANAMKYNDDQNVIHLMAKSLLEKFEEKWLHFLPKVESEEKRQKEEESKGVAATNTSREVAIVKLAKDTDDELNQINKKLEELRKMVVHRCRKMTTDEKRKLGAGICHLSPDDLSKALEIVAQDNPSFQTKAEEVDLDMDAQVRRPADLHVTVILVSCDVGELRRGRDTENANVVDGDALADEVKVKLHVLRALMLHKVDGEVDHTDVVALDEGGALEGVVELLKKLTELRGLGHAVGHNAVLGLSAGAGYDELLL

SEQ ID NO: 76189 - protein, 133 aa, Zea mays
  Coding DNA Sequence Number=SeqID_32814
  Subcellular localization annotation: CTP_CleavageSite=37; ConfidenceScore=5.11e-01
MGTVARTSSSVAATVDRCWVDAGTSRHLDGSTTPRIVASPGMGATGLPATGGLSAISSVDGTATDGGLVSHAQGSEGAVNVQDYLVHGSGGSGHLPGGGGGSGPKPPQPAGVRLAMSSAEKSVLGGYHEFSSA

SEQ ID NO: 76190 - protein, 330 aa, Zea mays
  Coding DNA Sequence Number=SeqID_32815
  Homolog annotation: Hit_ID=Q6QP51; Match level="QueryCoverage=14%, HitCoverage=22%, E-value=4e-15, Identity=79%"; Hit description =Putative growth-regulating factor 1
MVGSYCKAPCDAFFILGNRNNPKDGSEERQIFVAFAPRWYQMKKYKSEDAGGRGPPYRTFRFKTIGRSFYLPCLCKSFHNSISLMFCNVCKTGETFLERDRERGYSERDPSPRRERAPSPPTDQRFEGWPLGRVQQPPQSTRAPRPLLVRGSKAGPSEGFDSRLRPLGLRAHCWSEVRRLAPRRGSTAASGHSGSAPTTDQGFVGWPLKGSTAASEHTKRGMTLGTSDTWPMLGLRSRGTLGHFRDASRSEFCNGIPSEGGIEPLGPYQTGLGVGKSPTGSGAALSNPAPAKPLTASTYQPENLEPDYAPGLRPVRMREQPDRPKHHETL

SEQ ID NO: 76191 - protein, 271 aa, Zea mays
  Coding DNA Sequence Number=SeqID_32816
MNQQEAPTGVGEFLRDFGVPVVLWRLLQEVGYTEAPKYQWSRTVLRGQPWYEVVVRIPERARKPSWPYWMFHAEGMTPWEGAQARLMESIPIGQDSVESASARVLMAVLELQLTRGHSRQKWQQLYTGSYAAFKMMEMAKNSACTQAQERLEETKVQAEQVIGLEHQVTELQMQHQADQNRIKELKHQLTNAHSKLKILSQQQEEICLYAVVVREDLKETMSFISHQDQAIKELNRAHPMEFQVAQRLVNHLQQAVHRLNAAFYPTPASAD

SEQ ID NO: 76192 - protein, 253 aa, Zea mays
  Coding DNA Sequence Number=SeqID_32817
MLAKKEEHLDQREEQTAAVESLQRLQWELDDKASSFALVEENLKEKDASLDKRLTDLAWREKDLAFREEMFERREKLLADHELEAEEERALEERVRQFEAVQEAQAAPGPQAVEAMQETLEDLQVKQHAGVQRIAAWAGEASTVLVPLGVSPIPVSELPTSISDALPVLDSAADRLQRLDQILGARLETEGDRLCQAVIEYILTCFRSHDPTISLEPVIAGPMADTEDATREAELGADTSPSIKHSRKEDFSC

SEQ ID NO: 76193 - protein, 124 aa, Zea mays
  Coding DNA Sequence Number=SeqID_32818
  Subcellular localization annotation: CTP_CleavageSite=18; ConfidenceScore=5.11e-01
MHPSPPPIALGSLAGNITAASARHLTMGWPPRAPSGQIGPSTMIPYPRLVPRHPFTIENRDPGGEPMRGLTGAEEGSDAPEFVAPEEGQEPDPSEIDLLCQESFDEGKSILPLMHNLPILSTTT

SEQ ID NO: 76194 - protein, 156 aa, Zea mays
  Coding DNA Sequence Number=SeqID_32819
MALLYEGQRFTMPDATGKRGSSIGLSSGRAKTAGEVGARAGDDGRHMGLRNRAWDAEVTRMSGKMMTIMEGRGGGQYVIRAWEKVDDSYARGSPGGAWGRRQHTWARILAAKPPRDSSGSNEKIGDRRRDTRWWGELAVEQRTGIACNVEKADYRI

SEQ ID NO: 76195 - protein, 107 aa, Zea mays
  Coding DNA Sequence Number=SeqID_32820
MGARQHPGEGNWRCFWLGAGPEPPPKNHLRLLRSGRQDGAGRAPVSTLMAGAGAAGASSAATDGVLDDIVVVEAVAAVGAVGTPSDAAAPLLPDPQLEPRGPVALSR

SEQ ID NO: 76196 - protein, 271 aa, Zea mays
  Coding DNA Sequence Number=SeqID_32821
MFVGVAPCTSLFRHFFVLVKSGKAKDHLGAYYFQKRPDLAGAYIPTFGGARWENWHEDWVIAKTRPEVVEGQAIPGAGVPVHTGQDQELSDEQPDVDARGRGLPEAPDRAAAAEGASMLLAHRLKRHRPDPARAGTDLSWEELEVLVKGITGESFIPESLILPQGISALYDDPGLRTAILATLPTLDESGVAVRQTGGQDHHRGIRISDAPAGGPQSIGVAPSAPARASRTSAPGGIGVSEEERRRRLRRADGSFVSDPPLGPRRPALRSV

SEQ ID NO: 76197 - protein, 150 aa, Zea mays
  Coding DNA Sequence Number=SeqID_32822
MIPYPRPCLATLSPSLNQDPGGEPPRGLTGGRARPMEGSWVIRTSYCSEEEGFPHLLWSCALRMGIRKKPEYVWKEYRENGIENKEVFETPHRYFPPSNKNTPTWRKRLQALSGRDPTEDDPTIVYMAGYLHTLDNHYDDLSSHCTHLNS

SEQ ID NO: 76198 - protein, 266 aa, Zea mays
  Coding DNA Sequence Number=SeqID_32823
  Homolog annotation: Hit_ID=Q6BTJ4; Match level="QueryCoverage=76%, HitCoverage=29%, E-value=4e-11, Identity=31%"; Hit description =Similar to CA1621|CaIFF6 Candida albicans CaIFF6 unknown function
MCDKSLLASINTPFEARGLLSGTIIRGTLKAPKSQLVTPISTKLQRPDGVRLTAAKSGPRRHGKLRFARPQGSDSGSAPEDDELRFARPQGSDSGSTPEDDELRFARPQGSDSGSAPEDDELRSARHQGSDSGLAPEDDELRSARPQGSDSGSVPEDDELRFARPQGSDSGSAPKDDELRFARPQGSDSALVSADGLRLARSRGSDSTSALEDRLDLDLGGASTSPNPGHGPTTSTGGAIITLPQADSGYGEQDRRPIWLTPLYDQ

SEQ ID NO: 76199 - protein, 144 aa, Zea mays
  Coding DNA Sequence Number=SeqID_32824
  Subcellular localization annotation: CTP_CleavageSite=38; ConfidenceScore=5.61e-01
MGQSAAGGGAMVDAAKNGPAVMAVAGRQKQRSRPARARATAAPRTTRPVALTPRRDRRHLWQEKRATLRLRHNDRVKKGSKVGPSEGFNSCLRALGLHAHYWSEVRRLAPQKGSTAASGHSGSTPTTDQGFVGWPSKCSQPPQT

SEQ ID NO: 76200 - protein, 202 aa, Zea mays
  Coding DNA Sequence Number=SeqID_32825
MNKTPAFKVPLQTEPRFHLRRYEQPHTIGGLAEQHKADGWLAVARSNSSDDDDFCSGGPNSSSDDLRVDAAAMRPSPMPSLERQGRAEGRRVGGQSVGGTGYLVGGETSSGCRGGRRHRERLRSHSGQRARHAAAASATNGERPSPQSLREGAGHRPRRDRPQLGALPSPALMMKILEAEGGAEAAARLAFPRHRTGGHRLG

SEQ ID NO: 76201 - protein, 69 aa, Zea mays
  Coding DNA Sequence Number=SeqID_32826
MAGGKELAGAKEGCLAGGGFELGIKVNTLDLWLKGSIRVFIGVAHFVFLKNPFVLNMILLSVYYIALPC

SEQ ID NO: 76202 - protein, 106 aa, Zea mays
  Coding DNA Sequence Number=SeqID_32827
MAPKRATSKADEAAKAALLAEKKGKALVDTTHQEACEADALSKRQRNEQPTPEGSLRTCSSRGQPQLPPGFAPLKGANATEDGKVIGVLAEEQLQLRALRIKNRNL

SEQ ID NO: 76203 - protein, 1042 aa, Zea mays
  Coding DNA Sequence Number=SeqID_32828
MSSSSSSAADTPPSGASSEETLSNVAAEELRPGDIVEFGALRMSSVRVQDMQQLGYFGGGVARVPGTEEVPEPEGELVVFEAFFAAGHRLPAHRFVREKSKIGNKIAQFGSCTFTPKTGKTSMEVVELVPCACNKWGNWWEFWFYVAEGTVKDHPGLPVVVMCSHYYVAYPQFEVAEEDENEGALRCVARMSSGRDLVEEFVGYRVWPLTRGWALGEVCPRQMPSRGAMMVRSPAFALDLHGRDPAAFVREAEDGAARIVGCYVPKTEGLRSWDIRGTNDRLNRVFELNSLPYGGYPGEDAADRRGKKPMGSTEEGPSQEAALATKKRKLGTIVGEKGVSDNFVVELMGTCAAPGGRMSSPEIQESSARMLEVTGGRWPKNLPIPLAEGEDISTSRIARGLKIFPYGRNIVAVVSAVMNKDRQDAAQKCRAVVRLPDPRHEAKRARGSAKAAAAGGSQPTLAAKPAAPGSSKVSESAKVVAAGEAKSTQGEAAKVRELPSPGKRVADFGTNISVDDYFVESGEGQMVVVPPAVATTASTALVGAKGSAFCASGKISSAAAVKGEAGTMSRRLREASQQLSQQLSQHADVVREKSAAESKSRRLAEKVAALDAERTDLRRQLVEERREANQAIAEAQPAQAAAKQARAEGSLASQRVEEWEERFNALRGRVEKAKASTRSEVERTRAQLVESYRELGVRMADFEVPDREAGLRFLEWLQEELQVVLTLMEGFMSFASHVTCEGAMNALSREGYRHFEVFDQADKSFEREIFKAEDPVVKQSAGALFDRMWGAYGWEDVRERSDRAREQMERAEDVEDFGSLAGAPPEAAEGKPVLPSDAGEGPSDAPVPAAADEDPVLATVPTAEGAQEVVAEPAVEDPTAAAAASQVQDFGPTHATATESANFVAASTAVTENDSDDSVSKFFESDGSGSSLVWMEESSDEDLDYFAALDVAAAETSPRVMDVVPGPSAGRRRRRAVAKRRVSEVEGGRLRVDRAGKRELLASPAGVSVGEGELRNLFEGEELRIMLFNYREMGIIPKVGPM

SEQ ID NO: 76204 - protein, 202 aa, Zea mays
  Coding DNA Sequence Number=SeqID_32829
MCVLRNPKSPLKHKINHHLPYKHLNQPKMRIRLKTMKLKIKRMSHLKRRTMINWEMTIIKTRKMNRPYGIEDALGDSDWVLAMQEELNNFTRNEARNAQRQRGARYDGPDCTWALVLRDAAGWGDLAIGLRPLACRTKGGVCQSSSPLVQRDWRRHQAKGSVFAFAPTFALRGTSSTKSSGAEGVARWWRRCPRSKWFRGGF

SEQ ID NO: 76205 - protein, 193 aa, Zea mays
  Coding DNA Sequence Number=SeqID_32830
  Subcellular localization annotation: CTP_CleavageSite=45; ConfidenceScore=5.01e-01
MARFARLRSLETFEQWKKLTSTCSTPSAHARARPRVPPHAQRRARAKPVPRPAPEPIKPSQASTALFRAPSKPHRSLARRRLPVRSKSAAAQSLCYRRPANRAIPNLVQPSGKAVHASGKLPERGIGVCFAGEASPRSPELSTPPEYVDRPCLWHNFTGSLEDMVAGVTWPSTLPPGWTVEWDPASAEEEHEE

SEQ ID NO: 76206 - protein, 240 aa, Zea mays
  Coding DNA Sequence Number=SeqID_32831
  Subcellular localization annotation: CTP_CleavageSite=4; ConfidenceScore=5.21e-01
MSSRSLMRRVFPPSKPPDGGYPPSFRLIVGGTQLRGSWYLSAIVWLQGFSSASPAVPPRRWSPKTVTTNSWVGRSKPGCDLGPTLSFKDVHHPRWGGGQAKPALYLPCGFVGHPLPRRSRERALTGPAGGPDFDNAGLVDGRRRHLQRVGLAGLAPGGPFCRRAAVAPCRCPTRPGGFEWGSARGLMAPVVGVKAKAVREVPVADGITATIRASGLRLFVLVLAPRASAWARARLQQRPP

SEQ ID NO: 76207 - protein, 62 aa, Zea mays
  Coding DNA Sequence Number=SeqID_32832
MDAEVVELIDQAPTAPPTLSPTRSSARAELRESKLMNKYNELKRGFRFLHAAFVACGASEFF

SEQ ID NO: 76208 - protein, 209 aa, Zea mays
  Coding DNA Sequence Number=SeqID_32833
  Subcellular localization annotation: CTP_CleavageSite=82; ConfidenceScore=5.02e-01
MNKTPAFKVPSQTELRFRPAGMNNLHTGEPAGRQAPGDSPATSAAAAMVPGRTRPPEGSRSRPRSRDANQILKPKSRGPPSRAESSPTRSKVLPLRHGGWVPRVMQAGPEQKKPKPPRAVHATAQRLEAFLHYRLDQRVKGRTAMQAACNRAKWAHPSDFQRTQHGGLGPHVMQPAHRLLRASNCATTRATTAPPRLRNQYRDSRRPCV

SEQ ID NO: 76209 - protein, 202 aa, Zea mays
  Coding DNA Sequence Number=SeqID_32834
MAPLVDVVGPSLGLGERSSAEARAESEPWGWAKRSSSSFGAEPESEPWGRAKRSSSSSGAEPESETWGRAKRSSSSSGAEPESEPWGRAKRSSSSSRAEPEFEPWSRAKRSFLWRLRPDLAAVSLTLSSGTAVRAAQAALSSCQAGHLCIKCPCDLVGWRGDLPRLLLGEDWASGEPKLCADGGYQLRFRNLEGTPNYGPRQ

SEQ ID NO: 76210 - protein, 46 aa, Zea mays
  Coding DNA Sequence Number=SeqID_32835
MGDHVSGRVRGKVCGQVHSGLITLCKKKTKLRNNLGFLGHTGLLVG

SEQ ID NO: 76211 - protein, 117 aa, Zea mays
  Coding DNA Sequence Number=SeqID_32836
  Subcellular localization annotation: CTP_CleavageSite=62; ConfidenceScore=5.20e-01
MGKPVPSLLMLLPSRGGVPLDSPTRWQGGRPSHSSNHVLQRTCKNYATSKAEYTNTQLDLPVTALVPTITRMGDHVSGRVRGKVCGQVHSGLITLCKKKTKLRNNLGFLGHTGLLVG

SEQ ID NO: 76212 - protein, 119 aa, Zea mays
  Coding DNA Sequence Number=SeqID_32837
  Subcellular localization annotation: CTP_CleavageSite=37; ConfidenceScore=5.05e-01
MTGAHRTTSSEADRSTTSGARAIVMQGMKTWTDVRPMATTRATLDKRVPVRGMVDWSTTCAEAELDRWSGTQARLARAGGRDTRRRLAHSTLGLQASAQEAVAWVQPQGGDLCYGEGGA

SEQ ID NO: 76213 - protein, 159 aa, Zea mays
  Coding DNA Sequence Number=SeqID_32838
  Subcellular localization annotation: CTP_CleavageSite=47; ConfidenceScore=5.45e-01
MSKTGGSRLSMTGCYSSKGKVFFRTFGLRPSSISQYEFFSTAKLILRGATVGGLRLPKHLRTSPQQMGNILPYEHAVSPWRSTRSRCSRSSPCVDGGGPVRVAKKKQPDDLDRVAAQLSAKERRCLLHGASALDSSGDSDFDTCISALSQCYLRSYFYC

SEQ ID NO: 76214 - protein, 133 aa, Zea mays
  Coding DNA Sequence Number=SeqID_32839
  Subcellular localization annotation: CTP_CleavageSite=69; ConfidenceScore=5.49e-01
MGSSASPDPGLGLSLDPGRRTPPRPTLGLGLSLGLGRRSPPRPTQGSDSASTPEEGLRLARPQGSDSASASEDGLCLARPQGSDSASTSEDELRLARPQGSDLTSTSEEPSPRPTSGSDPPRHREGHHYRTPS

SEQ ID NO: 76215 - protein, 153 aa, Zea mays
  Coding DNA Sequence Number=SeqID_32840
  Pfam annotation: Domain name=RVP_2; Domain location=64-147; Score= -62.6; E_value=0.078; Accession=PF08284.2; Description=Retroviral aspartyl protease
MAMMGSTSEKMYLCQIPNFGFEMIKLRLGGIHFSKHFCKTESLIIDKPYLDSLNQHTLESLFFSQVRKRQTFVASVLRWYQRKNARNEVREERIFHLELLCKNLSGGVFASLGQDIDVILGMNWLAQHKTILNPDLRTIRLSYGQSRVGDLIA

SEQ ID NO: 76216 - protein, 77 aa, Zea mays
  Coding DNA Sequence Number=SeqID_32841
MQAACNHTKGAHPFDSDASSVEAQAHTSWTKKGDTPKGILLREGSRPRTLLLIRGSKAGPSEGFGSRLRALRLRAYY

SEQ ID NO: 76217 - protein, 53 aa, Zea mays
  Coding DNA Sequence Number=SeqID_32842
MSGAHRTVRCPLLTVGSATCPAQIARPTVGPADRWLTGQSGSRFWAYAHNRYC

SEQ ID NO: 76218 - protein, 292 aa, Zea mays
  Coding DNA Sequence Number=SeqID_32843
MASMWGGAAQVDVSCVEGYRYVGPLCLHDWAGDGDVVDAAVVVPLLPLCVEVGAGPPSDHMNDSAIRLIGEVFLFWGVGVGDVLMLLVWRWGWGSFRHERDSRIGEAAAHVPDPYHEFHFRGPGGILLAARGVSSGVLVLGWIPDAVAVKDAGAKATDGVVDGDLSESLAKESVSGRYPWKLSRNLSRRLLQESMDSGGNLVNQVWRQGTSLIEVVDPLEWRSVWEGVVALGEGCPVLQAEAAFAYVFQLCALLQGCPVLQAEVAFVLHQRDLPLEVLGLLLFVAYHLPHLG

SEQ ID NO: 76219 - protein, 165 aa, Zea mays
  Coding DNA Sequence Number=SeqID_32844
METRQRAGSPFVPYVTGRRPVTRSSHLATSSSTEAHSYCHLMREPYLRHYTLPLDPLAPESKFQHLAPTVRATKKPPAMAPKKASSKADEAAKAALLAAKKGKDLALTHSTHQEATEDDVLRTCEDDALRTCGPEGQPQPPPGFAPPEGADLTEDGGVLGVSAEE

SEQ ID NO: 76220 - protein, 256 aa, Zea mays
  Coding DNA Sequence Number=SeqID_32845
  Subcellular localization annotation: CTP_CleavageSite=75; ConfidenceScore=5.48e-01
MVAFQGGHPPFKGDSPYMHPQPSWAESSPTRSKAGRSSGHVVSQAHVTSWDSERTLSHSVKTARPCSVPRMARARATATSRTTHPVALTPRRDRRRLRQEKQATLRLRHNDRVKKGNKPRASLLIRGSKASPSEGFNSRLRAPGFRAHYWSEVRRPAPQKGSTAASGHSGSAPTTDQGFIGWPSKEGGIEPSDPVERGPGPADHPQLTGDTMFGALQGQHGAFPPLLLAERRRRGRQHTSPRTWDPTVHPGYGQLA

SEQ ID NO: 76221 - protein, 336 aa, Zea mays
  Coding DNA Sequence Number=SeqID_32846
MAPPIDVVGPCPGLGEAKRSSSSSGAEPESEPWGRAKRSSSSSGAEPESEPWGRVKRSSSSSGAEPESEPWGWAKRSSSSSGAEPESEPWGRAKRSFLWRLRLGLDAVSLTLSSGTAVGAAKAALSSCQIGQWSGEATFALNALAIWSVGVAIWPRLLLGEDWASGEPKLCADGGYQLRFRSLEAEVSRLHAELCRRTTIWVLDGDRINELRRDVCHLRDQLADRDLALDWVVQSRSLAWDKEQKAQARAAELNLAVEDLQTYCNTLHEEVHVLYSQLHPSEPTNPVESEARPSHVAGRALGGELDLFQPPPTMRLVDEWSPTPDDKATQRNGKQE

SEQ ID NO: 76222 - protein, 90 aa, Zea mays
  Coding DNA Sequence Number=SeqID_32847
MAHPGGRFAAECGPAAALQLRREIVLTSEYPHARRRLDELSHNLEPHRGYTLMPGDAQPVTTVAASQEYGNSGSLSAHLLPFLWLIDQLS

SEQ ID NO: 76223 - protein, 24 aa, Zea mays
  Coding DNA Sequence Number=SeqID_32848
MAIWPRLLLGEDWASGELKVTNSM

SEQ ID NO: 76224 - protein, 163 aa, Zea mays
  Coding DNA Sequence Number=SeqID_32849
  Gene Ontology: Mol. function=kinase activity; Cellular component =ornithine carbamoyltransferase complex; Biological process=amino acid metabolic process
  Homolog annotation: Hit_ID=Q6QP54; Match level="QueryCoverage=37%, HitCoverage=21%, E-value=2e-09, Identity=59%"; Hit description =Putative kinase
MAPPVDVAGPRPRLGDVEAPPRSRSSPSSMAEAESELLGRARWRPLAEARAEFESWGRAKRSSPSSGAEPNPSPSPGSGGAEFAVFRGLARVRALGRAERIGAAQAALSFCQTGQWSGEVTARKQGLGRAGNVFAAGGGPRARRRSSGLYADGGYQLRIRSLE

SEQ ID NO: 76225 - protein, 164 aa, Zea mays
  Coding DNA Sequence Number=SeqID_32850
  Homolog annotation: Hit_ID=Q6QP51; Match level="QueryCoverage=54%, HitCoverage=33%, E-value=6e-14, Identity=52%"; Hit description =Putative growth-regulating factor 1
MGSKAGPSEGFDSRPRARRVRDDPGYVRYMAEARATLLRPHEETTRPTEASQKELRPQRSQTTPLRPRGLHPAGKQQCSPRSGYCANHQGKTKSRFPTSSASCATGSSASPDLKPRPQPRPRVRSPPRPTSGLDLSLGLRRSLRLARPGPRADYATGDTSLPYS

SEQ ID NO: 76226 - protein, 195 aa, Zea mays
  Coding DNA Sequence Number=SeqID_32851
  Subcellular localization annotation: CTP_CleavageSite=48; ConfidenceScore=5.08e-01
MAPPVDVVGLCPRLGDVEAPPRSRSRSSLSSVAVVESEPMGRARRRPSAEARAESEPWGRAKRSSSSSGAEPKSEPWVGRSRVRRLPGLSPSPSPGSGGAEFAVFRGLAQGLSPSSSPGSGGAELPMAPEVGPDCLSASLCQVALQSATFALNAPAIWSVGAAIWSGLLLGEDRASGKPKLCADGGYQLRIRSLE

SEQ ID NO: 76227 - protein, 332 aa, Zea mays
  Coding DNA Sequence Number=SeqID_32852
  Homolog annotation: Hit_ID=Q6QP51; Match level="QueryCoverage=23%, HitCoverage=35%, E-value=1e-33, Identity=92%"; Hit description =Putative growth-regulating factor 1
MQVACNRTTGAHPFGFVASSTEAQAHTSCNERAGIARPVASTPRQGRRHHWQAKRTSFHLRYDDRVKKAAPEHSGFKLITDQRFEGWPLGRVRQPPQSTRAPRPLLIRGSKAGPSEGFDSRPRARRVRDDSGYVRYMAEARATLPRPHEGTTRPAEASRKALIPQRSQTTPPRPWGLHPAGQGFVYPRDAISPRPSLASGGNCSPGRSYASPEGLLRKWAHPRLARGPAWAGFIEKQPWPNRLSNRPYHRRIQCEDRLTPYPNTRTLVGKVEPQAQQEAPPRPTLGLSLGRRSPPRPTLGLGLNLGLRRSLRLARPWAQTDHAMGDTSLPYP

SEQ ID NO: 76228 - protein, 99 aa, Zea mays
  Coding DNA Sequence Number=SeqID_32853
MWRKTPSKMDCQAADKLTVDRRLSAVCRVAQLFHRVAVTRYCCQIGAEREEEIEVTEDRTPPPSDSQAGNCFYFDICGSEPESPVNEGKPRCISTFLRF

SEQ ID NO: 76229 - protein, 386 aa, Zea mays
  Coding DNA Sequence Number=SeqID_32854
MPASLAKGGACPAEELMRWDGWFAGQSLREPFEERNTGASSSHRGRGLPYCSRRGREPANDLTATSARLGCLESRHWFCSQEGATFVQVAVQFLARSNRPNAFPHQWSPRMVTTGSMVGRSKPGCGLCPALSFKDLHHPSWGGGRGKSRPASAWAGDPLLPPASGGGDHPPALRRRRPPAMRGKANCCYLARVQHFVLRPGDCGRLHQGVAQHVVRREGGTRVLGRSRSRSRGENGSEDLLVRFGAAAARWCGVGGQVAAGEGFSADDTVNATCAPGLRLFGFNGWFSSPARGRERGPSSGSVRPGAIAAAVMPSEMEVVVAAAVVGGEPPGNPRLLCDEPEPEAAVSAWTEAESARAEASLAQEQVASQAEEMQQRLLELGQVVH

SEQ ID NO: 76230 - protein, 124 aa, Zea mays
  Coding DNA Sequence Number=SeqID_32855
MARSIRAQGRAKRRLLLRPRSGSGEDAIPPEVKVEAEPWGRARRTPPSEAEGSEFSGWFVDAVNGLAVAGFARAAPEPLHGARGRSRTDSTFIIRPFVAFPQGGRGEAPCCPRRAPNMVSPVSC

SEQ ID NO: 76231 - protein, 314 aa, Zea mays
  Coding DNA Sequence Number=SeqID_32856
  Gene Ontology: Mol. function=protein dimerization activity; Cellular component=nucleus; Biological process=regulation of transcription, DNA-dependent
  Homolog annotation: Hit_ID=Q9SM11; Match level="QueryCoverage=40%, HitCoverage=32%, E-value=3e-53, Identity=86%"; Hit description=Em binding protein-1a
  Pfam annotation: Domain name=MFMR; Domain location=1-151; Score=14.9; E_value=2.4e-08; Accession=PF07777.2; Description=G-box binding protein MFMR
  Pfam annotation: Domain name=bZIP_1; Domain location=253-312; Score =24.7; E_value=0.00034; Accession=PF00170.12; Description=bZIP transcription factor
  Pfam module annotation: Pfam domain module=MFMR::bZIP_1; Domain location=1-151::253-312
MASSSDEQPKPPEPPAAAVVAAPPQTHAEWAASLQAYYAAAGHPYAWPAQHLMAAAAAGAPFGTPVPFPVYHPGAAAAYYAHASMAAGVPYPTSEAVATVAAATAPEGKGKGKGGGASPEKGSSGAPSGEDDSRSDSGSDESSETRDDDTDHKGSSAPKKRKSGNTSAEGEPSQAAVVRYATVESPYPAKGRSASKLPVSAPGRAALPSATPNLNIGMDIWNTSPALAVPAVQGEANPGLALARRDSVTQLDERELKRERRKQSNRESARRSRLRKQSHISLNYAVGPQPDDLRVVMGIIGSERQQPGWDKARE

SEQ ID NO: 76232 - protein, 116 aa, Zea mays
  Coding DNA Sequence Number=SeqID_32857
MENHPGKQCYHKETIDQAKDGGKKRFEVPSAREKVKETRNPKPGVKKKTCKVKVDRVTKSYETIDQAKDGGKKRFEVPSAREVKETRNPKPGVKKKTCKVKVDRVTKSYGASRITT

SEQ ID NO: 76233 - protein, 68 aa, Zea mays
  Coding DNA Sequence Number=SeqID_32858
MARSVRAQGRAKQRLLLRPRSGSGEDAIPPEVEVEVEPWGRARWIPPSEAEGRSVEGRSDCGHFDLAN

SEQ ID NO: 76234 - protein, 102 aa, Zea mays
  Coding DNA Sequence Number=SeqID_32859
  Homolog annotation: Hit_ID=Q5NKP3; Match level="QueryCoverage=35%, HitCoverage=14%, E-value=6e-07, Identity=75%"; Hit description =Putative uncharacterized protein 9C20.7
  Subcellular localization annotation: CTP_CleavageSite=33; ConfidenceScore=5.33e-01
MAPKGFEPTTSQTNVTGSYHYTTYTAFNDDAITSSSSSSTSSPTCHPSQESSVLGMSRTFDDYYIEDCGVILAPEVTQGRTDNNDQFVILATVEVAFVPTCL

SEQ ID NO: 76235 - protein, 75 aa, Zea mays
  Coding DNA Sequence Number=SeqID_32860
MESPGYHWPQRILETLENFNVIFDHLLGAVACGAEVTQLGAIGYGAERAQQLCATVLISRQLLPLFAQLTTIKIK

SEQ ID NO: 76236 - protein, 378 aa, Zea mays
  Coding DNA Sequence Number=SeqID_32861
MIPILPRDRDSPLITTKSEHYAPAPFDGTPAKPTTPPGSSNYSAKGVPFHPHGCTVIPDGHSMNRSEPLDRGRTIVMGCAGILQLSDWRCSLYVVEVTVGKVDAVAGGLGSPVRARTGEEGLANSLAGFRPQEQDRKWENDEGEALWAEAQGRAELASHRASAANPTQPNSGQTVWCGRCSKGVCGQAMWPGISACVHVGPRRFAGKVELTRRSHGTHGHTCSTLVGTPELAQPARALTPASSQVRRAPTPSAVPARAYKASPGAPHFAPHSPSPASHFPYLRRAQFRPPLPPELRPPWPAHSSHPQAKPVLRLAPSVAREARQALGPGQTSPEARDRPHRTSVFRRRAWIELSSESPPNSLRSYLLWHPVDLPDPFD

SEQ ID NO: 76237 - protein, 96 aa, Zea mays
  Coding DNA Sequence Number=SeqID_32862
MVNLVTMLNTELDHALDELGKVQAEDAELRVERATRHYQDGGSPAPVGCRDSAPFQWGSGHSAHSAKGVQRFIRFGFVSHPPWGGTFGLGIKLYTI

SEQ ID NO: 76238 - protein, 136 aa, Zea mays
  Coding DNA Sequence Number=SeqID_32863
MVSHSGYGGYKCGHCTTAVGVSEALYAKAGAGYTTPPQYAVQLPEEHRVPRCRVRMTLEPHPLQPGWCLLDSESFGYRAEDTIEAIALHGLTTFCGFHPLELSTHPIGLFPAEKEDDPMWKDRVEHAKDVWALYPG

SEQ ID NO: 76239 - protein, 55 aa, Zea mays
  Coding DNA Sequence Number=SeqID_32864
MASPPPVTTVDDPHLDVIATDRRTSPDPSPEPAPEPATEDLPAAPAFEGKPRFYA

SEQ ID NO: 76240 - protein, 181 aa, Zea mays
  Coding DNA Sequence Number=SeqID_32865
MSQSKFIVLNKLILQGLLLGAFGLRRHLRTQVGITADQNNTKVDTAPKVNSTPVLFTLIWHSLLRHACTFISFKLKREVQIEEKGERLQVMEIPRKREKDKERKNRGSPIHPPLGALRRLLVEAEAVSDSPRQHRGEDAPVSPAPRVSGNVKERSAAKRDPRAASHTHACDLTQRGGPIGQ

SEQ ID NO: 76241 - protein, 493 aa, Zea mays
  Coding DNA Sequence Number=SeqID_32866
  Gene Ontology: Mol. function=beta-lactamase activity; Biological process=beta-lactam antibiotic catabolic process
  Homolog annotation: Hit_ID=A2YKY7; Match level="QueryCoverage=92%, HitCoverage=57%, E-value=0.0, Identity=72%"; Hit description =Putative uncharacterized protein
  Pfam annotation: Domain name=DUF1446; Domain location=1-243; Score =109.2; E_value=1.2e-29; Accession=PF07287.2; Description=Protein of unknown function (DUF1446)
MGHTSGCGIPLFCNLSAVHHLFLIVNQRKNLHLGGAQIYELGWNWNDTQLAQGTLASHLLECGCQLTGGYFMHPGDAYRDFPFEQLLDLSLPFAEVSCRGEVIVSKVDGSGGLLSPHTCAEQLLYEVGDPANYITPDMVVDFCNVQFHQISKDKVSCDGAKPSNACCPEKLLQLSPTESGWKGWGEISYGGHQCLKRAQAAEYLVRSWIGERYPGINEKIVSYVMGYDSLKAIGGDEDSYLAKQVLDVRLRMDGLFELEEHAVQFVEEFIALYTNGPAGGGGISTGHRKEIILQKMLRWFAQVDRENIFWRSHAKKASIPCLHNQATYSETGQARISQAQRNPTCRTMAIQHFEASTETPASPAPALPGKRVALYHVAHSRAGDKGNDMNFSVIPHSPADIGRLRSVITPDWVKNAVSPLLGSSSFPDERDVQHRNKLLELVTVEIYYVPGISSLNVVVRNILDGGVNCSRRIDRHGKTLSDVILCQQVILPP

SEQ ID NO: 76242 - protein, 153 aa, Zea mays
  Coding DNA Sequence Number=SeqID_32867
MVRERRTQTNTMSKNTRDTRFIPRFGHTTKVSYFLVEAPTKSRVSFNPNPPFADHKVWEVYIKVPTKAGGRWGKLAKNRLNRFVNRLNRFPPGRTRFTDLLSRRVNRTQNRLSRAQIRLNRFSQNLHTTFSDRTDWQTGSDRAEQCRNRLNRF

SEQ ID NO: 76243 - protein, 91 aa, Zea mays
  Coding DNA Sequence Number=SeqID_32868
  Subcellular localization annotation: CTP_CleavageSite=19; ConfidenceScore=5.08e-01
MAPPRAARCPAQPARHAVVASTNIDGPRKSFSSFFESAIPSASPGDTVMRYLIRDGWFTGGDKDDGFDYGNGKEGVEADLQEFQDFDEFED

SEQ ID NO: 76244 - protein, 84 aa, Zea mays
  Coding DNA Sequence Number=SeqID_32869
MSKLSPIELRHSDMSQDEGVNRLKDEMTQRPMVFCVIIVVDCKGHKSFENKFPTVTRMMVLTKVMVAFGAIYDQEFQDFDEFED

SEQ ID NO: 76245 - protein, 326 aa, Zea mays
  Coding DNA Sequence Number=SeqID_32870
  Gene Ontology: Mol. function=protein disulfide oxidoreductase activity; Biological process=cell redox homeostasis
  Homolog annotation: Hit_ID=A2XD09; Match level="QueryCoverage=100%, HitCoverage=100%, E-value=5e-98, Identity=59%"; Hit description =Putative uncharacterized protein
  Pfam annotation: Domain name=Glutaredoxin; Domain location=154-227; Score=39.1; E_value=1.6e-08; Accession=PF00462.15; Description =Glutaredoxin
  Subcellular localization annotation: CTP_CleavageSite=22; ConfidenceScore=5.19e-01
MGCTTSRQARHDLRYCPSPLPRSQSFPARCPSDVGVHVVRLTSSTLGSLELDKALPRAPEPAPTRLAPRTPTMTPPNEPEDIDAWALMAGLEDRSPLLGAPFGRHSFSFPVATAPAQDLAASAKVTPLPMPMPRPDAAPTSGGEGKALPPRRAVLYFTSLRGVRATHEDCCLARAILKGYGVRLDERDVSMHRGFRDELRGLLGLGLGQAGGTPAALPSLFVDGELVGNAEELKRLHEAGELAPRLAGCESAASTAGPHGGDAGACEACGDMRFVLCDVCSGSCKVYVGDEDEAEEEEEGDECGGGFRRCTECNENGIVRCPVCCC

SEQ ID NO: 76246 - protein, 556 aa, Zea mays
  Coding DNA Sequence Number=SeqID_32871
  Gene Ontology: Mol. function=sucrose transmembrane transporter activity; Cellular component=integral to plasma membrane; Biological process=sucrose transport
  Homolog annotation: Hit_ID=Q9SXM0; Match level="QueryCoverage=100%, HitCoverage=100%, E-value=0.0, Identity=91%"; Hit description =Sucrose Transporter
  Pfam annotation: Domain name=MFS_1; Domain location=39-541; Score =21.3; E_value=0.0037; Accession=PF07690.7; Description=Major Facilitator Superfamily
  Pfam annotation: Domain name=Sugar_tr; Domain location=36-517; Score=- 128.1; E_value=0.00056; Accession=PF00083.15; Description=Sugar (and other) transporter
  Pfam module annotation: Pfam domain module=MFS_1::Sugar_tr; Domain location=39-541::36-517
MARGDGELELSVGVRGTGGAAAAAADHVAPISLGRLILAGMVAGGVQYGWALQLSLLTPYVQTLGLSHALTSFMWLCGPIAGLVVQPLVGLYSDRCTARWGRRRPFILIGCMLICLAVIVVGFSSDIGAALGDTKEHCSLYHGPRWHAAIVYVLGFWLLDFSNNTVQGPARAMMADLCGHHGPSAANSIFCSWMALGNILGYSSGSTNNWHKWFPFLMTNACCEACANLKGAFLVAVVFLVMCLTITLFFAKEVPYRGNQNLPTKANGEVETEPSGPLAVLKGFKNLPTGMPSVLLVTGLTWLSWFPFILYDTDWMGREIYHGDPKGSNAQISAFDEGVRVGSFGLLLNSIVLGFSSFLIEPMCRKVGPRVVWVTSNFMVCVAMAATALISFWSLKDYHGYVQDAITASTSIKAVCLVLFAFLGVPLAVSASPRLASPPDAMPRNANVDWASCPDRPISLLQMQILYSVPFAVTAQLAATKGGGQGLCTGVLNISIVIPQVIIALGAGPWDALFGKGNIPAFGVASGFALIGGVVGVFLLPKISKRQFRAVSAGGH

SEQ ID NO: 76247 - protein, 154 aa, Zea mays
  Coding DNA Sequence Number=SeqID_32872
MSGKRNAKFTGYQGDAKARESLFICYPSFSSLVTVAVGVVLQHTVVPWPVVGAKLEHCGGMEDHDHAIVPARASGVAQHLTTSHPDSHLASLMSACTSSCLDGGEETNVREEKHTCVAARNSMDSVRRSRGRRVACGVCATSLSCAQFEIEKRC

SEQ ID NO: 76248 - protein, 76 aa, Zea mays
  Coding DNA Sequence Number=SeqID_32873
MPKIKRSHAARVVGAIGGINGERSKIAEIEAASTGKAAWLRAVPEEMKGELAHLKGEHTAVGRPRPDFWRCFLKGK

SEQ ID NO: 76249 - protein, 142 aa, Zea mays
  Coding DNA Sequence Number=SeqID_32874
MGMARTALEVDNAEVRRLQLELEALSLYVCVNQAIRFVCARGRNNDLRLLDIPDRVYKAMEFEALENHSQFLGPLLVELPKSGKYSGLEALQDHAISSFYLFVRMGLLEAMDDVGDEPNGLVGGDLHDGIHLDPLGELVDSN

SEQ ID NO: 76250 - protein, 155 aa, Zea mays
  Coding DNA Sequence Number=SeqID_32875
MADNPGGYSPAVEMTTGQATMKGGIAVVPPLRREIAMRPPKFQGGKVKTPLGHLYDPHKPSIEDGATLDFRCTDQNSSMEYNFVYIIYFIHLLEQMFQIFIRSDVIVDITPQLITLNQGSKSNKYHKNKHSSIQIPIKIVLFLFLRVGLLVLKSL

SEQ ID NO: 76251 - protein, 375 aa, Zea mays
  Coding DNA Sequence Number=SeqID_32876
MADNPGGYSPAVEMTTGQATMKGGIAVVPPLRREIAMRPPKFQGGKVKTPLGHLYDPHKPSIEDGATLDFRCTDQNSSMEYNFVYIIYFIHLLEQMFQQQHAGKAADFEVLLDSAARGPGRWRAVEWGWVVLASCPARWSMDAPCACNRPAVAIRPGGQTCWPLRSRYAEPARQRIRLDRGRGGGRTEKLTRAAAATASAVVAVQHSMRAVGSGCRRAGNKTKRWDIASSGREEEETAGEAARQPRKKSPLLSCIVHPPVCTGTAFALARMHGWMDGWIRRVITHQRFRLDKQKQSERGWEPGTGNRVAHQSLPFPSTGTEFRACTSSEPAIGLVSEKYHIPSTYQDVFKDPDIRNYRRAKPLGPLLSGPNAATP

SEQ ID NO: 76252 - protein, 48 aa, Zea mays
  Coding DNA Sequence Number=SeqID_32877
MSTKTDGRRGIFIGAYLGAEIVAEIHGAYLGVKIYGAEVPGSVFCGDG

SEQ ID NO: 76253 - protein, 62 aa, Zea mays
  Coding DNA Sequence Number=SeqID_32878
MCDEKKLSSRGRFFGVQSAGTGSAVRFASVWNNEAKTLELALPAGGCKDQDLGSRLQMAATS

SEQ ID NO: 76254 - protein, 116 aa, Zea mays
  Coding DNA Sequence Number=SeqID_32879
MATRTNYDIRTWRQQRVEALASLKVQWQNRRQPTPVRMARGLRRRGQQAGDSTARELKPLGRERKMAGELGREEAPAMELGTKTRAHRRCVGAQGGWRDTGNLSCGARHWQGPRKS

SEQ ID NO: 76255 - protein, 57 aa, Zea mays
  Coding DNA Sequence Number=SeqID_32880
MGKPVPSLLMLLLSRVTALVPTITRMGDHVSGRVRGKVYCQVQSGFNNIMLREEKLS

SEQ ID NO: 76256 - protein, 451 aa, Zea mays
  Coding DNA Sequence Number=SeqID_32881
  Subcellular localization annotation: CTP_CleavageSite=61; ConfidenceScore=5.06e-01
MDKDRQDVARKRQAFTRVGDPSHEVKRARGSMKFATPGSHKPPPAAKLTVFGPSKSSSGARAVAAGSSKPPSAEPTKERGPPSPLCTAEAAAGGADLAMDICVDDYRGLCLRQDCGVGSDAGQLVVVPAPVAVALAMEAGGTKGASQDAWSKFCASGKIVSAAAVKDVAGSVSHQLKHASQQLKHAAAFADHVASGALTSEFAAERQQLEGRVERLRAQHTEAVQDKSAAENKSRRLMEKLAAAVAEKEDLSRQLAAERKDANRACASAQAEEEIEVLPTIVTGLMSFASLMTCEGAVNALSREGCGHFEVFDRSDEDFERGIFQVEDPVLKWSAGALYDRMWGPHSRETVRERSDRAMEQMVHDEEVEFVGDLDSTLPEASGAKEGTGGEPVPPSDAGEGPMVTPALTCAGKDPVPAAAPTAGDTSVVGANQLPKTLWRQPALRRWRDRG

SEQ ID NO: 76257 - protein, 161 aa, Zea mays
  Coding DNA Sequence Number=SeqID_32882
MMVDYTTVLDRPCVSSEGPTQQGIESIVEVTLASGVTSDGSSDLSLRLRLLQKLRVVARTAIGVVSVRVSSSSRDALWWCRGHLWAEVQGKATSQTPPPAEVRGKSPTAPAPAPSVGAPAPRVVDDAVSPGGWTDLAPCDTGDAPPGEKAKRGSQTYIQCT

SEQ ID NO: 76258 - protein, 137 aa, Zea mays
  Coding DNA Sequence Number=SeqID_32883
MISGVRKPSQSTILLLRGILLRQPCKMQHTEHFPSFARRSIGSAGGVIVSPVGEGNPRLNNMVNLAAVLNTELDHALDEWGKVRAEVAELCAECAARHYLDGGSPAPVGIQHPYRSPPHGRFDYGTPDCRTRIDLDP

SEQ ID NO: 76259 - protein, 81 aa, Zea mays
  Coding DNA Sequence Number=SeqID_32884
MKRASHDVDSFAVVETRFGGNEQFVDSGEQLEASAGALDGSLEWWPVNLSSRGGGRKEGGVLAHAIGGNYRGKLTGDHRMG

SEQ ID NO: 76260 - protein, 172 aa, Zea mays
  Coding DNA Sequence Number=SeqID_32885
MRNFMNCIRNCTPKYLLTLSEWELDLLEQQMSSQTRAHDGAGTSRGQEDTPNPPPVPPTLAEAIAALVTATADNTRFLREMVGHQVQQQGRRAYPRGPRETSYLDFSETHPPLFVKAEDPLEVDKWVRVIEQSRAISPALVVEAKYAGPGKSKGIGGDRSNQGPEKRQSLVI

SEQ ID NO: 76261 - protein, 85 aa, Zea mays
  Coding DNA Sequence Number=SeqID_32886
MATKLGEKLNSGAMVANRRRGLLFWFRNKQEEQTAHSIYIVHERWLRIRERGCETARVSSHTFIAQQVVGNNVHKLAKGGSSREV

SEQ ID NO: 76262 - protein, 151 aa, Zea mays
  Coding DNA Sequence Number=SeqID_32887
  Homolog annotation: Hit_ID=Q6QP51; Match level="QueryCoverage=32%, HitCoverage=22%, E-value=7e-14, Identity=73%"; Hit description =Putative growth-regulating factor 1
MQVACNRTARAHPLGFVASSMEAQAHTSCNWRAGYYVQETAPPLAPMLRLLDCRTSAVTRGNPAHGPTVPIEHIDHGDRERGYFERDPSPRRKRAPNPPTNQGFEGWPFGRVRRPPQSTRASSSLLIRGSMAGPSKGFDSRPRALGLRAHY

SEQ ID NO: 76263 - protein, 152 aa, Zea mays
  Coding DNA Sequence Number=SeqID_32888
MGSTRVAFVLLLEERNLAEPGCIPSPMVTQDGDHRFDGGEKQAGLRPLPRHQLQGSSSSLLWRGRAEPEFYLPHGLAGHLFLQYSGERALTGLAEGADFDNAGPGDCCAVRTGGPSKTSHAARATFVFLDCLVLTPTRRLRMEVDACPSTRT

SEQ ID NO: 76264 - protein, 1367 aa, Zea mays
  Coding DNA Sequence Number=SeqID_32889
  Gene Ontology: Mol. function=nucleic acid binding; Cellular component= nucleus; Biological process=regulation of transcription, DNA-dependent
  Homolog annotation: Hit_ID=Q6H3Y8; Match level="QueryCoverage=42%, HitCoverage=97%, E-value=0.0, Identity=67%"; Hit description=SNF2 domain-containing protein-like
  Pfam annotation: Domain name=DEAD; Domain location=776-995; Score= -37.9; E_value=0.029; Accession=PF00270.20; Description=DEADDEAH box helicase
  Pfam annotation: Domain name=Helicase_C; Domain location=1173-1252; Score=52.6; E_value=1.4e-12; Accession=PF00271.22; Description =Helicase conserved C-terminal domain
  Pfam annotation: Domain name=ResIII; Domain location=772-989; Score= -24.3; E_value=0.0052; Accession=PF04851.6; Description=Type III restriction enzyme, res subunit
  Pfam annotation: Domain name=SNF2_N; Domain location=778-1104; Score =14.8; E_value=1.3e-09; Accession=PF00176.14; Description=SNF2 family N-terminal domain
  Pfam module annotation: Pfam domain module=DEAD::Helicase _C::ResIII::SNF2_N; Domain location=776-995::1173-1252::772-989::778 -1104
MTRVIILLDSDKEDDGTGRQAGRELGGAAIASAGEASKLVKPEVVDDVGSNPVRPGALPTSLRVQGHRAPSSPSPVPAAVRKQPEIIAISDEDNDGSRFRRVRRVKDEASDWVLSAKAKRAMVSGVPPGSSDVKRKRKRGSSGAGDFHALDRNLSASGAGRRTSWMAEDAGSSRNVSSSELSRGGVGDRSGSTKKARGAPGKTRRGGGTRRERSTSAAPANLVGGSATVGSRIRLRSRQQGRVQCATYSARVSSEDTGEDEKHMQEQTRVEDVEFMEVDDDYDDVNVAGNVIDQESEQDEALEGRSSQDSHGYSEDKEGKDSAALSDNEEDVGGKELLEEEEEGADQEESHIIYDGEGEQEEDASEEETQELDETGEAQPFNPSNTMAGSTMRSGGDGKQVFRRRVFEGIYLPENPHRTVGKGIQGRTRSQRKCKDKKLLKRGTFSKPYNIDIPDSTSDSEEEIEPPAPQQGLLSSSEEDNMTFGKRKRRRAAINKRWDKRLSASSDEEDYGASAMDAKERPFRRLKKGLSNLQAAKEGCRNYEGSNPGHARYSGPNGGNLENMSSAQDDISFKRNVHMIRIKKRGRAAKAVYDELLDSLFSGWENHIGNPVHAEAGNSLPLVFSFGDEDAEENTENDKYQEQEDLWMECGIAFQSMNIGSNGCEEDGKEIPPVKVTSCNIGQHEFIIDEQIGVRCKHCHVVDLEIRDVLPTLGKCSAERGSAINPEFDRMLKEMLNVFEQNDVLVSNGHELPCNFGDHKAGSVWNLIPGVKETMFPHQQDAFEFMWTKLAGGTTIEQLKHTIKSDAGGGCVISHAPGTGKTRLAITFVQSYLEVFPHCSPVIIAPRGMLATWEKEFRKWKVKLPFHVLNSTEINWSEDKTLQEQAAKNGTFHRRLLTDKMDQNYRRLVKLGSWMNGTSIIGLSYSLFRKLANHEGMDGDKVRKLLLEKPNLLVLDEGHTPRNKKSLIWKVLKRVHTEKRIILSGTLFQNNFEELYNTLRLVRPKDADALHLETDESKDFWSSLRLNDITKANINEVRKKLDPIVHIHSGRFLQKSLPGLRESVVILNPLLYQKEVIASMEKTVAMGLDAEYKISLASIHPSLLASAKLSMKEESILDKPKLESLRSNPSGGVKTRFVLEIVRLCEALNERVLVFSQYLEPLSLIMEQLKERFSWAEGEEILLMSGKVLVKKRQTMMEVFNNMKSKAKVMLASTKACCEGITLVGASRVVLLDVVWNPSVGRQAIGRAYRIGQRKIVYTYNLIAEGTTEKRKYDRQAKKEHMSKLLFSNELERGGCNLPPELTFNDRVLEELTAREDLKNLFVKIYVDNQTDGSRVSFIDCFSLPVATDITQCPHQRYMWVAVDSAK

SEQ ID NO: 76265 - protein, 56 aa, Zea mays
  Coding DNA Sequence Number=SeqID_32890
MTSETATEKKTGTKEEGSHGHNMRSSSAKYLPASILRYVSLIKVQAYTYVSRLSAI

SEQ ID NO: 76266 - protein, 147 aa, Zea mays
  Coding DNA Sequence Number=SeqID_32891
MSGQSSHLERLHRLLREEKEHRRQEREQHDSSPSPQQEVESRRHPSSMPQLEVPPAPPQGTPAAGGDPDGDDDGGSSSHSTEPSDEQEPEGWVARPITRDASRGCHFHDALDTLLRQAFDRHTWSIEYRCVVYQHSRGLYPDQWDST

SEQ ID NO: 76267 - protein, 142 aa, Zea mays
  Coding DNA Sequence Number=SeqID_32892
MVGGTHRWVDRVADRLGLLVSVLFPNATESREIAAARRGAWRRPFPPPRSELRKLNRSSRDPFSPHLPSSHERLPQKPPPPLFRPRKNRVEISGTQGATRQRGIPRRKHFSAAGRTAPEVDYVKTPLKKSPLLRILVSSRLK

SEQ ID NO: 76268 - protein, 68 aa, Zea mays
  Coding DNA Sequence Number=SeqID_32893
MAMMGSTSEKTYLYQIPSWVLIDSDRHYFSDMKTWSLPYIVAKGTSFMTFVRRSLYPKRNNASKDEGH

SEQ ID NO: 76269 - protein, 611 aa, Zea mays
  Coding DNA Sequence Number=SeqID_32894
  Subcellular localization annotation: CTP_CleavageSite=41; ConfidenceScore=5.40e-01
MAPPVDVAVCAPSRATWGAESEPWGRARRSFVVFRVLARVRALGSGGAEFAVFRVLARVRALGSGGAEFAVFRVLARVRALGSGGAEFAVFRVLARVRALGSGGAEFAVFRVLARVRALGSGGAEFAVAPLARPDCLSDFTLSSDTAVGVAQAALPLCQTGQWSGGVTAVTSALPGARVRIEVSGHLCVKCPCNLVSRCGDLVKVASERSQGLGRAGDVSAIKRGASGETELYADGGYQLRIRRLEAPEPLHRARGRSGTDPTFYIRPYVAFPQGGGGECAMLPSMGTEHGVSGELQAVITVKVKRLALLLPEAPPTGAPVARRVGLGSKLACQKSEKRVHLARLHAACMAARPFCPLVWAKMGGRLVGSSHLPSPRMGGIRRLSASSLEERNSMGVGTFQPSFGFKDFHHAAWPHPATGGHPRWPRWKMRRVGGPPPRGSAAPFFPLRPGVKGVLEPHGDFLQPCQDMQGARGPGSPSPCLNGWFSSSAGGSPSAAIPPPKLLPKPLSCLGQGWWPSRLERAAASRPSFFSYSAGLPLRRGVARTCGGGNRSSVGSGISYASVLRSLRLSRPERESLGPFGLVVWGSSSLVKETPRLPFGGPRPGVAISV

SEQ ID NO: 76270 - protein, 84 aa, Zea mays
  Coding DNA Sequence Number=SeqID_32895
MAHEIIKKSEKDTHDARAEARRVEEAAEREKRIAELSPPPEPFDPLADLEMKEALDIINMAESVVDEVVDKLLHEVAEKVLKEE

SEQ ID NO: 76271 - protein, 111 aa, Zea mays
  Coding DNA Sequence Number=SeqID_32896
  Homolog annotation: Hit_ID=Q2QRH1; Match level="QueryCoverage=34%, HitCoverage=6%, E-value=4e-07, Identity=65%"; Hit description =Retrotransposon protein, putative, Ty1-copia subclass
MRTRLKMMKMKIKRMSHLKRRTLIKGEMKIIKTRKMIKKLGIKDRHIQESTKQFKEITPSTPFLVTFTRGIEDALRDPDWVVAMQEELNNFTRNELQPKTASSYKTFGDEA

SEQ ID NO: 76272 - protein, 145 aa, Zea mays
  Coding DNA Sequence Number=SeqID_32897
MARTYWRSIECVGLGGSDDSEEVEDSFDFEEWSDSEGDGGNDDGSSGDDDGKGGGDDDGKDGDDEGDGDNDGRGNGKGDSKGDGGDGKGDGDGKGDDSDKGDESRATATTTSQLPFVGNRMSIVSEADLLHLIETGVLPPKELYS

SEQ ID NO: 76273 - protein, 106 aa, Zea mays
  Coding DNA Sequence Number=SeqID_32898
MRKKHGSVPKLHTCSGLDSHNEQKHWHSKCHYKRNSGSVPAGLEGDCHHQKLEEEVARQPAQEVEPRLASLPALARMTNTLDAEGGIEITARLASPHPGAGGHRLG

SEQ ID NO: 76274 - protein, 562 aa, Zea mays
  Coding DNA Sequence Number=SeqID_32899
  Gene Ontology: Mol. function=DNA binding; Cellular component=nucleus; Biological process=regulation of transcription, DNA-dependent
  Homolog annotation: Hit_ID=A2ZV91; Match level="QueryCoverage=86%, HitCoverage=57%, E-value=1e-152, Identity=59%"; Hit description =Putative uncharacterized protein
  Pfam annotation: Domain name=WD40; Domain location=294-332; Score =24.2; E_value=0.00049; Accession=PF00400.23; Description=WD domain, G-beta repeat
  Pfam annotation: Domain name=WD40; Domain location=336-374; Score =46.3; E_value=1.1e-10; Accession=PF00400.23; Description=WD domain, G-beta repeat
  Pfam annotation: Domain name=WD40; Domain location=379-418; Score =33.5; E_value=7.8e-07; Accession=PF00400.23; Description=WD domain, G-beta repeat
  Pfam annotation: Domain name=WD40; Domain location=422-460; Score =4.3; E_value=9.3; Accession=PF00400.23; Description=WD domain, G -beta repeat
  Pfam annotation: Domain name=WD40; Domain location=478-515; Score =11.3; E_value=1.3; Accession=PF00400.23; Description=WD domain, G -beta repeat
  Pfam module annotation: Pfam domain module=WD40::WD40::WD40::WD40::WD4 0; Domain location=294-332::336-374::379-418::422-460::478-515
  Subcellular localization annotation: CTP_CleavageSite=51; ConfidenceScore=5.40e-01
MAVLTKGLDHFRSGILQQKPFMQSPQQFQQLQFLTPQQQQQLLLHAQQNLSSSMSSDVDTRRLRMLLNNRNVVLGQDGQTNSGGDVIPNIGSPGQSGGSRNDIDILIKQQQQQQSHSQQQQLQQPALSGQQSQSSNQLLHQHGKPGVGSLPIDGNLPNSFGFPEQGSKKRKKPVSSSGRANSSGTANTAGPSPSSAPSTPSTHTPGDAMSIPQLQYNGGPSKPLMMFGSDGTGSLTSPANPLQDNKNSHLQGDVERLLEDGSLDENVESFLSQDDMDPRETMGRCMDSSKGLGFTEVAKARASTNKVVCCHFSLDGKLLATGGHDKKVVLWFTDVLKRKSALEEHSSLITDVRFSPGMTRLATSSFDKTVRVWDADNPDYSLRTFTGHSASVMSLDFHPNKEDIVCSCDSDGEVRCWSINNGSCVTCVRVFNGGATRLRFQPRQGKYLAAASEKGISILDAETLQVCRTPLQVCNLAAILSYNFTGHVQIIQSVCWDAAGNYLASVSEDSVRSLELWDIREKNTVTISNAHDGMVAALAASSASGLVASCRGKSERAADLIS

SEQ ID NO: 76275 - protein, 108 aa, Zea mays
  Coding DNA Sequence Number=SeqID_32900
MPMDPAPTSLQPPHRKEDVVPCPQALCSTATEPCPAPNYLWCALSYAATISSMPSAAPSLSPPTTAHASAAPPPVPHVTPADMWLGSPETGGVKREHKGKSSRALGKG

SEQ ID NO: 76276 - protein, 195 aa, Zea mays
  Coding DNA Sequence Number=SeqID_32901
MAVRDERAATARPRRRERRCPLRTTAVVPRRGGGDDDPGGASAGRGPGSRERPEARAAVSTKGVRDGGGSSSAHGSDDPIQRSREAGLSPAAAATRGTRGSGSVGGRARRVLQGSVVRTTVQASFDHQFLRSSGSAKREMEMATSHGKASSRESGDKRREESPPHVKSHRSGDKKKKMNKVVYYETDSSSPLIVA

SEQ ID NO: 76277 - protein, 68 aa, Zea mays
  Coding DNA Sequence Number=SeqID_32902
MKAQSEISGAGPWSELEPALASYRLARPTERQGAAALCLVRRPNGTLWRRLEHDHDVLPFLANPEGAF

SEQ ID NO: 76278 - protein, 71 aa, Zea mays
  Coding DNA Sequence Number=SeqID_32903
MSSRGKKRLVVEVDLDLDPAAEVTAAFDRLCVSVVNKPPPAAAVVCQATFNSILSLSTNRSFPKWCPYFVG

SEQ ID NO: 76279 - protein, 162 aa, Zea mays
  Coding DNA Sequence Number=SeqID_32904
MDASQDLWDWDWEVVLPDHRSFSLSNGVKNLDDKETETEEQDLLPPSGDVDVHNECKGIGVVLDETCKSAVPSVADPIMASEGGVEEKAIQSPDAEESVTADSKFAQEEEEEEDIKKDVDDKRIQQVVRQASRLNQKAMSFAMGAGASRHFGRPRVKRSKKH

SEQ ID NO: 76280 - protein, 74 aa, Zea mays
  Coding DNA Sequence Number=SeqID_32905
MVDKVQIKDKETNVLCLSAGNRKNPIGNVLARAAKNLLSLGAPDCPVVHRTVSGAPGWLEQNGCSRDFDGGVRL

SEQ ID NO: 76281 - protein, 380 aa, Zea mays
  Coding DNA Sequence Number=SeqID_32906
  Homolog annotation: Hit_ID=Q7XB67; Match level="QueryCoverage=48%, HitCoverage=85%, E-value=3e-23, Identity=41%"; Hit description =Putative uncharacterized protein P0431A02.22
MDASQDVWDWDWELVLPDHRSFSLSNGGKNLDDKETVEHDLLPPSGDVDVHDECKGIGVLDETCKSAVPSVADPIMNSEGGEEEKAIQRPDAEESVTADSKFAQEEEEEEEDIKKDGDDKVGALIGALCSFGVAAATACVFLIGGRLHHHHTQQHKIQLQFFGDDKGVKSAFDGVVRVGGGTYSINHQVERAGLWWTHGSAPSANVVTKGEDVGEVPVDDDGGDDPWHDVDDCVIIGAEIAAGVYDGDTMHGGVEGAKRDGLMEEGLGIVSERRVQAEGDEDDISTVMDVGLEAREDADGGNALRRPADLLGRDTCPWRAAFGGDSGVSEEAGTGYRAVDSDGERVGAAALGVVRPVSAMVDLLSSISLLKNQVPMILRL

SEQ ID NO: 76282 - protein, 672 aa, Zea mays
  Coding DNA Sequence Number=SeqID_32907
  Homolog annotation: Hit_ID=Q7XB67; Match level="QueryCoverage=65%, HitCoverage=88%, E-value=1e-32, Identity=55%"; Hit description =Putative uncharacterized protein P0431A02.22
MDASQDVWDWDWEVVMPDHRSFSTSHGSKNLDDKETEEHYLLPPSGDVDVHDDCKGIGVVLDETCKSAVPSVADPIMASEGGKEEKAIQSPDAEESVTTDSNFAQEEEEEEEDIKKDGNDKVGALIGALCSFGVAAATACVFLIGGRLHHHHMQQHKIQLQFFGDDKSIQQVVRQTSRLNQKAMSFAMGAGASRHFGRARGSALSANVVAKGEDVGEVPVDGDSSDGDDPWHGVDDCVIIEAGIAARVYDGDTIDGGVEGAKHDELMEEGLGISERRVLAEGDEDDLSTVMDGGLEAHEDAGIGNSLHRLADLLGRDTRPWCAAFGCDSGVSEEAGTGHVAVDSDGERVGVVALGVTCPVSAMFAQEEEEEGEEEDIKKDGDDKVGALIGALCSFGVAAATACVFLIGGRLHHHHTQQHKIQLQFFGDDKRIQQVVRQTSRLNQKAMVEGVKSTFECVVRVRGGINHQVERAGSWWTQGSAPSAHAVAKGEDVGEVPVDGGGDDGDDPWRGVDDCVIIGAGIVAGVYGGDIMDGGVEGAKRDGLMEEGLCIVSERRVLAEGDEDDISTVIDGRLEAHEDAGGGNALRRPADLLGRDTRPWRATFGGDSGVSEEAGTGHGAVDCDGQRVGVVALGVARPVSAMVVLLSSISLLKNQAPMILGLQAKPCFTESW

SEQ ID NO: 76283 - protein, 221 aa, Zea mays
  Coding DNA Sequence Number=SeqID_32908
  Subcellular localization annotation: CTP_CleavageSite=48; ConfidenceScore=5.07e-01
MVALQGGRPLFKGDSPPTCALNRCGLSLLRHAPRSSPPRRGGWVPHVMQAGPWEKKPNRHVRAVHATAQRLQAVLHFRPDQWAKGRTAKQAACNRAKWARPFDFNEPSMEVQAHASCNRRAGCYVASQARWSNAVEIGPAVMAVTGGQKQRSRRQPSWRPIQGQRGSPLSRREDSAPVIRSSNGSRTRNGHPANRSPRRINSAAGQAAPQAGEASDALPSP

SEQ ID NO: 76284 - protein, 312 aa, Zea mays
  Coding DNA Sequence Number=SeqID_32909
  Homolog annotation: Hit_ID=Q7XB67; Match level="QueryCoverage=58%, HitCoverage=86%, E-value=3e-29, Identity=48%"; Hit description =Putative uncharacterized protein P0431A02.22
MDASQDVSDWDWELVLPDHRSFSLSNGGKNLDDKETVEHDLLPPSGDVDVHDECKGIGVVLDETCKSAVPSVADPIMNPEGGEEEKAIQSPDAEESVTADSKFAQEEEEEEDIKKDGDDKVGALIGALCSFGVAAATACVFLIGGRLHHQHTQQHKIQLQFFGDDKRIQQVVRQTSRLNQKAMSKHRPSSRVRWCVVDIRLVPPQAHDVAEGEDVGKVPVDGSGSDSDDPWHVVDDGVVIGAGVAGGAYDEDTVDGGVEGAERDRLMIEGLGVVGERRVLAERDEDDVSIVMDGRLEVHEDGALAATHSADQ

SEQ ID NO: 76285 - protein, 58 aa, Zea mays
  Coding DNA Sequence Number=SeqID_32910
MESWCLEMIKECLGYSSMRLGVPSIAPRQLGAIGGNLGRTVRCTTGHALFMVRCRSPS

SEQ ID NO: 76286 - protein, 123 aa, Zea mays
  Coding DNA Sequence Number=SeqID_32911
MARAKWLLSGLRRRCTAIIHRTVRWCTGLSGGPFTGELVALGNSSATYGYNSPDCPVSQRSAGPTVGRAIYAGHVAEPTARRRHRTVRCAPDMSGAPTALSLPTVNCAIYGKESGTGQCPIPL

SEQ ID NO: 76287 - protein, 163 aa, Zea mays
  Coding DNA Sequence Number=SeqID_32912
  Homolog annotation: Hit_ID=Q6YZD9; Match level="QueryCoverage=28%, HitCoverage=7%, E-value=4e-12, Identity=67%"; Hit description =Nodulin-related protein-like
  Pfam annotation: Domain name=Nodulin-like; Domain location=24-159; Score=-144.3; E_value=0.014; Accession=PF06813.4; Description =Nodulin-like
  Subcellular localization annotation: CTP_CleavageSite=63; ConfidenceScore=5.35e-01
MGRDGDWAEPRQRRLPLAIARPARWSATGTPTHPSSRSPRAMGGTPTMRFPAPSVLAMCVLIYVGTNGETFFNTTALVTCIQNFPKSRGQTVTRNMTTAYQNDQMLDKVMVVMGAPQGQQNGFKEAANSVEFLGREMLGMQLRAAKPDTDDLYVLIFLFLWQE

SEQ ID NO: 76288 - protein, 365 aa, Zea mays
  Coding DNA Sequence Number=SeqID_32913
  Gene Ontology: Mol. function=structural constituent of ribosome; Cellular component=intracellular; Biological process=translation
  Homolog annotation: Hit_ID=A3C3W1; Match level="QueryCoverage=28%, HitCoverage=33%, E-value=1e-41, Identity=81%"; Hit description =Putative uncharacterized protein
  Pfam annotation: Domain name=Ribosomal_L36; Domain location=176-215; Score=33.0; E_value=1.1e-06; Accession=PF00444.9; Description =Ribosomal protein L36
  Pfam annotation: Domain name=Ribosomal_S12; Domain location=253-365; Score=105.1; E_value=2.2e-28; Accession=PF00164.16; Description =Ribosomal protein S12
  Pfam module annotation: Pfam domain module=Ribosomal_L36::Ribosomal _S12; Domain location=176-215::253-365
MWPGVGKLPNWHVYPQWKPTKLSTLVPGLDSDGYDLLEKMLAYEPGKRVSAKKALEHPYFNDVNKEHRDPPYPRSGAAVPRHGLPRSALPPAPDAQLHRALSPSPAPVAGAQAGSSEVRERDPHDVPVPVCVPIPIRARDAHGRGRISGRLRGLGRRQGLRRNHRFTSPPPPPRVCKSNSGLTVKHLCRFCKVVKRRGIVFVKCMANAKHKQRQGFSTIAEAAVVSCVHLPPPPPASGSASAATFADKTRGMGARRKLKTHIRNQRWADKAYKKSHLGNEWKKPFAGSSHAKGIILAKIGFEAKQPNFTIRKCARVQLVKNGKKIAAFVPNDGCLNYIEENHGVQERGRERRWCMVNKQVRAERR

SEQ ID NO: 76289 - protein, 132 aa, Zea mays
  Coding DNA Sequence Number=SeqID_32914
MHGGVEGAKRDGLMEEGLGIVSERRVLAEGDEDDISTIMDVGLEAHEDADGGNALRRPADLLGRDTRPWRAAFGDDSGVSEEAGTGHRAVDSDGERVGAAALGVAQLRYNSPDCPVHQQSNGYLRAMVDSDG

SEQ ID NO: 76290 - protein, 191 aa, Zea mays
  Coding DNA Sequence Number=SeqID_32915
  Gene Ontology: Mol. function=carboxyl- or carbamoyltransferase activity; Cellular component=ornithine carbamoyltransferase complex; Biological process=amino acid metabolic process
  Homolog annotation: Hit_ID=Q8SA97; Match level="QueryCoverage=63%, HitCoverage=20%, E-value=1e-21, Identity=51%"; Hit description =Ornithine carbamoyltransferase
MAPPVDVAGLRPRLGDVEVPPKPRSNLSSVAEVESEPLVRARRRPSAEARAESEPWGRAKRTRVRALGRAERSSSSSGAEPESEPWVGRSGVRRLPELSPSPSPGSGGAEFAVFRDLARVRALGRAERSSSSSGAEPESEPWVGRSGVRRLPGLSPSPSPGSGGAEFAVFRGLARVQALGRAERSSSSSGA

SEQ ID NO: 76291 - protein, 87 aa, Zea mays
  Coding DNA Sequence Number=SeqID_32916
  Homolog annotation: Hit_ID=A2X271; Match level="QueryCoverage=68%, HitCoverage=12%, E-value=8e-13, Identity=56%"; Hit description =Peptidyl-prolyl cis-trans isomerase
MRILLNCKEKQKHTVFGKLVVGSDVLKKIEQVDVQSPDSTPVIPVTIVNCGELIEHKDIGSMSIEIGNAYELIGTFAALLIHLIYKD

SEQ ID NO: 76292 - protein, 66 aa, Zea mays
  Coding DNA Sequence Number=SeqID_32917
  Homolog annotation: Hit_ID=O48967; Match level="QueryCoverage=59%, HitCoverage=8%, E-value=3e-09, Identity=69%"; Hit description =Putative uncharacterized protein
MASYFHVALTGPARTWLMNLTLGLVYSWEELCAQLLGTFGFRRYLRTQVGIIVDQNNTKVDTAPKV

SEQ ID NO: 76293 - protein, 98 aa, Zea mays
  Coding DNA Sequence Number=SeqID_32918
  Homolog annotation: Hit_ID=O48967; Match level="QueryCoverage=100%, HitCoverage=20%, E-value=5e-26, Identity=62%"; Hit description =Putative uncharacterized protein
MVQIIEHRDLSPEDFLMEEGATSSMPRGSHHPAPGTDAMHAAQQHTPTQTSRAPSRAAHGGALSAARELLRNPPSSMASPGALRQWREDVDRLLGMAH

SEQ ID NO: 76294 - protein, 453 aa, Zea mays
  Coding DNA Sequence Number=SeqID_32919
  Gene Ontology: Mol. function=oxidoreductase activity; Cellular component=cytoplasm; Biological process=metabolic process
  Homolog annotation: Hit_ID=Q8S529; Match level="QueryCoverage=100%, HitCoverage=91%, E-value=0.0, Identity=92%"; Hit description =Cytosolic aldehyde dehydrogenase RF2D
  Pfam annotation: Domain name=Aldedh; Domain location=1-443; Score =767.9; E_value=6.3e-228; Accession=PF00171.13; Description=Aldehyde dehydrogenase family
KTFDTRDPRTGDVLAHVAEADKADVDLAVKSARDAFEHGKWPRMSGYERGRIMSKLADLVEQHTEELAALDGADAGKLLLLGKIIDIPAATQMLRYYAGAADKIHGDVLRVSGRYQGYTLKEPIGVVGVIIPWNFPTMMFFLKVSPALAAGCTVVVKPAEQTPLSALYYAHLAKMAGVPDGVINVVPGFGPTAGAALASHMDVDSVAFTGSTEVGRLIMESAARSNLKTVSLELGGKSPLIIFDDADVDMAVNLSRLAVFFNKEGIYDEFVKKAVEAARSWKVGDPFDVTSNMGPQVDKDQFERVLKYIEHGKSEGATLLTGGKPAADKGYYIEPTIFVDVTEDMKIAQEEIFGPVMSLMKFKTVDEVIEKANCTRYGLAAGIVTKSLDVANRVSRSVRAGTVWVNCYFAFDPDAPFGGYKMSGFGRDQGLAAMDKYLQVKSVITALPDSPWY

SEQ ID NO: 76295 - protein, 237 aa, Zea mays
  Coding DNA Sequence Number=SeqID_32920
  Gene Ontology: Mol. function=peptidase activity; Cellular component =cellulose and pectin-containing cell wall; Biological process =proteolysis
  Homolog annotation: Hit_ID=A2YTY3; Match level="QueryCoverage=72%, HitCoverage=39%, E-value=4e-34, Identity=48%"; Hit description =Putative uncharacterized protein
  Subcellular localization annotation: CTP_CleavageSite=13; ConfidenceScore=5.26e-01
MTPSSTVLPASARSSAQGSSIRTSYSTNRSCANWTRDTEGHCTHTLHRYRQLCAPHQPLRLRHSHRQKWHTVGACRRLEGLLVGGVRCRQSAILMDYESTIHDDGDVIFVSFGQDAPTSDDTKSFFHEPVTFSSLHTAIHGDPIVCSTGNSGPYDDTVINAAPWVIIVVATTVDRDFPNILTLGNIMRLGGTSLMSTTRQRTLLDGRCFLRHLQPVRHRRPCEGITDESMINEGGIL

SEQ ID NO: 76296 - protein, 396 aa, Zea mays
  Coding DNA Sequence Number=SeqID_32921
  Gene Ontology: Mol. function=catalytic activity; Cellular component =nucleus; Biological process=regulation of transcription
  Homolog annotation: Hit_ID=Q5JJP7; Match level="QueryCoverage=19%, HitCoverage=25%, E-value=6e-21, Identity=67%"; Hit description =Putative transcription factor PCF3
  Pfam annotation: Domain name=TCP; Domain location=247-381; Score= -14.9; E_value=1.4e-06; Accession=PF03634.4; Description=TCP family transcription factor
MTVLHHSHLPTDTKAERKGWWPHTSVSTAEIAALCRASERVTQTCSGRWCACGHRRSLIVSFTYREHRRGGESHGRCSTHRPGRTAGRVGRCSGGRPPGGSRDRKGQAPLSRLGPVTISPHPLCHPRSSPSSGQAGAPVTKQKKGSESTKPDLVCFLLPRLGGSWCLCVSVCGDGPQVPPPPPLNKTEPTTATTTTTSTAQQQQLDPKDYHQQQQPAQHLQIQIHQSPQQDGGGRGKEEEQLQVVAQPGERRQQPLAPKRSSNKDRHTKVDGRGRRIWMPTLCAARIFQLTRELDHNGEREDMERNRVRAWRLSSSVVARTAAGAAGAGRGIAGGGMRPRILPPARYGGGIGMEEESRDGTGRPVFAAGMAAGGSWQTSGRTGLGSGGSLQSSLNS

SEQ ID NO: 76297 - protein, 479 aa, Zea mays
  Coding DNA Sequence Number=SeqID_32922
  Gene Ontology: Mol. function=protein serine/threonine kinase activity; Cellular component=cytoplasm; Biological process=protein amino acid phosphorylation
  Homolog annotation: Hit_ID=A2YI77; Match level="QueryCoverage=15%, HitCoverage=14%, E-value=7e-30, Identity=87%"; Hit description =Putative uncharacterized protein
  Pfam annotation: Domain name=Pkinase; Domain location=249-450; Score=- 92.0; E_value=0.0042; Accession=PF00069.16; Description=Protein kinase domain
  Pfam annotation: Domain name=Ribosomal_L21e; Domain location=219-291; Score=-8.6; E_value=0.0013; Accession=PF01157.9; Description =Ribosomal protein L21e
  Pfam module annotation: Pfam domain module=Pkinase::Ribosomal_L21e; Domain location=249-450::219-291
MDKNQNLAYAPYIMALIKAKTRFEGHCEIVHTPFRPFKNEIGFLTRPLTPFPDDEEEAGYDAGDAPEADAEQMPPPPPPPQPQQYWQPCPGYFDPYFQNLQQSFHDNMGALSSQFDNLSTNDSMQDISQSQQQLQQNFGQFSSHFDTFNTHYYSMYPPPELQIKISLMKLISKILLIPKSKPSIHPPLAGVLDPTVDILEEAAKAKEAGVDVIIDQGCEAGGHVIGQIIDYVDVKVNNTVHKGMPHKFYHGRTSRVRNTKCAIGVEINKQWSKQSNRTKMITTINNLDEWHKRLTVVGRDENSRKRYRYKCKYNDLKKPNTYYVDSLGIVEILFKILVLNIFGEWIKLLLRESSAGHLCLSAVLLRVLVINNKCYDGAKGDMWSCGVIFFVLMAGYLPFEDSNLMSLYKKIFKEDFSCPSWLSTGAKKLIKKILDPNANTISSVVCSHHFNSFCSTSAGLITMYHRSVAYVDNSYCGAH

SEQ ID NO: 76298 - protein, 341 aa, Zea mays
  Coding DNA Sequence Number=SeqID_32923
  Gene Ontology: Mol. function=carboxyl- or carbamoyltransferase activity; Cellular component=ornithine carbamoyltransferase complex; Biological process=amino acid metabolic process
  Homolog annotation: Hit_ID=A6N096; Match level="QueryCoverage=54%, HitCoverage=91%, E-value=3e-86, Identity=81%"; Hit description =Chloroplast ornithine carbamoyltransferase
  Pfam annotation: Domain name=HGTP_anticodon; Domain location=77-162; Score=55.4; E_value=1.9e-13; Accession=PF03129.11; Description =Anticodon binding domain
  Pfam annotation: Domain name=OTCace; Domain location=197-338; Score =133.5; E_value=6e-37; Accession=PF00185.15; Description =Aspartateornithine carbamoyltransferase, AspOrn binding domain
  Pfam annotation: Domain name=OTCace_N; Domain location=91-193; Score=- 37.8; E_value=3e-05; Accession=PF02729.12; Description=Aspartateornith ine carbamoyltransferase, carbamoyl-P binding domain
  Pfam module annotation: Pfam domain module=HGTP_anticodon::OTCace::OTC ace_N; Domain location=77-162::197-338::91-193
MHRDIAVQKLRGDGGRSDAAHSTGTLLIRELKTNGGQHDAVQCISSLHVQKLRENQIKLYGSSSFLESIVDDTRVHHVPLVKNQEFDAAAKEITKALTTVGISHIIDTTAISIGRRYERTDEIGVPFVVAMDSTNVTIRERDDKEQIRVDINEVASMDILDLAKYAYVPVINGLTDYNHPCQIMADALTMLEQIGRIENTKVVYVGDGNNIVHSWLLLADVLPFHFVCACPKGFEPDAHTVEMARGAGISKIEITNSPREAVKGADVVYTDVWASMGQKEEVDYRKQKFQGFTAYLMHCLLAERGVEVTDGAIEAPNSIVFPQVENRMHAQNAIMLHVLGA

SEQ ID NO: 76299 - protein, 68 aa, Zea mays
  Coding DNA Sequence Number=SeqID_32924
MGKIYSAVEVEAGKWGRLSGDTERALGKLTGWARTSARGCKRKWPRWGRLESLARLKLKGYASIGWLR

SEQ ID NO: 76300 - protein, 179 aa, Zea mays
  Coding DNA Sequence Number=SeqID_32925
  Subcellular localization annotation: CTP_CleavageSite=30; ConfidenceScore=5.70e-01
MSCPCGLPPYRSPRPSLTSPRHPSASSSCRCFVTRVLHPASAQRSGTLLPISQPVAELPCARRPSADQPRAQQQRCRRRASSSSFIALKSSLAVHHVPRPCLNVMHLRLAVRCCLRNRRSSFGDQMIQVFEFYKVEDPEHLFGEGHNEDDGFDYDYGYGKEEGVEADLQEFQDFDEFED

SEQ ID NO: 76301 - protein, 200 aa, Zea mays
  Coding DNA Sequence Number=SeqID_32926
  Subcellular localization annotation: CTP_CleavageSite=59; ConfidenceScore=5.86e-01
MGWRSPSSASCSHTSSRDGPLPCSTSASPVVRISASSKLLRGSFTSVRVAGMSVGWWLRAVQLGPGVFSSLSLGREVATVVGEGILVQLLLSYRREEDVLGSRVDAPQKPNCRSPVQGLERQGLRRHLPSRFSVRAESRDGNTLTCGWVVTLKLWFYSRVLSARGLLYLTSHRGKLKEKGLHAKGQSAEGQESRMQLMKR

SEQ ID NO: 76302 - protein, 165 aa, Zea mays
  Coding DNA Sequence Number=SeqID_32927
MEHEGGKRTGKGESRGLRVALRPGRARRRLLRGQGRVRAPGQARRRPSSEAEAVFEPWGRTRRSSSSYVEVEPEPWGQARRRPSSKAEAMSEPWGRARQSPSSSESWLSPSPRVGQWSGEVTAVTSALSTGARVRIRCQAILALNAHAIRSVGVAIWPRLLLCED

SEQ ID NO: 76303 - protein, 251 aa, Zea mays
  Coding DNA Sequence Number=SeqID_32928
MMTASKKVRHVIRFRILFHFLFLSLATGTGKGDTPKGTLVHEGSGPRAPLLIRGSKAGPSEGFNSRLRALGLRAHYWSEVRRLAPRKGSTAASGHSDSAPTTDQGFVGWPPKGSTAASEHAERGMTLGLGPHLGLRRWTLPRPTPGLGLNHDSEDDGLRLARPQGSDIASASEDGLRLARPQGSGSTSTLDDELRLARPQGSDTALASEDGLRLARPGARTRPRPRRSLRLARPRAQTDHVTGGHHYPTPS

SEQ ID NO: 76304 - protein, 127 aa, Zea mays
  Coding DNA Sequence Number=SeqID_32929
MLKWGDPLLRGLVCFVGEAFGGGGTEDQGFESLALVVVFPLVMCGARLGKSELLVICVELGNYASGSPLASPNSSTRLTNLSVAEHKRLKDDMKKIDEEVQRQKDQVLRVADKKIKVLKVRPFGTLR

SEQ ID NO: 76305 - protein, 202 aa, Zea mays
  Coding DNA Sequence Number=SeqID_32930
MDEGAPLGGLESEDNTEPSHGLHTVLSSLWSRGHLAHRLRIRFPEDEGVRRPKQSNQPRRLTGPAGRGSGHGLTTLDAVSAVPATLPRPRGSVLRPPESGVARRRSRALGFVPTLGEIRPGLGRRREREDPCFEGGRQHCAWTRGGRVKPLDFGQGSFIFVRKAIPLADPLQIHVIVGSEHGEGPPDAMVQRLAESAARVVT

SEQ ID NO: 76306 - protein, 115 aa, Zea mays
  Coding DNA Sequence Number=SeqID_32931
  Subcellular localization annotation: CTP_CleavageSite=48; ConfidenceScore=5.30e-01
TQEPPTPRVAAITGDNRPSRNHRSHPRLPWPPLPLPKPPTSPVAATAAAEAYRAVRNRRRHRAWDAPPQLVCLGSVVARFWGTPSLVACLGTPPSLAPGIAAACTSDGTAIAAKT

SEQ ID NO: 76307 - protein, 65 aa, Zea mays
  Coding DNA Sequence Number=SeqID_32932
MDCILILSLDTKSYLIKQQYLVWTETIRAKRRRHRMPANLDSHSRRAVFGTALNVLKWTGRTEDT

SEQ ID NO: 76308 - protein, 108 aa, Zea mays
  Coding DNA Sequence Number=SeqID_32933
  Gene Ontology: Mol. function=two-component response regulator activity; Biological process=two-component signal transduction system (phosphorelay)
  Homolog annotation: Hit_ID=Q7FS86; Match level="QueryCoverage=41%, HitCoverage=51%, E-value=4e-14, Identity=88%"; Hit description =Putative response regulator
  Subcellular localization annotation: CTP_CleavageSite=29; ConfidenceScore=5.56e-01
MATTFVPSVSVMATAAAAPASVAPSPTPKANNNRKAVVPGMTGYELLKRVKESVALRDILVVIMSSENVPTRIIPLPAQITAFHPFDPNIVESGTFCHTKPQTVTSSN

SEQ ID NO: 76309 - protein, 163 aa, Zea mays
  Coding DNA Sequence Number=SeqID_32934
  Gene Ontology: Mol. function=binding
  Homolog annotation: Hit_ID=A2Z9F0; Match level="QueryCoverage=79%, HitCoverage=32%, E-value=1e-36, Identity=61%"; Hit description =Putative uncharacterized protein
MTHKPFDKGANTSRGKSTTQMALRDGLNIHALNVVLNILMTRGILEQRACLDTLLALLVNCSGNLTDFKEQDGLNKIAVIVKDANRDDHVRLKCSEFLLLYSGNAKEKCGADSESNMREDLAKVFGEKCASFISSMNLFSSTLESQMRQSELSFLAEHVLDYM

SEQ ID NO: 76310 - protein, 342 aa, Zea mays
  Coding DNA Sequence Number=SeqID_32935
  Gene Ontology: Mol. function=nutrient reservoir activity
  Homolog annotation: Hit_ID=Q651V3; Match level="QueryCoverage=71%, HitCoverage=55%, E-value=6e-11, Identity=26%"; Hit description=NAM -like protein
  Subcellular localization annotation: CTP_CleavageSite=96; ConfidenceScore=5.30e-01
MWDPQMWHAQGLDPTQASIFSNPTSHMTNPTWSQGPNDPSSYTFRNPWNPYFGMTNTGSPPTQTSFGQPQMVPPIAGPQVSTHVPSQTDPINFESKAEHSVHEVNSPTKPSDTPATFRRTKEQNFKPDEDLLLCKTWLEISSDPVISTGQRKEGLWARIEKRYNELRGEFPLRLNRALSSRWDKIRAETGKFARFYARVLRENQSGLIDNDKRGNAGTEPVRSLTPTGSVNEVEFDEGGSKGKRPLGRDSTKASRKKSMSSSSQSTDYLSRIHDIQIARLKQSEEKSDLKQQNIEFMKEVELKKLEVQSKEIQVQEKIDDGRQEAKGRRAEETLCYGHGCFT

SEQ ID NO: 76311 - protein, 141 aa, Zea mays
  Coding DNA Sequence Number=SeqID_32936
MALASPSAGSFPDKRARSENSDEGGPGDSRATAPLQEKAAVDPPSAVDPPSAANPFCWSGRRAADVVGNADPAAKFAERRPGRSVRRRRRRSSVSASSSSAGWRSTGVHRFADRSTLSRSASFELQGPRYINRCSKFFSSD

SEQ ID NO: 76312 - protein, 180 aa, Zea mays
  Coding DNA Sequence Number=SeqID_32937
MASGSSRGKGAVNERRKDGGKLTPMSFDGPLGPDFFEEAVFNFPVQSKKDFNKEHSLVKENCGFTRWVDPRPIFPHAEYISYLQNRIFDLERSASMPRSILLLPLSQQECWSSVVSTAPTAHANNGRILWGRVNSIWNVGALLENSYVSIAFSVLVIYFKCFKSPSRIALNLLFINYVFM

SEQ ID NO: 76313 - protein, 140 aa, Zea mays
  Coding DNA Sequence Number=SeqID_32938
  Subcellular localization annotation: CTP_CleavageSite=56; ConfidenceScore=5.33e-01
MQAACNRAKWTRFSDSQRASTEAQAHASRNRRAGCCMQATAPPLAPPPRLFGCGTNAATRGDPAAPAWRDEVRRLALRRVQQPPQIAWARHPLLVRGSKAGPPKGSMAASGYSGSAPITDQGFEGWPPKGSQSPQTPSEG

SEQ ID NO: 76314 - protein, 201 aa, Zea mays
  Coding DNA Sequence Number=SeqID_32939
  Homolog annotation: Hit_ID=Q10PV7; Match level="QueryCoverage=50%, HitCoverage=57%, E-value=6e-12, Identity=43%"; Hit description =Expressed protein
MAWARHKQQCSGNYCRVQESSPGGPELKCLEAVEAFNEGKVEEPACTSWHTTHTSNKSRRSNKNEREDASVEFLHVAHNAVVCSGLDSSSKDSESDEDEVPLINKRTERRRRQRLHEMYLARESNDVEFGSSTSHKVGSCSLAPKDNNKGESVPASQPEERSCSSHPVSSNGVAGNQAGHEHMSSPTDSPIRGEIVDISDG

SEQ ID NO: 76315 - protein, 102 aa, Zea mays
  Coding DNA Sequence Number=SeqID_32940
MGLCHRRSREGSKNRFGRRASEPTSPDRWVLTVGASDSWATEQSGGAPDSHCSLSDCNLADGEYILVPEQGVAQEVAQDPAPEPAIEDLPAPALEGKPRFYA

SEQ ID NO: 76316 - protein, 187 aa, Zea mays
  Coding DNA Sequence Number=SeqID_32941
  Gene Ontology: Biological process=polar nucleus fusion
  Homolog annotation: Hit_ID=Q6YU01; Match level="QueryCoverage=71%, HitCoverage=14%, E-value=3e-31, Identity=53%"; Hit description=CCAAT- box-binding transcription factor-like protein
  Pfam annotation: Domain name=CBF; Domain location=11-162; Score= -63.2; E_value=0.023; Accession=PF03914.8; Description=CBFMak21 family
MADLESIVRNLGLSLQLEYTFWYRDASLIEQLPLMVALQRPPQYACGCLFILSEVLKAKPPLWGIVLQNESVDDGDEHFEDILEIPEDSSVASAVLHKHNEKVAAHEKHNLDAADGIDSVKQVNLVDENNASTDSSRQHAFYDPRHREPSYWYFLFNLIFVHGSTFTYEFFVLLNYVIVIHKYPHSV

SEQ ID NO: 76317 - protein, 115 aa, Zea mays
  Coding DNA Sequence Number=SeqID_32942
CRRRPPPPALVARAAPATSDADPHTIVTAVTSPTSLTTPSELYCRWVSEALYAKAVSPDLLAGNRWGRLMYVGLECLARSCSLEDMVAGVTWPSILPPGSTVEWDPTSAEEEHEE

SEQ ID NO: 76318 - protein, 201 aa, Zea mays
  Coding DNA Sequence Number=SeqID_32943
  Subcellular localization annotation: CTP_CleavageSite=49; ConfidenceScore=5.38e-01
TGAKITAARLTDGSRAPVGWSVTSGRSRRSRRCAGQRRRWLELLWPQAQAAEVVVGTCFGQTMAVGFNQGARGAPLGDVEAMRTRNREMVQWITQSTCSGGVTNSGERDLTVLVGLVLGSSLGKLHDLPRKLSAGSDRAEVGGNGLAMAGGSGGSRGGAAEGARGHACERALGAFPSVCPRRTRGGLLLPVFKGLFGRLSV

SEQ ID NO: 76319 - protein, 277 aa, Zea mays
  Coding DNA Sequence Number=SeqID_32944
MTTSLVVGRSKPGCGLPPALSFKDVHHPCWGGGCVELGPASAWAPALSFKCVARATVATCAGWPHLRLLLWHLSYWEVVQDIVRRAGGAAFLDGLVLTPVVRTGVKTSSCTLARPPFAERRGRGPSCSGTHVGMIAVAGESSVQRRPSPLVLMRLPLLPRKPSRVSEPPGWWLQVLRHLPQGGGVCRLTIRDQAERLHGFRTPPGDQCLFFKTGPPVRWTHRTIVLNTRTPVMEWWSVQGFGYGTRLTGHTGSGPPYGTGIRSLEPAPRPSPVFVKQ

SEQ ID NO: 76320 - protein, 175 aa, Zea mays
  Coding DNA Sequence Number=SeqID_32945
MTSCKDGLRGRRSPQPHADQGDTRLGPGAHWCLRCLRSEISVEVVTLNVLTALTLPFQRDPGVFSRTPTVELRPEVVDSVVGAALNGVRDACAGVCCFTACTTAVPESGRSGTRGAEDATSWSITKSSEVSTRCSMIRTIMLSEKTSTNLKPGPYLARQMSERKSPRPGGGLHPP

SEQ ID NO: 76321 - protein, 171 aa, Zea mays
  Coding DNA Sequence Number=SeqID_32946
  Gene Ontology: Biological process=polar nucleus fusion
  Homolog annotation: Hit_ID=Q6YU01; Match level="QueryCoverage=39%, HitCoverage=6%, E-value=7e-30, Identity=91%"; Hit description=CCAAT -box-binding transcription factor-like protein
MVGYKVEPSCPGIDKSGKRLLPDRKLKSLIQRPLDILPETKDGYSLLLFWHWEDCLKQRYERFVMALEDAVKDMLPNLKDKAMKIRRVVVDGLLELGCCICGLLGLANRHKTKAWSIGRRAPTRAPAVLCQERSRYRYSRPYNRQHRTRPRPPQQHKDAAARLRPKTECHP

SEQ ID NO: 76322 - protein, 335 aa, Zea mays
  Coding DNA Sequence Number=SeqID_32947
  Gene Ontology: Mol. function=nucleoside-triphosphatase activity; Cellular component=nucleus; Biological process=polar nucleus fusion
  Homolog annotation: Hit_ID=Q6YU01; Match level="QueryCoverage=90%, HitCoverage=24%, E-value=8e-88, Identity=64%"; Hit description=CCAAT- box-binding transcription factor-like protein
MALSFSVPILLIKLMFLPVSYSCNIQTVFMLLKSKSEQERRLLTALVNKLGDPERRAASSAAYLLTCLLAAHPNMKMVVIDEVDSFLFRPHVGLRAKYQAVNFLSQILLTNKGDGPKIAKRLVDVYIALFKFYYPSHGHLLYELPLGAFCGLVNGALWHMEGAIVSLQVCTEMGMILDGGEHTGKKRHSGVVLMSSGDTKGDTYSKDSKKKVGKIEGGNNKMDSRSKGNNEVGSTAGSDLELDSRILSALLTGVNRALPYVASSEVDDIVEVQTPILFRLVHAENFNVGVQALMLLFQISIKNNIASDRLYRALYSKLLSPSAVTSSKVPFLCAF

SEQ ID NO: 76323 - protein, 83 aa, Zea mays
  Coding DNA Sequence Number=SeqID_32948
MDGGYHPRGGEPSVSQLLQVLQKGLEILLSLARGSIAPVAAGGGHHSLRKRWEPPIVVPEGLGKGILRKGSFPAKEAGPEPSY

SEQ ID NO: 76324 - protein, 21 aa, Zea mays
  Coding DNA Sequence Number=SeqID_32949
MATWPRLLLGEDWASGEPKIL

SEQ ID NO: 76325 - protein, 137 aa, Zea mays
  Coding DNA Sequence Number=SeqID_32950
  Subcellular localization annotation: CTP_CleavageSite=45; ConfidenceScore=5.03e-01
MVAPPPPPSAGKVMGQTRMLFFCHAGKTSSILPPAGGLTAAIVVVARRRKEYHVVAAIEGHELETPETEHCPGLERLLETTHPELDGKLFVNTQQAPTWRANCRRFDPGGSLDRRVNCRCVSQPRWVGARRNTRGKQ

SEQ ID NO: 76326 - protein, 130 aa, Zea mays
  Coding DNA Sequence Number=SeqID_32951
MQSACNRAKWAHPFDFNAPSMEAQAHMSCNRRADCYVRATAPPLAPLPRLLDCGASTTTRGNPAYDPTVPAKRSGHGPVSRGPGKGKTPKGILLREGNGPRAPLLIRGSKAGPSEGFNSRLRALGLRAHY

SEQ ID NO: 76327 - protein, 402 aa, Zea mays
  Coding DNA Sequence Number=SeqID_32952
  Subcellular localization annotation: CTP_CleavageSite=29; ConfidenceScore=5.21e-01
MSSSSLKRRVFPSSKPPDGGNATPWELVPLSHRSASRIFITQPGRTPSPAVTRDGDLQLDGGGKRAGLRPLPLPQPQGFSSPRPGRGECRVGVGPCVGGGPLLHSVMGGEAGIARGVRQLQRAWSSAASGFGATCGVGVCHGSRKRFFRRRGGRDRPRADLQLLRPSARPCLTSFGTGGGLLAAASTLRSALPLFGPPEQKSPSSPLLDTRSRLFDYLNRFTKHELPRVKVTGEAGGSDISMNRGGVGSRMGTWGNRLSRLLGPDSRRSPWTAAPPEAGSGFAEGVVDAEGATAPFGVKTRACRIRSSCSVCFLRPPRPEENTLAALAKLRLFSSCFEHLDFVEAWESLGSVGLAAYAYFHPSMRPCPRLSRESLKACFGRRASEPLAAYVYLVVSRIRFPK

SEQ ID NO: 76328 - protein, 500 aa, Zea mays
  Coding DNA Sequence Number=SeqID_32953
  Gene Ontology: Mol. function=protein dimerization activity; Cellular component=endoplasmic reticulum lumen; Biological process=proteolysis
  Homolog annotation: Hit_ID=A2YGG5; Match level="QueryCoverage=100%, HitCoverage=64%, E-value=0.0, Identity=68%"; Hit description =Putative uncharacterized protein
  Pfam annotation: Domain name=Peptidase_M20; Domain location=148-481; Score=201.2; E_value=2.5e-57; Accession=PF01546.19; Description =Peptidase family M20M25M40
MDRGGHAALLLLLLALAVIPVTGAAGAAFLEEDAILGAVERAMMRGGGGKGAATANASGRHQHRRQRYGVGAPWREEIAGLAGRPELAAWLRSVRRRIHERPELAYEEVETSRLVRDELGALGVGFRHPVARTGVVATLGTGRPPVVALRADMDALPIQEAVEWEHRSRVPGKMHACGHDAHVAMLLGAASILKAREHQLKLRIVWSSCHSSRFGRHAFQGTVKLLFQPAEESGCGAKRMIEDGALEGVEAIFAVHVSHQHPTSVVGSRTGALLAGCGFFKAVIRGGGGGGDRASDPVVLAAASTVISLQGIVSREADPLDSQVVSVAVVNGGSEQAQPQEQELVLGGTFRAFSNASFYQLRRRIEEVVTAQARVHGCAASVDFFEGQSFYPPTVNDARMYAHVRRVATDLLGAQAYRDVPPMMGAEDFSFYSQAVPAGFYYIGVRNETLGSVHTGHSPYFMIDEDVLPTGAAVHAAIAERFLAEHDSIMGVAASDDQDP

SEQ ID NO: 76329 - protein, 107 aa, Zea mays
  Coding DNA Sequence Number=SeqID_32954
MGPRDSEMDETGVGKRDRPVGPSCRRTPTREIWAARRREKANYKVGVTRVDDVEVAKSTGSTRSEDHEQSREDAFQNLIRPLPVQDLEGEGFQRPALLIADARLRSG

SEQ ID NO: 76330 - protein, 124 aa, Zea mays
  Coding DNA Sequence Number=SeqID_32955
  Homolog annotation: Hit_ID=Q8S468; Match level="QueryCoverage=24%, HitCoverage=17%, E-value=4e-07, Identity=86%"; Hit description =Putative pol protein
MENHPEKQCYRKGGEKKMFTSNVKNKDSHDTIILGDGNQGKVRNAQRPRKACYNGPDHTWASMLDEVARWDDLVTGLRPMTYGVKGEPARCLVSVGPTITAKASSEGWRLRLRPNICPPRDQFD

SEQ ID NO: 76331 - protein, 86 aa, Zea mays
  Coding DNA Sequence Number=SeqID_32956
  Subcellular localization annotation: CTP_CleavageSite=62; ConfidenceScore=5.24e-01
MAPGGWRGDALSRTRYRGLAGATRLSASSSRGREARHEPTAARRHRCTGPCSSSRPFAGRLSARYTMQLGGWTLLPVAKPNASQTP

SEQ ID NO: 76332 - protein, 171 aa, Zea mays
  Coding DNA Sequence Number=SeqID_32957
MENEWKTRHTACGLWVAGQPPVLADLGAGIIQAQASLMLMHQLLSLSRRMGRGIERFRGVRQSWRNAQSHNSQVTPRQSPALLSWSRPKTSEMAVRSLGLSGRSVSMGPGRAKDACQNKMTSAVPFGLGIPALFQGVGPWMLVQGQHSDRMSRRSNRRGLLALPCREEMSL

SEQ ID NO: 76333 - protein, 445 aa, Zea mays
  Coding DNA Sequence Number=SeqID_32958
  Gene Ontology: Mol. function=methyltransferase activity; Cellular component=Golgi apparatus; Biological process=metabolic process
  Homolog annotation: Hit_ID=A7Q816; Match level="QueryCoverage=70%, HitCoverage=79%, E-value=5e-94, Identity=52%"; Hit description =Chromosome undetermined scaffold_62, whole genome shotgun sequence
  Pfam annotation: Domain name=Methyltransf_11; Domain location=295 -391; Score=35.7; E_value=1.6e-07; Accession=PF08241.3; Description =Methyltransferase domain
  Pfam annotation: Domain name=Methyltransf_12; Domain location=295 -389; Score=31.6; E_value=2.8e-06; Accession=PF08242.3; Description =Methyltransferase domain
  Pfam module annotation: Pfam domain module=Methyltransf _11::Methyltransf_12; Domain location=295-391::295-389
  Subcellular localization annotation: CTP_CleavageSite=53; ConfidenceScore=5.78e-01
MDAPAAGATSSSATHAPPAPHHATAKKRHHSGRTKTLLLFVVTNSISILLSVTFSRVTGLGTGGSGGDSALDFAFSVLSSSQSLAVDLHNRVEATDAIIKRLISNSGKMKRDALPPKLTPDEELTVALGPHTLPFGYTPNLDSDKLYPAIGAACHRHRDELNKYMRYNVTGDCPPDAALAERLMLRGCEPLPRRRCRARGPAGFPDPTPFPESLWVVPPDKSVSWAPYACKNYSCLVDSARRRPGSHSHHHGCEACFDLAAGKEQRRWVGQGGDLDYDIDTVLASKPRGTVRIGLDIGGGTGTFAARMAERGVTVVTTTLDLGSPFGSFVASRGLIPLHLSAVAGRLPFFDGTLDIVHSMHVLSNRVPRAVLEAELYDIYRVLRPGGIFWLDHFFCTGKELTEVYVPIIEGVGFRKLRWNTGKKLDKGPNADEWYISALLERPMM

SEQ ID NO: 76334 - protein, 76 aa, Zea mays
  Coding DNA Sequence Number=SeqID_32959
  Subcellular localization annotation: CTP_CleavageSite=20; ConfidenceScore=5.09e-01
MGGTGSMDDGKQQQCPHLLRLAAYAGGHRSRVPSTAPEALATSAVVSAWRPRLPNAAAMLHGMGAAARKKGDCGDR

SEQ ID NO: 76335 - protein, 524 aa, Zea mays
  Coding DNA Sequence Number=SeqID_32960
  Gene Ontology: Mol. function=nucleic acid binding; Cellular component= chloroplast envelope
  Homolog annotation: Hit_ID=A2Y4R9; Match level="QueryCoverage=70%, HitCoverage=77%, E-value=1e-151, Identity=70%"; Hit description =Putative uncharacterized protein
  Pfam annotation: Domain name=DUF647; Domain location=123-519; Score =407.8; E_value=1.6e-119; Accession=PF04884.5; Description=Protein of unknown function, DUF647
  Subcellular localization annotation: CTP_CleavageSite=27; ConfidenceScore=5.35e-01
MAPAVGLKRSATQTITLPPPDTRLAVRDVMRSTIPSQPAVAPASTERQAPAAALQGFLCLEEVDGRRWSYVVDGGAAKGRSRGGAVPAGAAVRAVPLQSPLPPAEERRCTLLIGLGETVYPDNCSSIGNFEEIMAFIRSYVVPEGFPDSVTPSYVPYMTWRALKVYCRTYIQQSAFTAILKNRPKFNVLFTIQHFFGGAMGVFTTRTLLSSVGVSQSKVTPGAIAINWILKDGAGRVGKMLFARQGKKFDYDLKQLRFSSDLLLEIGAGIELTTAAFPQFFLPMACVANVVKNVAAVTSTSTRTPIYKAYARGENIGDVTAKGESVGNIADLVRSVVLNTLNRARFTVAVDSFIKTGHIPSLKEGNSQETIFNPPWRHEPVAIGSRFGEAFQEPASFLAIRPLFEDERYMVTYNPTKDKVYALLKDQAKSDDIIKAAFHAHVLLHFINASHARRLKQKQKQANPDRSEYLYSRNMDFLAHIAESCKIVSSSYGTFKKKAREQGWIMSESLLNPGKARLCAAKPQ

SEQ ID NO: 76336 - protein, 204 aa, Zea mays
  Coding DNA Sequence Number=SeqID_32961
MACPPTWPRLAGAAGRSRCGLRRSEPPGFEGGRVARRRLCASAEASQSQSAWEQPPGRTSAPGARRLVMAEGLTVPSAGSRAANRQGSRPRLAWLSRACTGLPAPCVGDRRAPRRCRCTRAEGRRARCRAAAVCARAEKPGAQPLDSGPTAPAPGPAAPTSREVDRIREPAGPSAHTRAEGRPSSIRALTPGRAPVPRYQSVPC

SEQ ID NO: 76337 - protein, 230 aa, Zea mays
  Coding DNA Sequence Number=SeqID_32962
MATEGLGEVVCECDEVVEAAVHRMAALVGAAYAGDEVGDIAGRRSGDERGDDRLGFSGSKTRADLGNVEAMTRADLKNVEEGEEAEHKEETASVEAARSQPLKYVATSTARRSKEMTTRALMKWRPPHRLRTSVLPTATLCLAAPASATVAEASEARHPAVGARLEEQQPHGLVGVLGRPRWRTTRATERPYRRRQRLEIWRPVARKDWSEGFLGDLSETGNANQVRMRE

SEQ ID NO: 76338 - protein, 259 aa, Zea mays
  Coding DNA Sequence Number=SeqID_32963
MSGGLRNESASKLEKVEVASTSSFGADVDPRAIDLAMRIAKRMFLKMKEDEAKNKIEEEENDRWRPNDESTSSQGLSFKSTSHMCFVTNGSDSERESEDEEEHESDSEDEDDLQQFFAQLSKKNRVSLLKLMKRAEEQKEMLHKQEYFLIRKIEDLEKLTKEHEKLKCSHDDLVQSYQASQSSIELEISGNSDISITQENKELKEEVGRLRRSLTLLKGKCHAQLSHDNHDNMVKKLEKGTTVACTNPLQKNAKFPRKA

SEQ ID NO: 76339 - protein, 66 aa, Zea mays
  Coding DNA Sequence Number=SeqID_32964
MGDHVSGRVRRAICCQVHLGLADPRWGMQILAGMLWCWLLDYLLSNSLLQNEDVLFVSEITVYRMQ

SEQ ID NO: 76340 - protein, 256 aa, Zea mays
  Coding DNA Sequence Number=SeqID_32965
  Gene Ontology: Mol. function=tRNA-pseudouridine synthase activity; Cellular component=nucleus; Biological process=pseudouridine synthesis
  Homolog annotation: Hit_ID=A2X849; Match level="QueryCoverage=82%, HitCoverage=35%, E-value=1e-104, Identity=90%"; Hit description =Putative uncharacterized protein
  Pfam annotation: Domain name=PseudoU_synth_1; Domain location=56-161; Score=39.0; E_value=1.7e-08; Accession=PF01416.11; Description=tRNA pseudouridine synthase
MAAASPPPSPPHAKRPKMSSSSDPEADAEPTSASAAVEGADPAQRRPRYKRRKVAILLGYCGAGYQGMQKNPGARTIEGDLEEALYQAGAVPEADRSAPRRYDWARAARTDKGVSAAAQVVSGRFYVDPPGFIDRLNAQLAPQIRAYGYVRVTNSFNAKKFCDRRRYLYLLPVFALDPSAHPDREAVMASMGSGSELTKCLECSERGRKIPGVMGREGKLPSPGQNVQLMQIFILGTRRRNLSLQPLKIKLKGCQS

SEQ ID NO: 76341 - protein, 233 aa, Zea mays
  Coding DNA Sequence Number=SeqID_32966
  Gene Ontology: Mol. function=identical protein binding; Biological process=negative regulation of catalytic activity
  Homolog annotation: Hit_ID=Q6ESH8; Match level="QueryCoverage=72%, HitCoverage=24%, E-value=8e-18, Identity=32%"; Hit description =Subtilisin-like serine protease
MGEVMIIGILDAGITTIGQINANSKAKGMPPPPVKWKDRCDNNQACNNKLIGFKTFVDTSDTCGNSLLQRASVLGIEYDKAFAVAPKAHLVMYHVCDEECHPKEVRAGMDSAVDDDVDVISMSFNGTEDNMVFHDDVVTAPWYNVVAQCLLYDLTVGEFIPYLCVMSLDADRKCKIVEPTHASCAEIGEIATKDLNYPSIMIFTGNDVWQVEAKQSVTKPYMAQCKWPGPLKI

SEQ ID NO: 76342 - protein, 256 aa, Zea mays
  Coding DNA Sequence Number=SeqID_32967
MEVRCQTSFCQNEDGFPKLLRACTVRLRIRSQPEYDGREFVEHGTEKCVVTVYIRSSPHHVEWSVTAARHRFKDTCQVIVRKALRALCQIYEEEVADTPLRFFPSFQRDRPVWMARMRVLEGQQLLEDDPIVMYLTAYLLTLDAQYDFLARHHRQMIDRAEDAEKRNRLDKQEHPESPQDPPPELFEPLTMKKIPAPSREIKEEAASTPPAPPPFEELQEPVPLEEEFNPVLPSQSLPEEVINISSLLTHPGDVSD

SEQ ID NO: 76343 - protein, 99 aa, Zea mays
  Coding DNA Sequence Number=SeqID_32968
  Homolog annotation: Hit_ID=Q8SA86; Match level="QueryCoverage=90%, HitCoverage=10%, E-value=4e-10, Identity=41%"; Hit description =Putative retrotransposon protein
MPRMARDDQTMCNEILGNYTRKEDQLMTAAFGTRPKRRCKRKRIVSILSRQAARMVKEDEKASKKIKSTPEPKDVASKKRKAESPKPKMTKAAEETEST

SEQ ID NO: 76344 - protein, 511 aa, Zea mays
  Coding DNA Sequence Number=SeqID_32969
  Gene Ontology: Cellular component=membrane
  Homolog annotation: Hit_ID=Q6ET90; Match level="QueryCoverage=97%, HitCoverage=51%, E-value=1e-127, Identity=54%"; Hit description =Mechanosensitive ion channel domain-containing protein-like
MDQARSKSGLRSHGSGKASSRPGSGTLGSPEEQPMLSDRREVVVKVDGNGNGHAPFSFHGADAGGGGKAGNATSSTHSTATTTPAESRPRSSEANSPRSPPKVWREGSYEFWNNDGGGAGAAATEAFSFKNRPPPQAPQSSSPSMSPTQPPRPEGGGVDPPTRLIGSFLRRQAASGGEVSLDLDLEMEELGRTAQLRSHPSFSSSLERDGRVSFQEPQKSHSTSSCSSDSDTDDGRKRRGDDGEVVRCTSSSTAAGTGPLLRVKTRSRLMDPPPQSQPAPAPAPAPASVPAASPVIDEERKSSGLRTPTKSGRLFSGLMHGNKSGPVGGKSGPMDDDEDDPFVDEDIPDDFKRGKFDALTVLQWLGLFLIVAALACSLSIKILSTKKVLGLHLWKWELLVFVLICGRLVSGWVIRLAVFGVERNFLLRKRVLYFVYGVRSAVQNALWLGLVLASWHFLFDKNVQQETNSPVLPYVTKILFCFLVATLIRLVKTLLLKIIDFECVNRAGECI

SEQ ID NO: 76345 - protein, 107 aa, Zea mays
  Coding DNA Sequence Number=SeqID_32970
MTWLWAGLIARRRFTLAVLLAGRRGGKFRNNVEQPHASNARLPLCLSSCLALIRAPGPCGQRVSWGRAHWRLLRPSAAPPAQSTEHGLGSHVAYVAWHGRGSVQGCD

SEQ ID NO: 76346 - protein, 277 aa, Zea mays
  Coding DNA Sequence Number=SeqID_32971
  Subcellular localization annotation: CTP_CleavageSite=39; ConfidenceScore=5.37e-01
MSSRSLMHRVFPPSKPPDEGYPPSFRLIVGGTQLRGSCPAAPLRRRSPKTVTTSPWVGRSKPGCDLGPTLSFKDVHHPRWGGGRAEPELYLPRGFVGHPLLRRSRGRALTGPAGGSDFDNAGLVDGGRRQPQRVELVGLAPGAPSCRKAAAAPCRCPTRPGGSEWGSAGGLTAPVVGAEVEAAREVPVADGITATIRASGFRLFVLVLAPRASAWARARLQQHPPWGLRCCSSATRSGEPPESLGSVGLVVRGFSSLVKGTPWPLFDEPRPGVAVSA

SEQ ID NO: 76347 - protein, 464 aa, Zea mays
  Coding DNA Sequence Number=SeqID_32972
MEAQAHASCNRRAECFVHATAPPLATRHYAFRLHEEPPPELASLGNSLQPLRYNSPDCPVYTGLSGVTAEQRLFRRQRLPATHQMRALRAQTSGVPILAHRTMNRTCPVCTGHPGGPRSQKLQRSESNGIGDVAGAPDMSGVHRTVRCAIKQTASTNGQGPGKGDTPKRILPREGTRLRASLLIRGSKAGPPEGFDSRLRSRGPYTHYWSEVRRSAPRKGSTAASGYSGSAPITDQGFEGWPPKAGNDLVMESHRREASSPRTPSLGDRGPADHPQRLGGCSCKPGSGRTVDSVNIPARELGTRPYTRATASSHEGTTRPAEALRKALRPRRSETTPSRPRGLHPAGALARTHRNKTQPRKAGPLAKKCDESLQASANTPFEARGLLSGTIIRGTLKAPNSQLGSDSGSAPEDGELRSARRRARTRAKSRKTANSAPPDPGLGLELSPGRRRTPLRPTQGSDSG

SEQ ID NO: 76348 - protein, 106 aa, Zea mays
  Coding DNA Sequence Number=SeqID_32973
MAPPVDVAGLRPRLGDVEAPPKPRSSLPSVVEVESEPLGRARRSSSSSRAEPESEPWVGRSGVRRLPGLSPSPSPGSGGVELAVFRDLAQVRALGQAERSSPSSGT

SEQ ID NO: 76349 - protein, 73 aa, Zea mays
  Coding DNA Sequence Number=SeqID_32974
  Gene Ontology: Mol. function=phosphoprotein phosphatase activity; Cellular component=nucleus
  Homolog annotation: Hit_ID=Q2QM47; Match level="QueryCoverage=65%, HitCoverage=4%, E-value=1e-17, Identity=91%"; Hit description =Serine/threonine-protein phosphatase BSL2 homolog
MAEPGLEDSQPVDLSKHPSSIVPTLQLTPLGEPPSPRAAHVATAVGTMVVIQGGIGPAGLSAEDLHVLNLKQQ

SEQ ID NO: 76350 - protein, 421 aa, Zea mays
  Coding DNA Sequence Number=SeqID_32975
  Gene Ontology: Mol. function=protein-N(PI)-phosphohistidine-sugar phosphotransferase activity; Cellular component=integral to membrane; Biological process=phosphoenolpyruvate-dependent sugar phosphotransferase system
  Homolog annotation: Hit_ID=P08722; Match level="QueryCoverage=74%, HitCoverage=51%, E-value=1e-155, Identity=88%"; Hit description=PTS system beta-glucoside-specific EIIBCA component (EIIBCA-Bgl) (EII- Bgl) [Includes: ...
  Homolog annotation: Hit description=Beta-glucoside-specific phosphotransferase enzyme IIB component (EC 2.7.1.69) (PTS system beta-glucoside-specific EIIB component); Beta-glucoside permease IIC component (PTS system ...
  Homolog annotation: Hit description=beta- glucoside-specific EIIC component); Beta-glucoside-specific phosphotransferase enzyme IIA component (EC 2.7.1.-) (PTS system beta- glucoside-specific EIIA component)]
  Pfam annotation: Domain name=Glyco_hydro_1; Domain location=301-421; Score=-335.0; E_value=0.072; Accession=PF00232.9; Description =Glycosyl hydrolase family 1
  Pfam annotation: Domain name=PTS_EIIA_1; Domain location=172-304; Score=293.4; E_value=4.3e-85; Accession=PF00358.11; Description =phosphoenolpyruvate-dependent sugar phosphotransferase system, EIIA 1
  Pfam module annotation: Pfam domain module=Glyco_hydro_1::PTS_EIIA_1; Domain location=301-421::172-304
MGGFWQIFVMFGLHWGLVPLCINNFTVLGYDTMIPLLMPAIMAQVGAALGVFLCERDAQKKVVAGSAALTSLFGITEPAVYGVNLPLGLWGPPLLATRKRKSTPLVCQVFSPSCKTIPSTGIDFTVWASVIGGVIAIGCAFVGTVMLHFITAKRQPAQGAPQEKTPEVITPPEQGGICSPMTGEIVPLIHVADTTFASGLLGKGIAILPSVGEVRSPVAGRIASLFATLHAIGIESDDGVEILIHVGIDTVKLDGKFFSAHVNVGDKVNTGDRLISFDIPAIREAGFDLTTPVLISNSDDFTDVLPHGTAQISAAANQVEGAWQEDGKGISTSDLQPHGVMGKMEPRILGKENIKDVAIDFYHRYPEDIALFAEMGFTCLRISIAWARIFPQGDEVEPNEAGLAFYDRLFDEMAQAGSSRW

SEQ ID NO: 76351 - protein, 52 aa, Zea mays
  Coding DNA Sequence Number=SeqID_32976
MALHKLYDDGGPQLSYGSRTTYDMTLLPPPRDYDMAADNPPAGGGIDDVFPA

SEQ ID NO: 76352 - protein, 225 aa, Zea mays
  Coding DNA Sequence Number=SeqID_32977
MDEGCTQPLSSDPMINLNTTLVTPISTKLQRPDGRDSGQGSVHSRDTISPRPSPASGKDSRLRRIHVSPEGLGLNLDTGRRSPPRPTPGLGLNLDLGRRTPPRPTPGLGLSLDLGRRSPPRPTPRLGLSLDLGGASASPDLGLGPTTSQGAIITLPLASSGYGEQDRRPIWLAPVKQVMMAPRVLHDDGGSQPLTEARRRQQGPDNPDSYAFTGLKRSSDDHDIT

SEQ ID NO: 76353 - protein, 245 aa, Zea mays
  Coding DNA Sequence Number=SeqID_32978
MAIIGAIGEAVVTCGHEVLHGTGSPSPEKSQPESGSSSSSEPRGPYEANAQQALRERAGVIRLLGVGVLRGNDARLRLRHEVNARRVPRWGAGSVDSLDSRRGAASCLAMAAPPPPPSAGKVTGQTRMLLFRHVGKTSPIPQTGGLTAAIVVVARRRKEYHVVAAVEGHELKTPETEQRPGLERLLETTHLELDGKLFVNTQQAPTWRANCRRFDPGGSLDRRVNCRCVSQPRWVGARWNTRGKQ

SEQ ID NO: 76354 - protein, 255 aa, Zea mays
  Coding DNA Sequence Number=SeqID_32979
  Gene Ontology: Mol. function=carboxyl- or carbamoyltransferase activity; Cellular component=ornithine carbamoyltransferase complex; Biological process=amino acid metabolic process
  Homolog annotation: Hit_ID=Q8SA97; Match level="QueryCoverage=59%, HitCoverage=21%, E-value=1e-08, Identity=32%"; Hit description =Ornithine carbamoyltransferase
MAPPVDVDGLRPRLGDVEAPPKPRSSLSSVAEVESEPPGRARRRPSAEARAESEPWGRAERSSSSSGAEPKSEPWVGQSGVRRLPGLSPSPSPGVGRSGVRRLPGLSPSPSPGVGVERSSPSSGVLARVRALGSGGAEFAVFRVLARVRALGSGGAEFAVFRVLARVRALGSGGAEFAVFRVLARVRALGSGGAEFAVFRVLARVRALGSGGAEFAVAPLARPDCLSDSLCRVALQSEWRRRRCPSVRLASGAVE

SEQ ID NO: 76355 - protein, 482 aa, Zea mays
  Coding DNA Sequence Number=SeqID_32980
MRALPIRGLGRWKDAMHEGSAKAWLPSKGVAPFLKATLPTCILSRRGLSLHQHAPRSSPYDTGARSHTSCKLAQDRRSKLPRAERVAAQRLQALLHFCPDQRVKGRTAMQAACNCTKGMHPFDFGASSMEAQAHTSCERMQQSNRLQAHVPSWDSERALSHGVKTTRPCSVPRTARACTTAAPPTTRPVALTLRQGRRHLWQAKRATLHLRHDDRVKKGTGKGDTPKGILLREGSGPRALLLIRGSKAGPSEGFDSRLRALGLHAHYWSGVRRLAPRKGSTAASGHSGSTLTTDQGFVGWPPKGSIAASEHAERGMTLGTSEAEARATLPRSRLRPLKGHDLASPEPSLGQRQPTQEDSRLARGVRLIASKFGLRRHRKLRLTRPQGSDSTSTPEDGLRLARPQGSDSTSTSDDGLRLARPQGSDSASTSDDDLRLARPQGSDSASTSEESPPCPTLGLGLSLDLGLGPTTSQGGHHYPTPS

SEQ ID NO: 76356 - protein, 168 aa, Zea mays
  Coding DNA Sequence Number=SeqID_32981
  Subcellular localization annotation: CTP_CleavageSite=82; ConfidenceScore=5.49e-01
MSGAPRKRGLRNSPASGSRGSRSAKIHRTVRCAPDCPVYQRSNGSLRRQRLPAVHLMRAQRAQKSESPIPVHRTSNSTCPVCTGHPGGPTSQKLQRSESNGSDDVAGAPDCPVCTGTVRCAIEQNPPANGQVLVGPVHHLKVRSPLLHTLMAVSHKSSLCYFRLPLIL

SEQ ID NO: 76357 - protein, 109 aa, Zea mays
  Coding DNA Sequence Number=SeqID_32982
  Gene Ontology: Mol. function=oxidoreductase activity; Cellular component=integral to membrane; Biological process=electron transport
  Homolog annotation: Hit_ID=Q0MRQ8; Match level="QueryCoverage=57%, HitCoverage=11%, E-value=1e-16, Identity=48%"; Hit description =Respiratory burst oxidase protein A
  Subcellular localization annotation: CTP_CleavageSite=33; ConfidenceScore=5.01e-01
MTAAIASGSRSQRQRQRPKGPGFRVGSPTFQPRGINDSEAYDIFFATWMHPIFPALFYACERVIRKFHENDYHSGIVRHPFSITLAPGDNYLTVHIRTLGDRTSKLSIL

SEQ ID NO: 76358 - protein, 60 aa, Zea mays
  Coding DNA Sequence Number=SeqID_32983
  Gene Ontology: Mol. function=diphosphate-fructose-6-phosphate 1 -phosphotransferase activity; Cellular component=6-phosphofructokinase complex; Biological process=glycolysis
  Homolog annotation: Hit_ID=Q84QT9; Match level="QueryCoverage=76%, HitCoverage=7%, E-value=2e-16, Identity=91%"; Hit description =Putative pyrophosphate-dependent phosphofructokinase alpha subunit
MMWSQVRTMVKPGCSWEILKAAISSMVSVTDVLTVMSHPLNAELPLYHFKLHIFNIMNAW

SEQ ID NO: 76359 - protein, 162 aa, Zea mays
  Coding DNA Sequence Number=SeqID_32984
MGTMGISTSTREIIPDRRSFLEKQAKRGPSGPLQRTVRDTRMTLGQNQCKNTSFHYGLSEGKAKTVRALARTVRPQARTVRSPLIYRGGLSAPGGRTVRAQQNGPTARKWLVAINTTPTTSIHYTQAFQPSTFNTRASNLFQDTFKASISPSFQLRKEIISD

SEQ ID NO: 76360 - protein, 123 aa, Zea mays
  Coding DNA Sequence Number=SeqID_32985
MASTLATRSCEYIGRCQRFIYNYTKSTVRNTVDYSGQEKLFGKTGQARTVRALAADRPRHKNDPRTEPMQKHKFPLRTVRRKSKDRPSSRADCPASGADRPVGGGTVRTRRADRPRSAEWPNG

SEQ ID NO: 76361 - protein, 149 aa, Zea mays
  Coding DNA Sequence Number=SeqID_32986
MGKNNKRKREPTPPSEEFGDSEYSEEEFSSESEGSPAPVSPPASSDDSDDSQGIAAEVWTYIRAVERAGLEGSDESECSSDEEDSDGGDEGEDDDDDDDDDGGGGGSGSGRGGGDGSRDSTKGDSRGSTKGGGRGSTKGGGGGRGRASG

SEQ ID NO: 76362 - protein, 18 aa, Zea mays
  Coding DNA Sequence Number=SeqID_32987
MTTVGMWPRLGARGQICF

SEQ ID NO: 76363 - protein, 132 aa, Zea mays
  Coding DNA Sequence Number=SeqID_32988
MAPKRASSKAAPSVDEAAKAALLGEKKGKALADHTPQKACEDEVLSKSQCNEQPTPEGTLRNCSSGGQPQAPHPGFAPLEGEDAIEDGEVIGVSAEEQLQLRALRIKNRNLQKQKEILEAKRQRVSAQAKVH

SEQ ID NO: 76364 - protein, 104 aa, Zea mays
  Coding DNA Sequence Number=SeqID_32989
MGENPKKGLTQIFMGILCRNGDAAGNLPRVELFWKQNPNVNEMKEVGFQNDRHMVTSEWQLAVGVDKRDDRSNGALPLPLRRHRNLSGGTSRIEISGKQRSGSR

SEQ ID NO: 76365 - protein, 161 aa, Zea mays
  Coding DNA Sequence Number=SeqID_32990
MGKGKRGRGSPRRAGDKQKRDPSPPSMDFVDSEYSEKEVSSEFEGSLALASPPTLSDDSDDSQGLAAEVWTYIRSVERAGLEGSDESEVSSDEENSFGSSEDQSSNDIDDEGDGGGDDSGDGDDDGGKGGNGDNGGDGDGGDGGGKDGSGGGKASGKAPLV

SEQ ID NO: 76366 - protein, 238 aa, Zea mays
  Coding DNA Sequence Number=SeqID_32991
  Subcellular localization annotation: CTP_CleavageSite=38; ConfidenceScore=5.04e-01
MSDGWSGSVDLLTRPLLPTPVGLRVRVVLRCRWCSFCSSDEVLGPLVSGDVEVRLSTQLFGYGQRFLQYGSDEGRIIRSLIEVFNHCCLSDLRDTISHGLKPLELNFNFNRGPGQVQPGSREVQPGSRASSTGVQRGSTGVQGKFSRDVDPRAIDLAMRIAERMFLKMKEDEAKNKIEEENDRWRPNDESTSSQGSSFKSTSHMCFVGNGSDSESESEDEEEQESDSEDEDYLQQFFA

SEQ ID NO: 76367 - protein, 155 aa, Zea mays
  Coding DNA Sequence Number=SeqID_32992
MERTNGNRAIRHTFVDVATRRRLRAKGSIFAFAPTTDPESPTTQGKPRWNGMFSKIKLDGGSIMVMMGSTSDKMYLCQGRTDVGLLTEDPLTGHMSSHGLTVFDVDLLTVAALLLATLALPLRCPTTLAHMAEWRVAASIYSAKTIKGEENQLGP

SEQ ID NO: 76368 - protein, 82 aa, Zea mays
  Coding DNA Sequence Number=SeqID_32993
MPTTCSLNMLGAVYIDIANNGCDLSIDLTGSDRLGRRFPPSETTQAPTPIKVTPPAPSCPHRVCARRLVIENIKLIETKQLF

SEQ ID NO: 76369 - protein, 309 aa, Zea mays
  Coding DNA Sequence Number=SeqID_32994
MAAADFADHVVSGALTSEFAAEIERLWAQHTDAVQEKSAAENKSRRLTERLHKAEAKACAGRRPVSPANAPRSWRRGSNSLRNRVDKTEVSTHAEVERTHAQFVDAYRELGARTAAFEAPGQKVVLRFLEWLQEELGVLPTIVTGLMSFASLVTCEGGMNALSHEGCGHFEIFDQSDEGFEREILQVEDPALKRLAGALFDRMWGPHGQETVWERSDRAIDQMAHDEEVQDLGDLDSTLPDSALPEASGWSWRRHPLRGEGPSVTPAPTGVGEDPALAPALTGEDVSKTVGEPAAEDPAAAVGPSQVAE

SEQ ID NO: 76370 - protein, 464 aa, Zea mays
  Coding DNA Sequence Number=SeqID_32995
  Gene Ontology: Mol. function=protein binding; Cellular component =nucleus; Biological process=regulation of transcription, DNA -dependent
  Homolog annotation: Hit_ID=A3AZ02; Match level="QueryCoverage=99%, HitCoverage=30%, E-value=1e-105, Identity=49%"; Hit description =Putative uncharacterized protein
  Pfam annotation: Domain name=HDAC_interact; Domain location=277-375; Score=159.1; E_value=1.2e-44; Accession=PF08295.3; Description =Histone deacetylase (HDAC) interactin
MRAQTVQSERALPSAADSDSSVDRLDLEHDIQKECIEKDKVRNACHDQHRGDYKRNRMNDEYENEDLDAEQSGPKSQRKVEGTGDDTPGVVTMSSFNCNEGDNDPEEESKVRNDNKNAIMHSAMRAQTVQRERALLSAADSDSSVDRLDLEHDIRKGCIEKDKVRNACHGQHRRDYKRNRKNDEYENEDLDAERSGPKSQRKVEGTGDDSPGIAAMSSFNCNEGDSDPEKERYNERGKSERVLTFNSKEGAAHEASTFPSKEKYNLCKPISELDLSNCQWCTPSYRLLPKNYPVPSASKRTDIEASVLNDFCVLVTSGSGAFKHMRKNQYEEILFICEDDMFELDVLLESVSVTIKRVEELVESMEGNSLKPDSSIHLDEHLTSLNMRCIEWLYGDHGLDVVDVLQKNAGVTLPVILTRLKQKQEEWSMCQSDFNKVWAEVYSKNYHKSLDYGSFYSKQQNTRI

SEQ ID NO: 76371 - protein, 240 aa, Zea mays
  Coding DNA Sequence Number=SeqID_32996
  Homolog annotation: Hit_ID=Q6J9V9; Match level="QueryCoverage=55%, HitCoverage=46%, E-value=3e-62, Identity=87%"; Hit description =Putative uncharacterized protein
  Subcellular localization annotation: CTP_CleavageSite=17; ConfidenceScore=5.21e-01
MRETCNNTMVVHPFGFVASGGPAWRPGPTCHVTGATVTACKETALPLMPMSRLLDCRTSAATRGSPARDPIVPVECHDHEASDTSGRRSGRRFVSVMMIVSKKGPGKGVFRKRTLPSEGNGPRALLLIRGSKVAPSEVRQPPQSTRAPSPLLIRGSKAGPSEGFDSRPRARRVRDDPGYVRYMAEARATLPRYPRTFPRPARTICNGIPPEGGIEPSDPIEWVRVRQITCRYFWSAPLGH

SEQ ID NO: 76372 - protein, 315 aa, Zea mays
  Coding DNA Sequence Number=SeqID_32997
MALGSLSPEKSQPKSESSSSSEPASPEAEMAVSRSQDDHIWYPGRLGYEVNAQQVLCEGAGVISPLGVGALRGSDTRRCLRCEDNTRHGPRRGAGVIDSLWPDSRRGAASCMATVAPSPPPPARRVAGQTRVFLFCHGGKSSSSRSPLPGEPMTVVAVALWGEEYHVVTAVKRHELETPEVEQRPRLKRLLEATHLELNGKVFVNTQRAPIWRANRRRFGPARTVNRLRSTLSPVDELTWPSEKFLEPCRSTAVGAAWILLTLSCFRRGSGETETSPEAEAGLERGELPVAPEAKLVGDRDSVISWWLAQLPERG

SEQ ID NO: 76373 - protein, 263 aa, Zea mays
  Coding DNA Sequence Number=SeqID_32998
  Subcellular localization annotation: CTP_CleavageSite=69; ConfidenceScore=5.53e-01
MQAACNRAKWARFSDSQHAQHGGPGPRVMQPARRMLRACNCTATCATTAPPRLRNQYHDSRRPSARPSSASLARRLGLRSRGTLGHFRDQRERSCNGIPSEGGIEPSDPVARGPGPADHPQRLGGCSRKPGSGRTVDSVNIPARELGTRPYTRATASSHEGTTRLAEALREALRPRRSETTPPRPRGLHPAGALARTHRNKMQPRKAGPLAKKCDESLQASANTPFEARGLLSGTIIRGTLKAPNSQLVTPISMKLQRPDGRD

SEQ ID NO: 76374 - protein, 177 aa, Zea mays
  Coding DNA Sequence Number=SeqID_32999
  Gene Ontology: Mol. function=flavin-containing monooxygenase activity; Cellular component=microsome; Biological process=electron transport
  Homolog annotation: Hit_ID=Q10RE2; Match level="QueryCoverage=78%, HitCoverage=34%, E-value=6e-59, Identity=79%"; Hit description =Flavin-binding monooxygenase-like family protein, expressed
MKLLRWLPIKMVDRLLLLVARMVLGDTEKHGLRRPKLGPLEIKNVTGKSPVLDVGAWSFIKSGNIKIVPEVESFTGSNGVRFVNGDEMAFDSVIFATGYRSNDDGELFTEDGKAKAEQPSDDDRWRGPNGLYRVGFSGQGLLGAGADALRAAADIAGRWQAEVAAAVAGAKVSSASV

SEQ ID NO: 76375 - protein, 114 aa, Zea mays
  Coding DNA Sequence Number=SeqID_33000
MAFEVAIVGHQLSSTLDLYGDGLGRCPNEETDVNREVERAPPHHLPISPVWSALINLVFGVHHKALYVSGYKGSPKRKDKTYQRRITKKSYVRVSPALQNRLEETVISFDSQKL

SEQ ID NO: 76376 - protein, 474 aa, Zea mays
  Coding DNA Sequence Number=SeqID_33001
  Gene Ontology: Mol. function=binding
  Homolog annotation: Hit_ID=Q9AU61; Match level="QueryCoverage=9%, HitCoverage=10%, E-value=7e-12, Identity=78%"; Hit description =Violaxanthin de-epoxidase
MEVKHDFMDFLQGPSKEEMELLDQLNMEATEVEKVFSRSLPLRKLRPHPFHSSTATPPSSAHPSSPSRPQFQVVHPSTPSDSICRFLAPLGPLFATTPPHAPQIRRSMGASGLAASSNGGNKWAKAANEEATMTVVAVESDEPRTESPLERGTIIYNLLVTLPFPSGLISRLRRAFLLCRFTTDLVSRSSLHMLQLLVQECLRSAIDLSSAQVAATTDNRPPAHCFTFGDESTTGQLPLPKDWVFSKFNRPINLLPETVGFLLQSFIGGATDLFKVSPLSDRVFRFSLSCKDVGFAVYQLRSYACSTFKAYLHLWNSGSPNWIKEWQRFSEEESKSWKLVSYRRSSPVSFADVVRKPALSGANLVPLGRPDRPKRSSSSLRQRILSPALMALPAQRRRAIVIFGITLFQKCKRSFGSFPNKFENASWRLFTFHGTCTVHKTPSLPAAVEESANFKLFVARGAFVAFAICSSQNR

SEQ ID NO: 76377 - protein, 163 aa, Zea mays
  Coding DNA Sequence Number=SeqID_33002
MESWCLELIKECLVFSSMRLGVPFIAPRQLGAVGSNPGKQILPSVGWRTGQSGAPPDRHCSVSGADCFPNLAQSTVEDQESLPHRTLSGAHQTVRCPHPTVALAMRHARIARPTVGVPDRWLTEQSGAPSDSPVIFSRTLMTAFLRATTSPQATHRTVRCTTG

SEQ ID NO: 76378 - protein, 220 aa, Zea mays
  Coding DNA Sequence Number=SeqID_33003
MISCLSEQPLIALGVWSPEGGHQLSEPILHQPHSAALSPVLQLRDVIGYFGIGSFVGEIPAEERYQKSSLTILYLARFLCPFFRRRGGQRGSPGRMDPLLLACRRAPPPLTIAARAVSSSPVELRRALSPAATVDPSLRRVPVAAEESPEPALRLTPPPSRPAVNRPPPVPLPRPKPYRRTPRALPDLPDHSDDPRAPPVARAPRLRRALRRGDERRRPS

SEQ ID NO: 76379 - protein, 322 aa, Zea mays
  Coding DNA Sequence Number=SeqID_33004
MRVVRIVITAQEKAKPWKETSRSFKTTMNSRWLVLDTLHSSHLERLHHRLREEQERRRQHGEQQGSSSSPQQEVETVRPRSSVAQLEAPLVPPRDVPAVGGATGGATGGDPDDDDSAHSTESSEPQEAEGWVARPITRDAARGCHFHDALDTLLRQAFDRHTWSIEYRCVVYQHSRGRYPDRWEATCLVRRPEDDLRGAEAVSEHYSISERDTAEAAMQDAARRALSQYCSLFGGVADGLNLRLSSTVNLVAVLNTELDHSLDELSRARTEIAELRAELAERHHQEGGSPAPVGTQHPYRSPPRGHHTYGSPVCKTRIDLDP

SEQ ID NO: 76380 - protein, 63 aa, Zea mays
  Coding DNA Sequence Number=SeqID_33005
MQAQANTGNQTQGVTLRAELDREIGLEARMCCGFKCAWLDDKWVHVPTTEQIKKCDGVNEASS

SEQ ID NO: 76381 - protein, 237 aa, Zea mays
  Coding DNA Sequence Number=SeqID_33006
MVALFSRAVIVGVLGPTTHPGLPLEMWSQARTILKVPWARLCRREQIGRISRARLPPAWLMQPSYREKPTKQAVIEYLRLFSDRGKSKKGGSSSHHSGDQRKREPNPPSEDFGDSEYSEEEFSSESEGSPVYVSPPVSSNDSDDSQGLASEVWTYIRAIERAGLEGSDESEVSSDEENSLDSSEEGAAVMATTRVTNDGGGDGDGDVDGGKGDDKGDGKGDSKGNGKGGSGSSKASG

SEQ ID NO: 76382 - protein, 96 aa, Zea mays
  Coding DNA Sequence Number=SeqID_33007
  Subcellular localization annotation: CTP_CleavageSite=42; ConfidenceScore=5.10e-01
MDTIGCKINDADYMNFFMNRTTTTTTHKNSPALLPRRWSRLSCEARANLAMGQGEAHVVGHQSDASEMVLKERVPHGGDPVTIELGITTTMALRWG

SEQ ID NO: 76383 - protein, 86 aa, Zea mays
  Coding DNA Sequence Number=SeqID_33008
MNVYCNLADGEYVLVPEQGAAQEVAPDPAPEPAPEDLPAPALEGKPRIECARSLEDMVAGVTWPSILPLGWTVEWDPASDEEEHEE

SEQ ID NO: 76384 - protein, 85 aa, Zea mays
  Coding DNA Sequence Number=SeqID_33009
MTEHHRRTNTDAPGSPFGWHCPNDFPKAPQASQVGDEGARRLRLQGRRPGFIGRVCEDRVQGKRQQNPEEAEVDKAGARGPRAKG

SEQ ID NO: 76385 - protein, 146 aa, Zea mays
  Coding DNA Sequence Number=SeqID_33010
MAHIKTTQRKGNGPQGVPRHQLAPRHEGSSSGSNDPIGDLEARVERLTMELRHGGREPRVEELSVALENLQGYNNALHEEVHMLYDQLHPNVPPEVAVMEAGATGAAGERPYGELDPFGAPPSMNIADDRPPEASSGAGADKDAED

SEQ ID NO: 76386 - protein, 88 aa, Zea mays
  Coding DNA Sequence Number=SeqID_33011
MTRSPDAATATLRLCQEHGGAVAGNVLPFVWPGVSKLSGSATATDPRFTMGRIRCCLIVGITNRSTNCKMNPEDLRNYTRSTKSNQIE

SEQ ID NO: 76387 - protein, 62 aa, Zea mays
  Coding DNA Sequence Number=SeqID_33012
  Homolog annotation: Hit_ID=Q5NKP3; Match level="QueryCoverage=58%, HitCoverage=14%, E-value=1e-07, Identity=75%"; Hit description =Putative uncharacterized protein 9C20.7
MSRVFDDYYIKDCGIISAPEVTQRRIDNNDYSPSSGDERLTAGTPMSAPQDLMGRLNWWNTS

SEQ ID NO: 76388 - protein, 234 aa, Zea mays
  Coding DNA Sequence Number=SeqID_33013
  Gene Ontology: Cellular component=integral to membrane
  Homolog annotation: Hit_ID=Q6YT98; Match level="QueryCoverage=83%, HitCoverage=100%, E-value=3e-45, Identity=50%"; Hit description =Integral membrane protein-like
  Pfam annotation: Domain name=DUF588; Domain location=62-217; Score =129.0; E_value=1.3e-35; Accession=PF04535.3; Description=Domain of unknown function (DUF588)
  Subcellular localization annotation: CTP_CleavageSite=2; ConfidenceScore=5.03e-01
MRLSTGQSASHAFNPRIVCGSLAHVRFGRPLQASDHIHMATVDATTPTESGGKQQAPSLPACRSFSGANPALRVLLFAVTLAGLVLLATAKQTVRVPIPQFPGLLLSRPAKFTDSPALIYLLVALVVTCFYSLLTALASLKLVSGSFPATRTLFLLVLLDVLYAAIMASATGSGGGVAWIGLKGNSHTNWNKICNIYGKFCRHIGSSVFLGLVASIILVLLAILNAHSLYRRSR

SEQ ID NO: 76389 - protein, 287 aa, Zea mays
  Coding DNA Sequence Number=SeqID_33014
MKAPHSCSTSRHAVNGTQPYHMGRSKDATWQGREVYSRCSTWGSDPLRGTPDPYAYKSRAPKKTQRAPWEYPSPPPGEVRALARSRGEKDPAMSRGPVLARVQAFPALPTITAWLEARDVSRRAEPDVKPMKSCSLCIYYGEDTPPVTTLTGGVPSQHLKCPVQSAGRRRQSHPAGGVPDQSVGKQCARAERRTVLITPSTRSFPCTPRIRRSRMSGPKESAPAAHICGSKYNIRYVPGPTCRASVPLCMPPFGYKRGGMRRYKTDPILGRHSQVHTSSRAIHHTVE

SEQ ID NO: 76390 - protein, 63 aa, Zea mays
  Coding DNA Sequence Number=SeqID_33015
MARECGQRWRSDKANRRCVVQVGTPAEHSASPIYTERRFMSPCIIGAIEKTVGEEIPTALPYS

SEQ ID NO: 76391 - protein, 90 aa, Zea mays
  Coding DNA Sequence Number=SeqID_33016
  Gene Ontology: Cellular component=integral to membrane; Biological process=electron transport
  Homolog annotation: Hit_ID=Q7F1E4; Match level="QueryCoverage=63%, HitCoverage=17%, E-value=2e-22, Identity=89%"; Hit description =Putative uncharacterized protein OJ1191_A10.128
MSNEEFDNLKEELMWEGSSVVMLSPDEQKLLEAAMAYVSGNPIMTDDEFDQLKLRLKGPNLAQRRERRTRRFPIRSTPKTIGNATDLDSH

SEQ ID NO: 76392 - protein, 172 aa, Zea mays
  Coding DNA Sequence Number=SeqID_33017
  Subcellular localization annotation: CTP_CleavageSite=37; ConfidenceScore=5.21e-01
MTDSLGSIKPKVEFSPPPFVRCVQVSLNNEKERFRCRAVTVRELVRVASPNLGAPLALLVFCVGGQWVTAGVDDTVRRFAMEGEAGKGVRLEKGRLGLRLLLRCVCAAAGMPHAVGGSRRNIPVAPPLPAAAQARARACPDARRRMPVHGAAASARPLVSSHRLGRRPLASP

SEQ ID NO: 76393 - protein, 213 aa, Zea mays
  Coding DNA Sequence Number=SeqID_33018
  Homolog annotation: Hit_ID=O48967; Match level="QueryCoverage=73%, HitCoverage=33%, E-value=3e-39, Identity=57%"; Hit description =Putative uncharacterized protein
MKAPHLCSTSRHTVNGTQPYHMGRSNDATWQGREVYSRCSTLGLDPLRGMPDPYVYNMMVRIIEHRTETSEDFAMEQEVASSAQRVPDRPDTGTAVVHAVQQHAPAQASRTPSRAAPTALSAARELLRQPSSSAASLGAMKQWRDDVDRLLGMTHSTSTRSRPRSSRRQCEATTSVRSPSVRGAQTDDLRAELNRRCTGEDARISLERARERR

SEQ ID NO: 76394 - protein, 495 aa, Zea mays
  Coding DNA Sequence Number=SeqID_33019
MGTQGQDLILREYQTKLGLRNTPPAGEDPTCAYVYANPEGSIPISPACCFRIEFYLTNPTSSHPIRQNDIWIEQPGLQFRTSMRKQEGPATWGPALKNECPFHGVVRSLCGRSDNLGAGTREETLVSGGGSEPYPGLGEAASRRPLTILSYTLVPNLDTLSLHPRRGARYQGKSTAGTIRSRVAAQPGLIPWACTLHRLAADIFATFPYEWDPSSMSAGMDYAASTKVAMEADPGQPHQWRRPPLHRRIAGDSDHLCTSSDNDLRSVRLASNSDHLRRQMALMPSPAEATTSARGSLTSGAARRKQDRRHHHERELPSGEIAGGNDPDADLSRRHQRTPSGGPGGGRAQGMREEQGMATAREIGPFLKADLPTRALKHHGQSLPRRSPGFLPYGIGAKPPHVIQTDSKHEQGEPPHKGHATASRLSAPLSSPKPAVERGNHHVGSMQPPRGYTPPQLHCNWRSNVETQTHMSYNRRTEPVQQLEESRMAQQWHQV

SEQ ID NO: 76395 - protein, 370 aa, Zea mays
  Coding DNA Sequence Number=SeqID_33020
MVTSSSMARESKPGCGLCPSLSLKDFHHQGWGGDCRVPGSRTRVASEPLLAPAPATVAGRGSSADEIAGTAYGPTSNPTAFCPSLHHEFGHGRGPPGSSIRPEVIAAAVRPPGAKVVIVAAAGAGDGAPFIGLLLLRRPPPRRVGLFVPAEESLGSVGLAVRGFSCLVKGTPQPLFDEPRPGVAVSARAEAELARKEDLVGRSLAGSSVSGTDAGVNLLRPRAGLMSSGDSWLRPRGDQPSLLLGPDSRRRHGRRWPGCDDEVVLQSGDPRTASPSEARSNLAEGVADAEGAAPPFNRQDPSLQDRIILQIVCVSESCFSRKVMSEGSVTDAVEKARRIASAEELSNESLGSVSLGCLRVLRHFRDPLSK

SEQ ID NO: 76396 - protein, 150 aa, Zea mays
  Coding DNA Sequence Number=SeqID_33021
  Homolog annotation: Hit_ID=Q6QP51; Match level="QueryCoverage=40%, HitCoverage=31%, E-value=1e-12, Identity=59%"; Hit description =Putative growth-regulating factor 1
MEAQAHASCNRRAGCHVRATAPPPAPLPRLLDCGTNTATRGDPAHDPAAPAWHDGQYGGKWAGSNGGGRRAGVAVTLGSERRFAFAIMTASKKAPSLSTDQRFEGWPLGGVQQPPQSAWVPHPLLVRGSKAGPSEGFNDRLRLLGLRAHY

SEQ ID NO: 76397 - protein, 236 aa, Zea mays
  Coding DNA Sequence Number=SeqID_33022
  Gene Ontology: Mol. function=UDP-3-O-[3-hydroxymyristoyl] N -acetylglucosamine deacetylase activity; Cellular component =cytoplasm; Biological process=lipid A biosynthetic process
  Homolog annotation: Hit_ID=UPI00005F2589; Match level="QueryCoverage =97%, HitCoverage=82%, E-value=1e-126, Identity=97%"; Hit description= COG0774: UDP-3-O-acyl-N-acetylglucosamine deacetylase
  Pfam annotation: Domain name=LpxC; Domain location=2-211; Score =363.9; E_value=2.6e-106; Accession=PF03331.4; Description=UDP-3-O -acyl N-acetylglycosamine deacetylase
MMYGFKTNKHLNAALAGLGIHYIVIEVNAPEIPIMDGSAAPFVYLLLDAGIDELNCAKKFVRIKETVRVEDGDKWAEFKPYNGFSLDFTIDFNHPAIDSSNQRYAMNFSADAFMRQISRARTFGFMRDIEYLQSRGLCLGGSFDCAIVVDDYRVLNEDGLRFEDEFVRHKMLDAIGDLFMCGHNIIGAFTAYKSGHALNNKLLQAVLAKQEAWEYVTFQDDAELPLAFKAPSAVLA

SEQ ID NO: 76398 - protein, 301 aa, Zea mays
  Coding DNA Sequence Number=SeqID_33023
  Gene Ontology: Mol. function=nucleotide binding; Cellular component =plasma membrane; Biological process=intracellular protein transport across a membrane
  Homolog annotation: Hit_ID=A3MYW1; Match level="QueryCoverage=100%, HitCoverage=41%, E-value=8e-91, Identity=52%"; Hit description =Protein translocase subunit secA
  Pfam annotation: Domain name=SecA_DEAD; Domain location=1-301; Score =302.8; E_value=6.6e-88; Accession=PF07517.5; Description=SecA DEAD -like domain
  Pfam annotation: Domain name=SecA_PP_bind; Domain location=147-268; Score=228.2; E_value=1.8e-65; Accession=PF01043.11; Description=SecA preprotein cross-linking domain
  Pfam module annotation: Pfam domain module=SecA_DEAD::SecA_PP_bind; Domain location=1-301::147-268
MHRMRKVVNIINAMEPEMEKLSDEELKGKTAEFRARQEKGEVLENLIPEAFAVVREASKRVFGMCQFDVQLFGGMVVNEPCIAEMRPGEGKTQTATLPAYLNALTDKGVHVVTVKECLAQRDAEINRPLFEFLVLTVGINLPGMPAPAKREAYAADITSEKEDSETFQGEGHFSVDEKSRQVNMTERGLVLIEELLVKEGIMDEGESLYSPANIMLMHHVTAALRAHALFTRDVDYIVKDGEVIIVDEHTGRTMQGRRWSDGLHQAVEAKEGVQIQNENQTLASITFQNYFRLYEKLAGMT

SEQ ID NO: 76399 - protein, 236 aa, Zea mays
  Coding DNA Sequence Number=SeqID_33024
  Gene Ontology: Mol. function=protein binding; Cellular component =cytoskeleton
  Homolog annotation: Hit_ID=Q9AXA6; Match level="QueryCoverage=83%, HitCoverage=73%, E-value=9e-67, Identity=62%"; Hit description =Probable protein ABIL1
MQHEPWRPGAEPAAGAGAGPAPTTVDEASMERSMSFVKALQELKNLRPQLYSASEYCEKSYLRSEQKQVVLDNMKDYAVRALVNAVDHLGTVAYKLTDLYEEQASEITTLELKVACLNQLDAGNKRMQAFSVTQADADFDPTPRPFSSARTLEWHLVSEKNSKTSRPDQSEIALGETKTTKASSSGFRLLGKESSASPLSRNVQSNITSLDIVSAGMKISKDEKRLCALINCKPSL

SEQ ID NO: 76400 - protein, 533 aa, Zea mays
  Coding DNA Sequence Number=SeqID_33025
  Gene Ontology: Mol. function=protein serine/threonine kinase activity; Cellular component=plasma membrane; Biological process =protein amino acid phosphorylation
  Homolog annotation: Hit_ID=Q5ZE73; Match level="QueryCoverage=100%, HitCoverage=72%, E-value=0.0, Identity=83%"; Hit description =Putative calcium-dependent protein kinase
  Pfam annotation: Domain name=Pkinase; Domain location=72-339; Score =330.9; E_value=2.3e-96; Accession=PF00069.16; Description=Protein kinase domain
  Pfam annotation: Domain name=Pkinase_Tyr; Domain location=72-328; Score=-33.8; E_value=2.5e-10; Accession=PF07714.8; Description =Protein tyrosine kinase
  Pfam annotation: Domain name=efhand; Domain location=386-414; Score =34.4; E_value=4.1e-07; Accession=PF00036.23; Description=EF hand
  Pfam annotation: Domain name=efhand; Domain location=422-450; Score =33.4; E_value=8.3e-07; Accession=PF00036.23; Description=EF hand
  Pfam annotation: Domain name=efhand; Domain location=458-486; Score =35.2; E_value=2.3e-07; Accession=PF00036.23; Description=EF hand
  Pfam annotation: Domain name=efhand; Domain location=493-521; Score =40.3; E_value=7.1e-09; Accession=PF00036.23; Description=EF hand
  Pfam module annotation: Pfam domain module=Pkinase::Pkinase _Tyr::efhand::efhand::efhand::efhand; Domain location=72-339::72 -328::386-414::422-450::458-486::493-521
MGNRASRHHRHATEQQPETPTLPKPQIQPPPPPTQTQQYQQAPPPPKPKPAADARAVGRVLGRPMEDVKATYTFGRELGRGQFGVTYLVTHRETGQRFACKSIATRKLVHRDDIEDVRREVQIMHHLTGHRNIVELRGAYEDRRSVNLAMELCEGGELFDRIIARGHYTERAAAALCREIVAVVHSCHSMGVFHRDLKPENFLFLNNKEDSPLKATDFGLSVFFKPGDTFKDLVGSAYYVAPEVLKRHYGAEADIWSAGVILYILLSGVPPFWAENEDGIFDAVLHSHIDFSSDPWPSISNGAKDLVKKMLRQDPKERLTAAEILSKATGLPLLYHPWIREDGEAPDKPLDITVISRMKQFRAMNKLKKVALKVVAENLSDEEIMGLKEMFRSLDTDNSGTITLEELRSGLPKLGTKISESEIKQLMEAADVDGNGTIDYAEFISATMHLNRLEKEDRILKAFEYFDKDHSGYITVDELEEALKKYDMGDDKTIKEIIAEVDTDHDGRINYQEFVAMMRNNTPEIVPNRRRMF

SEQ ID NO: 76401 - protein, 69 aa, Zea mays
  Coding DNA Sequence Number=SeqID_33026
MEGGCGRKRDPDADPDPQRNLAAGPGREPEEEEEDPESPFLYKYFPVLVLQGIRTATLQTTRTLTVTAS

SEQ ID NO: 76402 - protein, 685 aa, Zea mays
  Coding DNA Sequence Number=SeqID_33027
  Gene Ontology: Cellular component=integral to membrane; Biological process=response to tellurium ion
  Homolog annotation: Hit_ID=Q5ZE68; Match level="QueryCoverage=91%, HitCoverage=95%, E-value=0.0, Identity=69%"; Hit description =Putative uncharacterized protein P0501G01.17
  Pfam annotation: Domain name=C4dic_mal_tran; Domain location=259-523; Score=307.1; E_value=3.4e-89; Accession=PF03595.8; Description=C4 -dicarboxylate transportermalic acid transport protein
MEFTGTKKDVEMAGQLNTELSSREHALPALLIKVPSQAIAGFDCVPAAADAAVVSLNEPGDRAEDVAISILPAPARAYGGDAHGVPYSVSLSMPASPSGFHLSSHFMCAGDAPVATADVRPVLLEDQRQAAAAAHSPRLIKQTRFHSQPILNLHPPSKNVVDEAAARRWDSARDTRFDPFKTFSGRLERQLSNLRGRPQEPVDGISPDSKISEEETDQVPAADRYFDALEGPELDTLRATEVPVLPKDEKWPFLLRFPISAFGMCLGVSSQAILWKTLASAAPTAFLHVSPAVSHALWYAALALTVLVSGIYLLKVVFYFEAVRREFYHPIRANFFFAPWIACLFLALGAPRLVAEMHHGVWYALMAPIFCLELKIYGQWMSGGQRRLSKVANPSNHLSIVGNFVGALLGAKMGLREGPVFFFAVGLAHYMVLFVTLYQRLPTNMTLPKELHPVFFLFVAAPSVASMAWAKINGQFDAGARIAYFIALFLYMSLAVRINFFRGFRFSLAWWAYTFPMTGASVAAITYATEVDNVLTRALCIGLSGISTVTVAGLLVTTVFHAFVLRDLFPNDVSIAITRKKPKFSKILAHFRSSSSDMKELVLSLPRTAQSDSGETETEPSVTAKSRAEPSGPCKLRAFRAYDVAFAVLPGLVHERIITGELETMCLLTIVAGFLRTATDSRTAE

SEQ ID NO: 76403 - protein, 156 aa, Zea mays
  Coding DNA Sequence Number=SeqID_33028
MAGVCVGGLAESRRCGTVGLPLQAGQQAATGDSDIRTLHWSSGQWQPGSGRRRAGGHPQPDVLPIWWRCRRRLRPRGRVTRAPIYTQGRILTTTAGFTRQSGASVIPGGSFATNQSWEKVLTSWSHTSASNPRQHADAPNTVAATPGPRASAQVNS

SEQ ID NO: 76404 - protein, 250 aa, Zea mays
  Coding DNA Sequence Number=SeqID_33029
  Gene Ontology: Mol. function=nucleic acid binding; Cellular component= cytoplasm; Biological process=multicellular organismal development
  Homolog annotation: Hit_ID=A2XWI3; Match level="QueryCoverage=84%, HitCoverage=16%, E-value=1e-104, Identity=91%"; Hit description =Putative uncharacterized protein
  Pfam annotation: Domain name=DUF1785; Domain location=10-62; Score =108.9; E_value=1.5e-29; Accession=PF08699.1; Description=Domain of unknown function (DUF1785)
  Pfam annotation: Domain name=PAZ; Domain location=63-207; Score =126.2; E_value=9.8e-35; Accession=PF02170.13; Description=PAZ domain
  Pfam module annotation: Pfam domain module=DUF1785::PAZ; Domain location=10-62::63-207
MPLRKLFKYSPVGRSFYSPNLGRRQKLGEGLESWRGFYQSIRPTQMGLSLNIDMSSTAFIEPLPVIDFVAQLLNRDISVRPLSDSDRVKIKKALRGVKVEVTGNMRRKYHISGLTSQATRELSYVSFIAGMRFPVDDRGTVKTVVQYFMETYGFSIQHTTLPCLQVGNQQRPNYLPMEVCKIVEGQHYSKRLNEKQITALLKVTCQRPQERELDILQDSGSHQVTPPPHDDFADKCLHSSGGAMNNNPMS

SEQ ID NO: 76405 - protein, 147 aa, Zea mays
  Coding DNA Sequence Number=SeqID_33030
MGNSNKRKREPTPPSEDFGDSEYSEEEFSSESEGSPAPVSPPASSDDSDDSQGLAAEVWTYIWAVERSGLEGSDESEYSSDEEDSSDSSEEGGGGDGGDDDDDGSDGDDDDDGGSRGGNGGGKGGHGGSSRGSNGGGSSKGSNKASG

SEQ ID NO: 76406 - protein, 287 aa, Zea mays
  Coding DNA Sequence Number=SeqID_33031
  Gene Ontology: Mol. function=hydrolase activity, acting on glycosyl bonds; Cellular component=extracellular region; Biological process =cell wall organization and biogenesis
  Homolog annotation: Hit_ID=A5BNQ9; Match level="QueryCoverage=87%, HitCoverage=71%, E-value=1e-47, Identity=41%"; Hit description =Putative uncharacterized protein
  Pfam annotation: Domain name=Glyco_hydro_28; Domain location=65-286; Score=-69.6; E_value=1.1e-05; Accession=PF00295.8; Description =Glycosyl hydrolases family 28
MAPFFDAYYSSLVPLLFSCVLSSGAGAAEAAAAAAYKYNVAGFGARPDGRTDSAGAFASAWPAACRSQEPATVLHQPWRQQQPAGTTAPGSCSTASTASLCGAAPSTAAARRCGLWACKQAAEHGGCPSGATSLKVLNSRDVVISGLTSVESELYHVVVEGCEGVTVQDVQIVAPGSSPNTDGIHVQASSQVTVTRTSIRTGDDDCVSVGTGTTNLRVEHGWSLGKEREESGVENVTVTGAAFVATDNGLRLRIKTWARARVDGAYVRGVVFEHALMHDVRNPIIID

SEQ ID NO: 76407 - protein, 82 aa, Zea mays
  Coding DNA Sequence Number=SeqID_33032
MSALEDIACMLEQDSLVLQENLDNVNNVNNPGDSSYEPSALSAPPPADDYLSPDWDFAEHFENFWGLEYDSDQMPSFSDNDV

SEQ ID NO: 76408 - protein, 68 aa, Zea mays
  Coding DNA Sequence Number=SeqID_33033
MTETHSCPDLDPGVRRRSLCSLCVIAVVFACVFSRHGPQSPGPGPMVFASVGVRAVPRENETLCKTIE

SEQ ID NO: 76409 - protein, 290 aa, Zea mays
  Coding DNA Sequence Number=SeqID_33034
  Homolog annotation: Hit_ID=A2WSS3; Match level="QueryCoverage=60%, HitCoverage=67%, E-value=2e-28, Identity=46%"; Hit description =Putative uncharacterized protein
MQILRLLAARRFRRRRRGVSTITSTATAPATPRSGCVAGVYGYGEEEEDEGPFFDLDLTCCSAPASSAGSQAAESGSESEDASSCATATAAATERGDLDFVVSLQRSRIYDEPPPPPPPLMFCASEPSPSDGRRSSASASRLGSRLQLRTLSFGSAKAALYGGRASFSRSTGSARSARLFAAYGYGYGSPDQDPRDEGKARPPSGDVIRRYLSKISSRLQRRRGAATDLRLRKSRSASASAAAAARRDDSLVEKQDGIASAIAHCKESLHRVRRFLYKRLATGPVISSSC

SEQ ID NO: 76410 - protein, 896 aa, Zea mays
  Coding DNA Sequence Number=SeqID_33035
  Gene Ontology: Mol. function=ceramidase activity; Cellular component =extracellular region; Biological process=sphingolipid metabolic process
  Homolog annotation: Hit_ID=A9YFM2; Match level="QueryCoverage=83%, HitCoverage=95%, E-value=0.0, Identity=84%"; Hit description=Neutral ceramidase
  Pfam annotation: Domain name=Ceramidase_alk; Domain location=153-896; Score=1516.4; E_value=0; Accession=PF04734.4; Description =Neutralalkaline non-lysosomal ceramidase
MLLLSLAGAEGSRRAAELHKVDAIPVLRLRGAPALGIFSGSRRVLCGVSQCRGINGGQSLRPQQQLNHPRKEGGGRRDFADHGDLQLFLVNISSCMLVYCVHVEKCNCLQSICQFIETSNLHELINKPIPGSLWRHHLPCASKFLVLVRSRYGYAFFCYDITGPAADVNMMGYANAEQIASGIHFRLKARAFIVAEPNGKRVVFVNLDACMASQLVTIKVLERLKARYGDLYNENNVAISGIHTHAGPGGYLQYVVYIVTSLGFVRQSFDVIVNGIEQCIVEAHNNLHPGKIYVNKGDLLDASVNRSPSAYLNNPAEERGKYKYNVDKEMTLIKFVDDESGPIGSFNWFATHGTSMSRTNSLISGDNKGAAARFMEDWAEQNGIPKQAAHVNHDGLESSHMTSRLPRRVSPIIPEPNEITDDLVQLASSYEASGGRRLSSSSITKRIRSTQQNRPKFVSAFCQSNCGDVSPNVLGTFCIDTGLPCDFNHSTCNGKNELCYGRGPGYPDEFESTHIIGNRQFQKAVDLFSSASEEIQGKIDYRHTYLDFSKLEVNVRTSTGSQQVVKTCPAAMGFAFAAGTTDGPGAFDFKQGDVKGNPFWRLVRNLLKTPGKEQVECQAPKPILLDTGEMKEPYDWAPAILPIQIIRIGQLAILCVPGEFTTMAGRRLRDAVKAVLTSDNSGEFNNIHVVLAGLTNTYSQYITTFEEYEIQRYEGASTLYGPHTLSAYIQEFQKLATAMVANKEVPTNFQPPDMLDKQIGLLPGVVFDSTPPGVEFGDVSSDVPASSTFRKGSVVNATFYSACPRNDLLTDGTFALVEKLDGSNSWVPAYDDDDWSLRFKWSRPSKLSPRSFATLEWTVPGDAPSGVYRLRHFGASKPLIGSIKHFTGTSRAFAVR

SEQ ID NO: 76411 - protein, 57 aa, Zea mays
  Coding DNA Sequence Number=SeqID_33036
MEEEAQVMEGGAGDGLRGTLDHEVAPDGSFPNSMAAATSPPPTIRGSRMQSPKMCPY

SEQ ID NO: 76412 - protein, 142 aa, Zea mays
  Coding DNA Sequence Number=SeqID_33037
  Gene Ontology: Mol. function=hydrolase activity, acting on glycosyl bonds; Biological process=cell wall organization and biogenesis
  Homolog annotation: Hit_ID=A5BNQ9; Match level="QueryCoverage=32%, HitCoverage=11%, E-value=3e-10, Identity=67%"; Hit description =Putative uncharacterized protein
MTGAEGWSARVWCLRVVGGVLVGVDVDDEAGCAFRFPGSLPTSQRRQICSGRERQWRWKHHVLDTSPHPTQQHIMNPQVQSSAVKISDVRYTDIQGTSASQVAVKFDCSVSNLCGGIGLRDIKLTLQCTYANHSVLFEHLIV

SEQ ID NO: 76413 - protein, 136 aa, Zea mays
  Coding DNA Sequence Number=SeqID_33038
  Subcellular localization annotation: CTP_CleavageSite=73; ConfidenceScore=5.39e-01
MAGNARMTRSTASKTTRDKPATVVEHREVHLVIVVRAASSPVAARPSSSSVVARSSVQPAVARALFLLLMSCRVCVPGGCAPVLLVGGRAVVFVQPAVTRALLLLPTSYRACVPSGCASVLLLGGRAVVSVQPAAA

SEQ ID NO: 76414 - protein, 180 aa, Zea mays
  Coding DNA Sequence Number=SeqID_33039
MEFNGVVNRSTSKRRTTFATGSGGDDPMGHVIEMDELHLAAWLAAGEVKAHASSCFSAIIPAPVRVGEDELPPSWDPISSPLVLDFEGSSYVFSMSFMYLFYQRCTCLKCVLNVRAPVLSYFEAGIFSIPGLTEQYFSARDYNLKGIIHPRGLSDRRGLTQSLSGMNPSLERIHVNRTWP

SEQ ID NO: 76415 - protein, 84 aa, Zea mays
  Coding DNA Sequence Number=SeqID_33040
MAAQGAGRAVSSSLAKGPGKGDTPKRILPCEGTGLRAPPTDQRFEGWPPEGFNSRLRSRGPYTHYWLAPEGFTVASDAEQGMTR

SEQ ID NO: 76416 - protein, 62 aa, Zea mays
  Coding DNA Sequence Number=SeqID_33041
MKWSNSLHLKHLLFPLLFLLLDDTERNILLMEFNTCCGFSRLKLLHHASVDIFRRLRNVSSP

SEQ ID NO: 76417 - protein, 75 aa, Zea mays
  Coding DNA Sequence Number=SeqID_33042
MNIFFLEHLSDKEHSKNAENPSPELIQDCNLAVGEYALIPEQGAVHEEDQEPAPEPATEDLPTTPSFEGKPRFYA

SEQ ID NO: 76418 - protein, 294 aa, Zea mays
  Coding DNA Sequence Number=SeqID_33043
  Homolog annotation: Hit_ID=A3BWE0; Match level="QueryCoverage=29%, HitCoverage=25%, E-value=2e-07, Identity=31%"; Hit description =Putative uncharacterized protein
MKNPSEHDLRCLRQNYQAYDILVNSLSKDVYFVVIGSNSDVLVDAHDLWTRIKIKYYESNCTTSTPYVAGGTNLSKGEEKRWQPNDESTSLTGMSTTSYKCLIANNDSGYESDDEEEYEDDSEDESSSPQGTFSCIAFTNNNDRENDTNNVEEEEIHRFYTNLNKEDKVLLVKLLRRNKEQGKMLLRLEETPIKTNDSLEKMTKEHEELRCSHDDLVQRYDSVLIEQRNNDDALSCVTQLKIENAMLERKVELLSHEKLALTEKYDVLSYYHDNLLDRHIVGGLRLTKVLKNRI

SEQ ID NO: 76419 - protein, 93 aa, Zea mays
  Coding DNA Sequence Number=SeqID_33044
MARTHAYKAPRDFDRTPPHALDLTGAQNHRRSPVHDCNLADGEYVLVPEQGVAQEVAPDPALEPAPKNLPATALEGKPRFMHNMLFMLFYYTY

SEQ ID NO: 76420 - protein, 64 aa, Zea mays
  Coding DNA Sequence Number=SeqID_33045
MALMESKWEREKKRRGTFMVRGGRSAACLREVAGSPARLVGLRWRAALGLLIAQKFSEIHQKYL

SEQ ID NO: 76421 - protein, 122 aa, Zea mays
  Coding DNA Sequence Number=SeqID_33046
  Homolog annotation: Hit_ID=Q6AVD4; Match level="QueryCoverage=63%, HitCoverage=35%, E-value=1e-22, Identity=61%"; Hit description =Putative uncharacterized protein OJ1171_H02.9
MALQPAELKPSDRRKYNTRKTEHALDEVSSIEGVVLILGGSLVRPLFVYDITISHGIFGPGSAKEHALTKLAQSVSRKNLYISRLSVLLYHVELGVCPTQVPVQAYNKRFTRQGVTRRVMCS

SEQ ID NO: 76422 - protein, 259 aa, Zea mays
  Coding DNA Sequence Number=SeqID_33047
  Gene Ontology: Mol. function=kinase activity; Cellular component =ornithine carbamoyltransferase complex; Biological process=amino acid metabolic process
  Homolog annotation: Hit_ID=Q6QP54; Match level="QueryCoverage=43%, HitCoverage=39%, E-value=1e-25, Identity=58%"; Hit description =Putative kinase
MGRREAEREGGRKVAGDGRERGGNPAVFVFVPHPGRPESAWGRVMMAPPVDVAGPRPRLGDVEAPPKSRSSLSSVAEVESEPLGRARRRPSAKARAESEPWGRAKRSLSSFGVEPKSEPWVGRSGVRRLPGLSLSPIPGSGGAEFAVFRGLARVRALGRAERSSPSSGAWPESEPWVGRSGVRRLPGLSPSPSPGSGEAELPMVPAAGPDCLSASLCQVAPQSERRRRRCLSVKPLYADGGYQLRIRRHEGTPNYGPRQ

SEQ ID NO: 76423 - protein, 151 aa, Zea mays
  Coding DNA Sequence Number=SeqID_33048
  Homolog annotation: Hit_ID=Q6AVD4; Match level="QueryCoverage=23%, HitCoverage=12%, E-value=4e-09, Identity=82%"; Hit description =Putative uncharacterized protein OJ1171_H02.9
MGRLKALFAVEKIVSSHDIVVIDINIVEGSICRTGRSEQTEEGVEIDYKPRSGILGRLVTGPSFRPTEQPTFPKFRTRINGRRWVWSGTGRRDHDEMETDISSCGGGGAQQRGIGPVEVQAATAALRRSEVFHVLKELVGFVLYMHHQIPS

SEQ ID NO: 76424 - protein, 46 aa, Zea mays
  Coding DNA Sequence Number=SeqID_33049
MEYTNISNCNALPNEVKIDIDVFDETDTFNALDLHVCSHRDPMDAI

SEQ ID NO: 76425 - protein, 114 aa, Zea mays
  Coding DNA Sequence Number=SeqID_33050
MESRGTGQDERDQRTSARGDVVGRELHGSCLRSRGRTQDHGKEPCAGTGVVHCAYGGLSAEKSSGMRSAPVEHHGGEGTMAEGERHDGELSHGEHRRTPAKSARWGRVTGRTVA

SEQ ID NO: 76426 - protein, 101 aa, Zea mays
  Coding DNA Sequence Number=SeqID_33051
MKAPNRGLSTYSFIAARLSPPPEPYNPKADPAPLVGVVVIEPRRLGSDSLKPQKSPEYSPPTNFPAYARGPTTSDADLYLDVTDVTSPTSRDASPKLSRRR

SEQ ID NO: 76427 - protein, 69 aa, Zea mays
  Coding DNA Sequence Number=SeqID_33052
MAIISKIWGQSALELDLSLHCLVLDAVPDARARTGIRRVLGAFGFQRYLRIRIMSIQSMVKTKLEPDER

SEQ ID NO: 76428 - protein, 37 aa, Zea mays
  Coding DNA Sequence Number=SeqID_33053
MGRCTVFVRLTKLNELCSGGDAGNMEDFEEFQDYDEF

SEQ ID NO: 76429 - protein, 159 aa, Zea mays
  Coding DNA Sequence Number=SeqID_33054
MVSTRFHFTAQSPKLRRRGVDFVAWYSFLATTSREPRPHDSYTPVKATNPGEAVAEVAAPTSQRSQPVAVGAEIAVAPQLHRTCPVNYSGAAATDSRGCQVPEPRPLGAPDTVRCTPDSPVNYSAPALRIPEAEEFNAKSPGAPDTVRCARPGSLSGCL

SEQ ID NO: 76430 - protein, 388 aa, Zea mays
  Coding DNA Sequence Number=SeqID_33055
MSSHSMYHVLPPSEPLDGERSRRFRLAVVGGTQLRGSWYLSAIAQLQGFSSGSPAASPHRWSPKTVTTSSMVGRSEPNCNLSPTLSFKDLHHPCWGGERGEPGPAFVWAGVPPLPASGGVETILQLCGGGAPQPCRGRRTVAAQPRCNIPSFVRATVASRTGGSHSILVFVARMGVRTCRCALERPAPAGAVLVDRWTPPSVLRWWQLESQRNPRPLCGEPGPRAAVSAWTEAELARKRKLHRSGPGQVVHWPDQRRSRVAEATSQAGVLGDSWMRLRGGRPSCLLGPGSWRRPWRRWPGRGADVVLRSGDPSPVLPSEARSDFAEGGVDAEGAAAPPPSTSEPAGSVRLYRITHPNASYFSQKVMSETSYVNEVYERLENILRVETT

SEQ ID NO: 76431 - protein, 426 aa, Zea mays
  Coding DNA Sequence Number=SeqID_33056
MAGEQRVAEMSLTLSSDVPQTRVEEFASTAGATASQDLKKTKKKVTTRRSKVMKVQIESTLQALEEILVAPEAKVAAEIEELPPMGAKEAKFGKSIALIAQRVTPLELLPESEEEEEEERIAPMMSSFFDVDEDETEEKDIVGTILVLKRSAPPTADETGPSSLGFEKVTVVVTLLVIMAAEDKGSSKPALAEDKGKGSAKFEEAKKEIEDDTSLGKGPFDQDLGGRRALSKDKNFSDGDLEGLMMWVLSETYAFKSVLSAQDDYCAWIGIRSTASILLKVGRNHTRQAAEKVVDIRKKLQGKKNPKVIIEVKQTEAEAKYVVVEAEAISVRAVKEVADYVVLKVFIWFLGALKQGLCSDGLGLKTLEAGENCFVNLPLKLRKTKHFLLVLLNLLMDEFKVVDLLIKLLFSRWWAIGLLLVPCFSD

SEQ ID NO: 76432 - protein, 187 aa, Zea mays
  Coding DNA Sequence Number=SeqID_33057
MGAIQAKAPLKGHDPASPEPDLGQRQPTPEDSRLARGSPQAMDAPSTRPRLSSGRLRGEEYSAACLASTVVPLARVRLTAAKSSLGRHRKLRLARPQGSAPVSSSEDGLRLARPQGSDSTTTLKTTNSASPDPRARTQPRLRKTMDSASPDPRARTQPRPRRNRHLAQTWVRTGHVARGGHHYPAPC

SEQ ID NO: 76433 - protein, 77 aa, Zea mays
  Coding DNA Sequence Number=SeqID_33058
MHSLLAPFGRGTWLSCLDGRGDRGARLYTPETKSQQPPPWILMASISRLTRSKTRGEASGSGSYMAAAVTHTSVSGA

SEQ ID NO: 76434 - protein, 130 aa, Zea mays
  Coding DNA Sequence Number=SeqID_33059
MAPFVATAEARRRRGGDSRTLERRREHDEGLGRRWRCSGYAGKASVSMGRGKQRGKRANGGASRVEDTEAELTEAKGTVGPQRRWHNGRAGAVNNGGLLSSGKKQRTSEGWLGGACEWGKWQSKREGGVE

SEQ ID NO: 76435 - protein, 284 aa, Zea mays
  Coding DNA Sequence Number=SeqID_33060
MGTPDFCARWRAINALQPLRIPEAAKFQSRVLLEHRTLSDEWAPNVSGFSRSARKRRRLPVVEQGGARRRGIPNAGGDPDGDDDEAGGGSSHNTELSEEHEPEGWIARPITRDAALRCHFHGALDSLLHWAFDRHTWSIEYHCVVYQHRRGLYPDQWEATCLVRHPDDDLRGAEAFSEHYSITERDTAKEAMQDAARRGVIVSPIGEGNPRLNSMVNLVVVLNTELDHALDELGMVRAEVAELCAERAARHYQDGGSPTYVGIQQPYRSPPRGRFDYDTPDCRT

SEQ ID NO: 76436 - protein, 177 aa, Zea mays
  Coding DNA Sequence Number=SeqID_33061
MDEGTPLGGLESEEDAKLSHGLHAVLSSLWGRGYLAHRLRIRLPEDKDTSIGGTAAPSASTPPSAESDPASDGNTVGGSPPRRKMSAPRLGHRRQGLLQEPGPSRRLDRPLRSLSQLSPEDISPAHGLGSPTPASVPPMDDPARLQPPMLCLLGLGSPQLLGRRSPLFSSQLCLCPC

SEQ ID NO: 76437 - protein, 194 aa, Zea mays
  Coding DNA Sequence Number=SeqID_33062
MTASKKVHHVVQFCILFLFPFLSLATGARKGDTPKGILLCEGSGPRALLLIRGSKAGPSEGFDSCLRALGLRLTTGQRSKLRPLKGHDLSSPEPGLEQEQQIQGEADSSQVQPRAPKEALPRPTLGLGPRLDLRRRSPPRPTLGLGLHLDLGRRSPPRPTPGLGLSLDLGGVTASPDLGLGPTTSQGAASLPYP

SEQ ID NO: 76438 - protein, 174 aa, Zea mays
  Coding DNA Sequence Number=SeqID_33063
  Homolog annotation: Hit_ID=A2X743; Match level="QueryCoverage=51%, HitCoverage=56%, E-value=9e-20, Identity=57%"; Hit description =Putative uncharacterized protein
MPDLSTSYLPPFPELSLDAGALAVDHAGNAAAAASADAASAYASSSASVGSGVDDLVIPAECRWKGHVRTFDMAGAGAVTTCPAARRGGGKKLSLIPSLEPARTQASASAPTLEERVSEWAAKKAAAGVPTHHCVLPFLTGAPMAIYISVTTISVALFSPRARDYERPPNSEEF

SEQ ID NO: 76439 - protein, 173 aa, Zea mays
  Coding DNA Sequence Number=SeqID_33064
PIQPSETSVHTSVKLPERGIEACFAGEASPRSPEFSTPPESPWFGRYTRRRREYPPARVDRAIPATSAVEPHLAVTARASPSQPCPSPDLYRRREYVLVPEQGATQEVAPDPAPEPAPEDLPVTALEGKPRNPFEMNTSSLEDMVAGVTWPSILPPGWTVEWDPASAEEEHEE

SEQ ID NO: 76440 - protein, 101 aa, Zea mays
  Coding DNA Sequence Number=SeqID_33065
MEDWEATCPAKLTALCETAKCVFSWEELDKTDEERAQHMRMRPANINFALVGDQRDAIQNSIKTGQRVNVKTSTTGLQQFNHMKQAIYSVRKMGYLASLRS

SEQ ID NO: 76441 - protein, 270 aa, Zea mays
  Coding DNA Sequence Number=SeqID_33066
  Gene Ontology: Mol. function=cytochrome-c oxidase activity; Cellular component=mitochondrion; Biological process=electron transport
  Homolog annotation: Hit_ID=A2YNT4; Match level="QueryCoverage=14%, HitCoverage=17%, E-value=6e-10, Identity=76%"; Hit description =Putative uncharacterized protein
  Pfam annotation: Domain name=COX6B; Domain location=86-125; Score= -17.6; E_value=0.0043; Accession=PF02297.8; Description=Cytochrome oxidase c subunit VIb
MGQKSRGFRTLGSGLSRLLLSLQGRLAEAIVVDPTSSRVPDYNQPSPPPPSAAPPSAANTPLSRPLVLLLQQDGGGEETLPLRLLIEIKTAPADFRFPTTNQTRHCFTRYVEYHSQNSTPIFLTNYCNSHGIQRLLFGMILEKYILLRKLRIFIDWIEGSYKRGLMAAGAAASPWASLSPDTTPLLDKQLVLELQHDGGVAHGDGDGVSEDDMTKFGAAPGDGHAGVQDVVTKLAGGAAHGDGDIGCQDDVMKAACDAAHGYGTSVARTV

SEQ ID NO: 76442 - protein, 67 aa, Zea mays
  Coding DNA Sequence Number=SeqID_33067
  Subcellular localization annotation: CTP_CleavageSite=39; ConfidenceScore=5.20e-01
MPAHGHHRWLFLPICCPSFAAGAEPSSSQSAACSTGRLCWMTRKKRKRLKPRRRASVGCEERLGAAL

SEQ ID NO: 76443 - protein, 80 aa, Zea mays
  Coding DNA Sequence Number=SeqID_33068
VLSSGSGGRVVDFGVARWQWEDMLNNDHLYFACLDGHLRLRRARAHRVQLARRLDAFNRYQEYRCSSGQQFMRVSSWRAL

SEQ ID NO: 76444 - protein, 274 aa, Zea mays
  Coding DNA Sequence Number=SeqID_33069
  Subcellular localization annotation: CTP_CleavageSite=47; ConfidenceScore=5.58e-01
MARGQHARTRRLPSTRGFLPHQRRRNPSRRHALTPSPLVSNRPRPLLASTYSGLLATPHPHPLPAPTVPRAQSLALLTSPLTPDAPDAAHPAPDAFDTLAYLALLTLALDARFGCVRYPNARIPAPPTPSVAEKVLASLGDERTTMSPVLTPTTRSHETTGGGDVFGVPRWREGMVNGKVEQTIDVTFTLNNSIRRLDFNKWNGVKDSTKTNRKNKTGFKTKEQKETEVLPGLAHRTVRCGTGQCPVHHRTMSGAPGRIAFELFTFGFLRRSPL

SEQ ID NO: 76445 - protein, 171 aa, Zea mays
  Coding DNA Sequence Number=SeqID_33070
  Homolog annotation: Hit_ID=Q7XBD1; Match level="QueryCoverage=16%, HitCoverage=7%, E-value=1e-07, Identity=89%"; Hit description =Putative retrotransposon protein
MGIFIWAVRSQGLEPSAKCFSNMHELLYETNTTETTVQAKDGGKKSFEVPNAWEKVKETRNPKPGGKTESVGAPKHPAEAKEKTAEEPELGESTGLRKILSPPLEPELPKLGAGPSVPIETEPVGTGQSIEQGPSDVGLVLEKEDAPKKVESPTLEASTEELDFYYSTRFG

SEQ ID NO: 76446 - protein, 143 aa, Zea mays
  Coding DNA Sequence Number=SeqID_33071
  Subcellular localization annotation: CTP_CleavageSite=36; ConfidenceScore=5.23e-01
MVFDGVADGAAQNSKHQVSVDGVLSTGLRKTTSQQRAETSGAAAHNTIFPMGIPSNSQGGRLHGGAMDDDELAAAAVLWGKEGEQGRVLFGRSDGGWSSGVVDLGRVMGLVLARRESSVSWLLAGAGARSAIEGGRPWEEALC

SEQ ID NO: 76447 - protein, 436 aa, Zea mays
  Coding DNA Sequence Number=SeqID_33072
MGSARVAFVLRMLEERNFAEVGTFQPLLGFKDFHQAARLHPLTNGHAGGGESAHRPSGGGGLRQCGADRPQASSAPACLVRWLSWLWRSFRCHLPPLGGVWLSARRMGGCCAARTEGPPKTSHAARAAFMFLGCPALAPARRLRAEVGARRPGGIEWGSTGGQVAAVVGAEVVAAGEGFSADETVSATHGPTSGSLALIACPRPSIGDAGEGLVAAVSALRSSLLLFSRPEWRSLSLLTERAAASHLEFVIPQALRCGVKETLGRSTMSRSQWQRCQRGQRRSRLEKKLHRPRSRRGADIFLRGGDPPPVSPSEAGSDSAEGGVDAEGAATPPVDDLFVGSRIVYPSESYLSRKVMSEDSIIDIVEKAQKIILAEKFSSVKTCSVSRIAYPSVSYCLWQKVMSEDPTIEVVEKRERCSGRKTFSEENFDAEGVRPF

SEQ ID NO: 76448 - protein, 112 aa, Zea mays
  Coding DNA Sequence Number=SeqID_33073
MAVVVIVARWRKEYHVVAAVEGHQLETPETEQHPGLKRLLETTHLELDGKLFVNTQQAPTWRANCRCFDPGGSLDRRGAENRCRHGSMRGAIITCLPGRARWDAGLVPRSLS

SEQ ID NO: 76449 - protein, 137 aa, Zea mays
  Coding DNA Sequence Number=SeqID_33074
MHNSETTDQAKDGSKKSFEVPSAWEKVKETRNPKPGVKKKTCKVKVDLVKELWCIKEHYIRTWLTTNKTTDQAKDGSKKSFEVPSAREKVKETRNPKPGVKKKTCKVKVDLVKELWCIKEHYIRTWLTTNKDVGAQK

SEQ ID NO: 76450 - protein, 173 aa, Zea mays
  Coding DNA Sequence Number=SeqID_33075
MVPCIPPLSEDASIKVERKHKRERRKALWAGYAYRILAFKHSPSLGSLPIGEWRAFMSGQLAPCSHCVVPSLLDLGELPPWSTKERVHPYERGLEVETGSVWVNLGHGNLLYIGSVSIQLRSGRKAKYFKIPLPSSVRYEGEWFYARNVAGNALPFTGWELMSTEKWHYRVET

SEQ ID NO: 76451 - protein, 210 aa, Zea mays
  Coding DNA Sequence Number=SeqID_33076
MASQRPMYKQYSGFMTLTAIPLKPLALTEIEARVKAITTLSSRFFMVEDSPSLFLKIFQAVWCVDLPGRSGSSLTGYPQGGPPRFASPSARHGGGLGGWVIILGGASMVEALVITLPLSSLAPFPLSIAVAGGQFEAASLPSVVAGTQVLPPSTTLLVAGTQVLPPSTIVASTLAGPCCMWCLKKATRTFPLYTQRLGRIGNRGGGVAAY

SEQ ID NO: 76452 - protein, 105 aa, Zea mays
  Coding DNA Sequence Number=SeqID_33077
MESHDLRAERESRLVGGNENDGFGIDSGNGKWYSFRLERQLLDLPPHKASPLQPNRTLAEYVDVYSPLLYTPNPSSSGCLHCNHCSGENEAVEGDFQEFQDYDEF

SEQ ID NO: 76453 - protein, 78 aa, Zea mays
  Coding DNA Sequence Number=SeqID_33078
MAHRSCSGPPEAFSLPFYPLCPWIHGVFPAIEFDVAPSPSLPNSGDPGATLACAYLNADNLTAAERSGAASRTSVSPV

SEQ ID NO: 76454 - protein, 140 aa, Zea mays
  Coding DNA Sequence Number=SeqID_33079
MGRLEPRQKGNHGLWVVQPLQSVRNWYISRAHGYEQPWDPLRLEEQCGVDDGLDLKYYPRRSTSSAGGVIVSLVGEGNPRLNIMVNLVAMLNTELDHVLDELGKMSENRRRGGRRAQQEKQAPPGGGSPAAVATATPDDH

SEQ ID NO: 76455 - protein, 210 aa, Zea mays
  Coding DNA Sequence Number=SeqID_33080
  Homolog annotation: Hit_ID=A2XFR6; Match level="QueryCoverage=66%, HitCoverage=40%, E-value=4e-25, Identity=42%"; Hit description =Putative uncharacterized protein
MELHHLSMKNGVILEDSSEEILATPTPLSESHDFAAGASSSVPPVLVSQAPALGGDDPDDSGDRGFRTLSSHESLTPLSTYAASVSNAARRALWSLSHTYRQQLHDTAYRHLPLCSSGESQTSVVPGEAGEGRLNTLVGVVAGLNTDLDSATLDLLRVHEEFKDAHARITLIEAQLEGRNPPEAQVPAIAVSPPRKRIHYGAPGSIPILL

SEQ ID NO: 76456 - protein, 133 aa, Zea mays
  Coding DNA Sequence Number=SeqID_33081
MEAKEGRTTLGRELASMEGIDWGRWGGDELGTRSGGLLGRPTQQARTGEASTTIKLEQAEMVNPSGDKVDDVNDKIPTPIVMNKKDESHGYLLNGTKNNKRTRRMFGYKIKPPQPQAKAPKLMDTQTRESNQA

SEQ ID NO: 76457 - protein, 157 aa, Zea mays
  Coding DNA Sequence Number=SeqID_33082
MAGKRPRIRGQRGENGEEKASGGPEELRHRASTVDRHGRAPAMPKLAEDRAKLGKLSTGKGTCGALRRELGAWAGVVAEKSGDHQQGLLRRSNEQLALKSAVAADLNSLCTELKDEVAAVRAKVAPLEEVRPLKGKVSLLEEEERKLRENLLAVTGE

SEQ ID NO: 76458 - protein, 72 aa, Zea mays
  Coding DNA Sequence Number=SeqID_33083
  Subcellular localization annotation: CTP_CleavageSite=38; ConfidenceScore=5.29e-01
MAPIPPPSSLPQLQQPLRGVCSPCHAYGARRAPPTSLRSPMRDDAFVFTPHVQQPQLRFDMVKLGEKCKRDI

SEQ ID NO: 76459 - protein, 245 aa, Zea mays
  Coding DNA Sequence Number=SeqID_33084
MTSHKSSEGGNAHSHTDELAREGFPRILWEVLREAGYTTPPQYAVQLFEEHRVPRCRVRMTMEPHPLQPGWRSLDFESFGFRAEDTIESIALHGLTTFCGFHPLELSTHPISLFPTEKEDGPMWKDRVEHAKDVLALYPRQTAHLTVRCMNALYRLQAVRGEAMFQLMGLVESTKITLDNREDLVVDLSTELVEKDLQVEQMATQIQELEEQVGARENAIEVLEDQLLTTQQQLEEANQHLDMHH

SEQ ID NO: 76460 - protein, 102 aa, Zea mays
  Coding DNA Sequence Number=SeqID_33085
MADAHAIEGVQEDDVGLAAIINQYFVQILACYPAIDYHGICMWCTAQINVPGIESERDVGPLCLYYWVGESDVVDTAIVVLFMPLGVEVYTGSPSDYVNDPQ

SEQ ID NO: 76461 - protein, 127 aa, Zea mays
  Coding DNA Sequence Number=SeqID_33086
MARVYTGELLLQQRGADRKKPTGGPSCGTPFYHPTIEAHCCYPTTEVRVAVTLRAGKQSWISSLRGTEMVMAVGMNPATMDVVLELTRLHRELSPCPTMEEVDAAVDAEEARLAEITKEEKAARVLA

SEQ ID NO: 76462 - protein, 87 aa, Zea mays
  Coding DNA Sequence Number=SeqID_33087
MDATHDFLLLLFPVAWWSVAEDASKLRIMKQAECSMLYRGHMYSVYLNVNCLFNSAQPTCTHTMVSEELAMMTEDELDANKVTHRRW

SEQ ID NO: 76463 - protein, 205 aa, Zea mays
  Coding DNA Sequence Number=SeqID_33088
MGSVAGTGEDLSNNPPQSTLCRTVRFKRLELVGVTYIGGIRYGSERSQISCPLPNNLVVPVHLEVGQELRLCFLDQLLLVLLELELFVSRQGLPSRLYEIAREALELSHELAIEGRSDGSIYVVPSEVAKKCVDTFSGANHYNKNRRRCSLHRRGRSVARGRTVRACAGAAKVTGGAWISLPRGTPFGRRDPRCCLGSAGQPRLL

SEQ ID NO: 76464 - protein, 150 aa, Zea mays
  Coding DNA Sequence Number=SeqID_33089
MVNCGGSLPVSFCCFFLMTLFVLQLANCPGEVAGASLYAPSKSHEGGGCSPRPSALVSDRGDPPRAPLLRWGLLRGRSHPVSKVRGGLGLGLSKQRGHSALRMGDARDLVGEPADGAFGLWNVDVEILERGGRVRLRSNIFNYGSNKWLY

SEQ ID NO: 76465 - protein, 182 aa, Zea mays
  Coding DNA Sequence Number=SeqID_33090
MELKPAFLQKPFWVPHGPRLLAGMDYAAPAGVTLEAGSEQPHQRRRPPLHRWIAGDSDHLCTNCDNDLRSERLASSTASGSDGPDSGGNHLCKGQPHQRLRPPQHRQQRPPPHRWTAAASTRVKRSSLPSSHGVRTRPSKNVVATPAAYSVLYGPLPCPDQAAGGSVGGSPRAIRAREPGTR

SEQ ID NO: 76466 - protein, 42 aa, Zea mays
  Coding DNA Sequence Number=SeqID_33091
MAVMGSTSGKMYLCQVRKQQTFAVFALRWCPKKNLSSVATRG

SEQ ID NO: 76467 - protein, 315 aa, Zea mays
  Coding DNA Sequence Number=SeqID_33092
  Subcellular localization annotation: CTP_CleavageSite=82; ConfidenceScore=5.17e-01
MAYFMGHKQREVKGKAWTRVSTGPLLTLGSSSFRGLVEWSTTSRRLVLFHHCSARLQGFSSCSPAAVPRQWSSRRMTTILVVGRRKPGCSLPPALSFKDVHHPCWGGRRAESGSCLPHGPVTRFFLQHLGEKAFIGLEEKANFGYAGPAGCKRCQLPCAWLPGSDGPGAASDAASCRLVGAWLSVHHTGDGRAVRGSATSTASPAPLAVLGGRTRRCMPRGWRRRSWMVLSSLRGRTGARTSSRVSRQPPSTGAEVAAVVGAEVVAAAGEAAPCRGGCLRCRDHQSHLLLSPRLFGFNGLAVTPRRRTKVRTYSQ

SEQ ID NO: 76468 - protein, 152 aa, Zea mays
  Coding DNA Sequence Number=SeqID_33093
MTLGTSDTWPRLRLRSRGTLGHFRDQQERFCNGIPPEGGIEPSDPIERGRVRQITCRVRLTTAKSSLRHNRKLRLAQPWTSALGGGLRLARSQGLVPPRPRKVVSASPDPRARPQPWPRKVVSASPDPRAQPQPRPQKVVSTSPNPRAWPRP

SEQ ID NO: 76469 - protein, 126 aa, Zea mays
  Coding DNA Sequence Number=SeqID_33094
MERGEVAGDDGRRWWPPERSPDYRKAETRRLETESLRLGEEMRQSPWLGRAGGDFLKREMGTPDSLQWLSGAHRTAHSRCPVNHRTAHRKRGTSRAAAGAPDIAQCSVRCTPDCPVRQALDAIQGI

SEQ ID NO: 76470 - protein, 109 aa, Zea mays
  Coding DNA Sequence Number=SeqID_33095
MAMMGSTSEKMYLCQDLVDVGLLTKDPLTGHMPHHGHLQDELAERDLAIDWAVNSRSIAWDREAKARARVEELSTAVDNFQTYLPTLLEWESGPLEQQVKHLDNEVMLE

SEQ ID NO: 76471 - protein, 489 aa, Zea mays
  Coding DNA Sequence Number=SeqID_33096
  Homolog annotation: Hit_ID=Q6JAD6; Match level="QueryCoverage=88%, HitCoverage=70%, E-value=1e-128, Identity=82%"; Hit description =Putative uncharacterized protein
MPRTKNASASGGGDDEDPRRPFRQVKGKTVYLEQQEGRKKRRSDREARAAAAAAAAAAQAALGDQPDVPSDQIAFRARRLASRSRSSTHTSASTPPPTLPAPVTPIAPSTSTAIPTTSTTPASTASPAPAPASAPPVPPPRFRERDETEVRPLGSDPRLFDLQRATAARVPSVQRQICEEWVRVFYASVWIDPDHHWMRFRFDREDVTITADQIRQLFGFPVSTTRLHSLCYGTSDPPRRPHGGVAPGTAHVAALFRPPFSDGSRRSPADFTTAAKYLYELVRRTLLPRMGYREATTHIQLWLLGALVSHSEFDVVDFLICEIEDTVLDGIRARRQLPYAHYLCHIFAQLIQPPRSQSTLEASRLVFGSYRPAPEIPVPAYAPVFDTQVEDAALRQFDSQGAAADDDDDDDLGVPLPPPPPMPPRSHDHEAGSSRAAPAPPALDPALASILQTLTQQQQTLTQQQALLAAEQAQHAGQAGCSSATAYSG

SEQ ID NO: 76472 - protein, 309 aa, Zea mays
  Coding DNA Sequence Number=SeqID_33097
MPRNMVNRGLYPSRDLRRGLPFRLWWYKCGHCTTAVGVHEALYAKAIRGIDGLFPFKCGLASKAGLRHLSWNNSGSSATAGNAQSHTDGLAREGFPRILWEVLQGAGYTTPPQYAVQLFEKHQVPRCRVRMTLEPHPLQPGWRSLDSESFGDRAEDTMEEIVVHGLTTFCGFHPLELSTHPIGLFAVEKEDDPMWKDRVEHSKDIWAIYPGQTAHLTVRCMNALYRLHVMRGEAMSHLMALLEATKITLDNREELVVDLSTEMVEKDLQVEQLSNKIQELEELVGTRENTIEVLEDQLINTQQQLAEAN

SEQ ID NO: 76473 - protein, 101 aa, Zea mays
  Coding DNA Sequence Number=SeqID_33098
MAGDRVAAGTPFAGKTPVISGSGEVESTRGSTVEASVGFIGAGVSRRHGHGLVRREARGVGRALACSEHVEHVEVFFCPCSTARRDRKRANLGKNPAQASS

SEQ ID NO: 76474 - protein, 213 aa, Zea mays
  Coding DNA Sequence Number=SeqID_33099
MVGNKARVEGCIAAQFKLNKVAHFTRRATKDQTLTTLTSSTARWPQIGWRHVGSRCVSTIGPYFDWRHEPVDPSVVYASGGGKAHGRYALFDGFIDSSLVRSQRMGSSSSSLCSRRPNEQELEIMRLCEEMRQQWEFMHACNAHNQVLYQGLGSQQFNTPPTHIPAPGDRVKLEVGGSESEPIGKGFVESLFAYPPPGGGSGQSFNHPSGGYP

SEQ ID NO: 76475 - protein, 56 aa, Zea mays
  Coding DNA Sequence Number=SeqID_33100
MGLSEVRWTRTTIGGPNDLEGSVTAYPFEDEQATVDPEVQQIEVAEQELIEGKLCP

SEQ ID NO: 76476 - protein, 54 aa, Zea mays
  Coding DNA Sequence Number=SeqID_33101
MAMMGSTSEKMYLCQNKITRNGSGEMARVACTLRGKRLDGGVSVLSVGVNLIWS

SEQ ID NO: 76477 - protein, 41 aa, Zea mays
  Coding DNA Sequence Number=SeqID_33102
MDVLMIRYLGEDQQGLGKDQGISLRGEVIRVSRVITNGAVV

SEQ ID NO: 76478 - protein, 93 aa, Zea mays
  Coding DNA Sequence Number=SeqID_33103
  Subcellular localization annotation: CTP_CleavageSite=17; ConfidenceScore=5.20e-01
MRDARRGHASHAGGGTTAGARAAGVLRTSKDLGKAKVLRRSSKGVHNRKEIKSESAATLSRVPGPVCTKMDAQDASGLRLRRTGYGWKDNEII

SEQ ID NO: 76479 - protein, 46 aa, Zea mays
  Coding DNA Sequence Number=SeqID_33104
MAMMGSTSEKMYLCQVKKQQTFVASVQRWYQRKRTKTKATGGKALR

SEQ ID NO: 76480 - protein, 319 aa, Zea mays
  Coding DNA Sequence Number=SeqID_33105
MDSYHELGAWTAEFEVPDQEPGLRCLEWVQEELQALPTIVEGFMSYASLVTCEGAMNALSREGCRHYEVFDQADEDFERDIYKVEDPIVKESAGALYDRMWGPHGREVVRERAETARGQAARGERVDDFGALNSALLDPESNPALSKVALELPPETTEGAPNAPAAAAAGGGPPPETAKGVPDAPAAAAAGGGPPPTAAPRAEDPVTVAAEATVEAPATARSSQVQDFGPAHATATTNCLAASTVDDGNKSDGSASKFSDFGDSGSSVEWTEESSNEDLDYFAALDVAAAEASPQAADAEVVLGPSTGRRRRRAVVKRR

SEQ ID NO: 76481 - protein, 203 aa, Zea mays
  Coding DNA Sequence Number=SeqID_33106
  Subcellular localization annotation: CTP_CleavageSite=58; ConfidenceScore=5.37e-01
MASPSLSFKDVHHPLLGRGASQVGALPSTWVGGPLLPPAFRGEGCSPALRRRRTPATRGRPVVGRQLQRVRPFGLDGFGAASDAASCCSGRGVAVRPPHERRLRRVWVRHIHPFSCPPTTLGDRTRRHGSEDPFVRAEAAAANWYRGGRCRWRTGGEDLLAVALTLRWSLLLASRTERRSLSLLVQRPTVRDQAERLPGSGLP

SEQ ID NO: 76482 - protein, 280 aa, Zea mays
  Coding DNA Sequence Number=SeqID_33107
MFTDTVVVHHRTAEANGFFTDDLVERIVVLVDFLFRLTVNDVVIVDEVHVGAVLIAMRGMTAQHGDVVGVRELSTNTVNNAFVDFVDAAPAAGYFGGKAHVAGFEDLHTFGSHFIRSPVQACTIPVFCLPPRERLPPRQLRFTPALLPQIPPPSSRPLRPRTPRQQRARMEGCRASNARGWKVAAPASSARIAPALLATNDRGWKVAAPNRRSRKSASAAKVQLLLAAPANQPRGRFAPTLLATKDREWKAAPANRESAAPSKPTDVQINLGSGCSRGWK

SEQ ID NO: 76483 - protein, 185 aa, Zea mays
  Coding DNA Sequence Number=SeqID_33108
  Gene Ontology: Mol. function=unfolded protein binding; Cellular component=cytoplasm; Biological process=cellular protein metabolic process
  Homolog annotation: Hit_ID=P40412; Match level="QueryCoverage=95%, HitCoverage=32%, E-value=6e-82, Identity=88%"; Hit description=T -complex protein 1 subunit epsilon
MALAFDEFGRPFIILREQEKKTRLRGLDAQKANIASAKAVARILRTSLGPKGMDKMLQSPDGDVIITNDGATILEQMDVDNQIAKLMVELSRSQDYEIGDGTTGVVVMAGALLEQAEKLLERGIHPIRVAEGYEMASKVAFDHLEHISEKFEFSADNIEPLVQTCMTTLSSKIFTKFSEVDEAGH

SEQ ID NO: 76484 - protein, 109 aa, Zea mays
  Coding DNA Sequence Number=SeqID_33109
MLVDYTTGLLQQPGYPVVVQGASLAEVQGKAASQTPPHAEARGKSPAALAPAPGVGAPAPCAGDDAVSPVDWTDLTLCDAVDAPPGEKAKRDHRLTCNAPKTSHLQKTS

SEQ ID NO: 76485 - protein, 108 aa, Zea mays
  Coding DNA Sequence Number=SeqID_33110
VADGLDLKYYPRRSTDSARGVIVSPVGEGNPRLNSMVNLVVMLNTELDHTLDELGKMSENRRRGVRRAQPEQQAPQEEAAPQQHLPPPPPMTIEQMFLMQTQTVQAIG

SEQ ID NO: 76486 - protein, 152 aa, Zea mays
  Coding DNA Sequence Number=SeqID_33111
MGKNNKRKREPTPPSEEFGDSEYSKEEFSSGSEGSPAPVPLRESSDDSDDSQGLAAEVWSYIRAVERSGLEGSDGSEYSSDEEDSDDGDEDEDDDDDDGDDDDDGGGDGDGSGSGRGSGGGSKDGDGGGSRGSNRGGSSRGSTRGGSSRTSG

SEQ ID NO: 76487 - protein, 350 aa, Zea mays
  Coding DNA Sequence Number=SeqID_33112
  Homolog annotation: Hit_ID=Q2QQ41; Match level="QueryCoverage=45%, HitCoverage=55%, E-value=1e-07, Identity=25%"; Hit description =Putative uncharacterized protein
MKPHVASGHGAEERRPTTSSTQINNLNKSHACIDAENAGLVKVLHLVYLVYRKKSKFFTCSNPDNVPKELPSDLEELYLQRQNPSYLYGISRLYILALPPFVLGYKVYMHSSGYKVLMEPVVLNRERAAADRLKRMPILFDDYRDEDFYYGLPRKYSIVARVEVKFPIEPRFRDRQHFVLSDINGAKIEAITYMYETVKHFDNLLHEKHVYKMHNVKFSLHPGEFNFRHLNGPMELCLDQQTIVEPYTVPIQMAPFPKQILLNLADIAELPNRTLVDIMAVVVHLDTIHRTMWGPFRKIVIMDARGYLHIIKVWGDLLNKNALRWALAKEDYGIIIGTMFRRFRRQGFAL

SEQ ID NO: 76488 - protein, 24 aa, Zea mays
  Coding DNA Sequence Number=SeqID_33113
MAVSCVCATADAPDPFGGELMFGI

SEQ ID NO: 76489 - protein, 100 aa, Zea mays
  Coding DNA Sequence Number=SeqID_33114
MVGALWGGSTVTRIAERREKPWATNVACHVRLQSNPGVRIGSFNGTNGENQSVRLSGAEVLAVRRDFPIGILHGGSPPRKGPFELHASKPYTENPVLARN

SEQ ID NO: 76490 - protein, 136 aa, Zea mays
  Coding DNA Sequence Number=SeqID_33115
  Gene Ontology: Mol. function=unfolded protein binding; Cellular component=cytoplasm; Biological process=cellular protein metabolic process
  Homolog annotation: Hit_ID=A7PJV1; Match level="QueryCoverage=94%, HitCoverage=24%, E-value=7e-57, Identity=84%"; Hit description =Chromosome chr12 scaffold_18, whole genome shotgun sequence
MREILFSLQRCCSTTSLCFRVNRCKRALAEIAVKAVLAVADLERKDVNLDLIKVEGKVGGKLEDTELVYGIIVDKDMSHPQMPKRIEDAKIAILTCPFEPPKPKTKHKVDIDTVEKFQTLREQEQKYFHELVQKCK

SEQ ID NO: 76491 - protein, 280 aa, Zea mays
  Coding DNA Sequence Number=SeqID_33116
  Gene Ontology: Mol. function=cysteine-type peptidase activity; Biological process=proteolysis
  Homolog annotation: Hit_ID=A3B1J1; Match level="QueryCoverage=62%, HitCoverage=18%, E-value=4e-20, Identity=31%"; Hit description =Putative uncharacterized protein
  Pfam annotation: Domain name=Peptidase_C48; Domain location=48-213; Score=-14.0; E_value=0.002; Accession=PF02902.10; Description=Ulp1 protease family, C-terminal catalytic domain
MTIFARKVILLSSILSRKSLCEPRVEVVLIDDAFVERKWMECLFQPSAYLGDEVIDCYINLIKAQKHLKCRSGGRVHIENAFQFNFLKRDGDLEIKTEELYPIKDMTHICSAERRVLLYLDHDMIKGLQRQIDMISQRKELKDHRWPDLQVASWPLREIDMGYAKQTDSSSCGLFLLNYIEYWTGDELSDSFTQDDMSHFRKKMAAILLSSDLNKRRGCLLYKNEKEVDSGSPSDVEILENPTDSNKRKLLHVLDDSEVVFEDEEGPITQADLQRWFVDD

SEQ ID NO: 76492 - protein, 117 aa, Zea mays
  Coding DNA Sequence Number=SeqID_33117
MAPKKASSKADEAAKAALLAAKKGKALALTHSTHQEAAEDDVPRTCEDDALRTCGLGQPQPPPGFAPPEGADLTEDGEVLGFAPPEGADLTEDGEVLGVSAEEQLQLRALRLKNHNL

SEQ ID NO: 76493 - protein, 33 aa, Zea mays
  Coding DNA Sequence Number=SeqID_33118
MNLSTVSCVLCRKEQVRGRRMGTARGRGRIFSI

SEQ ID NO: 76494 - protein, 169 aa, Zea mays
  Coding DNA Sequence Number=SeqID_33119
  Homolog annotation: Hit_ID=A2YHM2; Match level="QueryCoverage=37%, HitCoverage=30%, E-value=6e-15, Identity=64%"; Hit description =Putative uncharacterized protein
  Subcellular localization annotation: CTP_CleavageSite=66; ConfidenceScore=5.56e-01
MANAASSASSPGAGPSSSPQAGGDGGGDAHTPRQRQGRPPRAGSDPLLIVCGCFSVVTVATALLCVAVNVVSAVQSFRAGSDIFGGIFRCYAVVFSLFVAVLETEWGLAACSTGESQRKEACICMPRTPAVGNADEGGLHAATGTDYRVQYRNVLLMMGNRIMNDMLVG

SEQ ID NO: 76495 - protein, 51 aa, Zea mays
  Coding DNA Sequence Number=SeqID_33120
MKKELRLKFTGLCGGAPDCLGERLQLVEIPRKREENSKRKDRGIQVDHWIT

SEQ ID NO: 76496 - protein, 119 aa, Zea mays
  Coding DNA Sequence Number=SeqID_33121
MKQQRQEADVGKLQGGGDAENPNVAGSHTLADEVQVDLHMLGVLVLHEIGGEVDGADVVAVDEGGTLKGVVELVEKLMHPGGLATPLATARYSTSALEREATGCRLAAQETRLAPRNTA

SEQ ID NO: 76497 - protein, 332 aa, Zea mays
  Coding DNA Sequence Number=SeqID_33122
  Gene Ontology: Mol. function=3'-5'-exoribonuclease activity; Cellular component=cytoplasm; Biological process=embryonic development ending in birth or egg hatching
  Homolog annotation: Hit_ID=Q108Z7; Match level="QueryCoverage=71%, HitCoverage=12%, E-value=1e-103, Identity=71%"; Hit description =Transcriptional regulator, putative, expressed
  Pfam annotation: Domain name=Not1; Domain location=1-282; Score =332.3; E_value=8.6e-97; Accession=PF04054.6; Description=CCR4-Not complex component, Not1
MASSLSIFHSFRSLFTASVHVKRLLVALLKFMEPYLRNAELPEAMDLLYKGTMRVLLVLLHDFPEFLCDYHFSFCDVIPSSCIQMRNVILSAFPRNMRLPDPSTPNLKIDLLAEISIAPRIMSDVDGALKSKQLKTEVDEYLKAVQQLQLNKANPSASVQQINHISPMDIFQIGTATDIFRSLITSLDTEGRYLLLNAIANQLRYPNSHTHYYSFITLYLFSEATQEITQEQITRVLLERLIVNRPHPWGLLITFIELIKGRALQVPAFPSHNMVAVFAGVAGGLDHNWVYFDQPNEPTSGRGQRPNPMETTAFPSHNKVSFWLPTQRGPSC

SEQ ID NO: 76498 - protein, 102 aa, Zea mays
  Coding DNA Sequence Number=SeqID_33123
  Subcellular localization annotation: CTP_CleavageSite=62; ConfidenceScore=5.78e-01
MGISPVAIPRAVTSVLDSFALCSSFRASSLPSPTSPPIPPLARNRRPSPLMDSYSSPSAVPPAAAETARYSYRPRLRWPPDVEEYFIMAYGRSGGAYVRIGG

SEQ ID NO: 76499 - protein, 245 aa, Zea mays
  Coding DNA Sequence Number=SeqID_33124
  Homolog annotation: Hit_ID=A3C781; Match level="QueryCoverage=50%, HitCoverage=4%, E-value=7e-54, Identity=84%"; Hit description =Putative uncharacterized protein
MSCAPPSGWAVAEWTVDADPLVMGARLEALIANDGKDVEIQSVIMEVPDILRRCVSRDEAALAVAQKVFKSLYDNTSNTTYVSWLLATLVAIRDVCKLVVKELTSWVIYSDEEKKFNIDIIFGLIRSELLNIGEYNVHLAKLIDGGRNTSVHQVHPDTLELKDVAVYRCSAWCLDSSLVPASRELWIVEPPFAVDGVSSGRRTLMYPIRITFSSAPRRDGSDPKLHAITSGGDGSGHVQQGSPPF

SEQ ID NO: 76500 - protein, 335 aa, Zea mays
  Coding DNA Sequence Number=SeqID_33125
  Gene Ontology: Biological process=embryonic development ending in birth or egg hatching
  Homolog annotation: Hit_ID=Q7XC99; Match level="QueryCoverage=79%, HitCoverage=11%, E-value=2e-77, Identity=57%"; Hit description =Transcriptional regulator, putative, expressed
  Subcellular localization annotation: CTP_CleavageSite=56; ConfidenceScore=5.58e-01
MSLSVALLSCIATTSVLSICLPTPSNINAPSTSRLIFTSSENGLLPLVKFTCFLLSCSEVATEFAMSLVQALFAHDPVGFTEFQNVLDALSKHTKRPGSPESLQQLIEIARNNVSTTTGFVAVKDEKVLATRANKEENTANEITLVDPNQVAVLFSEWCQMCNHLQQDGLLKGDDISERFFRILTVMDLPLYQELAVTHSLVSEQIVAPGGSSQQSPQQPHISYFSIDSYAKLVVMVLKYSVEITPNKASILSKILSVTVRSIQKDAEEKKASFNPRPYFRLFINWLYDLTTTDGHHDSSNFQVLTAFANAFHMLQPLRVPAWRSVHHAWTFLQR

SEQ ID NO: 76501 - protein, 103 aa, Zea mays
  Coding DNA Sequence Number=SeqID_33126
  Subcellular localization annotation: CTP_CleavageSite=70; ConfidenceScore=5.54e-01
MADDLNALGKVVSDRTLVLNVIRVSTSASPTSVPSFVVLDPSLSSSTSREDLTLEELTMTNQQPSPAVALAATTEPLQQSPQRSRFNSVGAANGNANSHQAWR

SEQ ID NO: 76502 - protein, 269 aa, Zea mays
  Coding DNA Sequence Number=SeqID_33127
MRARNWKTVQRLTRSTCAGGFLNSGEHDWAIPVTRVPGSSLSKTHGFTRKLSEGLDRTEEDGRGVGHGGCSRAALAGRGEVAEVNGWLGQVRRGTEEGKFGAILSIGSKGFEKGIKISGEQEQGGQTSSKKVEKVARVFTERGKIKFKTRRPPPPFIHRARRFGKPAVQQYGVNQRSCQKPPRNHFERGQRLRHLATSSAPDDLVELVPRRANVGAKAKTPPFARCLRLNRWTNGDKTTDRLTLCPIRHRTKTCDEVVPSCDLVQHGGP

SEQ ID NO: 76503 - protein, 105 aa, Zea mays
  Coding DNA Sequence Number=SeqID_33128
MWLSFIGQRLATPKGQDHTNHSRRESWDPDLFDGSTVACAGSRLWASSAGLLAKDSPRRSITKGWGRATLAMLKGLGRLVAGALARVERLGKKKGSPHDWVDRRS

SEQ ID NO: 76504 - protein, 741 aa, Zea mays
  Coding DNA Sequence Number=SeqID_33129
MPTATTKKRKLGTIIEGLGVSDHFAVDLMGTCAAPGGRISSPELKESSARMLEITGGRWPRNVTIPRAAGEDMFTSRLAHEMKIFPYGRNIAVVVSAVMDKDRQHAMRKRRAFTRVGDPSREVKKARGIAKSAAPAAASHRWLRSLPSTALANLHQERGPLSPLRTAEAVAGGAELSMDIWVDDYRVGGVMMFDARTGRGLVGLGQDCDVGSDAGQLPVVPAPVAAASAVTTAEAKGASQDPWSKFCASDEITSAAASKDVAGSVAQQLKHADAFAHHVASGALTLEFAAERQRHEGRIQCLRTQHTEAVRDKSAAENKSRRLMEKLAAAEAKKDLSHRLVEEKKDVDRACAEAQAARAEAKLARAEANLARQHTEEAEASHSSLRGCLDKEEASTLAEVDQTHAQLADAYRHLGARIAPFHASGKEVGLCFLGWLQEELEGAVNALSREGCRHFEVFDRSDEDFKRGIFQVEDPVLKQSAGALYDRMWGPHGYDTVRERSDRVMEQMAQDEEVEDLEDLESTLPESSGAKERIGGQLAPPSDTSEGPVMTPASTNVGEDPVLAAAPTGEDTSVVAGEPTAEDPVASVDPLQVLTCGPAQATAADDTYFMVPATAVPPNDNLSGSESGSFSSDDVATAESLLRVEVSEVSDPPSARTKCRRRRVVSKHSVGEVSRSGRHRRMGMEWDRLRVDRFGKRELMSSPIGTSIGEGDLRNLFEGEELKIMLFNYREAGIIPKVEPM

SEQ ID NO: 76505 - protein, 87 aa, Zea mays
  Coding DNA Sequence Number=SeqID_33130
MAPLARPDCLSDSLCRVALQSEWRRRRCPSVRLVSRALYADGGYQLRIRRLEGTPNYGPRQIDIRTIRIDLGREALENRWVTRWLFI

SEQ ID NO: 76506 - protein, 34 aa, Zea mays
  Coding DNA Sequence Number=SeqID_33131
MDNNNYGQGAVRLAASVTSSFEFGSDIEILGQVG

SEQ ID NO: 76507 - protein, 56 aa, Zea mays
  Coding DNA Sequence Number=SeqID_33132
MEIEGFVGDCYLADREYVLIPKQGVTQEEVQEPALEPATEDLPAAPAFEGKPQFYA

SEQ ID NO: 76508 - protein, 484 aa, Zea mays
  Coding DNA Sequence Number=SeqID_33133
MEVVELVPCAHNKWGNWHEFWFYIAEGTVEDHLGLPVSEMCSHYYSAYPPFEVAEEDADEGALRRDPAAFVREAEDGAVRVVGRYVPKTEGQRSWDIRGSNDHLNRVFELNRLPYGGCPGQDDVDRRGKKPVVETGDDPASAAAPSSKKRKLGISMGGLVVSDGFARELMRTCAAPGGRMSSPDLRESSARMLRVTGGWWPKNVPIPRAVSEDFFTSRMVHDWKVFPYGRNIAAVGSAVMDKDRQGAAQKRQAVVRLHEARPKRQRGAAKAAAPDGGQPLLAAKSAVPASSRVPEAPKAARELPPGKRVADFATDISVEDYLVGSDEGQLVVAPPAVATAAAALVPRAKGSALSAGGEMPALAAVRDEAGAVSRRLKEMQEALSQASDFADRAASGALTAVVSAEVERLRTQHADAVREKSVVDSKCRKLADKVAALEGEKTDLRRQLAEERKEANEALAKAQAAQAEANLARAEGSLARQRAE

SEQ ID NO: 76509 - protein, 137 aa, Zea mays
  Coding DNA Sequence Number=SeqID_33134
  Subcellular localization annotation: CTP_CleavageSite=35; ConfidenceScore=5.20e-01
MAARPRPGAPPCPGHGAALVRPWRGPNSLPALACPAPARRGRDVPARRDLELGPACLWRATLSSASARPHAVGLSMAPLLPAAQQNDLVEEPEELAGEAPEQQSIGGGMEAKSHHQPIILRSTCKNYATSKAEYTNT

SEQ ID NO: 76510 - protein, 149 aa, Zea mays
  Coding DNA Sequence Number=SeqID_33135
MAAWMLSEQGNRGAGDLLFCESWSLGVGEPRRCVGKKGAVAGRPWSRKVEVGQWDFNRGGARLLGYLPWTVEGGAMVGVEVPTPMEKPLRAGEKGSLAMALEVQERVGGGEPIWEQGGSSSMGDGGLACPSWGAVRPEKSRDERSSSAP

SEQ ID NO: 76511 - protein, 166 aa, Zea mays
  Coding DNA Sequence Number=SeqID_33136
MEQESGGRPMGLQPWGARLLGCLPWTAEGGAMVGAEVPTPMEKPLRAGEKGSLAMALEVAMRLMVLGFDSSNASPLQPNRILAEYVDVYSPLLYTPTPHPQVVSIATTAQEKMKSWKETSRSSKTTTSSRRGLAATPSRLPVKAAFIYVSFLHFDYCKDYVDVSDL

SEQ ID NO: 76512 - protein, 65 aa, Zea mays
  Coding DNA Sequence Number=SeqID_33137
MATRPRPPGAASPAWCGLAPAPRLAPAMARPWGLERFLECLSVRTYSLDDRLGKLCNHEGGMGCP

SEQ ID NO: 76513 - protein, 31 aa, Zea mays
  Coding DNA Sequence Number=SeqID_33138
MEKILAAYIKASKQWCSTQNKLAQGPDLQMI

SEQ ID NO: 76514 - protein, 150 aa, Zea mays
  Coding DNA Sequence Number=SeqID_33139
MQRQVQPKFHDRQRWRRSLPRWRFAGDEGAGALRAKGRREGTGRFGMARRTRSWAWHRRRGTREWKSAVEQPNGGANHSSEQQGSTWDIKGMGELLTSRGNSRALEQRRGRMDALGRRWRGFGCTGRTPVSVDWAKQMGWGKLEGVPRCW

SEQ ID NO: 76515 - protein, 71 aa, Zea mays
  Coding DNA Sequence Number=SeqID_33140
MQLVDDLKNDVLNQWMLAKREGEGSVPEKDTTDAEAKTVDAEADSDDEEDDDILSSSKPSHIEFGKSTVKP

SEQ ID NO: 76516 - protein, 98 aa, Zea mays
  Coding DNA Sequence Number=SeqID_33141
MKEQIKDVILPLCWVPAFPTPPTIAPSNVLHPLLILIVAAAGWLVASREGLRERDEQWTKVISWETGAFVYHNFLVLTNPKQREDYDFYGKSGVSMYV

SEQ ID NO: 76517 - protein, 190 aa, Zea mays
  Coding DNA Sequence Number=SeqID_33142
  Gene Ontology: Mol. function=RNA-directed DNA polymerase activity; Cellular component=chromatin; Biological process=RNA-dependent DNA replication
  Homolog annotation: Hit_ID=Q2QQC0; Match level="QueryCoverage=54%, HitCoverage=5%, E-value=9e-09, Identity=33%"; Hit description =Retrotransposon protein, putative, Ty3-gypsy subclass
  Pfam annotation: Domain name=Retrotrans_gag; Domain location=31-102; Score=1.8; E_value=0.036; Accession=PF03732.8; Description =Retrotransposon gag protein
MACYFPLLQCGGLGMQFGSKTISTTQCNYPGIVASLTLESKTVSLCYVHNVYELMEEFMKLKQGGDTVTQYLNKFNHLSQYAIDQVNTDLKKRNCFMRGLNDRLQRKMATCLDLTYTRAVSTALAVEAKYAGPGKSKGYGGDRPNQGPEKRQSYVKVPILLYIDEKKVFEADLFQVSGHEFMIQTDPKRS

SEQ ID NO: 76518 - protein, 185 aa, Zea mays
  Coding DNA Sequence Number=SeqID_33143
  Gene Ontology: Mol. function=phosphoprotein phosphatase activity; Cellular component=cytoplasm; Biological process=protein amino acid dephosphorylation
  Homolog annotation: Hit_ID=P22198; Match level="QueryCoverage=32%, HitCoverage=18%, E-value=3e-25, Identity=96%"; Hit description =Serine/threonine-protein phosphatase PP1
MMDPALLDDVIRRLLEVKNIKPGKNAQLSESEIKQLCAAAKEIFLHQPNLLELEAPIKICGHNLIVVLTGFHAVALLYLMNSCSTIVSVIQKMIILSFMLHKMILVNLSMSYPEIPLAELPDEYQSHIFSSEQGDLALINWIKEIPCEPRVEVVLIDDAFVKRKWMECLFHPDAYLGDEGDHDNH

SEQ ID NO: 76519 - protein, 120 aa, Zea mays
  Coding DNA Sequence Number=SeqID_33144
  Subcellular localization annotation: CTP_CleavageSite=22; ConfidenceScore=5.03e-01
MPSPTRVSVASLPTAGAVLSCRAHRASRWPTHTRSTLHPKKPACAWEERVLDADKYAIMHCGVQEILHWMAPGTPQMFCRDEFIKVDISGVNKRVIRLSNVQNRWAQWLIDGHQTTVTNI

SEQ ID NO: 76520 - protein, 181 aa, Zea mays
  Coding DNA Sequence Number=SeqID_33145
  Gene Ontology: Mol. function=ATP binding; Cellular component=integral to membrane; Biological process=transport
  Homolog annotation: Hit_ID=A2ZV99; Match level="QueryCoverage=27%, HitCoverage=3%, E-value=4e-13, Identity=76%"; Hit description =Putative uncharacterized protein
MGATCVICLSINASSSGGQNVVGGKGRIPSCTCSGDNEWSYKEKIEFTTYFASEISEGLLFEMEDQIPSLAELVKFGSLLDFHQQCSERYRSNFFLLGSGSFATKFLNVVNLAALLSCREAIADVDVNYCNTLFFRMKMKHDTLNVGGPYMGALFFGGLMIMFNGLSELTLIVFKLSVFFK

SEQ ID NO: 76521 - protein, 249 aa, Zea mays
  Coding DNA Sequence Number=SeqID_33146
  Gene Ontology: Mol. function=protein binding; Cellular component =cytoskeleton; Biological process=regulation of actin filament polymerization
  Homolog annotation: Hit_ID=A7QTM3; Match level="QueryCoverage=71%, HitCoverage=96%, E-value=6e-70, Identity=74%"; Hit description =Chromosome chr11 scaffold_170, whole genome shotgun sequence
  Pfam annotation: Domain name=P21-Arc; Domain location=78-248; Score =366.0; E_value=6.3e-107; Accession=PF04062.5; Description=P21-ARC (ARP23 complex 21 kDa subunit)
MPDNPTGGGAYLQTSVMAANMRDYVEVVFKNAENLVQSWHIDGYAFWVVGYNLTTCFDALIQINDMVFYIQFLAYKVYHSSFADDDGITKACSCPLLPLKTHIKGPAPASDPDKADIVDEAITFFRANVFFKNFHVKCSADKLLIYLTFYINIALKRLEGCRTLAVGTKAIINLGLEKVPVPGEPGFPFPGLFTLPQSQEEAELLRNYLKQIREETSGRLLNCAYRANGFPNKWWLAFAKRKFMNIVIL

SEQ ID NO: 76522 - protein, 61 aa, Zea mays
  Coding DNA Sequence Number=SeqID_33147
MEHRPGLERLLEAAHLELDGKLFVNTQQAPTWRANCRRFETGGRKERIQVYNGGCSRVLRV

SEQ ID NO: 76523 - protein, 121 aa, Zea mays
  Coding DNA Sequence Number=SeqID_33148
  Gene Ontology: Mol. function=carboxyl- or carbamoyltransferase activity; Cellular component=ornithine carbamoyltransferase complex; Biological process=amino acid metabolic process
  Homolog annotation: Hit_ID=Q8SA97; Match level="QueryCoverage=68%, HitCoverage=23%, E-value=3e-10, Identity=45%"; Hit description =Ornithine carbamoyltransferase
MAPPVDVAGLRPRLGDVEAPPKPRSSPSPWVGRGGGYGAVLLSGRSVERRSDGGHFGSAGWGARVRIKLYADGGYQLRIRSLEDGWGGREDVGELKNRTVSMEEMIGARGRRLTIGAWLES

SEQ ID NO: 76524 - protein, 562 aa, Zea mays
  Coding DNA Sequence Number=SeqID_33149
  Gene Ontology: Mol. function=aspartic-type endopeptidase activity; Cellular component=anchored to membrane; Biological process=DNA integration
  Homolog annotation: Hit_ID=A2X2S4; Match level="QueryCoverage=87%, HitCoverage=92%, E-value=1e-171, Identity=60%"; Hit description =Putative uncharacterized protein
  Pfam annotation: Domain name=BBE; Domain location=462-520; Score =27.5; E_value=2.9e-05; Accession=PF08031.3; Description=Berberine and berberine like
  Pfam annotation: Domain name=FAD_binding_4; Domain location=90-233; Score=109.6; E_value=9.3e-30; Accession=PF01565.14; Description=FAD binding domain
  Pfam module annotation: Pfam domain module=BBE::FAD_binding_4; Domain location=462-520::90-233
MMSKTKAAVRPRSWHLPFLFLLLLAQTCSPQEQGGGGALHGSFVRCVARLSPATTDTSRLVHAPSAASYPSLLNATIQNLRFASPRTPRPALLLTPATVAEARACVTCCRRHGLTVRARSGGHDYEGLSYRSVAGARPFAVVDVAALRDVRVDAGRRVARAGPGATLGELYYAVTRESGGALGFPAGICPTVCVGGHLSGGGFGPMMRKHGLGADNVVDAEVVDAEGRLLDRAAMGEGLFWAIRGGGGGSFGVVVSWTVRLVPVPPVVSAFTVRRLVRRGDQRQTQAAVRLLTKWQRVAHALPEDLFVKVAMEPEVDDAGERHPSVTFKSLFLGNCSGMVAEMSAHLPELDVRAGDCREMSWIQSTLYFYGYTGEQAAEVLLDRSLQPKDYYKVKLDYLTSPIPAAGLGGLLARVVEDRGGSVDVDPQGGAMSETPESDTPYAHRRGYLYNVQYFVKWGGDANVSYEDAHLAWGPGPGAELEGETSYEAARAWGEMYFRGNFRRLAMVKAEVDPDQARVISEFCATSLFIRFSISLRHGTADIAVLPPMLCTEPTLKLQGVN

SEQ ID NO: 76525 - protein, 337 aa, Zea mays
  Coding DNA Sequence Number=SeqID_33150
  Gene Ontology: Mol. function=structural constituent of ribosome; Cellular component=ribonucleoprotein complex; Biological process =translation
  Homolog annotation: Hit_ID=P42795; Match level="QueryCoverage=58%, HitCoverage=97%, E-value=5e-79, Identity=79%"; Hit description=60S ribosomal protein L11-1
  Pfam annotation: Domain name=Ribosomal_L5; Domain location=142-195; Score=101.6; E_value=2.5e-27; Accession=PF00281.10; Description =Ribosomal protein L5
  Pfam annotation: Domain name=Ribosomal_L5_C; Domain location=199-317; Score=186.3; E_value=8e-53; Accession=PF00673.12; Description =ribosomal L5P family C-terminus
  Pfam module annotation: Pfam domain module=Ribosomal_L5::Ribosomal_L5_ C; Domain location=142-195::199-317
MMVEEASLLDYMKLRILRQEPNIRPELTKAQRPSHVPQKHKQAHGKPLTVPRAQTSQLGLLPFNLAPPPPYTSTHISTVVRRRRRTEGEEGTAVSSPPWYAASIPSPCYHSHLVSFLFLVRPVICEANSPGVPQAHEKKLSNPMREIKVQKLVLNISVGESGDRLTRAAKVLEQLSGQTPVFSKARYTVRSFGIRRNEKIACYVTVRGEKAMQLLESGLKVKEYELLRRNFSDTGCFGFGIQEHIDLGIKYGSVLLYENLSYGSGIHDTYDPSTGIYGMDFYVVLERAGYRVARRRRCKSRVGIQHRVTKEDSMKWFQVKYEGVILNKAQANTFPDV

SEQ ID NO: 76526 - protein, 112 aa, Zea mays
  Coding DNA Sequence Number=SeqID_33151
MCTLTIEEGDEEVWLIGVQQGDYMGKSKECASSQTPDRCMILPFDMAIRTKPNPVWSLDTYKLKVCVLNVDSLEASACSVVVRVVWRRRPLASGGGEEEVAIGSAGAWIIEE

SEQ ID NO: 76527 - protein, 67 aa, Zea mays
  Coding DNA Sequence Number=SeqID_33152
MAIRTKPNPVWSLDTYKLKVCVLNVDSLEASACSVAVRVVWRRRPLASGGGEEEVAIGSAGAWIIEE

SEQ ID NO: 76528 - protein, 156 aa, Zea mays
  Coding DNA Sequence Number=SeqID_33153
MARAAVDLRPVAAVAAALRSRHAVAAVPRPAVAAPDPEGERRQRPCAVAAVPRPVAANPLPRRAVAEVPRSASGPLYGQAAASPKPRGGGTSKAGEQATPVDVRVATTTHEARCSSERRHGRREMRAAMITRDILRSGVVFFSIIVFYAYHMYYLR

SEQ ID NO: 76529 - protein, 52 aa, Zea mays
  Coding DNA Sequence Number=SeqID_33154
HQHVKLLGLELLSGELHPALFGNLTSLLNSYVHNRALILKSCNIGSMHNRVY

SEQ ID NO: 76530 - protein, 132 aa, Zea mays
  Coding DNA Sequence Number=SeqID_33155
  Gene Ontology: Mol. function=binding; Cellular component=integral to membrane; Biological process=transport
  Homolog annotation: Hit_ID=O80414; Match level="QueryCoverage=43%, HitCoverage=15%, E-value=6e-21, Identity=79%"; Hit description =Mitochondrial phosphate transporter
KVPVPGEPGFPFPGLFTLPQSQEEADPPSYCLLGAPRPAKGTSSARSFAATGAAARLHASAPAPAAAGAGGAVPFSVQAPNEKIEMYSPAFYAACTAGGIASCGLTHMAVTPLDLVKCNMQVSGQRPRSVSP

SEQ ID NO: 76531 - protein, 67 aa, Zea mays
  Coding DNA Sequence Number=SeqID_33156
MVVVGALQREVGGGSALQRGAWAVVVRMEAGTRAGVRPIPGFKGKLPGIFLGKALFLLRWVKMRMEA

SEQ ID NO: 76532 - protein, 250 aa, Zea mays
  Coding DNA Sequence Number=SeqID_33157
MEVRCQTNFCQNEDGFPKLLKACTVRLGIRSQPEYDGREFIEHGTEKCVMTVYIGSSPHHVEWSVTTAGHRFKDTCQVVARKALRTLCQLYEEEVADTPLRFFPPFQRNRPVWMARMRALEGQQLLEDDPTIVYLTAYLLTLDAQYDFLARHHPQARVAALESREVIAVEALKQAKDEHVQKLMEAYLVTHNQRRALWIQRARFIPTLFNPSKLKDPQILEGHPVSTRGEKEGLGTPGRSHSLGRNSSLR

SEQ ID NO: 76533 - protein, 144 aa, Zea mays
  Coding DNA Sequence Number=SeqID_33158
MGKSNKRKREPTPPSEDFGDSEYSEEEFSSESEGSPAPVSPPASSDDSDDSQGIAAEVWTYIRAVERSGLEGSDESEFSSEEEDSDGGEGEDDDDDDDDDDDDDGDGSGGDSGGGDGSKGSTKGGSSVGSTRGGGGGSGSKASG

SEQ ID NO: 76534 - protein, 493 aa, Zea mays
  Coding DNA Sequence Number=SeqID_33159
  Gene Ontology: Mol. function=protein binding; Cellular component =nucleus; Biological process=negative regulation of ethylene mediated signaling pathway
  Homolog annotation: Hit_ID=A2X7Z8; Match level="QueryCoverage=91%, HitCoverage=39%, E-value=0.0, Identity=70%"; Hit description =Putative uncharacterized protein
  Pfam annotation: Domain name=F-box; Domain location=13-61; Score =17.1; E_value=0.068; Accession=PF00646.24; Description=F-box domain
  Pfam annotation: Domain name=LRR_1; Domain location=168-191; Score =8.1; E_value=9.6; Accession=PF00560.24; Description=Leucine Rich Repeat
  Pfam annotation: Domain name=LRR_1; Domain location=275-300; Score =7.1; E_value=15; Accession=PF00560.24; Description=Leucine Rich Repeat
  Pfam annotation: Domain name=LRR_1; Domain location=302-326; Score =6.2; E_value=22; Accession=PF00560.24; Description=Leucine Rich Repeat
  Pfam annotation: Domain name=LRR_1; Domain location=353-377; Score =0.7; E_value=2.2e+02; Accession=PF00560.24; Description=Leucine Rich Repeat
  Pfam annotation: Domain name=LRR_1; Domain location=379-407; Score =3.4; E_value=71; Accession=PF00560.24; Description=Leucine Rich Repeat
  Pfam module annotation: Pfam domain module=F-box::LRR_1::LRR_1::LRR _1::LRR_1::LRR_1; Domain location=13-61::168-191::275-300::302 -326::353-377::379-407
MAAAPQPPPLEADQTLALPDVLLLRVLACLPEPQLTGAASLVCRRWTRLAGRLRRRLAVRDWAFVAHRLPYRFPDLADLDLFPASIAAPTTAVPHGAAASPLLTCGVVSLTLDTSADPPLGACRFIDDDALDRGLAAVAASFPNLSRLSATAASESGGLMAIAVGCPTLQELELHRCTDLALRPVSAFAHLQILRIVAASPALYGTAEGGGVTDIGLTILAHGCKRLVKLELQGCEGSYDGIAAVGRCCAMLEELTIADHRMDGGWLAALAFCGNLKTLRLQSCSRIDDDPGPAEHLGACLTLESLQLHRCQLRDRSALHALFLVCEGAREIQFQNCWGLEDDMFALAGLCRRVKILLLEGCSLLTTRGLESVITSWGDLQSLEVVTCNKIKDEEITPTLAELFSNLKELKWRPDNKSLLAASLVGTGMGKKGRVFFKRLILPAHQRIKGKVLNNSAGFLCLLSANLISRNVALHRWGLALRMRGNGYPNTNT

SEQ ID NO: 76535 - protein, 174 aa, Zea mays
  Coding DNA Sequence Number=SeqID_33160
MAQRSQWEDMSFDGRGHHRQVNQVLEHADRVLEKNAKKVCRDAFSNARLQVVNAYMKRRGHFINNFRQYSDVYLTVDQYMESWFPQQAQQQPFVFPQFQSSMPQWGLHAPPPPPPPQGSGVMGHNTPPPVIPAPGGAYAGEGATPGENPNPLHDFVNEFFASEGSGHNSIDSNM

SEQ ID NO: 76536 - protein, 116 aa, Zea mays
  Coding DNA Sequence Number=SeqID_33161
MERWRGKEVYDIYIGTRKAEPGPEVRVDHGGWVRRWRTTGQCRIRRGLLQRPTELGVGMNLATGEDFGWAAVDQGHIAATRAPWLSVAARRTEPEPGIRVFSWGRSGSGVAHRQRS

SEQ ID NO: 76537 - protein, 120 aa, Zea mays
  Coding DNA Sequence Number=SeqID_33162
  Subcellular localization annotation: CTP_CleavageSite=53; ConfidenceScore=5.63e-01
MGSGAAPPSSVWAGVGAGVGHWSFAARVRSRWCQLGGSGVTRTTVISRRCPFVAANPPCAVAKLHPHLNAAPFNLTVVTDGSSDFDGRFPSMPPPWPAWSPGPRPSEGYEGEKTNREPLD

SEQ ID NO: 76538 - protein, 322 aa, Zea mays
  Coding DNA Sequence Number=SeqID_33163
  Homolog annotation: Hit_ID=Q5Z478; Match level="QueryCoverage=29%, HitCoverage=10%, E-value=1e-07, Identity=37%"; Hit description =Putative uncharacterized protein B1130E07.22
MASLVHPERYQTERRLDTSGKAKDHLGAYYFQSRADSAGAYISSVSGARIESLATGGLTSMHVVGDFLKRRIAPLQARARLSCWFTGSNDLGRVHRGPGTDLSWEELELLVKGITVAPTGESGSQQQVFAGLDAGDLTLPATIKAAPSGPQVPPATADAAPSGPQVPTAAVAAGSLGPQVPATTAEAVPSGPQAPVGDPIATTSPTATADPTTAAMLLNMPSATAEATGGAPDSIPPLVLEEPEVILRRQLQTGTGLETAPPPLPRVLSHAHQALQETEVVILREWEALETEHQRLGDWRTQLEERTKAASCQFALEQFELE

SEQ ID NO: 76539 - protein, 60 aa, Zea mays
  Coding DNA Sequence Number=SeqID_33164
MQAACNRAKWACPFDSNEPSMEVQAHASCNRRAGCYVVRERGIPRKGPFSVKETGSEPPY

SEQ ID NO: 76540 - protein, 142 aa, Zea mays
  Coding DNA Sequence Number=SeqID_33165
MGNSVWSSSINRAYEQQEILEMLEHSTEGYESTWSRLATVSSHRTVFLVDLGEIPNWGLLVSNWRHDLVGWVLDYLTDSTAHSIYRLWGRWPVNLELARWRPEKEEVTGGAIMAFTGVVVQRGSDSECLTKQLVTPRSWIFA

SEQ ID NO: 76541 - protein, 144 aa, Zea mays
  Coding DNA Sequence Number=SeqID_33166
  Subcellular localization annotation: CTP_CleavageSite=87; ConfidenceScore=5.93e-01
MGKSKKSGSSSHHSGDKRKREQSRPQRTLVTPSTRRRSSPPSPRGRQSTPLPRCRLMTRTIPRGSLPRCGCTSGPSSAPGSDESEISSDEEDSSGSSEEGSGGDSDEDDGSDGGDGDDSKGDGKGGSGKGGSGSGRASGKAPLA

SEQ ID NO: 76542 - protein, 121 aa, Zea mays
  Coding DNA Sequence Number=SeqID_33167
MAMMGSTSGKDVPLPGLMTEDPLTGHMPRHGQHTLESLSLSRVSLCNRFRIFVSPMICNVCVTGETLLGKVGLMTWEVPSHQPHREKNLSSGNLADEGTDAEIFDDITKPESGTGAACITR

SEQ ID NO: 76543 - protein, 149 aa, Zea mays
  Coding DNA Sequence Number=SeqID_33168
  Subcellular localization annotation: CTP_CleavageSite=27; ConfidenceScore=5.48e-01
MGKSKKGGSSSHHSGDKRKHEPTLPRRTSAIPNTQRRSFPLSLRGRQSTPHSWHRPMTRTIPKGSPPRCEHISGPSSAPGSRAWMSWRSPRTRRTPLTRPRRGAAMTVTARATATTEATTRAMAARAMARAATAAAGPVAKRHWLKILV

SEQ ID NO: 76544 - protein, 62 aa, Zea mays
  Coding DNA Sequence Number=SeqID_33169
  Subcellular localization annotation: CTP_CleavageSite=30; ConfidenceScore=5.24e-01
MGRDLGPNPTRYNGSYRPGTKGPFGRAYFSASALAHVAVTPAAVEGAATSMKNAATSVKGAA

SEQ ID NO: 76545 - protein, 76 aa, Zea mays
  Coding DNA Sequence Number=SeqID_33170
MGKYKKGPGSPRRSGDKRKHEPSPSSEDFGDSEYSEEEFSFESKGSLRFRGNDRVMLDTVSVSELTVEWCLILSAF

SEQ ID NO: 76546 - protein, 174 aa, Zea mays
  Coding DNA Sequence Number=SeqID_33171
MMTTSSWVGKSKPGCDLGPTLSFKDVHHPCWGGGQAEPALNLPCGSAACRSRRLGSRRPLLPEGGCRAVCTGGPPTMPRAARAAFVFWGGPAFALGWRPRAEAGAPLVWEDLSGDLPGGLVAPAISAEAEAAREVLVADGITATIRAPGPRFFVLVLAPRASAWARARLQQRPP

SEQ ID NO: 76547 - protein, 472 aa, Zea mays
  Coding DNA Sequence Number=SeqID_33172
  Gene Ontology: Mol. function=kinase activity; Cellular component =ornithine carbamoyltransferase complex; Biological process=amino acid metabolic process
  Homolog annotation: Hit_ID=Q6QP54; Match level="QueryCoverage=18%, HitCoverage=36%, E-value=9e-12, Identity=48%"; Hit description =Putative kinase
MALPVDVAGPRPRPGDVEAPPKLGSNLSSVAEAESEPLGRARQKSFGRGKGGVRSLGSGEAEFVVFRGRARVRALGSGGAEFAVFRVLARVRALGSGGAEFAVFRVLARVRALGSGGAEFAVFRVLARVRALGSGGAEFSLAPLARPDCLSDSLYRVALQSEWRRRRCPSVRPQLARWLRDAWAWASKLACQKSEKRVHLARLHAACMAARPSRPLVWAKVGGRFLVAPLRRWSPKTVTSSSWMGRGKPGCDPVPSIGRVRHPRWGGERGELGLYLLRGLANHLLFQLLVVAIVLPRCDGGVLQSCRGRRTVAVQLGCNIPPFPSRSRRGRQRGSAGALRSGPLFGFDGLFASLERDREQEPSGGRVHPGPWLLLQRSLASLPMFVPPQARGRSYPRGRNRSSVCDGTLNASVLCSLWLSRPEHRRSWLENGNLVDRSLAGLSASGSDAGVDQPRPRVGLAPLEDGWPRPRG

SEQ ID NO: 76548 - protein, 80 aa, Zea mays
  Coding DNA Sequence Number=SeqID_33173
MPTHRAIKYRASRPVLTSQAGGRRWYLGRWIPAGRLGLEAGASCGCSESEPLIWGPTDGSVPAIQPADRLWTVGYRSKGS

SEQ ID NO: 76549 - protein, 80 aa, Zea mays; identical to SEQ ID NO: 76548
  Coding DNA Sequence Number=SeqID_33174

SEQ ID NO: 76550 - protein, 105 aa, Zea mays
  Coding DNA Sequence Number=SeqID_33175
MSQLMGLVESTKITLDNRKDLVVNLSTKLVEKGLQVEQMATQIQELEDQVEARENTIEQQLEEANQHLDLHHQEIQDMEAEGADEDVDIEGGEESEPASSLDTAG

SEQ ID NO: 76551 - protein, 240 aa, Zea mays
  Coding DNA Sequence Number=SeqID_33176
TAIAAKSSRGPPYTDHSPTALAPFGYQDDLQMTRDLTAKRSNTDKHAAQSRSDGQDPIAYLRLPWAAARTHRAVEKSGHPPNGMGWLPEIDASVTPVATRGGQWRRIPCHGRIVPRDGFSRRRCNRCGGAVSCNKGEMGRRDHEALYLFSGAQVVADTAAKTPPEHHGPGELAKSVEPRRFCWERIADRRDPQRSEEERGERFTERGQASPGKWVPRRSGSARRGARETDRWGKGVGARV

SEQ ID NO: 76552 - protein, 113 aa, Zea mays
  Coding DNA Sequence Number=SeqID_33177
MMRDEKEVTWQWNEQCNKEEVELLHKLSERRKEAAEKYLSHFTVDRHQKIIRQWENLSYLRFRVLLATYTKHIGYKWVTLGPAIIWYADACVRVTITAAATRHATGSGHGRTI

SEQ ID NO: 76553 - protein, 96 aa, Zea mays
  Coding DNA Sequence Number=SeqID_33178
  Subcellular localization annotation: CTP_CleavageSite=71; ConfidenceScore=5.50e-01
MTTVVLSPLRKQGDVSRIPAAPSAALLQGSGTSPTTTLSHTQGSSTLRQPRWHVHRVINPTGRRVPDLSMRDDGGGKLVGERRWLPDYHNQDGVAP

SEQ ID NO: 76554 - protein, 194 aa, Zea mays
  Coding DNA Sequence Number=SeqID_33179
MTAVTGSTYEKKYLCQEGGELKARLAQLQLLILSEDLEEPCQTGESGGSAPHEDQDLELKNQELELCQTGPKNYLRKWEIVERDRAIDWAINSRSIALDCEATARARVEELSLALENLQAHNNNLHEEVHVLYDQLDPNVQPEVAAMGARTSGAASRGPYGELDLFGAPPSMNIAVDRSPEASSGAGAAKDMDK

SEQ ID NO: 76555 - protein, 61 aa, Zea mays
  Coding DNA Sequence Number=SeqID_33180
  Homolog annotation: Hit_ID=Q6QP51; Match level="QueryCoverage=90%, HitCoverage=25%, E-value=5e-22, Identity=90%"; Hit description =Putative growth-regulating factor 1
MPVGLCRRGRTDRSHFALSLTDLTGKQRRSTRSDCCASHPGKADNSKFSLGRNRKLRLARP

SEQ ID NO: 76556 - protein, 186 aa, Zea mays
  Coding DNA Sequence Number=SeqID_33181
  Subcellular localization annotation: CTP_CleavageSite=18; ConfidenceScore=5.43e-01
MPRQAKPMPPPAPIKPAKASTVSPRSLSTSPERQIIGTLYARRVSVKLTEPGIKLYLAGDTGSASPDFTRSPAYLDRAPQPEHTSPTSPTACARGPTDFGHHHRRVVPRRDRKDFLELTPPFAGPSSPPVSRAALFTSADYNLADGEYILVPEQGVAQEVAQEPAPEPAIEDLPAPALEGKPQFYA

SEQ ID NO: 76557 - protein, 916 aa, Zea mays
  Coding DNA Sequence Number=SeqID_33182
MPPSGASSEDTFGNVAAEELHPGDTVEFGVSWISSVRVQDMQQLGYFGSGVGRVPGAEEVHQLTPNAVVALVKYVWATTSYGGRPSVEGTVEDHPGLPVAVMCSHHYTAYPQFEVVEDNEDEGALWCAARMSSGRDLVEEFIGYGVWPLAHGWALGEVCPREMPCRGGKLVQSPAFALDLRGRDPAAFVREAEDGATRIVGRYVSRMEGLWSWDIRGSNDRLNREAVPATKERKLGTAVGKVGVSDGFAVELMGDMCGLRGKDVFARASGVFGMNAGVMTKDRQDAAQKRRAVIRMADPRCEVKRAWGSAKAVKPAAPGSNKSSAGAKTATAGGTKSPPVEAAKGRELPSPEKCVTDFGTNISVEDYFVGSGEGQMVVVPPSVATTLPSAELRARGTAQDPWAAFCASGEILTATAAKDVAGTMFQRLREASQRLSQQLSQRLSQQLSQQLSQAADFADRVASGVLTADVAAKVERLRPQHADAVREKSAAERKEERREANQAIAEAQAAQAETKVARTEGSLASQHTEEWEARFNALRGRMDKAKASTRSEVERTFAQFVSSYRELGARTADFEMPDQEAGLRFLEWLQEDLLILPTIMEGFMSFASLVTCEGAMNALSCEGCRQYEVFDQADESFEREIFKAEDLVVKQSAGALFDRMWGAHGREAIRERSDRAREQVKMEHAEDVEDFGSLVGAPPEAAEVNPVLPLDAGEGPSAVAVPAMAGGEDPVSAPAPTIEGALKVADEPPVEDPTTAAGPSQGFGPAHATATDNANFVAASTVVAEDVSDDSVSKFFEYDDSGGSVVWTEESSDEDLDYFAALDVVAVEASPRVVGAEVIPSASVGRRRRRAVAKRRVSEVEGSRLRVDGAGKRELLSSPAGISVGEGELRNVFEGEELRIMLFNYREMGIIPKVEP

SEQ ID NO: 76558 - protein, 47 aa, Zea mays
  Coding DNA Sequence Number=SeqID_33183
MSPRPPSSLRLEAHEYSGDRPGAWGHMRPYIEALGTQAPINTPVQCP

SEQ ID NO: 76559 - protein, 391 aa, Zea mays
  Coding DNA Sequence Number=SeqID_33184
MDKDHQDATRKRRAFTRVRDPSREVKKARGIVKSTAPGSSKPPPAAKPAAPGPSKPSSGARAVAPGSSKPPSAEPTQEQGPPSPLHTAEAAAGGADLSMDICVDDYRVGSVMMFDARTGRGLVVCCVYVIANLMDFSWQAAAFVEHVASGALTSEFTAEKQRLEGRIERLRTQHTEVVRDKSAAENKSRRLMEKLVAMEVEKEDLSCQLAAERKDANRAYTEAQAAHAEAKLACAEANLARQRAEEAETSHSSLRDRLDKAKASTRVEVNRTQAQLTDAYRQLGAGTAPFDASSKEVRLRFLGWLQDELEVLPTIVTGLMSFASLITCELAVNALSHEGCGHFEVFDRSDEDFERGIFQVEDPVLKRSVGHFMIGCGALTVVILSGRGQTG

SEQ ID NO: 76560 - protein, 78 aa, Zea mays
  Coding DNA Sequence Number=SeqID_33185
MELQSGHTVEFSTSRISSVRVQEMQQLGYFGDGVGRVPGAEEIPEPKGELVVFEAFFVAGLRLLAHRFVVEVLQRFDV

SEQ ID NO: 76561 - protein, 130 aa, Zea mays
  Coding DNA Sequence Number=SeqID_33186
  Subcellular localization annotation: CTP_CleavageSite=37; ConfidenceScore=5.39e-01
MSGAPEDSNSNSSPSGNSRGNSAIIHRTVRCTPDSVRCSKEERPQELASFRNSFQLLRYNSPDCPVYLRGNGYFGANGYLQRIYCAPARAEVRHAHAGAPDTLQYMSGAPPDIQAGPEVRAPTELCVPSD

SEQ ID NO: 76562 - protein, 77 aa, Zea mays
  Coding DNA Sequence Number=SeqID_33187
MPVHPARPLLRRAVPVLTVVTTDADADADARRGHAGPWLGVLERGRTSCLLFALAIGIMESKLHLVKALFRTPRANN

SEQ ID NO: 76563 - protein, 118 aa, Zea mays
  Coding DNA Sequence Number=SeqID_33188
  Homolog annotation: Hit_ID=A2Y331; Match level="QueryCoverage=88%, HitCoverage=21%, E-value=1e-18, Identity=46%"; Hit description =Putative uncharacterized protein
MAAMDVTKNNIKEALKAKPKLLTEVLACFEKIWEHQMEQKMYGTTLFLNLGNFFALREKDKRQTSRLRSMFNDVLWKMAVDDEEQSISKQADDYERSKGECFSKLGAIRDGERKNPSQ

SEQ ID NO: 76564 - protein, 74 aa, Zea mays
  Coding DNA Sequence Number=SeqID_33189
MDPELPAATMGDEQGTRGIHWEELMAGVEGARNGVGAANGTHGEHRGGSEQGGCPWIERTTITRVGWGSKFMFS

SEQ ID NO: 76565 - protein, 48 aa, Zea mays
  Coding DNA Sequence Number=SeqID_33190
MQVARNRTAEAHPSGFVASSMEAQAHTTSGVESSTQLKSSSAEKLSCS

SEQ ID NO: 76566 - protein, 270 aa, Zea mays
  Coding DNA Sequence Number=SeqID_33191
MVTTNLMGEASRATASAPPSASRIFIILAGDEGGGRKTSSSSAEEASSSHAGEGELLLPRQGAAFRPLSGRLWPAAPGVAQHVVRCEGGTHVLGRSRSRFCGENGSEDLPVRFGAADARWCGVGEQVTTVVGAEVVAAGEGFSADDIVSATCALGLQLFGFNGWFSSPTRGRERGPSSGSVRPGATTADVLPSETEVVAALLVQRSLASHPELVVPRALRCGGCSYPREWNRSSICNGTPRAGAFVKVPNRAKGVPACFVSVRPATLAEA

SEQ ID NO: 76567 - protein, 467 aa, Zea mays
  Coding DNA Sequence Number=SeqID_33192
  Homolog annotation: Hit_ID=A3B299; Match level="QueryCoverage=98%, HitCoverage=50%, E-value=1e-159, Identity=64%"; Hit description =Putative uncharacterized protein
  Subcellular localization annotation: CTP_CleavageSite=31; ConfidenceScore=5.04e-01
MKLILCLWEQSSSFQLVIVISCTSMSDLFVRLAKFSNLKKEGSSFAGRVVEPVLRLLNQNGLVAVWSTLFILMAYLFEFNHSMDEAIDLLRTVIKLYPSSVNRHYNKVESAIAAKIMSNVKPSENSPSLTYTVSMLQKFARTLALLPSVRVSEDSWSLMIRRILIVVNNLLNDAFIGLEEEKKGHDIMLLLVPPGTDPLPTLGDEVMPGGNVHIMKKFRVFTVPTISALTLCCSVMLTSYYPVQVNVPIHALIALMRRVLLVDGSLHNKLFPSTTSLHQELICFDLPSLHSTFLDLLNATIKGMRSQLLPHGASIIRLITEYFKIAKLPTLRTKTYSILQLLLTSMGVGTSLHLLEATVRNAVADLNDDGEINMTMINTNSSQLTNESSSKVYSKKRKQEPQMQNSTISGSEKVAISPRKRKGSSIPITSKGVAPESTGDVTLSTPHSVKIAALETLEVLLNVIFLI

SEQ ID NO: 76568 - protein, 596 aa, Zea mays
  Coding DNA Sequence Number=SeqID_33193
  Homolog annotation: Hit_ID=Q6JAD6; Match level="QueryCoverage=43%, HitCoverage=40%, E-value=2e-96, Identity=63%"; Hit description =Putative uncharacterized protein
  Subcellular localization annotation: CTP_CleavageSite=42; ConfidenceScore=5.07e-01
DIVRSIVFGGSLALQVCSRGSAERDSGSTGAGSSSTGAGSSSAGAGWAADAIYGFLFSGTSRHLDASTTPRIATSSGMGATGLPATGGISAISSVDGTATDGVGATTSGVASTTVPVDACRITVSNAQGSEGAANVQGFLVHGSGGSGHLPGGGGGSGQNSHSPQDDLACPCAYLLSCLDSLSREVSSTLVWMVRTKNVSAPGGGDDEDPPRPFRQVKGKTVYLEQQEGHKKRHCIESSSTRVSALLLRSLYTRHSYHSTSHFASSSRSRAIHHFSHTYHLHHSRFHYSSFYSHFRSIHSTSPLSVARRDRVVSTDSSASAPAIGSPCFSTSRQCRFQVWIEPDHQWMRFRFEQEDVTIHASQICQLFGFPESSTRLHILCYGTSDPPRRPHGGVAPATTHVTTLFRPPFTDGSRHSPADFTPAAKYLYQIMRRSLLPRMGYREATTHIQLWLLGALISHSEFDVVDFLICEIEDMILDGLHARRQLPYAHYLCYIFAQLIRPPQFQGTLEASRLQFGSYRPAPEDLVPGTVVPDDDDADDFGILPPPPVPPRSHDHEARSSSAAPVAPPVVDPALVAILHSLTQQQALIASEQAR

SEQ ID NO: 76569 - protein, 142 aa, Zea mays
  Coding DNA Sequence Number=SeqID_33194
MGKSKKGGGSSHHSGDKCKREPTPPSEDFGDSEYSEEEFSLESEGSPSLASPPTSSDDSDDSQGIAAEVWTYIRAIERAGLEDSDESKYSSDEENSSDSSEEGSGGDGGDGGGDSGQGGDGSGKGGSGDGGDGSKGSNKASG

SEQ ID NO: 76570 - protein, 62 aa, Zea mays
  Coding DNA Sequence Number=SeqID_33195
MAVGVSEALYAKAVSPDLLPVNRWGQLMFSGGHGCWSDLAVYLAPGWTVEWDPTSAEEEHEE

SEQ ID NO: 76571 - protein, 170 aa, Zea mays
  Coding DNA Sequence Number=SeqID_33196
  Homolog annotation: Hit_ID=Q6JAD6; Match level="QueryCoverage=92%, HitCoverage=43%, E-value=8e-23, Identity=56%"; Hit description =Putative uncharacterized protein
MSGGSPDSYCALSGVHRTGTVDCPTKNVSSSGGGDDEDPPCPFRERDETEVKPLDADPRMLDLQRATAARGAAVSSDCFESASAFGSTCFPVRHRSRLRGSPFLSARPPFTDGSRRSPADFTPVAKFLYELMRQFDVVDLFICEIEDTVLDGLRARRQLAYAHYLCHIFA

SEQ ID NO: 76572 - protein, 240 aa, Zea mays
  Coding DNA Sequence Number=SeqID_33197
MASLLPTASRMFIICAGEEGEPSRGSVFRMGWRSASSLSIWGRRALASLAEEVRFGRQSRRAQVRHTHGLSRAAGRTKEVVAATGVTVSATCRRASSSLALIASLSPPVGRRGRGPFRNDAHAEMIAAAGEPLGAKVVVAVGAEVVAVAGDPWMQRWSSPLVELSGASFQRDSCWCSVVHSCRNGARVPLPREPSCVFGPPGWWLQVLRHLPQGGGVCRLTGLVWGSQVRPDSLDGGSRY

SEQ ID NO: 76573 - protein, 139 aa, Zea mays
  Coding DNA Sequence Number=SeqID_33198
  Subcellular localization annotation: CTP_CleavageSite=61; ConfidenceScore=5.33e-01
MAPPPPCVPSALLHSPAVFLSMAGAQQLGSSALLPRGRDSAQSCEQEHAMAGSTPSMDAPSCSLRPALSIQRAPFSSMENQQRAPFLAVRHGARRLFDKMRSKPHATAALPFDLHSPRRVSSLSCSLRSPIRDAVENRG

SEQ ID NO: 76574 - protein, 197 aa, Zea mays
  Coding DNA Sequence Number=SeqID_33199
  Homolog annotation: Hit_ID=A0MMD1; Match level="QueryCoverage=65%, HitCoverage=88%, E-value=1e-14, Identity=42%"; Hit description =Putative uncharacterized protein
MGNPGRSRQLSTLVASAAILLSLSALPICWPYTYEQDGMQHPFLFVATVFPRFSIQQAIRVASPRASFVTALRSLGQNVDEAEARRFLEDAGVAAGAGDIDLAAFLAVAARKMGARQSEARLAKCFDVFDDACSGSIPAEQLRQVMLNYLLPEPFDPLADPETKKTIEIINMAEAIVDEVVTKLLTEAADKVLKEEE

SEQ ID NO: 76575 - protein, 36 aa, Zea mays
  Coding DNA Sequence Number=SeqID_33200
MGSRHSACSAEAECRGKEEGVEVDLQEFQDVDEFED

SEQ ID NO: 76576 - protein, 285 aa, Zea mays
  Coding DNA Sequence Number=SeqID_33201
  Homolog annotation: Hit_ID=A3CJ40; Match level="QueryCoverage=93%, HitCoverage=25%, E-value=1e-107, Identity=71%"; Hit description =Putative uncharacterized protein
MELSELHDGFIVQDALTIKAQVQVIREKIDRPFRCLDGQYRRELIRVYLSTVEQIYRRFIDEKRRMFSRLIEDKLGWSSFSGFWLAMDPSVRRHMTREKTETILKVVVKQFFIEKEVTSTLVFDSLYSGLKALEYQSNNKKGIPKITEADARSTPMVLIDQDMFVLADDALLLFERAALDTQSHQPLPKKDDKGSPNRTKDDTSSDEFDKDSIERDDRWLEELGCKTLELFAVTHIFSRAEAAYQEAMALQLQEELIREEASERAGTELKPKRRAADKKRRGKNM

SEQ ID NO: 76577 - protein, 102 aa, Zea mays
  Coding DNA Sequence Number=SeqID_33202
  Gene Ontology: Mol. function=catalytic activity
  Homolog annotation: Hit_ID=A3B342; Match level="QueryCoverage=58%, HitCoverage=18%, E-value=7e-14, Identity=63%"; Hit description =Putative uncharacterized protein
MAAHATVYDKLRRSRLLDVMYYLADEPGVHFVWQPSQESSVLVMSRVFDDYYIKDCGVISAPKVMQRRTGSNDHFVILITVGKENLLRGNRSLGGKGNILGV

SEQ ID NO: 76578 - protein, 77 aa, Zea mays
  Coding DNA Sequence Number=SeqID_33203
MPRNMVNRRLPSSRDLRRGLPFRLWWVQVRSLHDGQSGSVRHCSLEDMVAGVTWPSTLPPGWTVEWDPASAEEEHEE

SEQ ID NO: 76579 - protein, 239 aa, Zea mays
  Coding DNA Sequence Number=SeqID_33204
MTSHGSSDDGNALTHTDGLAREGFPRILWEVLQGAGYATPPQYAVQQFEKHRVPRCRVRMTLEPHPLQPGWRSLDSESFGYRAEDTIEAIALHGLTTFCGFHPLELATHPIGLFPAEKEDDPMWKDRVEHAKDIWAIYPGQTAHLIVRCMNALYRLQELEELVGTRENTIEVLEDQLINTQQQLAEANEHLDMHHQEIQDQEANEDVDIEGGDEPASSVDTAGSGRPPSPESSVASFTH

SEQ ID NO: 76580 - protein, 130 aa, Zea mays
  Coding DNA Sequence Number=SeqID_33205
MGKSKKGGSSSHHSDDKRKCEPSPPSEDFGDSEYSKEEFSESEGSPAYASPPGIAAEVWTYIRAVERFGLEGLDESEISSDEEDSSDSSEEGSGGDGDDEGDDGDKGDGGSGKDDGGSGSGRASGKASLA

SEQ ID NO: 76581 - protein, 810 aa, Zea mays
  Coding DNA Sequence Number=SeqID_33206
  Gene Ontology: Cellular component=exocyst; Biological process=vesicle docking during exocytosis
  Homolog annotation: Hit_ID=A7Q0F3; Match level="QueryCoverage=100%, HitCoverage=99%, E-value=0.0, Identity=55%"; Hit description =Chromosome chr7 scaffold_42, whole genome shotgun sequence
  Pfam annotation: Domain name=Sec15; Domain location=464-810; Score =38.4; E_value=1.9e-11; Accession=PF04091.3; Description=Exocyst complex subunit Sec15-like
MRRKLPGDAPLSAAGPGHALSASAPSEVDLAQLSAAIAAGEDLGPFVRRAFACGRPEPLLVFFLGAARDREAEIEELCRAHFHDFIRAVDDLRSLLADADALKGSLSASHSALLSSAAPLLASLESFLAARSLAGNLSSALASSRRCVRLLALAARANAHLQAGNHGLYLALRAVDAIDRDLASGPEPLPLPTLRRMLLSVVPAVRAHAEREISREFSDWMVSIRAASRHLGQVAISRSAAARQRQEELRSKHRPLEECITLDDDGVGDLDDFAAAAATAEAADGAAAASFDLTPLYRAMHIHQTLALGERFKKYYLENRKLQLTSDFDVIAATPFLESHQVFFSQIAGFFIVEDRVFRTGGGLTSRPDVDALWDAAVGKMVSVMEDNFSRMQTANHLLLITDYAALLSATMRRYGYPVGMLLDVLAKHRDKYHDLLLADCRRQVAEALTADKFDQMLMRKEYEYSMNVLAFGIQSSDITPAFPYVAPFSCTVPDICRIVRSFIEDSVSFMAHGGGGDTYAAVKKYLGRILSEVVDASIKKLLDSGSGLSVSQAMQVAANMSVMERACEFFTRHAAQLCGVPLRAVERGRRDFPLRRSRDAAEALLLRLLRAKVDEFMRQSDGINWMADDSPPGGNEYANEVIIYLETLTSTAQQILPLPVLHRVLVAVLAHISERIIELFLNDSVKRFNANAVTGIDTDLKMFETFAEGMSSLFVDSGQESAKNEMKAALVEARQLVNLLMSNSPENFLNPVIREKSYNKLDYRKVAIISEKFRDTSESYFSTFGTRGARQNPKKKSLDTLIKRLREAS

SEQ ID NO: 76582 - protein, 74 aa, Zea mays
  Coding DNA Sequence Number=SeqID_33207
MAQWVRVLSRGELTGDDLTAVKSHGDATEVFGYVAQGREAAVHRRAYLLQPQSRGVRRAKTLEFESYKAQKLSP

SEQ ID NO: 76583 - protein, 108 aa, Zea mays
  Coding DNA Sequence Number=SeqID_33208
  Subcellular localization annotation: CTP_CleavageSite=45; ConfidenceScore=5.46e-01
MSPPLRHSFSVKGVGAGTPYSSDTNPDIDSRNGYCMSTRTFHSMRAPSFSTSSDVPFVLPAFALFFLPNLLPPPMVTVASRPRLVDAGTGRVGIAPSLSSCVPPRRTR

SEQ ID NO: 76584 - protein, 271 aa, Zea mays
  Coding DNA Sequence Number=SeqID_33209
  Homolog annotation: Hit_ID=Q6QP54; Match level="QueryCoverage=26%, HitCoverage=19%, E-value=4e-07, Identity=50%"; Hit description =Putative kinase
MGHELKALETEHRPGLERLLVTTHLELDGKLFVNTQQAPTWRANCRRFDPGGVESEPWGRARRSPSSEVEAESEPWGRARRSPSSEVEAESEPWGRARRRPSSKVEVESEPWGRARRRPSSEVEVESEPWGRARRRPSFRVEAESEPWGRARRRPSSGVEAESEPWGRARRSFLWRPRLDLAAVSLTLAGGTAVGAGQAVLFSCQAILALNAPAIRSIGVAIWPRLLLREACPSWASGESKLCADGGYQLRLGVLGVPLIMVPDRIVSYSP

SEQ ID NO: 76585 - protein, 163 aa, Zea mays
  Coding DNA Sequence Number=SeqID_33210
  Subcellular localization annotation: CTP_CleavageSite=59; ConfidenceScore=5.87e-01
MAPPHFQPPSSAQQPSAQLLPSAAMASSPSSRPLLSTASYSREPSSKLPRRSSSTPPCSSSTQVGALSLAVLSVAPLLAVPLTLAHRRPGKLPHGARLPVPWSPVVAPFFPLWLRSSAPSMAPPAPSSTRSSRQSPFVAHARSIQDRSGEPRACITQIRSRSG

SEQ ID NO: 76586 - protein, 189 aa, Zea mays
  Coding DNA Sequence Number=SeqID_33211
  Subcellular localization annotation: CTP_CleavageSite=63; ConfidenceScore=5.55e-01
MQGHSVPTHINRPHRFPVSRSGLTALSYNAPLTPTGRRAVTALVPTITGMGDLVSGRVRGYVHCQVHSALAVRKPGKVSGLQEQRRFAEGLRSEGRWGELLLCARRDLGEGDAAQGAGKSRPRPWEKWSCAFAEHLQRVEEGAGGAMEGAEERSHKGKKGATTGHHGTGSRAPWGSLPGRLCASVRGTA

SEQ ID NO: 76587 - protein, 353 aa, Zea mays
  Coding DNA Sequence Number=SeqID_33212
MKASKKAAQLLRREQAGLTSTDVAAPRASRHERVGTAPPPLQAAPPQVEGYHHQQQIMSPPHLACVATHGWARALPPCSPVARTRSTSTMLPASRCAGVPPRSPAARASPPRHLGVRASERIVAASSPSRHTGARVCYRRHHPGGRQARPPPPMENKDRGKRKKAQLARSPLRPTCSSYRAPSSIAQTGTLARPTSPRPCHSSHARTRHATLCAPAASPAANYAHVAHVVRTRGCSWPCSPRCSYSPSNHPSEPRTSLSSVQFSLIFLLHALATERLPRCSCAACPASRATVACRSGEPRQRAPTASPAAFSPPSPRRASQPVPLPAGEPLCGRKPGMAEEGRCRSLCGSLAT

SEQ ID NO: 76588 - protein, 51 aa, Zea mays
  Coding DNA Sequence Number=SeqID_33213
MAIPHSHMLVAMAPLRFARSLEQSEEPKLPNASDLGPAAPWRSITLGQMQL

SEQ ID NO: 76589 - protein, 162 aa, Zea mays
  Coding DNA Sequence Number=SeqID_33214
  Gene Ontology: Mol. function=nucleotide binding; Biological process =defense response
  Homolog annotation: Hit_ID=Q8S453; Match level="QueryCoverage=41%, HitCoverage=5%, E-value=2e-21, Identity=76%"; Hit description=Rust resistance-like protein RP1-4
MGPLSRTKDNRGGGSPTIGVGNDASRRSAERHDRILALRVSNILPNPYLGKGARVKNRLANNVHVAKFLEVYMSVPQRAKKSANGRTASIALPKFELVIQAAQKSPHRGMPEAWLRCLKEAFYDAEDLLDEHEYNVLKGTSRSQKGPLLGEDVKAPPFQLLS

SEQ ID NO: 76590 - protein, 138 aa, Zea mays
  Coding DNA Sequence Number=SeqID_33215
MGSTSEKMYLCQVPNFGFEIIKLRPGGWLARERSLGVVSPSESIKDRVDVGLLTEDPLTGHMPRHGIHFSKHFCKTESLIIEKPYLDSLISSIPLRVFSLVGWYQRKNARNEVREERILHLGLLCKNLSGGVFASLGM

SEQ ID NO: 76591 - protein, 74 aa, Zea mays; identical to SEQ ID NO: 76582
  Coding DNA Sequence Number=SeqID_33216

SEQ ID NO: 76592 - protein, 140 aa, Zea mays
  Coding DNA Sequence Number=SeqID_33217
  Subcellular localization annotation: CTP_CleavageSite=44; ConfidenceScore=5.11e-01
MVQGLNKIKFSAPPPVISAPRSSLTLRFVRLGVRITVNGEKIVRLDDLGALLALSPYSLAPATWQRDRCHRATVSRGCAMLSVVSPRRRKLCSFASVGPIPERQPRNGNGEMARVACTLRGTRLDGGVSVLSVGVNPFWS

SEQ ID NO: 76593 - protein, 118 aa, Zea mays
  Coding DNA Sequence Number=SeqID_33218
MKAKSHHQPNQGGLTALAYNAPLTLAAAVQWPHLYPPYLEWETQSQVAAAGRTEQRDGVAGQEIDDDEVELAAGERELGCRERLAGMEDEGGACSCTRLGAESLLEAARQGSLLPGRG

SEQ ID NO: 76594 - protein, 229 aa, Zea mays
  Coding DNA Sequence Number=SeqID_33219
MRWSLLLGRGSSAAGRGWRAWEMKGAPAPAQGWASSLCWKQPGRGACCREGGDERSHSSAREGAWLAVVVRESGGRRGEEGSRAGGLPFKEASPAAIGRDGRPAELWYLRTRSEPQYEEVRRMRRLAQNRSYAQGTFGVISEKGNRLKREKAIQTSMDYYRVISKSFENKSPTLAPTSGELFSTTFDSIDLRHATEESFSDRGCRSAAAGPEPGDPFSSRSPKPEKEGH

SEQ ID NO: 76595 - protein, 73 aa, Zea mays
  Coding DNA Sequence Number=SeqID_33220
MTKICPSNPKLRSSENLRNKATVGKQELRNQAKQSRRIKCARGTIWGSIQQPSWIAQPMAAPVQPPTSLIIFS

SEQ ID NO: 76596 - protein, 137 aa, Zea mays
  Coding DNA Sequence Number=SeqID_33221
MEICRIELGFKWVKATGCWGRLEESPQQTNSRSSSWAPSRFYQQAEWEANGREDSEARKQELGHGKQRRLKAQHLWDILEPDTVSKSAQSAPDGYFQNTGVPHDHPAVISIAPVRHLITRLSSSKWPTQPAITQCYL

SEQ ID NO: 76597 - protein, 139 aa, Zea mays
  Coding DNA Sequence Number=SeqID_33222
MDQGGALLGRSDGGAEGEKGIRQGQREAPASLRKKKGMRERRHGCWRNQGAMVGAEVPVPMEQGGSAMGKLGLEPWSREGSSLVGYPVPWEERETPGSSTNEVVGRPRRHPTVERHGGAGDGVGKSGRVAAVWETRKKM

SEQ ID NO: 76598 - protein, 341 aa, Zea mays
  Coding DNA Sequence Number=SeqID_33223
MNMCELTLAVSHPPQEKNMWFKRSHSEEFDSIKRNWGVVRFVVVPLMGLGVCGSLCQGGDEDDVYDYGNGKWYSFRLERQEIESVRSCSPMLPLEAPPAPPLSAPAAGVAAGGDQDDEEELELEGWVARPITRDAAHGYHFHDTLDTLLRQALDRRTWSIEYHCVVFQHSHEVYPDRWEATWLVRRPENSLRGVEVCSEHYSISERDSAEAVMQDAARRALSHYCSVLGGVADGLNLRYYTRCPSGSTGGVVVSPVGEDNPRLSSTVNLAAVLNTELDHALDEPSRACVEIALLRAERAEHRHLEDGSPAPIGTQHPYRSPQRGHHAYGNPDCSTKINLES

SEQ ID NO: 76599 - protein, 130 aa, Zea mays
  Coding DNA Sequence Number=SeqID_33224
  Subcellular localization annotation: CTP_CleavageSite=40; ConfidenceScore=5.50e-01
MAQCRGDLARIKQTACRRRWYVTMPSCSSSSSSARASPTMSSSEKTLSDSSVVDLQLGHIVEFGISRIFSGRMLEMQRLGYFGSGVGRAPGAEYVPKPEGELVVFEAFFDAGLHLPAHRFVVEVLLRSKL

SEQ ID NO: 76600 - protein, 24 aa, Zea mays
  Coding DNA Sequence Number=SeqID_33225
MVVMGSTSKKKYLFQVDPKQEDEN

SEQ ID NO: 76601 - protein, 577 aa, Zea mays
  Coding DNA Sequence Number=SeqID_33226
  Subcellular localization annotation: CTP_CleavageSite=25; ConfidenceScore=5.07e-01
MFDAQTGLSPAGVESGQLAVVPSVSAAGLVVVAKGAMATDDAGTSTDPWLRFCAVAGVTAFAEQVASGVLTLAVCFREEAARVEAETARKRAADMELELRNICSHRVNKESSTRAGVERAHTLVVDPYPELGTLTAPFDQSGEEVGLRFLWWLQEELELLPSITMGLMSYVSLITCEGATNALSREGCRHFEFFDRANEDFDHGVFQIEDDVLKRSVGSFMIGCGVPMAMASSGRGRTERWRRYIVGLEKEAGAEGHTTPPGGAAEDPAAAAASAQDGELGSPFSWVDESSEDDLDYFAALELAALEFPLRFAPHEVLPPAPSPRPPSSPSQPLALPLTPCPGAERPSARATRAPCPAVHLRSSMVLRPTPVAPHPSRAPPRPDPGRRSRAAPHPATRDPTQAAEAELRPTRPCPTSTLSSSLRSATSSCAATRVSFRRLGCLCPTALLRLPPVVAPMAAMDDTTTTTIGPGTQLPVAPAAISSELAHGGPPYIAGLGPLHAAPPLTIRRGSPSCFPTLASPTWSHTVVPFALPTTDSPLVDTLATIQAAVTASRERERVASLALERERALGAALTT

SEQ ID NO: 76602 - protein, 127 aa, Zea mays
  Coding DNA Sequence Number=SeqID_33227
MECARDSCCIAGDRGTRQAIDWAVNSRSIAWDCEATTRARVVELSVALENMQAYYNTLHEEVHVLYDQLHPNVPPEVAGMGARTSRAAGGEPYGELDLFGAPPSMNLADDRSPEAGNGAGAAKDEDN

SEQ ID NO: 76603 - protein, 191 aa, Zea mays
  Coding DNA Sequence Number=SeqID_33228
MAHTKTTQRKSTGPQGVPQHQLASRHEGSSSGSNDPIGDLEARVDHLRSKLRHGCREHARDSRRIAELSAEVNRLQYEISERDTAIDWAVNSHSFAWDCEAKALARVAELSASLKNLQAYCNTLHEEVHLLYDRLHPNVPPDVVAMGVGPSITTNGGSNGGIDLFGAPSSMNLADERSPEVGSRTTKDGED

SEQ ID NO: 76604 - protein, 147 aa, Zea mays
  Coding DNA Sequence Number=SeqID_33229
MAGGGACFPRRTPVISGSGGALGAQVHMTKASGALIGKGEAQARGAGRPCAGRALPQQVRARPHLSGLDLGFARYKGGEVGFVARLKTETKVESKHVKLFLFDFKLCQSMFKQSQGYSRMELTYYSASSSEFPWTGRLLSQIHSGFL

SEQ ID NO: 76605 - protein, 113 aa, Zea mays
  Coding DNA Sequence Number=SeqID_33230
MASFPPPLLLPQASRRLPLPLPYSLGAELQASMAVELLPWLGLCPSALCPSSLNAGAPCFLPPGRAPSGMAEGNLLPLGSPIRAPKQCPSLLHFPSAPYADLHLVIALLTENL

SEQ ID NO: 76606 - protein, 273 aa, Zea mays
  Coding DNA Sequence Number=SeqID_33231
MVTSSLMVGESESGCGLCPSLSLKDFHHQGWGGDCTVLGSRTRVASEPLAAPASATAAGRGSSAGEIAQAGHGPTSNSTAFCPSLPHKFGHGRGPPGSSIRPEVSAAAVRPPGAEVVVVAAAGVGDGAPFVGLLLLRMPTPIEWGYSPVDYLNRFTKHESPRVKVTSEPGCPLAGPTPELISRGLGSGWRPWKMVGRGPRGNRPSRLLGPDSRRSPWQRLSGRDDDVVLQSGDPWTASPSEARSDLAEGVVDAEGATAPFQREDPSLQDQSVL

SEQ ID NO: 76607 - protein, 1266 aa, Zea mays
  Coding DNA Sequence Number=SeqID_33232
  Gene Ontology: Mol. function=mismatched DNA binding; Cellular component=MutSalpha complex; Biological process=mismatch repair
  Homolog annotation: Hit_ID=Q9XGD0; Match level="QueryCoverage=94%, HitCoverage=97%, E-value=0.0, Identity=94%"; Hit description=MUS2 protein
  Pfam annotation: Domain name=MutS_I; Domain location=399-553; Score =131.1; E_value=3.2e-36; Accession=PF01624.11; Description=MutS domain I
  Pfam annotation: Domain name=MutS_II; Domain location=558-719; Score =43.0; E_value=1e-09; Accession=PF05188.8; Description=MutS domain II
  Pfam annotation: Domain name=MutS_III; Domain location=727-955; Score= 95.9; E_value=1.2e-25; Accession=PF05192.9; Description=MutS domain III
  Pfam annotation: Domain name=MutS_V; Domain location=960-1207; Score =467.4; E_value=1.8e-137; Accession=PF00488.12; Description=MutS domain V
  Pfam module annotation: Pfam domain module=MutS_I::MutS_II::MutS _III::MutS_V; Domain location=399-553::558-719::727-955::960-1207
MEPRRRQQQQSILSFLQKQPPSWRDPSGEGTPPEKPPRPPMGSVAGIMERLVRPPPPPQASHGWARNQYDSQVRHSEGKNLPVENQVLSNECLGALFSRPIYGEHSRTILSPEGGADMSPSQEPQKHSLRSSTDESTRATKEVILEHPKKLFSESHTNCIHATALNENFGVQTPSQVASKKIFPGLAHGADTPLTGYGSEQTLLQHSSKKFSLVSANGKYTRAAVTPFEQNSNNTRAEELSKMRSGSSDMLYLKPTNLSAELETNGTPLKNHSKNSSLLMDGKYNITSAALFPELDSSPLKPETPAMQAAIPRLKRVQEDQGVDANNQCPPLWAMNKKMKSAHCSIEKKDHDEMAGSARSKFEWLNSFAIRDANKRRPNDPLYDKSTLFIPPDALRKMSTSQKQYWNIKCKYMDVVLFFKVGKFYELYELDAEIGQKELDWKMTVSGVGKCRQVRNTIICLQALHLPLDLGFVGRGQCLDKSGTRVVGVWEATVGISESGIDDAVDKLIARGYKVGRIEQMESANQAKARGVHSVIERKLVHVSTPSTAVDNIGTDAVHLLALKEVTLASSGFQVFGFAFLDYAALKIWVGSVQDDDSSAALGALLMQVSPRELIYETSGANSYSLLSGISKETQRTIRKYASAGSVKMQLTPLSGIDFSDAAQIRNLIHSKGFFNASTESWLSALDCTMNQDVVICALGGLIGHLTRLMLHDALKNGEVLPYHVYKTCLRMDGQTLVNLEIFSNNFNGGSSGTLYKHLNHCVTASGKRMLRRWICHPLKDIDAINKRLDVVEGFIQNCGLGPTTLGYLQKIPDLERLLGQVRSTVGLSSLLQLPFIGEKIIKKRIKTFIMLINGLRNGIDLLNDLQRADHGILALYKIVDIPSLSYLPELIHKFEERMQNEFPCGQVSDVNANGANDLAALMDVFIGKASEWSLVINAVSTIDVLRSFAAMTLSSFGAMCRPQVLLKDDVPVLRMKGLWHPYAFAGNANSLVPNDLTLGQDLSGLNRFALLLTGPNMGGKSTIMRATCLAVVLAQLGCYVPCTSCELTLADSIFTRLGATDRIMTGESTFLVECTETASVLQKATVDSLVLLDELGRGTSTFDGYAIAYAVFRHLVERVRCRQLFATHYHSLTKEFASHPHVSLQHMACMFKPRSDGNGQKELTFLYRLTSGACPESYGLQVAAMAGIPKSIVEKASVAGQVMRAKIAGNFKSSEQRAEFSTLHEEWLRAALAVSAMDGQPDDDDVMDTLFCIQQELKSHFRKAR

SEQ ID NO: 76608 - protein, 192 aa, Zea mays
  Coding DNA Sequence Number=SeqID_33233
  Gene Ontology: Mol. function=DNA-directed RNA polymerase activity; Cellular component=DNA-directed RNA polymerase II, core complex; Biological process=transcription
  Homolog annotation: Hit_ID=A3BPR9; Match level="QueryCoverage=47%, HitCoverage=6%, E-value=1e-32, Identity=78%"; Hit description=DNA -directed RNA polymerase
MKMVAEFKAPKKKTDDQDQLPEPVERKQILSDERRISDEDCLLLGLNPKYVRPHWMILQVLPDPPPHVRPSVMMDTISRSEQVLWSTEQLSDWFVGDDGYKLVQYVLVVVEQGETFVRALEEAVPEDEKLKDSDHESGLKDAKMVDHNRISATALEGDLKDINMTNDDKPGESIESAQGKPSQTSEPVGTAT

SEQ ID NO: 76609 - protein, 78 aa, Zea mays
  Coding DNA Sequence Number=SeqID_33234
MDGADVGEEVMRIGQGLWVGMGRGNMVAEVAMDALVCRVAVAAGRGREGTMVVVAGGRLARGLGMVEVGNAAVFVFLW

SEQ ID NO: 76610 - protein, 586 aa, Zea mays
  Coding DNA Sequence Number=SeqID_33235
  Gene Ontology: Mol. function=actin binding; Cellular component=cell outer membrane; Biological process=defense response
  Homolog annotation: Hit_ID=A2WLD9; Match level="QueryCoverage=100%, HitCoverage=72%, E-value=0.0, Identity=68%"; Hit description =Putative uncharacterized protein
  Pfam annotation: Domain name=Filament; Domain location=64-395; Score=- 190.0; E_value=0.049; Accession=PF00038.12; Description=Intermediate filament protein
  Pfam annotation: Domain name=M; Domain location=193-213; Score=1.2; E_ value=92; Accession=PF02370.7; Description=M protein repeat
  Pfam annotation: Domain name=M; Domain location=232-252; Score=1.5; E_ value=84; Accession=PF02370.7; Description=M protein repeat
  Pfam annotation: Domain name=M; Domain location=257-277; Score=6.0; E_ value=21; Accession=PF02370.7; Description=M protein repeat
  Pfam annotation: Domain name=M; Domain location=387-407; Score=9.2; E_ value=7.8; Accession=PF02370.7; Description=M protein repeat
  Pfam annotation: Domain name=M; Domain location=425-445; Score=3.3; E_ value=48; Accession=PF02370.7; Description=M protein repeat
  Pfam annotation: Domain name=Pox_A_type_inc; Domain location=102-124; Score=8.3; E_value=5.1; Accession=PF04508.3; Description=Viral A-type inclusion protein repeat
  Pfam annotation: Domain name=Pox_A_type_inc; Domain location=151-173; Score=3.6; E_value=25; Accession=PF04508.3; Description=Viral A-type inclusion protein repeat
  Pfam annotation: Domain name=Pox_A_type_inc; Domain location=274-296; Score=4.1; E_value=21; Accession=PF04508.3; Description=Viral A-type inclusion protein repeat
  Pfam annotation: Domain name=Pox_A_type_inc; Domain location=302-324; Score=1.7; E_value=47; Accession=PF04508.3; Description=Viral A-type inclusion protein repeat
  Pfam annotation: Domain name=Pox_A_type_inc; Domain location=397-419; Score=4.4; E_value=19; Accession=PF04508.3; Description=Viral A-type inclusion protein repeat
  Pfam annotation: Domain name=Pox_A_type_inc; Domain location=516-538; Score=3.0; E_value=31; Accession=PF04508.3; Description=Viral A-type inclusion protein repeat
  Pfam module annotation: Pfam domain module=Filament::M::M::M::M::M::Po x_A_type_inc::Pox_A_type_inc::Pox_A_type_inc::Pox_A_type_inc::Pox_A _type_inc::Pox_A_type_inc; Domain location=64-395::193-213::232 -252::257-277::...
  Pfam module annotation: Domain location=387-407::425-445::102 -124::151-173::274-296::302-324::397-419::516-538
MESKLAENEAALSLMRDNYEKRLLEQQAAQKKQSMKFQEQEVSLSGQLASATKTLTSLSEEFRKEKKLAEELRDEIQRLESSITQAGIDNDVLETKLEEKLGEINFLQEKVSLLNQEIDDKEKHIRELSASLSSKEVDYQKLTAFTNQTKKSLELANSRVQQLEEELSTTKNALVSKISSIDSLNAKLETLNSEKEEADKKINELIQEYTDLKVASETRASHDSKLLSERDDLIKQLEEKLSVALTDSSKDQETIVELNKELDATKMMLKNELKSMEALKDSIRSSEEALKTSRSEVSKLSKELEEANELNEDLVSQISKLREESNEMQVDLTNKLGEAESLSKALSEDLASVNEMVQKGQEELEATSIELASIAEARDNLKKELLDAYKNLESTTHELVEERKIVTALNKELEALAKQLQVDSEARKSLESDLEEATKSLDEMNNSALLLSKELESTHSRSATLESEKEMLRKALAEQTKITTEAKENTEDAQNLITRLETEKESFELRCRHLEEELALAKGEILRLRRQISTNSSQKPRARGPPEASETLKEQPVNDYNQKTSGVVAGTPQPVKRTVRRRKGGA

SEQ ID NO: 76611 - protein, 249 aa, Zea mays
  Coding DNA Sequence Number=SeqID_33236
MAVTYTYKNSDGLDMIRECGAAHTGQGGTRLEPGAYRGLRCNCSEVVVEVATLDVLSALTRALQGDAGILVCTPTVEFCPQVLSRAALTEGKCIDADTSCWRRDDRGLGLVELECAMLSRQSTSSRHCFMAPGEAVKLGGWRNNSLAADSAPGVALDSLDVCAGVCCRAECTAAAPGTGRLVARGVEEAASSSTKKSLGKESWCSTMWTMASSRKTSEYLKPSPPTWRAKCRRGKTPAGWRNAPTLILR

SEQ ID NO: 76612 - protein, 243 aa, Zea mays
  Coding DNA Sequence Number=SeqID_33237
MVYRLLGWDAPAFGGRICAGTFHPGARPCGSGALPSVLGFKDVRQPRGGEERAEPRLHLPHGLRWLPPLVRLPGAEVVASAGEPLGAEVAATAGEPSVQRWSPPLTNIPKKELAMVPKRPTVQDQAERLHGSGPPQETNFRVRDQAKWPHRLQTTPWNGLPFFRTGPQAVGPSCFRREVLNCKLGCSIRMSSYQQAGLMRADLTGLAYTDAPVVRKRYSFNRSKIVTSGSAYSRHLVGSFPAG

SEQ ID NO: 76613 - protein, 205 aa, Zea mays
  Coding DNA Sequence Number=SeqID_33238
  Gene Ontology: Mol. function=microtubule motor activity; Cellular component=microtubule associated complex; Biological process =microtubule-based movement
  Homolog annotation: Hit_ID=Q2QM62; Match level="QueryCoverage=29%, HitCoverage=6%, E-value=7e-19, Identity=75%"; Hit description =Kinesin motor protein, putative, expressed
MPTRRGTAAPERLRCCANADTGHRPHKASRAEHRALGCATASSHRARAGRAPHHEPSWLSWALSRGIDPESFIDEDNDESYEDVGTEDVEQIHMVALEIFLICEAVVGPTNPYLFQFICAAPVHYLWSVIERRLLSEQNIYLMKVYNEQIIVSVLKVYNEQIHDLLLTGSQPGATTKGLEVRQVGEGAHHVPGLVKARVANINEA

SEQ ID NO: 76614 - protein, 299 aa, Zea mays
  Coding DNA Sequence Number=SeqID_33239
  Homolog annotation: Hit_ID=Q9FUH9; Match level="QueryCoverage=88%, HitCoverage=78%, E-value=2e-90, Identity=63%"; Hit description =Microtubule-binding protein TANGLED1
MTGALSTPCSPTEFGLRSLAHACDFVSYSESCWRRMRGGASAQKRSPSGKFGGIVGGEGAQWRRMSLPAMLLDETVQVSQFARGIVTTAGAMNREPPRTPKPAPRTRKPAAGEPTPLHARRAREKQSHRGGTTTRGAGTATPPSRSRVRSRIQFKPVSSVAVSRPSVSANRVSPKNRPWAKKAVMFQNPMFHASTSAAIDPCATSSPSKKQKRLYKTRSPVVAQQIPHKFLASPTKTWRCSFSPSSLATRLMSPIKERLSLGRSRDNGVDVGGGPMSVLKQRPCVSLMVRTVSSKISSR

SEQ ID NO: 76615 - protein, 117 aa, Zea mays
  Coding DNA Sequence Number=SeqID_33240
MQSQKNVLLQYQITHLHNVCLTGHWELSAAELLSLGNDSPNGLVPHSGNMHDLLLALELLGCSGWFLGQEGGVSGCSDADIDFLPAGCSGGNAAAEETASGTAATSSDADAGAGDLA

SEQ ID NO: 76616 - protein, 95 aa, Zea mays
  Coding DNA Sequence Number=SeqID_33241
MMLVDYTTALAPPRAPCHGSNCHQRRRRLRLHQGLLQQLGCPMVVLGASLAEVQGQAASQTPPPTEVRGKSPAAPAPGIGAPAPRAGDDAVSSSG

SEQ ID NO: 76617 - protein, 129 aa, Zea mays
  Coding DNA Sequence Number=SeqID_33242
  Subcellular localization annotation: CTP_CleavageSite=54; ConfidenceScore=5.36e-01
MTSVALNPLRKQGNVSRIHAAPPAMLLQGSRHFSDSHVSTCTGLKALLYQPRARSNKFTSRLTDLAGPKRRQLRSVSLAIHLGSEDRVYTTQAGKGSRLVGKVYDLCRVLETGISAELTVKSGLVILFD

SEQ ID NO: 76618 - protein, 119 aa, Zea mays
  Coding DNA Sequence Number=SeqID_33243
MPLSLRLFHISCCSLLLAFLLSLSLPPWGLAAEVWTYIRAVERSGLEGSDESEYSSDEEDSDGDGEDDDDDDDDEGGGGGDGDGSGRGGSSGSKDGDDDGSRGGSGGGGSSMGSNRASG

SEQ ID NO: 76619 - protein, 224 aa, Zea mays
  Coding DNA Sequence Number=SeqID_33244
  Homolog annotation: Hit_ID=Q6J9V9; Match level="QueryCoverage=56%, HitCoverage=44%, E-value=3e-57, Identity=87%"; Hit description =Putative uncharacterized protein
  Subcellular localization annotation: CTP_CleavageSite=46; ConfidenceScore=5.17e-01
MASGQTLLLKGPRSCPLTGDENQPLKPKSRRPGAQVALTVSSVEATASARGSLTYGDHHLSTGDSGHPPTNTAPATGDRQPPQSAPAGTGKGDIPKRILLSEGNGPRALLLIRGSKVAPSGVRQLPQSTRAPSPLLIRGSKAGPSEGFDSRPRARRVRDDPGYVRYMAEAQATLPRYPRTFPRPAGTICNGIPPEGGIEPSDPIEWVWVRQITYMYFWSAPLGH

SEQ ID NO: 76620 - protein, 278 aa, Zea mays
  Coding DNA Sequence Number=SeqID_33245
MDDFEKFQDYDKFYHLERLHRRLHEELERRREEQEQDQEQQDSSPSPQREVAYERPPSPAPQPEMPPAPPQGIPAAGGDPDGDGDNDDAGGSSSHGTERSEEPELEGWIARPITRDAARGCHFHDALDTLLCRAFNQHTWSIEYCCVVYQHRRGLYPDQWEATCLVRRPDDDLWGAEAFSEHYSITERDTAEAAMQDLMGLDLKYYPRRSTGSARGVIALPVGEGNPRLNSMVNLAVVLNTELDHALDELGKHPYHSPPRGRFDYGTPDCRTRIDLDP

SEQ ID NO: 76621 - protein, 119 aa, Zea mays
  Coding DNA Sequence Number=SeqID_33246
MARTAHQSCSDPPEAFSPSISPLCPWIHGPFPVIEFAVAPSSSLPNSGDPGTPLAHAFLNSGDLTTAERSRAARSRSPLPDNEQLVVPECVAEDPSEQQPGGEASNMDDFEEFQDYDEF

SEQ ID NO: 76622 - protein, 203 aa, Zea mays
  Coding DNA Sequence Number=SeqID_33247
MTHFLSGLINLLLKIGETKHLFFLLLNLLMDGFEVPDFLVQLLLLSGCNASPGPDDFFGDMTKVKACRRWSSTGRSLGKITFMSLTFTISQKKYRAVDMGQPLAGDKNATAADGRRRLRRADRGPFNWSHASSWHTLESLFLSRVRKRQIFVAFAPRWYQMKKNKTEVREDLVLHIGSFAYNLSGGVCASLSLYNITAQHSPF

SEQ ID NO: 76623 - protein, 183 aa, Zea mays
  Coding DNA Sequence Number=SeqID_33248
MEMSRWAEDRGSFCGLVPTWRTLNFNSKGLLRSKERGKYYEGILTNVRGVKDAAHARRSNHGGAEGSRPRVVVEPAARFADRASLLQGAGRGGNIAQGPNGDFGSYNYHETPDEYAESAVSPVVSIEQVAGRTVALLQDLKGNAGARSAQLVALGVFPGYVGYKSPYSPREAPDSLVLQSCNS

SEQ ID NO: 76624 - protein, 137 aa, Zea mays
  Coding DNA Sequence Number=SeqID_33249
MGKPGPSLLVLLLYRGRVPLDYHPGGKMDGQVTPATMSSREPVKNYATSKAEYTNTQLDLPVTALVPTITGMGDHVSGRVRGKVCCQVHSGLAFQSWGRQILDGRLWCWLLDYLLSNSLLQNEDVFPVSEITVYQMQ

SEQ ID NO: 76625 - protein, 84 aa, Zea mays
  Coding DNA Sequence Number=SeqID_33250
MPNKKHNRKKKGILGELDNVQLKPSKHLMKPKDVITNYCNIADGEYILVPEQGVAQEVVQEPAPEPAIEDLPALALEGKPRFYA

SEQ ID NO: 76626 - protein, 56 aa, Zea mays
  Coding DNA Sequence Number=SeqID_33251
MAVKHQAAREHTRQRCWPSGPTCVYADAIVNITPQPITLNQRSKSDKYHKNKQSSV

SEQ ID NO: 76627 - protein, 136 aa, Zea mays
  Coding DNA Sequence Number=SeqID_33252
MKAHVAQRLHARFRPLAYAARSMPHGSIGSLPERGAGVSKGYPSFWVPTVALTPAPQKHDSIADNLYPDPGASIKDSRRLKNEEKDIDMQIGVRNQLVTDVVDTSQSEIVIDSGLEWEEEPEHVITTSHPNSEDEE

SEQ ID NO: 76628 - protein, 338 aa, Zea mays
  Coding DNA Sequence Number=SeqID_33253
MRLMVLVMIMVLMARLRHTARKSVIPFLPSRLAERPLRRPVAGQSSHLERLHHRLREEQERRRQEQQSSSFSLHQEIESPPPAPPLGAPASGVAAGGDPDDGDGDDSSSHDTDFSANPEPEGWVARPITRDAARGCHFHDALDTLLRRAFDRHTWSVEYRCVVYQHSRGVYPDRWEATCLVRCPEDSLQGAEACSEHYSISERDSAEAAMQDAARRALSHYCSVFGGAADGLDLKYYPRRSSGSTGGVIVSPVGEGNPRLSSTVNLAAVLNTELDHALDELSRVRAEIAQLRAERAERRYLDGGSPAPVGTQHPYRSPQRGHQSYGNPACKTKINLEP

SEQ ID NO: 76629 - protein, 358 aa, Zea mays
  Coding DNA Sequence Number=SeqID_33254
  Gene Ontology: Mol. function=hydro-lyase activity; Cellular component= cytoplasm; Biological process=fatty acid biosynthetic process
  Homolog annotation: Hit_ID=Q6I5L0; Match level="QueryCoverage=41%, HitCoverage=73%, E-value=1e-71, Identity=85%"; Hit description =Putative beta-hydroxyacyl-ACP dehydratase
  Pfam annotation: Domain name=FabA; Domain location=232-350; Score =153.6; E_value=5.4e-43; Accession=PF07977.4; Description=FabA-like domain
MGLRSAKGEIRGEGETGVVPPGGRGTGGHAPGGCSGHATIVAGWLGGRLCHHWLAGWPGTACSCVEGRGGTYCENEEKIKKNNEQTKTNNLKNGVPKGKPHKTSVAPLGPCHPRSYRQFATSFALASRALPPAHRAVRHRTAPMEVAAVPRSAAACRAAPLLPAVRAAACHLALPRRAFSASVAAAPAPRRLAARRAADGDSVETAPEAVPIEKRFPPFPSVMDINQIREILPHRVIEYKAGEYAVGIKNVTINDNFFPGHFPERPIMPGVLMVEAMAQVGGLVMLQPEVGGSRDNFFFAGIDKVRFRKPVIAGDTLIMRMTLTKYQKRFGLAKMEGKAYVGGDLVCEGEFLLVSATE

SEQ ID NO: 76630 - protein, 353 aa, Zea mays
  Coding DNA Sequence Number=SeqID_33255
  Gene Ontology: Mol. function=hydrolase activity, hydrolyzing O -glycosyl compounds; Cellular component=anchored to membrane; Biological process=carbohydrate metabolic process
  Homolog annotation: Hit_ID=A2X0Q5; Match level="QueryCoverage=91%, HitCoverage=69%, E-value=1e-129, Identity=63%"; Hit description =Putative uncharacterized protein
  Pfam annotation: Domain name=Glyco_hydro_17; Domain location=1-215; Score=70.5; E_value=5.6e-18; Accession=PF00332.9; Description =Glycosyl hydrolases family 17
  Pfam annotation: Domain name=X8; Domain location=235-319; Score =138.1; E_value=2.5e-38; Accession=PF07983.4; Description=X8 domain
  Pfam module annotation: Pfam domain module=Glyco_hydro_17::X8; Domain location=1-215::235-319
MHMHRYVAVGNEPFLETFNGTYLNTTFPAMQNVQAALAKAGLADRVKVTVPLNADVYQSPTGKPSDGDFRADIHGLMLSIVQFLAATGAPFVANVYPFISLYADPNFPLDYAFFQGSSAPVVDGGVTYQNTFDANHDTLVAALRRNGFGNVSVVVGEGFLAHVASGQGTPLRPGPLDAYLFSLVDEDRKSIQPGNFERHWGLFYYDGTPKYPLSLGGNASSLMRPARGVKYLDKKWCVLKTSANLADQKVGDSVGYACGLADCTSLGYKTSCAGLDAKGNVSYAYNMYYQTMDQDDRACDFNGLATTTSVDPSAGTCRFIIEIDVGAAAPRSAIGFAAVLAAGLAASVLSVLL

SEQ ID NO: 76631 - protein, 238 aa, Zea mays
  Coding DNA Sequence Number=SeqID_33256
  Homolog annotation: Hit_ID=Q6QP51; Match level="QueryCoverage=20%, HitCoverage=22%, E-value=7e-14, Identity=73%"; Hit description =Putative growth-regulating factor 1
  Subcellular localization annotation: CTP_CleavageSite=44; ConfidenceScore=5.07e-01
MVAFQGGPLLLKATLPTCVLSRRGLSLLQHAPRSSPYDTGAGLRASYKLAQGRQGQTAAHGARDCPAVTSTPPLSPRPAGESAGRHAGGVQPHPGGRTLSTSTHPAWRPRPTCHVTGAPVTTCKKLDRHSLQYRAFSTAEPVSRLEATLRMTRQCQPSTSVTGRGRKRGYSERDPSPRRKRAPSPPTDQRFEGWPLGRVQQPPQSTRAPRPLLVRGSKAGPSKGFNGRLRPLGLRAHY

SEQ ID NO: 76632 - protein, 213 aa, Zea mays
  Coding DNA Sequence Number=SeqID_33257
  Gene Ontology: Mol. function=endonuclease activity; Cellular component=intracellular; Biological process=DNA repair
  Homolog annotation: Hit_ID=A2ZYQ5; Match level="QueryCoverage=38%, HitCoverage=23%, E-value=3e-27, Identity=74%"; Hit description =Putative uncharacterized protein
ERNVDLFKNLVHEYDYACWSCSVARLGYSGTVVISRVQPISVQYGLGIPERDQEGMLITLEFDDFYLVNAYVPNSGRGLRRLASVGTDEDAGESNPEANELELSRVSEMQLILADHGQLAESMLSVGPTGHDTEAGDVWGEPIAESMLSEGPTGHDAEAGGAWGKLSARGEAVVAPNAHLSFLTIVEIDVSEVKVSFWDVLVTVGDLFSNAMG

SEQ ID NO: 76633 - protein, 45 aa, Zea mays
  Coding DNA Sequence Number=SeqID_33258
MDPKGKGKVTDEKEILLSDKEGETIDSGSGCEEDWTKILRMQHLK

SEQ ID NO: 76634 - protein, 681 aa, Zea mays
  Coding DNA Sequence Number=SeqID_33259
  Gene Ontology: Mol. function=binding; Cellular component=proteasome regulatory particle; Biological process=proteolysis
  Homolog annotation: Hit_ID=A7Q7J2; Match level="QueryCoverage=100%, HitCoverage=69%, E-value=0.0, Identity=71%"; Hit description =Chromosome undetermined scaffold_60, whole genome shotgun sequence
  Pfam annotation: Domain name=PC_rep; Domain location=109-142; Score =22.5; E_value=0.0015; Accession=PF01851.13; Description =Proteasomecyclosome repeat
  Pfam annotation: Domain name=PC_rep; Domain location=149-182; Score =30.0; E_value=8.6e-06; Accession=PF01851.13; Description =Proteasomecyclosome repeat
  Pfam annotation: Domain name=PC_rep; Domain location=184-218; Score =34.8; E_value=3.2e-07; Accession=PF01851.13; Description =Proteasomecyclosome repeat
  Pfam annotation: Domain name=PC_rep; Domain location=219-252; Score =28.0; E_value=3.4e-05; Accession=PF01851.13; Description =Proteasomecyclosome repeat
  Pfam annotation: Domain name=PC_rep; Domain location=288-323; Score =10.4; E_value=0.46; Accession=PF01851.13; Description=Proteasomecyclo some repeat
  Pfam annotation: Domain name=PC_rep; Domain location=324-356; Score =16.0; E_value=0.08; Accession=PF01851.13; Description=Proteasomecyclo some repeat
  Pfam annotation: Domain name=PC_rep; Domain location=358-392; Score =34.1; E_value=5e-07; Accession=PF01851.13; Description =Proteasomecyclosome repeat
  Pfam annotation: Domain name=PC_rep; Domain location=436-468; Score =9.1; E_value=0.72; Accession=PF01851.13; Description=Proteasomecyclos ome repeat
  Pfam module annotation: Pfam domain module=PC_rep::PC_rep::PC_rep::PC_ rep::PC_rep::PC_rep::PC_rep::PC_rep; Domain location=109-142::149 -182::184-218::219-252::288-323::324-356::358-392::436-468
MRENITTPNGSAVTVDPNASTHADRLTKIKGILSGETSIQLTLQFLYSHNRSDLQILKTIKQAVEMRNSVCHSATICSNAIMHAGTTVDTFLRENLEWLGRATNWAKFSATAGLGVIHRGHLQQGRALMAPYLPQNGAGGSGSPYSEGGALYALGLIHANHGEGIKEFLRESLRNTTSEVVQHGACLGLGLAALGTSDEEICEDIKNILYTDSAVAGEAAGIGLGLLMVGTASEKATEMLAYAHDTQHEKIIRGLSLGIALTVYGREEEADTLIEQMTRDQDPILRYGGMYALALAYRGTANNKAIHQLLHFAVSDVSDDVRRTAVLALGFVLYNEPEQTPRIVSLLSESYNPHVRYGAALAVGISCAGSGLSEAISLLEPLTSDVVDFVRQGALIAMAMVMIQTNESYDPRVGAFRRQLEKIILDKHEDTMSKMGAILASGILDAGGRNVGIRLKSRSKHDRLTAVVGLAVFTQFWYWYPLTYFISLAFSPTALIGLNSDLKVPTFEFLSNAKPSLFDYPKPATQQTAAASVKVPAAILSTYAKSKARAKKDAESKAKEKADDSSNASTSMQVDGAAAEKKAAEPEPAFQVLTNPARVVPAQEKFVKFLEGSRYKPVKAAPSGFVLLQDLKPTEAEELALTDAPSTAAATTNALASSASEPAAMAVDDEPQPPPAFEYTS

SEQ ID NO: 76635 - protein, 311 aa, Zea mays
  Coding DNA Sequence Number=SeqID_33260
  Gene Ontology: Mol. function=helicase activity
  Homolog annotation: Hit_ID=A3A6M0; Match level="QueryCoverage=84%, HitCoverage=18%, E-value=3e-79, Identity=55%"; Hit description =Putative uncharacterized protein
MEVPTYTSEVVHPTADVSEPDSSSDNTCDWVIPEYTSTPFMPASTQTEDVGSPDMSIEPLRLDDNDEGVIFGEDNDENEGYLFADEDTNVDFEIDGTQDQSVATDVPDPYDKVYSNIPEETHMLKHVPDCGYCTAKKFEYELPGFCCLGGKVELAPLVTPPQLRRLWDSADSDARHFRDNIRFFNGHFSFTSLYCCLDSMTTNMRDSGIYTFRAQGMMYHNIKSFGIECGAEHKHLELYFYEDDPSLEHRYLGILRGNPYSEQLRSMGHVENLADYHIALNPDQTLNQKTYNTPLTSEVAAVWIEGSERRG

SEQ ID NO: 76636 - protein, 257 aa, Zea mays
  Coding DNA Sequence Number=SeqID_33261
  Subcellular localization annotation: CTP_CleavageSite=43; ConfidenceScore=5.39e-01
MRSLLEPRAALRMAGSSPAPPADGGGASSSTRSVHQRRCGGVVGASGGARLRGGRALDLSAVVSNREDKYFVIKGHIPCSDSLLHEKHVYKMHNVWFGLNPGAFNFRHLNGTMELYFTQQTVVEPYTVPVQMPPFPKHILLNLDDIAELPNRTLVENKIRWDIMPVANHSQTSLAISFRGDQNELLGPMVDAKESKRKRNRERYAVMSVEQKNEKNRKRREARQRNKGHNVMPNVSGGDEKRPILINKSAHKPTIGK

SEQ ID NO: 76637 - protein, 160 aa, Zea mays
  Coding DNA Sequence Number=SeqID_33262
  Homolog annotation: Hit_ID=A2YP63; Match level="QueryCoverage=42%, HitCoverage=9%, E-value=5e-08, Identity=45%"; Hit description =Putative uncharacterized protein
MGGSRIRAELCSPRDRHPGLVVPCKSAPPPEIRLMRAYISSSSLRKSALRALAKALTTDQLFYLREQFTLFGPNKSGHISLQNMKTKDWREKQDEFKKKKRMSKLEEIRQGTAVATTATPTVNAGATTADATPKSGRSGERGRGGRKKDAWMAKCTLLTH

SEQ ID NO: 76638 - protein, 391 aa, Zea mays
  Coding DNA Sequence Number=SeqID_33263
MAPSCDVVGPSPGSGEAEAPPRSGEAETVVRGQGRVRALGSGEAEFVVFRGRARARALGSGEAEFVVFQGRARVRALGSGEAEFVVFRGRARVRALGSGEAEFVVFRGRARVRALGSGEAEFPMAPEAGLGCCQPHSVEWHNSRSDAGGAVFLSGRIRCQAILALNAPAIRSVGVAIWPRLLLGEDWVSGEPKLCADGGYQLSHPGFRGPKPGREHNHQRLHIFTHKSCYPSAKGSRLPIHLYRGGFLPDRHRSKINQGPPYTDHSPTALAPFGVSLAKIHGRRGIGDIKAKGAVGKLPVIRLQGSPPSLRGGSTVRREGAAKAPTAVTSFSPIYFLGSAPCTLLDARWLGDEDLQSSTLYVNPPGAGGGFNSPKHGAAANRGWSGAPDHI

SEQ ID NO: 76639 - protein, 121 aa, Zea mays
  Coding DNA Sequence Number=SeqID_33264
MQTVLTPANSHSGDCNLADGEYVLVPEQGAAQEVAPGPAPEPAPEDLPATALEGKPRGLYPSRDLRRGLPFRLWWVQVRSLHDGSRGSLEDMVAGVTWPSILPPGWTVEWDPTSAEEEHEE

SEQ ID NO: 76640 - protein, 163 aa, Zea mays
  Coding DNA Sequence Number=SeqID_33265
MACLTLRGLLPRQGGLIAGDGGVLYSSVDEEDIRKIGRGATLRIPVVAFAGATTKMVFSFPLVATGAPGPSAPFVPSNLGPHPGPACVSGRGHRRGILFGQVRDAVQDPLPARDTREGSEMENLPSIEDNRGVEDVYHGVVMNRCRTPYLACQLLVFSPNYAL

SEQ ID NO: 76641 - protein, 115 aa, Zea mays
  Coding DNA Sequence Number=SeqID_33266
MAYPARQTQRVSANPHPSGEPSPLAPHPEPDMRAETHRENRISSGLDEQPHASPTMSNCIPDVAEAVVIEDFYRGSNDSAFIWAIFQKASTTLEQLFCKADIYITADERTWDLIG

SEQ ID NO: 76642 - protein, 150 aa, Zea mays
  Coding DNA Sequence Number=SeqID_33267
  Subcellular localization annotation: CTP_CleavageSite=33; ConfidenceScore=5.25e-01
MGASVQPAGNSGQANQSFVAVNLSKGELRVHVLAITVGVTSDFLDESGPLPFNQVRLCDQVSPMGVFARGFATSRCSGHELRLTDEVPSPFIGGDVDVRFAEKLFQGGRCLLEDGPNEGRVIRSTVEVLDHDCLSHIGDAVAHGLEALLE

SEQ ID NO: 76643 - protein, 321 aa, Zea mays
  Coding DNA Sequence Number=SeqID_33268
MRGIRSAPHRLARQRLGRLLCLMRLLSGDLVVRLASQNCSAGTWSSISPHKLARWGLGHPSRLPDLLGRDFEPYLGYLILRYPTAAPEPSGDSLESHGRTLPAIDAMCWMRVHFPLMTIECSGSFSFGMENFSQDRTKENKEWATKLEAKGLRLNMLTKLNKFGQPKGSPMVTPSTGLPQKNVKYDLRCGIEQMTYGPDTKAFEVGYAYHAFSPEHLWPFPSESFSRPRGDLPSMIFFPAPMGTFSLCSATQERLNDLDRKGFLPHESVSCWRLEEKGGAPASRDGKVVVMASFYECGFGLPLHILRARVVLLLWARVAKH

SEQ ID NO: 76644 - protein, 32 aa, Zea mays
  Coding DNA Sequence Number=SeqID_33269
MSRGRLGPERSDANWPSHGPGTPGGAGGRSPP

SEQ ID NO: 76645 - protein, 169 aa, Zea mays
  Coding DNA Sequence Number=SeqID_33270
MKLWKETFRSSKTTTSSRRGLATTPSRLPVKAAFIYVSFPHFDLLWLDLDTLHESPSSPSYPPALLSVRFRRPVAGQSSHLERLHHRLHEEQEHRRQEQQGSSFSLQQEIESVRSCSPVLPLEAPPAPPLGAPASGVAAGGDPDDGGGDDSSSHDTDFSADHEAEGWVA

SEQ ID NO: 76646 - protein, 55 aa, Zea mays
  Coding DNA Sequence Number=SeqID_33271
MGSSSLRVERESRLVGKRHYGTGGYEIDGFGYEYGAGEDEAVEGDFQEFQDYDEF

SEQ ID NO: 76647 - protein, 67 aa, Zea mays
  Coding DNA Sequence Number=SeqID_33272
MAGGGPAAARNSIGAPKFPPTANHAHNPCDMANLPDPQRTRGTRNNEGDKPDKVGPHHSGTRAHKRL

SEQ ID NO: 76648 - protein, 258 aa, Zea mays
  Coding DNA Sequence Number=SeqID_33273
  Homolog annotation: Hit_ID=A2WLM0; Match level="QueryCoverage=23%, HitCoverage=17%, E-value=4e-15, Identity=70%"; Hit description =Putative uncharacterized protein
MDAGVDGGGEDEGDYDEEDIGPLLSFDEMLHLHTTCPVSKDFSSARKWRLCCYTTSASTTSIPRGTRVLQMGAAPMSSDVPVPSAADLADQVTYVLDFFSLGYVMCLGVTAGAYVLTLFAKVASDGFIGNGSMDAGVDGGGEDEGDLDEEDIGPLLSFDEMLHLHATCGVAVLGDMMEASWCRGTHSRGHRRDAADAGGGGAPALDRLCPRLDFLASPITSRKVPAEDPPSVDDFATAYIEEHFDEEEAKASHPYSSP

SEQ ID NO: 76649 - protein, 555 aa, Zea mays
  Coding DNA Sequence Number=SeqID_33274
  Homolog annotation: Hit_ID=Q6J9V9; Match level="QueryCoverage=13%, HitCoverage=43%, E-value=9e-11, Identity=42%"; Hit description =Putative uncharacterized protein
MTVSKKGPGKGDTPKRILPREGTRLRASLLIRGSKAGPSEGFDSRLRSRGPYTHYWSEERSCNGIPSEGGIEPSDPVARGPGPADHPQLTGDTMFGAHRGQHGAFPPSSLRKGDAGAVNILARELGTRPYTRAMASSHEGTTRPAEALREALRPRRSETTPPRPRGLHPAVALARTHRNKTQPRKAGPLAKKCDESLQASANTPFEARGLMSGTIIRGTLKAPNSQLEHLMQRWPDTFILTRAPQSRSDRRYFAAPLTSLTERQRRLRRSDCGATRQSEADRQPAPEDDELRFARPQGSDSAPASAGDLRLARPGGSDSTSATEDRLDLGFGGASTSPNLGRRPATPLTEARGRQQGLNSSDSCPSARLHRSSDGHDITPAGCQDLSGCHNGMYLGRWLSPARHVALCYIPHCTPGSSPYAYKRKDQGPLREGWPRGDEDEVRARLRPLAPSPAWTLVTPYCKRTRPGRGTNTKAAGFPPLSRRSPAASLSPLRARPRARPIWAGARSDIHSSAQGPPGLGTPTNRLCINWGLPSKAVAGRSSGAGSSAGPGATS

SEQ ID NO: 76650 - protein, 25 aa, Zea mays
  Coding DNA Sequence Number=SeqID_33275
MGTNGHLDLDTGGSKPILRKFTLGP

SEQ ID NO: 76651 - protein, 94 aa, Zea mays
  Coding DNA Sequence Number=SeqID_33276
MGVGKGRLDGLNCILNFCDYSVAVAVERARLEGSDESEYFSDEENSSDSSEEGSGGDGGDGDDDGGDGDSGGGSGKGGSGDGGGGSKGSNKASG

SEQ ID NO: 76652 - protein, 349 aa, Zea mays
  Coding DNA Sequence Number=SeqID_33277
  Gene Ontology: Mol. function=unfolded protein binding; Cellular component=cytoplasm; Biological process=cellular protein metabolic process
  Homolog annotation: Hit_ID=Q10GP3; Match level="QueryCoverage=86%, HitCoverage=80%, E-value=1e-136, Identity=78%"; Hit description=T -complex protein 1, beta subunit, putative, expressed
  Pfam annotation: Domain name=Cpn60_TCP1; Domain location=1-328; Score= -26.8; E_value=1.3e-14; Accession=PF00118.15; Description=TCP-1cpn60 chaperonin family
MPCKWDKISYCKYFRFSVSPMICNVCKTGETLLGKDSFLDEGFILDKKIGIGQPKRIENAKILVINTAMDIDLRFMSKVADIEDAEKQKMRDKVQKIIAHGINYFVNRQLIYNFPEELFADAGILAIEHADFEGIERLALITGGEIASTFDNPESVKLGHCKVIEEIMIGEDMLIHFTGIEVGQACTIVLRGTSEHVLDEVERSLHDTLCVLSETVNDTRVLFRGGWPEMTPRKKSHDIDAFSHALQAIPTTIADIVGFDRAELISQLQAEHHKENCTARIDVITGNVGDMQKLGIQESFKEKQAILLFATEAAKMILKVGEIITCAPCRREDKMSAVCLYCDWRRVDV

SEQ ID NO: 76653 - protein, 89 aa, Zea mays
  Coding DNA Sequence Number=SeqID_33278
MKKKLSNLELVMEELDNVKKSMKAAMVEIEENKKSKNELQKLKGSTKVKHLRATIRKKRIPTRRNNRINGQTRHIILLIDCIVHSTAPS

SEQ ID NO: 76654 - protein, 241 aa, Zea mays
  Coding DNA Sequence Number=SeqID_33279
MFDVAARGRWMQWEVVVVSNDRGSRRGEAAISVIAATVAFIITFAQAATEADAGVSRLWRSRWDIVEWLSSLVSEPVFNFHAYEEFKSYHPIKTPSFGFNKGAKWEPKALWSGSTGLSGVHRTVSGAPPDIVRCTRGLQLELATFGNFRRRLRYNSPDCPVYTGQCPVRQGRSASGTRQLRETPTASPLKFTGLSGVHRTVRCDSGATVFSAPTALCRAFNARSARADGRRAHSGTSDKEQ

SEQ ID NO: 76655 - protein, 263 aa, Zea mays
  Coding DNA Sequence Number=SeqID_33280
MSDGNGPPKLHAAKPDDHVELLGVESNWNMGDAEEVLHTSYDESVEADHGGGRFNSGALDGGSEEGGLGSQVYNIRDFSERNTTRGGDFARQARVLLGTTTWQRGGHRQDTVPNGLTRSGTCSTSHGDGRQTRAATEAVRRRPAETTSSSSAQVAPAWTEGWSVWRSGCPRRNAARPTRLTTFPDVRADRRRGKKRVAALDLYPGRKEKAVSPARVRLTTAKGTTGSFASPDLGPRPQEGGLRLARPQGSASPSTSEGGLRLA

SEQ ID NO: 76656 - protein, 133 aa, Zea mays
  Coding DNA Sequence Number=SeqID_33281
MVGTSAVTTRRQPGSVEHCTIQEMVDGVTWPTTLPPGWTVEWDVAPNDFRAFSTISITESYERVRVHVQTSIEGAAAPSASFSPSARSGLASNGDTGGRNSTSKEESSTALGPSQPRSSPGSRPVQTPRPAAP

SEQ ID NO: 76657 - protein, 129 aa, Zea mays
  Coding DNA Sequence Number=SeqID_33282
MEIFIPVVLIVEALLMKALCAEAFGSGHLEQDDEPLLKLHLSASEGQLDEPSSPSFVAPVDGASPDFGFPGPSRPPEVLDCGYRVAAPVAEAFFGGMTKVMLAEGVQSSRNGSEFTGGGRQCWGLVLKY

SEQ ID NO: 76658 - protein, 76 aa, Zea mays
  Coding DNA Sequence Number=SeqID_33283
MQVACNRTTGTHPFDFDASSMEAQAHTSCERKQQSNRLQAHVPSWGSRGSLSHGTGKGNISKGILLREGSGPRALL

SEQ ID NO: 76659 - protein, 412 aa, Zea mays
  Coding DNA Sequence Number=SeqID_33284
MVTTSSMVGRSKSGCGLCPALSFKDLHHPCCGGGRAEPEFYLPHGPAGHLFLQHSGERALTGLAEGADFDNAGPAGQKRRQLQHAWLAGSAGSGAASGATSHCWGGAWLSAHCMGGCCAVRTGGPSKTSHAARVAFVFLDCLVLTPARRLRAEVAAVVGAEVVVARGGFSAYEIVGAICGRTSSSLALIACPLPSSGDVGEGLVTAASTLRSSLLLFSRPERRSLSLLVQRSAASHLEFAVPQALRCGSCPYPREWNRSSVCNGTLSAGNPRLLCDESEPEATVSAWTQAESAREEASSAQEHVASLAEEVQQQRLELGQVEFLPPVSPFEARPDLAEGENDAEGAAAPSIDDFFVGSRIVYLSESYFSREVMSEKVMSEDPAIEAVEKREIRSGRKTFTEENFDAEGVPPF

SEQ ID NO: 76660 - protein, 106 aa, Zea mays
  Coding DNA Sequence Number=SeqID_33285
MVYYSGPLYSVSNHLTLDAGISLCVDTVIRRCFMTMPIKQTKSDDDTSSHMKCKGFSSFLHVGVKSRLWNCCGIMGRQWKCCSPSILRGPTTIVLSIVLLFGDHKA

SEQ ID NO: 76661 - protein, 63 aa, Zea mays
  Coding DNA Sequence Number=SeqID_33286
MEGVAIWGRARMVGKGGDGGGMVRKNMLEILLDIPWRHKNHGEKVKRNTNLGMNYTYIGMFLI

SEQ ID NO: 76662 - protein, 290 aa, Zea mays
  Coding DNA Sequence Number=SeqID_33287
  Gene Ontology: Mol. function=nucleoside-triphosphatase activity; Cellular component=plasma membrane; Biological process=protein amino acid phosphorylation
  Homolog annotation: Hit_ID=A2XMQ5; Match level="QueryCoverage=22%, HitCoverage=15%, E-value=2e-23, Identity=67%"; Hit description =Putative uncharacterized protein
MDEDFGYVSPLLAFNLGLHVSCLKLFIQREGHPFKFCSRAEEIDATARSGSDLYLHLDLLPCPQEPKYALHLRVSVVRIPDCLNSSFGGSEYQDMVTGMEPILRVNCNETTLVLGGAASAAIPPYSFFASSGNSVPLHSEVVEHLASVIAPALCPSDILPKIKFFTFLYGPPENEQGIFEEVLHGRLDFDVEPWPSVSEGAKDLVGGLAPDKPLDSAVLSRMKQFSAMNKLKNMALRDEVEMDGRVVEQKVQMTAVVVEIRKKESGELVAIGRQWMTASRPKVAAAHSKI

SEQ ID NO: 76663 - protein, 174 aa, Zea mays
  Coding DNA Sequence Number=SeqID_33288
  Pfam annotation: Domain name=Collagen; Domain location=113-171; Score= -34.3; E_value=0.024; Accession=PF01391.9; Description=Collagen triple helix repeat (20 copies)
MGKGRRGRGSPSRAGDKRKRVPSPPSEDFGDSEYSDEVSFGSEGSPAPTSPPASSDDSDDSKGLSAAVWTYIHVVERSGLEGSDESEVSSDEENSSDSSGERSSDDSDDEGDGSDDDSGEGDGGEGGDDGGKGGSGGDGSIGDGGDSGFGGVKGDGGDDGSKGDGKASGTAPLV

SEQ ID NO: 76664 - protein, 129 aa, Zea mays
  Coding DNA Sequence Number=SeqID_33289
MKVREHWEDKEGECFIQFGHGGGLTPSGITVKVRMCEERKRFGIRISRRLLGLVIVSHLSPRGSGALQLSSSSGWLLGQEGEVSGCSIVGTDFLPVGCSGGTAAVDEGTASDTSAATGADASVLEGDLA

SEQ ID NO: 76665 - protein, 195 aa, Zea mays
  Coding DNA Sequence Number=SeqID_33290
MPAPRRVRRCEIHGEIGRHARGGRVLFRQIANAAERTAQRKRDDKGVPYVIRRHVMVGWAGVARWNGAGPVGLGRLCNPTCRSGLGFLFLKVTLGTGFQSVKSTFVFRMKRGGTLYPQVMLPICHEIATSHTPLPRRRGRVTLRGLYKVPLASENPLQFMGSSNAGIPCRTAITAKSSRGPPYTDHSPTALAPFG

SEQ ID NO: 76666 - protein, 52 aa, Zea mays
  Coding DNA Sequence Number=SeqID_33291
MGTTLAGSLSSAVRQTLDKGDDEDSGREEKSNASVTVFSSSSSLSHEYEPLV

SEQ ID NO: 76667 - protein, 29 aa, Zea mays
  Coding DNA Sequence Number=SeqID_33292
MMRVMDKLKGKKRGDRGDSSRALQRQGNG

SEQ ID NO: 76668 - protein, 25 aa, Zea mays
  Coding DNA Sequence Number=SeqID_33293
MGKDGCVEESVANSIMEERESEYMK

SEQ ID NO: 76669 - protein, 298 aa, Zea mays
  Coding DNA Sequence Number=SeqID_33294
  Gene Ontology: Mol. function=microtubule motor activity; Cellular component=microtubule associated complex; Biological process =microtubule-based movement
  Homolog annotation: Hit_ID=A2ZM87; Match level="QueryCoverage=50%, HitCoverage=6%, E-value=1e-35, Identity=47%"; Hit description =Putative uncharacterized protein
  Pfam annotation: Domain name=DnaJ; Domain location=260-298; Score =13.2; E_value=0.00022; Accession=PF00226.22; Description=DnaJ domain
MQREELEVDLQKVREQMLAVQPSGKARRYMEDGMVDLADSSRHPIDMHNELLCAQETIRILRREVSEKESEIAQCNAHISELNVHVEAVAQEYKHKMNSKKDEELSAAKQRIVELEGIAARRQRECVVNAVKSVYEARRAITRTHLTHKVLSAAVYNHYKTIYCESLIVKLKFQQVLHLMASHSPFMFHLYIKARSVPILSAIKNRYYKVTDGALRACGETTSVVFRPYNSMWSITTCFGIDFKKTKNKCINMRKKLKKRILGVEESASQQEIEKVYHKLALRLHPDTNPGNELAIED

SEQ ID NO: 76670 - protein, 88 aa, Zea mays
  Coding DNA Sequence Number=SeqID_33295
MVSELVPPRVFIYPCDSAGRQLRVTSVQLIKHIITLKWVFKLKKDEAGAVIKHKARLLVHSTKKEEVETFKAEMKASFQMSDLEPPPT

SEQ ID NO: 76671 - protein, 414 aa, Zea mays
  Coding DNA Sequence Number=SeqID_33296
  Gene Ontology: Mol. function=ubiquitin-protein ligase activity; Cellular component=cytoplasm; Biological process=protein modification process
  Homolog annotation: Hit_ID=Q53LU3; Match level="QueryCoverage=86%, HitCoverage=94%, E-value=1e-150, Identity=70%"; Hit description=F -box protein family, AtFBL12, putative
  Pfam annotation: Domain name=LRR_1; Domain location=137-164; Score =4.5; E_value=45; Accession=PF00560.24; Description=Leucine Rich Repeat
  Pfam annotation: Domain name=LRR_1; Domain location=189-213; Score =7.2; E_value=14; Accession=PF00560.24; Description=Leucine Rich Repeat
  Pfam annotation: Domain name=LRR_1; Domain location=215-238; Score =0.1; E_value=2.9e+02; Accession=PF00560.24; Description=Leucine Rich Repeat
  Pfam annotation: Domain name=LRR_1; Domain location=288-315; Score =2.5; E_value=1.1e+02; Accession=PF00560.24; Description=Leucine Rich Repeat
  Pfam annotation: Domain name=LRR_1; Domain location=340-367; Score =4.8; E_value=40; Accession=PF00560.24; Description=Leucine Rich Repeat
  Pfam annotation: Domain name=LRR_2; Domain location=189-214; Score =7.6; E_value=1.6; Accession=PF07723.4; Description=Leucine Rich Repeat
  Pfam annotation: Domain name=LRR_2; Domain location=288-313; Score =13.1; E_value=0.29; Accession=PF07723.4; Description=Leucine Rich Repeat
  Pfam annotation: Domain name=LRR_2; Domain location=340-365; Score =9.9; E_value=0.79; Accession=PF07723.4; Description=Leucine Rich Repeat
  Pfam module annotation: Pfam domain module=LRR_1::LRR_1::LRR_1::LRR _1::LRR_1::LRR_2::LRR_2::LRR_2; Domain location=137-164::189-213::215- 238::288-315::340-367::189-214::288-313::340-365
  Subcellular localization annotation: CTP_CleavageSite=20; ConfidenceScore=5.03e-01
MWNDISLDSCGSCGYPLNLSSSNRSTSEVGSYKKSLKKGLISFISVDLSRFTQVDELESGSERSAFGLTCKNWFKVRNLGRKSLTFHCSFNPAIDKEHAKCIPKILAHSPCLNRISLAGLTELPDSALSTLRVSGSSLKSFSLYCCSGITDDGLAQVAIGCPNLVVVELQSCFNITDAALESLSKGCRGLKSLNLGSCMGITDQGVSAIFSNCPNICTLIVTGCRRLSGAGFRGCSSSFRYLEAESCMLSPDGLLDIASGSGLKYLNLQKLRSSTGLDGLGNLALAKSLCILNLRMCRYLTDDSVAAIASGCPLLEEWNLAVCHGVHLPGWSAIGLYCSKLRVLHVNRCRHICDQSLLALGNGCPRLEAVHINGCAKVTNNGLALFTLSRPHVNLRVYEVMSIGPSIENLFRLH

SEQ ID NO: 76672 - protein, 210 aa, Zea mays
  Coding DNA Sequence Number=SeqID_33297
  Subcellular localization annotation: CTP_CleavageSite=67; ConfidenceScore=5.44e-01
MALCNLTGVRPAPPLPFPWAPIKGPPRAPLSPAPASATHLPPHPSNRAKRRRLLPLRRSGDRRSGTRSPEEGPEPDLPEMEDSLVIRTSYCSEVEGFPHLLQSCALRMGICKKPEYVWKEYLENGMEKCSMAVYLGESRNYPNHPSFQVTFTRYRFPDTCQNVARKALQQLCQNYSRVIFETPPSLLSTQQQKYPRLEEKTLGPVRERPY

SEQ ID NO: 76673 - protein, 279 aa, Zea mays
  Coding DNA Sequence Number=SeqID_33298
  Gene Ontology: Mol. function=carboxyl- or carbamoyltransferase activity; Cellular component=ornithine carbamoyltransferase complex; Biological process=amino acid metabolic process
  Homolog annotation: Hit_ID=Q8SA97; Match level="QueryCoverage=40%, HitCoverage=21%, E-value=7e-12, Identity=46%"; Hit description =Ornithine carbamoyltransferase
MALPVDVAGLCPRQGDVGAPPKPRLRLSSVAEAEPEPWGRARRKSFGRGQGGVRALGSGEAEFAVFRVLARVRALGSGGAEFAVFRVLARVRALGSSGAEFAVFRVLARVRALGSGGAEFAVFRVLARVRALGSGGAEFAVFRVLARVRALGSGGAEFTVAPLARPDCLSDSLCRVAPQSEWRRRRCPSVRLLYADGGYQLRIRRLEAPEPLHGARGRSGTDSAFYIRPYVAFPQGGGGECAMLPSMGTEHGVSGELLAAKAKRRALLPPEAPRVPPRS

SEQ ID NO: 76674 - protein, 260 aa, Zea mays
  Coding DNA Sequence Number=SeqID_33299
MKLRSEVSRLRFDCEEKEKSFKILEKDFIDSWARVHKMREEKNKLEASNTEKDMRIALLEAKLERVKEEHEAKTTKLMQAFAEVAINLSSAQVKIDDLKDEINHKKGEKELSIEESIKNREKAQQAEKVVDIRKKLQSRKSEAPPVAAAARGARAPEPTPPPVANAAVDAAASPPLASAARGRRDLPAVVHSLRGRCPRPQRPAAALPEDAAVPEPEAVVESCHVSARTWPFARCRTRPHVSARTQLHTGRQPSLLWAIQ

SEQ ID NO: 76675 - protein, 98 aa, Zea mays
  Coding DNA Sequence Number=SeqID_33300
  Homolog annotation: Hit_ID=A2YGX3; Match level="QueryCoverage=96%, HitCoverage=8%, E-value=3e-11, Identity=47%"; Hit description =Putative uncharacterized protein
NMLLLKNVISLNPDAEEVSQQRLLSLVAERLVPTFLDRFGPKSPEIWMFVFDASMREWHCVRMQRQFVKDEGYANTREQNITNAIDLFLHLTTGIAST

SEQ ID NO: 76676 - protein, 146 aa, Zea mays
  Coding DNA Sequence Number=SeqID_33301
MDSQAYELVVISAFPSEKQVSSTAKRFIIVFGDQKGTNILFGDSAGEEVEDLQNQAYMADSKDLNRASPNSSTRLTNLSATEHKRLKDDMKKIDEEVQRQKDQCSRWRINGSSRTSGGLPPETVQEREIDANYMSSVLQQLPTNSG

SEQ ID NO: 76677 - protein, 152 aa, Zea mays
  Coding DNA Sequence Number=SeqID_33302
MGKNNKRKREPTPPSEEFGDSEYSEEEFSSEPEGSPAPVSPPASSDDSDDSQGIAAEVWTYIRAVERAGLEGSDESEYSSDEEDSDGGDEGEDDDDDDDDGDGSGRGGGRDSTKGSSRGSTKGSSGGSGDNTRGSSRGSTKGGGGGRGRASG

SEQ ID NO: 76678 - protein, 37 aa, Zea mays
  Coding DNA Sequence Number=SeqID_33303
MNVFDINRRYPFAESQFQTLDFGQSGIDQESRSNKYK

SEQ ID NO: 76679 - protein, 292 aa, Zea mays
  Coding DNA Sequence Number=SeqID_33304
  Gene Ontology: Mol. function=acetolactate synthase activity; Cellular component=chloroplast; Biological process=branched chain family amino acid biosynthetic process
  Homolog annotation: Hit_ID=Q53L28; Match level="QueryCoverage=29%, HitCoverage=67%, E-value=1e-34, Identity=68%"; Hit description =Acetolactate synthase, small subunit, putative
  Pfam annotation: Domain name=ACT; Domain location=73-137; Score=46.8; E_value=7.4e-11; Accession=PF01842.16; Description=ACT domain
  Subcellular localization annotation: CTP_CleavageSite=67; ConfidenceScore=5.77e-01
MTMNAAIASRLGLAVSRCGAGSRVDSRPLTPAVGFTAGPRARSVAVTAASSSPATGGVTPVPPRSNRSVMKRHTLSVFVGDESGMINRIAGVFARRGYNIESLAVGLNKDKALFTIVVSGTDKILNQVVEQLNKLVNVIKIYCNCKHHPVSQGNVAQRRGGHELEPRSAAPHGPAATSAQTVVWLEQMVARPVDPLVRRRVVVVVARSSQMKASVERSVAEGRHVLQPLVRGGEQPPRCSGALVQLRLPRNGAPPSSASPADALGNRVLQPAGACRWTAAAVCRGASTLSWT

SEQ ID NO: 76680 - protein, 630 aa, Zea mays
  Coding DNA Sequence Number=SeqID_33305
  Homolog annotation: Hit_ID=Q6JAD6; Match level="QueryCoverage=97%, HitCoverage=97%, E-value=1e-142, Identity=65%"; Hit description =Putative uncharacterized protein
  Pfam annotation: Domain name=Extensin_2; Domain location=285-628; Score=-135.3; E_value=0.053; Accession=PF04554.4; Description =Extensin-like region
MPRTKNASTSGGGDDEDPRRPFRQVKGKTVYLEQQEGRKKRRSDREARAAAAAAAAAAQAALGDQPDVPSDQIAFRARHLASRSRSSTHTSASTPPPTLPAPVTPIAPSTSTAIPTTSTTPASTATPAPAPASAPPVPPPRFRERDETEVRPLASDPRLFDLQRATAARVRRFRYVPVESWLPAQRDPAAGVLFSTRIQESFFRAQMSAQIALRVHRLLDLPAFLLAAGAESEAHLTYLPGLLSFLTISGRYVEEWVRVFYASVWIDPDHHWMRFRFEREDVTITASQIRQLFGFPESTNRLHSLCYGTSDPPRRPHGGVAPGTAHVAALFRPPFTDGSRRSPADFTTAAKAPLRPHALVFGSYRPAPEIPVPAYAPVFDTQAEDAALRQFDTQGTAADDDDDDFGIPPPPPPPMPPRSHDHEAGSSSAVPATPPAMDPALASILQTLTQQQAHLAAEQARLSDRMLSMFQNMQDRQDALQQQLIQDRAENREFMALMLQHSGISAPPVQSAPPSSLHAPVVPSILSAPPAVTSPLRPVTLAFTSPVLSSVCPQPPVPPASAVTTTAVAVSVTASVPVAPAALPASESVPAPASTADPGSETDSDPPSAFALLPRPRPDAPPPPPPASDV

SEQ ID NO: 76681 - protein, 97 aa, Zea mays
  Coding DNA Sequence Number=SeqID_33306
MGEVKELLGGGASRTEGLFGWAVAVEKVAVGCELWKKLFSIQKPLKAGPEGAFSFALRESRLLEKAASWIQPFGWLLAFRGQKLKPKAKPNTPGDGE

SEQ ID NO: 76682 - protein, 384 aa, Zea mays
  Coding DNA Sequence Number=SeqID_33307
  Gene Ontology: Mol. function=enzyme inhibitor activity; Cellular component=cell wall; Biological process=cell wall modification
  Homolog annotation: Hit_ID=A2XAB2; Match level="QueryCoverage=66%, HitCoverage=80%, E-value=1e-48, Identity=46%"; Hit description =Putative uncharacterized protein
  Pfam annotation: Domain name=PMEI; Domain location=111-215; Score =19.8; E_value=0.00035; Accession=PF04043.6; Description=Plant invertasepectin methylesterase inhibitor
  Pfam annotation: Domain name=Pectinesterase; Domain location=268-384; Score=-147.6; E_value=1.9e-10; Accession=PF01095.10; Description =Pectinesterase
  Pfam module annotation: Pfam domain module=PMEI::Pectinesterase; Domain location=111-215::268-384
MTGPRREPWRRSPPPLSTRGAPIPRRLHLEPIQHRRQPCPQHWIFEISILKDFVEHRQERGEMRRLEVLAWSCAIATVVLALAPGVAAASEATHDVDDVSLAVSRIGTAAPSPTSNVTAICLSTPYPSACETALSSPAQGSSGTDDPFATLDQLGDALAAAARDADGVTTWLSAALTNQATCDDSLAADPDSAGRGAIRARLSALTQFIATALALHVNKSKAHHSGGGSPSSGSLPTPASPFPSWVTQQDRKLLESSHAGASGGLAVDAVVALDGSGTHRTINEAIAAVTTTAANGGGARKVIHVKAGRYEESVTVSSKQKNVMLMGDGKGKSVIVGHKSAGEGYTTYASATVGTTSDARYTSASSYSSFHHPRQHACTKATYP

SEQ ID NO: 76683 - protein, 162 aa, Zea mays
  Coding DNA Sequence Number=SeqID_33308
  Homolog annotation: Hit_ID=B0JCV8; Match level="QueryCoverage=99%, HitCoverage=38%, E-value=2e-17, Identity=69%"; Hit description =Misfit TNP1-like protein
MGNKVRYPVDDITRPVTCTLVIRYGINNNRTKKVGTGIAIPGPSTFRTPPPSPQPSRDSRQSKKSKLPLPKLVSTFEKKKSKATTAGKARFLKGIGRDLTSHTVDLAEHEESVEKAKAMAAKIKIPTKAGYKNVPKHYVSARPLLTLEKLRKVPVGIKRLHD

SEQ ID NO: 76684 - protein, 38 aa, Zea mays
  Coding DNA Sequence Number=SeqID_33309
MAQSQLGKRHLDRIELLDTWLHLNHLFFSCGGCETAMD

SEQ ID NO: 76685 - protein, 151 aa, Zea mays
  Coding DNA Sequence Number=SeqID_33310
  Subcellular localization annotation: CTP_CleavageSite=14; ConfidenceScore=5.06e-01
MNRLGPKPAQVGPTAAESRPRPRARWRLCRKALEVLSNRKRVRLLFPGVTDISQKGPLVSVYSVFHVLDGVQARPCSGEQLRRPIEAVTGANLRLRLNPSPQECFPQLNCTIGGLGSSGHGGRKYNGNMIVFPAMGTGLVQLKESGSITEA

SEQ ID NO: 76686 - protein, 120 aa, Zea mays
  Coding DNA Sequence Number=SeqID_33311
MSKNARDTRFIPRFGHTTKGRLNLPWQAWQPVCQSDWQTDAQTDLQTDCWSEVRGVRDQLNCPLGPVQLVLTREFRRENPSSTARRQVQLLKKLNSAEVKFSWKAQLQLKKFSCFSARTL

SEQ ID NO: 76687 - protein, 179 aa, Zea mays
  Coding DNA Sequence Number=SeqID_33312
  Gene Ontology: Mol. function=metal ion binding; Cellular component =nucleus; Biological process=multicellular organismal development
  Homolog annotation: Hit_ID=O04003; Match level="QueryCoverage=93%, HitCoverage=41%, E-value=5e-70, Identity=82%"; Hit description =Protein LIGULELESS 1
  Pfam annotation: Domain name=SBP; Domain location=1-42; Score=7.1; E _value=0.003; Accession=PF03110.5; Description=SBP domain
MDSDLPLPSRIFHLLDEFDDAKKSCRKRLADHNRRRRKSKPSDADAGDKKRAHANKAAAAKDKAESSSKNMDIGDGLGAQILGSALLSKEQDQAMDLGEVVKEAVDPKGKASMQQHYGFPFHSSSAGSCFPQTQAVSSDTTSNIGQVQEPSLGFHHHQHHQHSNILQLGQAMFDLDFDH

SEQ ID NO: 76688 - protein, 168 aa, Zea mays
  Coding DNA Sequence Number=SeqID_33313
MASWRKKLEAWAASREPQPATHPAAAPSFYPALTPLYRSSSLCCFVSHRKNPAAYLLLSPLLPTPLCYLPAGRLARTAATRAGPGMRRRWSRAAVLACLLLLACVAESRAVPDASGGGGGPGEQRRGAFDVVVVGLVSIGLGRRWRAGEMVDEDKRRVPTGPNPLHNR

SEQ ID NO: 76689 - protein, 57 aa, Zea mays
  Coding DNA Sequence Number=SeqID_33314
MKHKTAALKLTQRFLSKDLKWERQEIEFRRENPSSTARRQVQLVYGQRGSQLNLTFS

SEQ ID NO: 76690 - protein, 126 aa, Zea mays
  Coding DNA Sequence Number=SeqID_33315
  Gene Ontology: Cellular component=chloroplast thylakoid membrane; Biological process=cell redox homeostasis
  Homolog annotation: Hit_ID=O23166; Match level="QueryCoverage=38%, HitCoverage=18%, E-value=1e-11, Identity=64%"; Hit description=Thiol- disulfide interchange like protein
MSTCWRAATEGVRYMQQSDIPYYLNHVEVPGGDVGALLIPHEDIWKEFTALSNEKVQEAPMVCIYKLREHAGGSSFHFVSDFKQEVLTKTLALPNGKPTIVEFYANWCEVCRELAPYIYKVEQQYK

SEQ ID NO: 76691 - protein, 354 aa, Zea mays
  Coding DNA Sequence Number=SeqID_33316
  Gene Ontology: Mol. function=carbohydrate binding; Cellular component= cytoplasm; Biological process=carbohydrate metabolic process
  Homolog annotation: Hit_ID=A7Q6C4; Match level="QueryCoverage=92%, HitCoverage=98%, E-value=1e-135, Identity=72%"; Hit description =Chromosome chr11 scaffold_56, whole genome shotgun sequence
  Pfam annotation: Domain name=Aldose_epim; Domain location=32-326; Score=238.7; E_value=1.3e-68; Accession=PF01263.11; Description =Aldose 1-epimerase
MSVSASSPAAAAGDEKQEAAPVRRCKGVNDLDKVVLREVRGSSAEVYLYGGHVTSWKDEHGDELLFVSNKAIFKPPKAIRGGIPICFPQFSNFGNLEPHGFARNRTWSVDDDPPPFPVPTSNSAYIDLILKPTEDDLKIWPHRTPERLIFVIFLSMFVALEGKRGYLVALSPGGDLMLTSRIRNTNADGKPFSFTFAYHTYFKISDISEVRVEGLETLDYLDNLQDRARSTEQGDAIVFESELDRIYLGTPSKIAIIDHEKKRTFVVRKGGLPDAVVWNPWDKKAKAMSDFGDDEYKRMVCVEAAAIEKTVTLKPGEEWTGKLELSAVPSSYYSGQLDPDRVIQDSTVPEDSIS

SEQ ID NO: 76692 - protein, 881 aa, Zea mays
  Coding DNA Sequence Number=SeqID_33317
  Gene Ontology: Mol. function=oxidoreductase activity, acting on single donors with incorporation of molecular oxygen, incorporation of two atoms of oxygen; Cellular component=cytoplasm; Biological process=fatty acid biosynthetic process
  Homolog annotation: Hit_ID=A1XCI1; Match level="QueryCoverage=100%, HitCoverage=100%, E-value=0.0, Identity=91%"; Hit description =Lipoxygenase
  Pfam annotation: Domain name=Lipoxygenase; Domain location=210-865; Score=850.2; E_value=1.1e-252; Accession=PF00305.10; Description =Lipoxygenase
  Pfam annotation: Domain name=PLAT; Domain location=97-199; Score =28.6; E_value=1.4e-05; Accession=PF01477.14; Description=PLATLH2 domain
  Pfam module annotation: Pfam domain module=Lipoxygenase::PLAT; Domain location=210-865::97-199
  Subcellular localization annotation: CTP_CleavageSite=14; ConfidenceScore=5.13e-01
MMQQLRHSQPSPCLCGLRAARPMLALGAAASRSRPAGKLQPSVCLGLGHVAPAAARGQPRPRAVADSALGASPTSVHVGGKLLLQNFAADSQQRLKLSIQLVSATVADPDGRGVKAEASVLDAVVGSGDSELDVDLIWDEALGAPGAVVVKNHSDFPVYLRLLSVPAGVGGADDEAAAVHFACNGWVYPVDKHPYRLFFTNDACVKEETPSALLKYREDELGALRGDGETTERPFQPWDRVYDYALYNDLGNPDLRQDLARPVLGGSQEYPYPRHPRSESRAPLDEEIYVPCDERVGFASIPAPTLPPLGGHFRSLADVYRLFGLDDLGRLPEAKAVINSGAPFPVVPQVISVNPTHWRKDEEFARQMIAGANPVCIKRVTKFPLASELDRGVFGDQDSKITKDHVEKNMGGMTVQQAVEEGRLYVVDHHDWVMPYLKRINELPASEEKAEVSQRKVYAARTLLFLDGEDSSMLRPLAIELSSPHPEKEQLGAVSTVYTPPDSGDDGITAGRFSTWELAKVYASANDAAENNFVTHWLNTHASMEPIVIAANRQLSVLHPIHRLLKPHFRKTLHINAVARQIIVGSGDQRKDGSVFRGIDEVTYFPSKYNMEMSSKAYKAWNFTDLALPNDLIKRGLAKGDPKKPETVELAIKDYPYAVDGLDMWAAIKKWVADYCAIYYADDGAVARDSELQGWWSEVRNVGHGDLADAPWWPAMDCVADLVETCATVVWLSSAYHASISFGQYDYLGFVPNGPSITTRPVPGPDAGAEVTESDFLASVTPVTEALGFMSIASGPMGLKGTEVYLGQRPDTEQWTRERRAAEALAEFRARLEEVAGNIDRRNADPALKNRTGQVEVPYTLLKPTAQPGLVLRGIPNSITV

SEQ ID NO: 76693 - protein, 160 aa, Zea mays
  Coding DNA Sequence Number=SeqID_33318
  Subcellular localization annotation: CTP_CleavageSite=77; ConfidenceScore=5.41e-01
MRAISNYICTLSLTEGKVGASGSTLRSSVIGSFGIVPVLAFRRRFFSQDLRQQSMPPTVSLDNNDDLMSGHWMGLVSSSDEDDENDDGSNDYDISDEDNDNSGDDDGDDDGGASQSDEMPPSKRHQLQHDNLLWYAWPALDGVRDDTSDYPGSGFSRSYF

SEQ ID NO: 76694 - protein, 125 aa, Zea mays
  Coding DNA Sequence Number=SeqID_33319
MAGRRYGLRILDVTAAAPTIHALRLNVSLAFDFIPLPEGITDTESLPLFVEAIVPTTSHMAESSDLYKIRLMRDRAKAAAGKTKTKGKVKEATSSESTSEAFKMKNLWGGLVKAKLLKQWNILKG

SEQ ID NO: 76695 - protein, 205 aa, Zea mays
  Coding DNA Sequence Number=SeqID_33320
MELSKEVKSKYEELVTLAFGFKEQSSYKVPSAKWLRFIEEKYYEDPSANVGAGGKRKRAAKSEADKEPPSGLVKKNAKMSVHNDTTVKKTSTPKKTTRPKSRKRVAPLPLRHITAPRLSSPLGPTLTWFMINSKDSDEGGKSLKGQEILSEEEVESPRILGLGTAAFAVSSSSEKMAQRNLSKMTSLRGTRKQKETRKRKILHLR

SEQ ID NO: 76696 - protein, 303 aa, Zea mays
  Coding DNA Sequence Number=SeqID_33321
  Subcellular localization annotation: CTP_CleavageSite=61; ConfidenceScore=5.04e-01
MDLALVAVSVADVMATTIARGSVQVTASPTLPLDPTGHRKEVAFWVKPQPSVHSSVALRIVITRKRSSRLDYVSISDGRCLLARAVAWVEALRSAEVEAIQLHASSSCAKDKERELANLHSKICRLRSEVSPLHAECDGARGDMDHLQDEGSRLKETPRGVKSRIELAKSSSWEVEVRLVQPGSELTRERDTIEELHKIVVQAWDAKAMVDKVGVVAIEKTCKLLLARENAVTAGCRTDALLSERSSEHQELCLVASIVCDYLFPLSLTKAPLIDPLREVPNRVECSVAKGVSERELGLHLFS

SEQ ID NO: 76697 - protein, 69 aa, Zea mays
  Coding DNA Sequence Number=SeqID_33322
  Homolog annotation: Hit_ID=A3B342; Match level="QueryCoverage=86%, HitCoverage=16%, E-value=6e-10, Identity=61%"; Hit description =Putative uncharacterized protein
MSRASNDYYIKDCDVISAPEVTRRRIGSNDQFVILATVGGNFFRQVWDVLFNYETMQIVAYIKVCMALN

SEQ ID NO: 76698 - protein, 74 aa, Zea mays
  Coding DNA Sequence Number=SeqID_33323
  Subcellular localization annotation: CTP_CleavageSite=60; ConfidenceScore=5.53e-01
MGYAQANASACYKNVVLGLSSTCGSANRVVRGAMHRGRRVMSVLTSEDMAPTSQWLVGVRAGAIRGWDEVAVVR

SEQ ID NO: 76699 - protein, 271 aa, Zea mays
  Coding DNA Sequence Number=SeqID_33324
  Homolog annotation: Hit_ID=Q6QP51; Match level="QueryCoverage=18%, HitCoverage=22%, E-value=2e-12, Identity=71%"; Hit description =Putative growth-regulating factor 1
MAKWSPHRAQTRGEEEGMEIGRGGAHHGRMEKNDMGDTASGGRRAKRGKAPMARGGRGREARGGPGGWANGVGERLCSRAHTQGGGCGWDTHAARVWGRWATASEWAKGRWASRRLPGRARLRMGHGEGRKGASWACAGEWARGVTGRIGGTFGRRSRRRFTSAIMTASKKGPRKGILLKGSFSAKEAGPEPPTDQRFEGWPLRRVRQPPQSTRAPSPPTNQRFEGWPLGRVRQPPQSTRAPRPPLVRGLKAGPSDGSDSRLRPLGLRAHY

SEQ ID NO: 76700 - protein, 502 aa, Zea mays
  Coding DNA Sequence Number=SeqID_33325
  Homolog annotation: Hit_ID=Q6JAD6; Match level="QueryCoverage=91%, HitCoverage=74%, E-value=1e-148, Identity=57%"; Hit description =Putative uncharacterized protein
MEKCKPIKTPMPTNGHLDLDEGVTLPAREPSPVLPGFPPLVRQVRMPRTKNVSTPRGGDDEDPRRPFRQVKGKTAELGDQPQTPSDQIAYRVRRLASRPRSSTPNAASTPPPTLPAHVTPTGPSTTSTTPASTAPPPAPVSAPPIPPARFWERDETEVRPLAADPRLFDLQRATTARVRRFRYVPVESWLPAQRDPVAVDLFSTRIQESFFRAQMSAQIALRVHRLLDLPAFLLAIGADSEREDVTIHASQIRQLFGFHESSTRLHSLCYGTSDPPHRPHGGVAPGTAHVAALFRSPFSDGSRRSPADFTTAAKFLYQLMRRTLLPWMGYREATTHIQLWLLGALVSHSEFDVVDFLICEIEDTVLDGLRARRQLPYAHYLCHIFAQLIRPPQFQGTLEASRLVFGSYRPAPEDPAPAPAPVFDTQAEDTALHQFEAQDAAVDYDDDDDDFGISPPPPMPPRSHDHEARSSRATPAAPPAIDPALASILQTLSQQQAHLAAE

SEQ ID NO: 76701 - protein, 178 aa, Zea mays
  Coding DNA Sequence Number=SeqID_33326
MAPEGGLNCCQPHSVEWHNSRERRRRRCFPVRSVSGAAKCLRSLRLCRLKSTRQDKVSGNPCIKCSCDTVGWRGDLAKVASLRRLGLGRAEGLSKYDICCTAYINQNIMDQKSLDDTRYDHSIIVRVIFELKVVLGEEGKGTSVMHERVQVSVNSTGTFGDEADPQQCSSTTSFQNNV

SEQ ID NO: 76702 - protein, 166 aa, Zea mays
  Coding DNA Sequence Number=SeqID_33327
  Subcellular localization annotation: CTP_CleavageSite=27; ConfidenceScore=5.04e-01
MSSRHIPTKRSTRVVVPYNPETSVGLQAALVAPASAHLHVAEPVRRSARIITLQAVTTTDRRRNTPYCMMTSSRFCVDDGSLFCKLCDRRMHDRIIYMYMSMGFCTEECRNEYFLDYRCRLTMATVEAEGRSEARKPVEAAAATTEGQGVGYRRIFFTCAEVESFP

SEQ ID NO: 76703 - protein, 146 aa, Zea mays
  Coding DNA Sequence Number=SeqID_33328
MDELFNKLNSIEIDHQTQAKTENPGAPTIALASRGGASSNPSPIMFALFSLVTITKDNPNHFIASFPKKRKKEASPLDHHFGRRKGKLEYSFGKYKSKGGFDKESLKKKYLQKAEIKERALFASLSDLDHYSNDVTSSSNDEKTDR

SEQ ID NO: 76704 - protein, 83 aa, Zea mays
  Coding DNA Sequence Number=SeqID_33329
MIPARNPGRGERQSGVLKLGLAPTEEWESYGLQPGLRARLIWPDIARVQRAGAAELQRGRIGHDTAELKETEHMSEFLTSGRV

SEQ ID NO: 76705 - protein, 62 aa, Zea mays
  Coding DNA Sequence Number=SeqID_33330
  Subcellular localization annotation: CTP_CleavageSite=44; ConfidenceScore=5.13e-01
MARLTPTKSKSTGKSKPSSSAMDAAAEPDAISSWRPKRDKRGRSAAQGQTVRDLVQELGFPA

SEQ ID NO: 76706 - protein, 47 aa, Zea mays
  Coding DNA Sequence Number=SeqID_33331
MASCAPGATACAGGVWPAWLAAQAARGKEEGVEVDLQEFQDFDEFED

SEQ ID NO: 76707 - protein, 129 aa, Zea mays
  Coding DNA Sequence Number=SeqID_33332
MQNATWRALSQYCSLFSEVAGGLDLKYYARRSTGSTRGVIVSPVGEGDPRLSSMVNLVVVLNTELDHALDELRKARAEIAELRAERVEHHHQEDGSPTPVGTQHPYRSLLRGHHAYGTHDCRTKIDLEP

SEQ ID NO: 76708 - protein, 177 aa, Zea mays
  Coding DNA Sequence Number=SeqID_33333
MRACKGQKVAAGIYELSECYLGDTDAGYRGTTTLGREPGTPDAGHAVVLGRLGTAALAWISLLAGGVAVAGGGRVAGAGTQPASHAGGTATGWQGRRRRDSVSAFWRLVVPQPPKEPLVEAAGIWRTRQSGAPPDTVRYASHVTRPQLELLTSRPPDSPVVHRIGTIHCPVRLLVLL

SEQ ID NO: 76709 - protein, 256 aa, Zea mays
  Coding DNA Sequence Number=SeqID_33334
MPGKANCCCPARMQHSVLCPRFRGEDGSEDLPVRFGAAGARWCGVGGQVDAVVDADVVAAGESFSAVETVNATCGPTSSSLALMSGSRPLSGDANESLPVAASILGPSLLLQRSLAGRLEFVVPQALRCGGCSYPRGWNRSSVCNGTLSADVCSLWLSEPEHVVKGTLGRSAMSRSQRQRCQHGQRRSWLEKRLHRPEPDRAVHWRDQRRSRVAEAMSRAGVLEGQLAEASGRSAEPFARAGFLEETLAAMARAWC

SEQ ID NO: 76710 - protein, 57 aa, Zea mays
  Coding DNA Sequence Number=SeqID_33335
MESHDLRAERESRLVGGNEIDGSGYDYGTGCQHCNHCSGEDEAVEGDFQEFQDYDEF

SEQ ID NO: 76711 - protein, 365 aa, Zea mays
  Coding DNA Sequence Number=SeqID_33336
MAERYQLPRSCVPPTMRRKDSGYPPSGGLEGGKTRCIREREDMVAFQGGHPPFKGDDPYSHPQPSRAESSPTRSKVPPCGAGAGSHTSCKPTQSRRSQTAARGAHDRPTVTSDPPLLPRPTGERGGQPRRQHATAPSGRASPTPNTPSLEAQAHASCNRRADCFVHATAPPLAPPPRLLDCGTNTATRGDPAHNPAAPAWRGGQCGQKWAGSNGGGRRAGAAATSRSGRRFAFAIMTAPVKAPSLPTDQRFEGWPPEGFDSRLRSRGSYTHYWLAPEGFTAASDAERGMTMGTFDNNQGSGCAPELTGDTMFGAHRGQHGAFPPSSLRKGDAGAYVKKPSLSLIALSPCAEARGLLSQTRLRPNR

SEQ ID NO: 76712 - protein, 91 aa, Zea mays
  Coding DNA Sequence Number=SeqID_33337
MAKVEKEKEEALKVHNVDMMRIKEHDKSIIKLHTNLKTTKDSIASKDIENQRILETLEQLRAGGTSRATSHTGGDIEGVLGCIKIHWFYTV

SEQ ID NO: 76713 - protein, 221 aa, Zea mays
  Coding DNA Sequence Number=SeqID_33338
MGRGSEDIREPSKSASGVISQSGNRRSAKGSTLRRWMAAITPAALCRIARIKWLAGTPNHCSWKETKLTTYPGGGDGAAPLAGGIHSGRLSSERGRSKPSATRSSRSPVVTVEKGHGSRGEMMVTRSAITEQKGWRRKGLGKRFPFLWLNLSGCENLRGRREAEQRTVARPSSEYIKTKARPVQRFAWTRRGIQKPKAKRPFLERLAHAQRPPREPHAPSH

SEQ ID NO: 76714 - protein, 290 aa, Zea mays
  Coding DNA Sequence Number=SeqID_33339
  Homolog annotation: Hit_ID=Q6L570; Match level="QueryCoverage=71%, HitCoverage=60%, E-value=3e-67, Identity=63%"; Hit description =Putative uncharacterized protein OJ1115_D04.1
  Subcellular localization annotation: CTP_CleavageSite=36; ConfidenceScore=5.18e-01
MTGRPPLYARSPARRQAFASNEHPPPGKRTLPPSLPAMTGRPPPYARSSARRQAFAGDEHPPPALLGPPPLVDPSAGRGVCLMSTSWRDKQRPELVNFVATFLATNMYRLNFMSLSPDFIFNNGGLSVAFAFETDWLPEREAAVFSRVTTLKRQFKYLYVVVVVRSAEQNESFNQSYFKYGMELGCPTFVPVCDPAMGFEKIVRIAHARGGKTFVASFTQFLARVQVLNRELALIACLFSSVCKQKDNIATMRIEREQAVQCMDAFLRVLTSIPGIDSHDANADSGQISA

SEQ ID NO: 76715 - protein, 246 aa, Zea mays
  Coding DNA Sequence Number=SeqID_33340
  Gene Ontology: Mol. function=cytochrome-c oxidase activity; Cellular component=mitochondrial envelope; Biological process=electron transport
  Homolog annotation: Hit_ID=A2WSJ3; Match level="QueryCoverage=22%, HitCoverage=70%, E-value=2e-21, Identity=83%"; Hit description =Putative uncharacterized protein
  Pfam annotation: Domain name=COX5B; Domain location=144-233; Score =23.6; E_value=9.1e-08; Accession=PF01215.10; Description=Cytochrome c oxidase subunit Vb
  Subcellular localization annotation: CTP_CleavageSite=35; ConfidenceScore=5.63e-01
MWRRLQTLAPSLRRAAASSSPASARAVPLSTVPVAAFRRTSTLLSSPGDKPAPSKVEDVMPIATGLEREELEAELQGKKRFDMDPAVGPFGTKIKLVLSTSNDTIFHSSMDMALSKKDPPDTSLVTDINIVNYKVFDMCMLKLHYLKLVSNTPAVSQPYMKFVGLPMLQDLNCSGQYKESAVIESYYNKRIVGCPGAEGEDEHDVVWFWLEKDKPHECLVCSRYFVLKVIGDGGDPDGHDDEDDHH

SEQ ID NO: 76716 - protein, 94 aa, Zea mays
  Coding DNA Sequence Number=SeqID_33341
MLISEAMKASLSSNKVNARLPGDETILTPGKDKVVVYKSFFKAGLRLPMYKMIVKVLQHYEMKAKGQTDLHNNFECYNFVYCKDTAGQVLAYRT

SEQ ID NO: 76717 - protein, 61 aa, Zea mays
  Coding DNA Sequence Number=SeqID_33342
MKYQEFFYSKRIPRLLLTGLHTLPTSRDSRSAQGSGLPIDHFQSDLVGSHYVDFTKIPQRS

SEQ ID NO: 76718 - protein, 202 aa, Zea mays
  Coding DNA Sequence Number=SeqID_33343
MTGQSSHLERLHRRLHEEQEHRCQEQQQEEVESRRQPSPAPQPEMPPTPPQGIPTAGGDSDGYGDDNDGGSSSHNMELSEEQEPEGWIARPITCDAARDCHFHDALNPLLCRSFDRHTWSIEYRCVVTSIVVGYTRTSGRLLACGVADDLDLKYYPRRSTGSVEGVIVSPVGEGNPRLSSMVNLVSMLNTELDHTLDELGKA

SEQ ID NO: 76719 - protein, 270 aa, Zea mays
  Coding DNA Sequence Number=SeqID_33344
  Gene Ontology: Mol. function=kinase activity; Cellular component =ornithine carbamoyltransferase complex; Biological process=amino acid metabolic process
  Homolog annotation: Hit_ID=Q6QP54; Match level="QueryCoverage=34%, HitCoverage=33%, E-value=3e-18, Identity=56%"; Hit description =Putative kinase
  Subcellular localization annotation: CTP_CleavageSite=33; ConfidenceScore=5.42e-01
MSSKPFASVLASSVCSGLTCRGESALVFVSNARSMPYAPPVGALAPSTRLTADEALPPAWPWLPRLLLRRRGRGRATVERHELETPETEHRPGSERLLETAHLELDGKLFVNTQQAPTWRANCRRFETGGSLGRRVNVTACPSPDGSARGRARRGEARSPEAGVREVEIPRPSCSSRAQVGRKERIQPESARGRVMMAPPVDVVGPRPRLGDVEAPPRSRSSLSSVAEVESEPLGRARRRPSAEVRAESEPWGRAMQSSSSSRAEPKSEP

SEQ ID NO: 76720 - protein, 153 aa, Zea mays
  Coding DNA Sequence Number=SeqID_33345
  Gene Ontology: Mol. function=RNA binding; Cellular component=synaptic vesicle; Biological process=transport
  Homolog annotation: Hit_ID=A2WWV5; Match level="QueryCoverage=71%, HitCoverage=70%, E-value=3e-44, Identity=76%"; Hit description =Elicitor-responsive protein 1
  Pfam annotation: Domain name=C2; Domain location=6-91; Score=91.1; E _value=3.4e-24; Accession=PF00168.21; Description=C2 domain
MGKGVLEVHLVDAKGLSGNDFLGKLDPYVIMQYRSQERKSSVARDQGRNPCWNEVFKFQINSAAANVQHKLILRIMDHDNFSSDDFLGEATIDVTDIVSLGAERGTYHLNAGQAQRGPRRQDVPRRDQGRHHLHLHPDPEMVLVNFSGEQGGE

SEQ ID NO: 76721 - protein, 791 aa, Zea mays
  Coding DNA Sequence Number=SeqID_33346
  Gene Ontology: Mol. function=ribonuclease activity; Cellular component=ribosome; Biological process=RNA metabolic process
  Homolog annotation: Hit_ID=A2WWV6; Match level="QueryCoverage=97%, HitCoverage=97%, E-value=0.0, Identity=72%"; Hit description =Putative uncharacterized protein
  Pfam annotation: Domain name=RNB; Domain location=368-664; Score =326.8; E_value=3.8e-95; Accession=PF00773.10; Description=RNB-like protein
  Subcellular localization annotation: CTP_CleavageSite=67; ConfidenceScore=5.30e-01
MAARAAGCCSSAALAFFRLHPLRCAVRPAAALVGGCSSGLRGGCRSRLAHSIVDLVMEELRSRRRVRVSAKIGLQGTKELPDNKIVKRTLQKGLLLEFQKDPERSLLAVVERPDGKKNWMVTDQNGVMSSIKPQQVTYVVPGIMNFDYSKIDEFLEKTQNLLDPTILECAWMELSEKDKSITVEEFAEIVYGTKESLESYCAHLLLSRDVVYFVKVESRDYSMYQPRSPAQVEELLRRKLAKEAADKELEEFVHLLKSAKALPMESKPPKASWLVEEKVRQKIESLQAYAVDACDDEQRRLAGNILKAMGFTRTSSAALKLLINVGYFPVHVNLDLFRYDVRIRYTDEVLSAAEELLVDSPDTDMHIRKDLSTLKVYAIDVDEADELDDALSATRLPDGRIKVWIHVADPTCLVKPHSIIDREAMHRGTSIFLPTTTFPMFPERLAMNSMSLQQGKECKSVTVSVILNLDGSIAEYTLENSVIKPTYMLTYESATELLYMNLEEEEELRILQEAARIREQWRRSQGSIDTAMIEPRIKVSNPDDPEPNINLYVEDQANPAMQLVSEMMILCGEAVAAFGFDNNLPLPYRGHPQSNTAVSVFSHLPEGPARSFANISVLRAAEMDFQKPVPHGVLGIPGYVQFTSPIRRYVDLLAHYQVKAFLRGDSPPYSAGDLEGMTFIASMHVKVARRLHSNSLRYWLLEYLRRQPKGRKYRALILKFVKDRMGALLLVERPKTHAVEQREKDMVGMQVTTTISRGKVGDQVSVTVETAHPRDDILSVREVVEDTKDSE

SEQ ID NO: 76722 - protein, 116 aa, Zea mays
  Coding DNA Sequence Number=SeqID_33347
  Homolog annotation: Hit_ID=Q60E27; Match level="QueryCoverage=44%, HitCoverage=7%, E-value=3e-08, Identity=53%"; Hit description =Putative uncharacterized protein OSJNBb0012L23.10
MAKAVNKSKKSKIKGSHHDDEGAYSDTDSLRAFSDSSYDNCEERCYKILQPNARGRTRDANGAFHASTSTKKYVGCKVKTNGPKHTCGSYEVLFLLYEMLLLYDNVMGSWYFVMLL

SEQ ID NO: 76723 - protein, 287 aa, Zea mays
  Coding DNA Sequence Number=SeqID_33348
MGRLEPRAEWESRLVGKVCNLCRVLETGGEAGNMDDFEEFQEYEEFYSTLTLVLTVSFVDGPYQERRRQEQEQEQQDSSPLPQQEVDSERPPSPALQPEMSPAPPQGIPAGGGDTNGDGDDDDTGGSLSHDIELSEEPEPDGWIARPITRDAARGCHFHDALDTLLRRAFDQHTCGVADGLDLKYYPRRSTGSAGGLIVSHVGEGNPRLSSMVNLVAVLNTKLDHALDELGKVRAEVAELCAERAACHYLDGGSPAPVGIQHPYRSPPRGRFDYGTPDCRTRIDLDP

SEQ ID NO: 76724 - protein, 82 aa, Zea mays
  Coding DNA Sequence Number=SeqID_33349
MAIPRWSLLPSTIRRPTRCKTKLESRRNERGNHYRKLYSREPQRRRTAAPACNNIVDEELRPSRTPQFPGVGAKVVRVNPVV

SEQ ID NO: 76725 - protein, 60 aa, Zea mays
  Coding DNA Sequence Number=SeqID_33350
  Subcellular localization annotation: CTP_CleavageSite=37; ConfidenceScore=5.18e-01
MYGKTSDLKFTIASFSGRDFWDKVSRSRRLVWWGSSVAAVGVYASCRVIRAVESLASSSD

SEQ ID NO: 76726 - protein, 79 aa, Zea mays
  Coding DNA Sequence Number=SeqID_33351
MGTSSCSRSGRADGSVGFIGSPGMYSWLREEGLDLGRDFWDKVSRSRRLVWWGSSVAAVGVYASCRVIRAVESLASSSD

SEQ ID NO: 76727 - protein, 329 aa, Zea mays
  Coding DNA Sequence Number=SeqID_33352
  Gene Ontology: Mol. function=hydrolase activity, acting on glycosyl bonds; Biological process=cell wall organization and biogenesis
  Homolog annotation: Hit_ID=A2YQG1; Match level="QueryCoverage=26%, HitCoverage=18%, E-value=2e-20, Identity=63%"; Hit description =Putative uncharacterized protein
CAGFYAGAGPAREVWASVEEFGAVGDDATPNTAAFRCAVAELGARAAGGGGARLDVPLGRWLTGSFNLTSRFTLFLHRGAVIIGSQEAATARSRSRSRRADPRSADAGRLLAGFVLGERSGPATELVATDDSDAASDRSSVASESDTQLPTSLAAASTLSCFFAFSAFHSSAAAGTTALPYYPRSPLPPKSSPKSAVLLGRGSMAGSSAVLQARARPRIRRRGGRGLAPAPVHPGAARARPPGLGVPPRARLHGWLLGGPPGKGAASASDPAQGGRGLAPAPVHPGAAHARPPGLGGPLGAAHGSRALMDEPPAVRASCSSLSPALRRA

SEQ ID NO: 76728 - protein, 128 aa, Zea mays
  Coding DNA Sequence Number=SeqID_33353
  Homolog annotation: Hit_ID=A7PVR6; Match level="QueryCoverage=21%, HitCoverage=10%, E-value=3e-08, Identity=100%"; Hit description =Chromosome chr8 scaffold_34, whole genome shotgun sequence
  Subcellular localization annotation: CTP_CleavageSite=42; ConfidenceScore=5.17e-01
MDFDMAYRQHNYVQLSEGWKNSATVSSRKGRRAPAGTFAGSPQTMRWSLELEKSKPVILTGDLNCAHQEIDIHDPAVPYHAASSVILSMLVTPCIRSIISKKLGPFEQGMVQGCITGISSRPQVSYIL

SEQ ID NO: 76729 - protein, 146 aa, Zea mays
  Coding DNA Sequence Number=SeqID_33354
  Gene Ontology: Mol. function=transition metal ion binding; Cellular component=ER-Golgi intermediate compartment; Biological process =Golgi organization and biogenesis
  Homolog annotation: Hit_ID=A2YMU5; Match level="QueryCoverage=83%, HitCoverage=26%, E-value=9e-49, Identity=75%"; Hit description =Putative uncharacterized protein
MELLWYVRFGLWWIILGVASSIGLGSGLHTFIMYLAPHVALFTIKAVQCGRVDLKSAPYDTILLERRPSWLEKDCLQFGPPIYHETIPFSKILQEVYLEDILWSIGTALGELPPYFLSRTGSVHTALRTKYNIIYLITAVFSCLST

SEQ ID NO: 76730 - protein, 205 aa, Zea mays
  Coding DNA Sequence Number=SeqID_33355
  Gene Ontology: Mol. function=nucleic acid binding; Cellular component= cytoplasm; Biological process=multicellular organismal development
  Homolog annotation: Hit_ID=A3BJL5; Match level="QueryCoverage=54%, HitCoverage=11%, E-value=1e-27, Identity=57%"; Hit description =Putative uncharacterized protein
MVHVLPLPRPHPAPHPAILGQVSFGHNPLQEVAILLIFDFDGVRILRLQNESRSDAEKIFNEFNARKPEEKNVFKGVTKNHLFMGIIGITIVFQCCLDKNVRSAGPAYFANVAIKINAKFGGRNLEFANPKESLPGVTIEPTIIFGADVTHPAALDDTAPSIASVVASQDWPKVANYNGIVRAQGHRKELINGLEDIVKYGHRNL

SEQ ID NO: 76731 - protein, 508 aa, Zea mays
  Coding DNA Sequence Number=SeqID_33356
  Gene Ontology: Mol. function=ubiquitin-protein ligase activity; Cellular component=ubiquitin ligase complex; Biological process =protein ubiquitination
  Homolog annotation: Hit_ID=A2X5S7; Match level="QueryCoverage=74%, HitCoverage=87%, E-value=1e-131, Identity=64%"; Hit description =Putative uncharacterized protein
  Pfam annotation: Domain name=DeoC; Domain location=101-311; Score= -71.9; E_value=0.068; Accession=PF01791.10; Description=Deoxyribose -phosphate aldolase
  Pfam annotation: Domain name=U-box; Domain location=11-88; Score =89.9; E_value=8.2e-24; Accession=PF04564.6; Description=U-box domain
  Pfam module annotation: Pfam domain module=DeoC::U-box; Domain location=101-311::11-88
MELASSYSAAEIPHYFLCPISLEVMRDPVTLATGITYDRASIERWLFTDGHATCPVTRRALAPAEMDATPNHTLRRLIQAWCAAHQVERFPTPRQPLDSCRVAALLDQGRHGGAAAALREIKAVIAESERNRRCVEATPGAVDFLASLVAKDSSADRSPSKRASSQQDADDGDSLGEEVLDSPTFMSSPAEDALGVLYSLKPSERSLAQIMEREGNFLDTLASVLRRPSYRTRAYGILLLKAMTEVMTPAQFMMVSADLVQEVVLVVSDRVSSKAVRAALHVLCRLCPWGRNRVKAVQAGAVAALVELLLDEGGSRVTELAVVAIDHLCGCAEGRSDLVAHPAGLAVLSKKVMRVSAAATESAVRALHAVARHSPTPSVRQEMLAVGVVAKLLLVLQTNAGERAGLRGAGVGGGGSGVEAPNGGGVETLGVAVEASGTAVATPATTWRLWVVVAPGGARRHRPAERRPAACVSRETSQRMKEIGGDDSMQFHKMTMNVGQGKVGVLKA

SEQ ID NO: 76732 - protein, 86 aa, Zea mays
  Coding DNA Sequence Number=SeqID_33357
MMGPLESSLVGFGGLDDNPIKGLISVLSVEQTADQAKEERKKSFEVPSSREKVKEAEEPIVRGEEEDFKVKVDRVEKSYNASKITS

SEQ ID NO: 76733 - protein, 135 aa, Zea mays
  Coding DNA Sequence Number=SeqID_33358
  Homolog annotation: Hit_ID=A7NUP0; Match level="QueryCoverage=59%, HitCoverage=34%, E-value=8e-23, Identity=63%"; Hit description =Chromosome chr18 scaffold_1, whole genome shotgun sequence
MVHVLPLPRPHPTPHPAILGQVRYKQRLSWTRFGDLLKERRSTSCFFVDLWEDGGSDDGYVLVKQEDVVDGMTSFMAACLVSIKKTKDLLPDQLQKALRKAISVEKKKSKIWKAWDETKVIYNVASWGRHCCWAT

SEQ ID NO: 76734 - protein, 299 aa, Zea mays
  Coding DNA Sequence Number=SeqID_33359
MDYAAPIRVALEAGFELPHQWRRPPLHRRIAGDSDHPSNNSGKKARPGNQRSGRRTAVQGACNRPTIKRPFIFAVSSGQRGEPPRKRRATVPRLCAPSAPLQLAVQLKGPGPRVITSAATRGSPAHGPTVPLSTTVMGQSAVGIGTIVGVVISGPTVIAATGARKQRSNHQTDSGPTCRLASSPEAGPGATVGTLNQGYPLLQHKGIAPMRRLLATRRTAPNSAGWAGPRVRSPRVGPNFGRVPEREGPWGGVKVIQQAARLLGLQANSAPVPSSALCYPFYKKLPLHAEDTQISDDRI

SEQ ID NO: 76735 - protein, 477 aa, Zea mays
  Coding DNA Sequence Number=SeqID_33360
  Homolog annotation: Hit_ID=Q6JAD6; Match level="QueryCoverage=61%, HitCoverage=68%, E-value=1e-35, Identity=57%"; Hit description =Putative uncharacterized protein
  Pfam annotation: Domain name=Extensin_2; Domain location=224-476; Score=-140.3; E_value=0.084; Accession=PF04554.4; Description =Extensin-like region
  Subcellular localization annotation: CTP_CleavageSite=30; ConfidenceScore=5.35e-01
MMRILVAPSGRSRARPFTWSNRKAARSGVRTEQPVQRQRLQQPLRRPSLEISRRLHPIRLHTVFVVSPPGLAPPLTPPLPLRHPLCLLPSLLLLHPPPQPYPLPPLRQLPLLLLLPLPLQLLLSLHLDSGSAMRLRFDLWLRILDCLTFSVLQRHGAQMSAQIALRVHRLLDLPAFLLAAGADSEAHLTYLPGLQTLLTISGRSASFLDFPSRRLVFTASATALLTLLVALTAVWLRAEDAALRQFATQGTAADDDDDFGVPPPPPPPLPPCSHDHEAGSSSVAPAPPQAMDPALASILAHLAAEQARLSERMLSMFQNMQDRQDALQQQLLQDRAESRAFMALMLQKSGVSVPPVQSAPPPPLHAPVVPSILSGPPVGTSPLRPVTLAFTSPVLSSICPQPLMPPASAVTTTAVAVSVTTSVPAAPAARPLSESVPAPASTADPGSETDSDPPPAFALLPRPRPDAPPPPPPASDV

SEQ ID NO: 76736 - protein, 223 aa, Zea mays
  Coding DNA Sequence Number=SeqID_33361
MEASVAERISERKASVAERRGRCQPLAERAPLAVNSYNSTVLQTLQYCNTDHACNCVFLPWLTQMEKQTNKMGIDWCSQYFGTGISCKRRKMAYDYYYQCVPTEAHHFPANSSQLYSTCSWKLDKGIFNMWNEKLVCSVGIGSSCSRISDTTTFSTMLVPLCNQFLLLKSPGANQSAQYTAPLNSQHRHGYQIRWTKNWGLPPAKAPNQSFFLTLSIGFSTDR

SEQ ID NO: 76737 - protein, 292 aa, Zea mays
  Coding DNA Sequence Number=SeqID_33362
MDYAAPIRVALEAGFGLPHQRRRPPLHRRIAGDSDHPSNNSGKKARPGNQRSGRRTAVQGACNRPTIKRPFLFAVSSGQRGEPPRKRTSAATRGSPAHGPTVPLSTTVTGQSAVGIGAAVGVVISGPTVIAATGARKQRSNHQTDSGPTCRLASSPEAGPGATVGTLNQGYPLLQHKGIAPMRRLLAARRTAPNSAGWAGQRVPRGEEGHHASVRSPRVGPNPGRVPEREGPWGGVKVIQQAARLLGLQANSAPVPSSALCYPFYKKLPLHAEDTQISDDRTQEDCPSSKYL

SEQ ID NO: 76738 - protein, 72 aa, Zea mays
  Coding DNA Sequence Number=SeqID_33363
MADPGAVVAPRSETQRRWLPIRMRGGNGSSIRSHGDGSQIQRCGGGDSLIYRASDDGAVGRVSGCDPGPRGG

SEQ ID NO: 76739 - protein, 54 aa, Zea mays
  Coding DNA Sequence Number=SeqID_33364
MTCCAHDAKRRQGCRYAAQTVTGHEMVQRSRVSQMEKKMGAMDQSSVDAEVDKD

SEQ ID NO: 76740 - protein, 109 aa, Zea mays
  Coding DNA Sequence Number=SeqID_33365
MVTSCRRFMPSLLDAKLNHVFSLAFEAYDPLPESVALPSARLFVECFCRALGKEAFAESRTRQSPALGNDSVCREQDSRHRNTLGKDVFAECQTLGEGGTRQKVVSSRL

SEQ ID NO: 76741 - protein, 93 aa, Zea mays
  Coding DNA Sequence Number=SeqID_33366
  Subcellular localization annotation: CTP_CleavageSite=29; ConfidenceScore=5.33e-01
MKTMRSTSTNRNQVVQRKRVWVLTYKSKRSSRIASIGLKHLKVKATSPQVNLEESKSTQESREQPMNKPRFLASFFLNLGGEIPVKGVRFVTP

SEQ ID NO: 76742 - protein, 45 aa, Zea mays
  Coding DNA Sequence Number=SeqID_33367
MDNSQFSNWVERKGRLLKDKFKIPRIRAYPDKGIEKPKDNDLTTE

SEQ ID NO: 76743 - protein, 437 aa, Zea mays
  Coding DNA Sequence Number=SeqID_33368
  Subcellular localization annotation: CTP_CleavageSite=38; ConfidenceScore=5.21e-01
MQSACNRAKWAHPFNSNAPSMEAQAHTSCHRRAGCYVRATAPPLAPLPRLLDCGTSTATRGNPVYDPTVPARRIGHRPVSRGRRRDGRCGRKWADSNGGGRRAEAAVTSSAKLTSPHGTDMRHLWQEKQATLRLCHNDRVKKGTEKGDTPEGILLREGNGPRAPLLIRGSKAGLSEGFNSRLRALGLRAHYWSEVRRPAPRKGSTAASGHSGSAPTTDQGGNDLVMESHQREASSPRAPSKGDRVRQITRSHFAAPLTGLTKGQRRLRRSDCCATRQSAADSSQGSDSGSAPEDDELRIAQPQDSDSGSALEDDELRFARPQGSDSGSAPEADELRFARPQGSDSGSAPEDDELRFARPQGSDSALASADGLRLARPRGSDSTSALEDRLDLDHGGASASPNPGLGPTTSQEAPSLPYPKLTQATGNKTGVPSCLPR

SEQ ID NO: 76744 - protein, 619 aa, Zea mays
  Coding DNA Sequence Number=SeqID_33369
  Gene Ontology: Mol. function=triacylglycerol lipase activity; Biological process=lipid metabolic process
  Homolog annotation: Hit_ID=A2Z0X6; Match level="QueryCoverage=98%, HitCoverage=99%, E-value=0.0, Identity=73%"; Hit description =Putative uncharacterized protein
  Pfam annotation: Domain name=Lipase_3; Domain location=60-217; Score =37.2; E_value=5.8e-08; Accession=PF01764.16; Description=Lipase (class 3)
MPTDSAPPNAASLSEDDRLLVAHCATLSFPSSSPTAAAATTHSASSFQVHHASHPYPCAAFVFPPSWSAADWMGGDGGHPPFGDAEVDPALFPSLRAVGSGIPARTNAAFLGNFRRLLDGSTLQSEVSRAVAEEKRVVFTGHSSGGSIATLAAIWFLEKCTRRGSVNQAHPFCVTFGAPLIGDNIFNHAVKREGWSQCILHFLLPLDIVPRIPLTPLASFREETQAVLDRLSSQTPNNSPAGRSLVIPEYYETLLRSTLSIASYEACSFMGCTSSILGTLTSFIDLSPYRPCGTYHFLTSSEQLIVLANSDAVLQLLFYCLQLDPQQQLLDAAARSLSAHWQYEPIKYCIQDIVCVDYLGTISSAVPGRQAGRVALGSIELSREAILHLSAAAQWEKQRQRNQTKIDESCQKIQEALRSLNEYKRSRELDGVSYYDSFKLQREVHDFNANVKRLELAGLWDEIVEMLRRRELPDGFEAREEWVSLGTLFRRLVEPLDIANYYRHSKNEDTGSYLSKGRPRRYKYTQKWHEQLQRVPVGSSLESCFWAVVEELQAEMADGRAFEDLRERLVKLENDAHGWYNSGSLGKDVFLGSSSFVAWWRTLPEQHRAASSIAKLVSL

SEQ ID NO: 76745 - protein, 52 aa, Zea mays
  Coding DNA Sequence Number=SeqID_33370
MASCKWRRKEGPDDGIQLEESIDATETKTKQSNRRKIDEGGVGGTLPGPLFN

SEQ ID NO: 76746 - protein, 63 aa, Zea mays
  Coding DNA Sequence Number=SeqID_33371
MVEEEYKEGNCQLVFKLFSKLLDDEIENIVQFMMEQQGLFAKASSFREERGKTSRIATSTGDI

SEQ ID NO: 76747 - protein, 629 aa, Zea mays
  Coding DNA Sequence Number=SeqID_33372
  Homolog annotation: Hit_ID=A3BYF6; Match level="QueryCoverage=99%, HitCoverage=73%, E-value=0.0, Identity=75%"; Hit description =Putative uncharacterized protein
MPASSVSGGSGPGGVSPDAIIEWLQDEMGYPSAPPAPDQLRKICRGNMIPVWSFLLRRVRSERTVATARRNILVHGVAARRAREGGAMGAGAGDAAAREAEARERDLAAEEAERLRGIVRRQRKELRARIAEVAREEAERKRVLGERSNARHKQVMLQAYEQQCDEAHKIFAEYQRRLHQFVNQARDVRRSSIGVAGATGALVDMQLQSDRDDLYPSTIKSNRLPEDLLETAGERSIRKACETLAADMIETIRSSFPAFEGCGINSSCQLDAEKLGIDLVGEIPTYVKLVALDSLKNPFMLLQSIITYTSRMKTLIHRETDKIDIRADAELLRYKYENEQVIDAASTDASSPLPYQVYGNGKTGSQLSTRGTYDQLLERQKEHVQQFLATEDALNKAAEAKALSQKLLQRLYGTADMAGNKKLPTGNTTQNVTNSRHLELDVWAKEREVAGLKASLSTLTSEVQRLYKLCAEWKEAEDSLKKKWKKIEEFDARRSELEFIYSALQRANMDSSAFWEQQPLSARGYASTTIIPACHAVVDMSTNSRDLIERELAAFSQSLDNSLCRLPATPQALLEAVGSNGVTGSEALAAAEKHAALLTARAGARDPSAVPSICRISAALQYNFGMECL

SEQ ID NO: 76748 - protein, 129 aa, Zea mays
  Coding DNA Sequence Number=SeqID_33373
  Homolog annotation: Hit_ID=Q6H590; Match level="QueryCoverage=75%, HitCoverage=26%, E-value=2e-41, Identity=82%"; Hit description =Putative uncharacterized protein OSJNBa0048A13.17
MDSGGGMEQRRAPHTIGRMLEQRPLQQSYAGEGEAAAVWPLWYTGEQEKVVSERWLPELRNAVQEARRCFDDCQRVRGLVDEWYEQPAATIVDWVTIDGQSVGAWINLVKQLHMEISRRTLAMSSVGDD

SEQ ID NO: 76749 - protein, 163 aa, Zea mays
  Coding DNA Sequence Number=SeqID_33374
MGKNNKRKREPTPPSEEFGDSEYSEKEFSSESEGSPAPIPLRESSDDSDDSQGLTAEVWTYIRAVERSGLEGSDESEYSSDEEDSDGGGEDEDDDDDDNDDDDDGDGDGDGSGRGGGGGSKDGDGAGSRGSNRGGSSRGSTRGGSGDGSNRGGSSGGSNRASG

SEQ ID NO: 76750 - protein, 114 aa, Zea mays
  Coding DNA Sequence Number=SeqID_33375
MELSPEIAISRPETFPHCLTSATRTRGHGKSREANLTEFGGVEFPAHGEARLWQTPLLRRAIDRTASDPRLKSNAELRRGEPYDYGSLGSECHTTRILPNAACCVEGMRCGYAS

SEQ ID NO: 76751 - protein, 105 aa, Zea mays
  Coding DNA Sequence Number=SeqID_33376
MTARTSREPTPPLAGPLSPPLKKIEKDCNLADGEYVLVPEQGAAQEFVDNNPWGLVVHGIKIGIRIKVWYCSLEDMVAGVTWPSILPPGWTVEWDPASAEEEHEE

SEQ ID NO: 76752 - protein, 134 aa, Zea mays
  Coding DNA Sequence Number=SeqID_33377
MAGHPHGDELGLINPFSNKSCNCVLSSANSLGGIRLGVKERLALLRFQISSKLDSIQQTAAAVAAKRRLLELYRPPAPWWSSSPALACGVPLVVPSKRLIVVPFSVTLTRDDGGSPDPYGEAAERWTCDDQYGG

SEQ ID NO: 76753 - protein, 86 aa, Zea mays
  Coding DNA Sequence Number=SeqID_33378
MELCHGSREHARDSHRIAELSAEMSSRTRAQDGAGTSRGGEETPNPPPVPPTLVEEFKQAFREHYIPDGVLQMKLEEFVRLKQGGD

SEQ ID NO: 76754 - protein, 162 aa, Zea mays
  Coding DNA Sequence Number=SeqID_33379
MAWLQGGTSAEGRASARELGTVEHVTWGTTAMACRGRRPRSRRGSHGSSCSVGRELGRWAAERLGRGGQWPGDAGRDGGVRQGKATVEAELEGEQGGRVGELGERSREGDIAEVPDLSASGDNSDWAEDDPCDPTTTSKPEAPMQSLNQLPVVTDLADARST

SEQ ID NO: 76755 - protein, 120 aa, Zea mays
  Coding DNA Sequence Number=SeqID_33380
MVIGDRAAVSRRKLARKGATVRVNLLYSILGEMVEFGEGLGVDLCLPADEFDSSQFSKKTSVISSGINYGSDTLYQRGRSTGHTARALPRAECYYTLADFLGLRLALPPGLGHSPRNPRL

SEQ ID NO: 76756 - protein, 176 aa, Zea mays
  Coding DNA Sequence Number=SeqID_33381
MKTLTTFCGYHPLEMVMHPLGLFPAEKKDDPMWCNRVSPMKDVWAMYPDLVGRVTVQCMSALYHLQALQSDAMAHLANLAQTTKLTVDSREDFVVDLSSELVEKDLQLHDVQQEHEEANDHLDMHHLEMEANEAGSKGEEAPEELGPAPCANVTASAMPLHPYLVSLPLLRVDESF

SEQ ID NO: 76757 - protein, 207 aa, Zea mays
  Coding DNA Sequence Number=SeqID_33382
MQYNGSSSLISCEKQTIRIEFFILARLWCWLRGYLLSSSLLRHEDILFVSKAGVLIGGECTGQTTVIWFNPRARLRFLARGASLGRVPSSQRVGWGWGKLDWPVFGGSGSGGRGHTAHGQTTVNWTPVRLERARKSVTDAWEGFIGAGAGQGAGWPLARRGARAGVLWQAQGASNTWSFQSARVPQLTQVANVRILAKIRCESFSGT

SEQ ID NO: 76758 - protein, 69 aa, Zea mays
  Coding DNA Sequence Number=SeqID_33383
  Homolog annotation: Hit_ID=Q8W0Y1; Match level="QueryCoverage=53%, HitCoverage=5%, E-value=2e-08, Identity=70%"; Hit description =Putative transposase
MGKGFLHTLGWIRGKADVVATRSCKRLIVDMHYEAHIKAIITYHGSVLRDKGQSATSKNPHGSPSPSLN

SEQ ID NO: 76759 - protein, 289 aa, Zea mays
  Coding DNA Sequence Number=SeqID_33384
MLCQVGSGRLQVYFPGANRTAEFGEDELRCSLEWVGNKWNPLKGRKDVTSKLTSTADCGSECLIGKQDPLNFYVPKNSEPQLERHQYDKGGIEKSSVSTISRDQKRVLADLTNDLKLDNLRWRPRKRSRRSGSRKQSDTSSGSSSGDMDLFSPSPVEALVSMTQFVQHVTSFHVEHKIGKRVFMPCLYMDFDLASLSPRTGPGPAPMSRTSCMCSYSSASPGAASSSGMPAPSPRTTSAPSRVSALTSSSLGVETELSMHAGGARCDQYYPCLINDDNGDDHDVRSTLY

SEQ ID NO: 76760 - protein, 521 aa, Zea mays
  Coding DNA Sequence Number=SeqID_33385
  Gene Ontology: Mol. function=RNA binding; Biological process=metal ion transport
  Homolog annotation: Hit_ID=A7P367; Match level="QueryCoverage=25%, HitCoverage=35%, E-value=9e-32, Identity=47%"; Hit description =Chromosome chr1 scaffold_5, whole genome shotgun sequence
MAWGEDEAIDPDVASTGVHVSERIGRDAISSLPPRPSSASGSASSPRAQKHTRADRIGGAMSHDELADKEPSSSEEFQLAPTDSKFRSLSPAPIPIPASPGIRSLVDSVTATCKLYIVPKSRPSSDGGLKRKRDAFNDDANPQKFIPSVPFEKPLKAGSGGAKAKSQKSNQTHPKTPIQLRHAACLARNPSPSHTTPHWSAAALPPLRVSASIIHRPAASTALRVYRAKHQPYRPPLCIGLRGIGNSTPHRRLHTGNSARVDSPHRVLHFCSNSGFGVLLLGAHDLAADRPSTQAVMKKIIDVPMSGGVEPEVDNDSHTDYRVRLYNGRRPWQYKLIIGWLEDGGSLWVRLTNVGATVTLFLVPDKNGVLADVVLGFDSLDPYLRHKDKIKVRYLELQDADETGNLEEWVMLTRVAKPDQLGLRFLGRPMVRPQRVEQSKASCFDVGAIVDAWWHGGWWEGIMLCQVGSGRLQVYFPGENRTAEFGEDELRCSLEWVGNKWNPLKGRKDVTSKLTSTADCG

SEQ ID NO: 76761 - protein, 111 aa, Zea mays
  Coding DNA Sequence Number=SeqID_33386
  Subcellular localization annotation: CTP_CleavageSite=72; ConfidenceScore=5.29e-01
MSGAPGGLRLKLATFGNFQGRLGYNSPDCPMYTGQCPVRQGRSASGTRQLRETPTASPLKFTGLSGVHRTVRCDSSATAISAPTALCGAINARAARIDGRRAHAGTPDKEQ

SEQ ID NO: 76762 - protein, 403 aa, Zea mays
  Coding DNA Sequence Number=SeqID_33387
  Gene Ontology: Mol. function=nucleic acid binding
  Homolog annotation: Hit_ID=A2Y732; Match level="QueryCoverage=54%, HitCoverage=80%, E-value=1e-38, Identity=38%"; Hit description =Putative uncharacterized protein
MGNHGGGPGSGLAGDMAPMRSDDWPSWLPDGFNLEFRIFATKSRFPWFLHTELVDSDIMNYKDLLDEIMRKYPCSYGEVVKMYYYCAESKSNIEVCCDEDLVNMFQKNASTKTCHISIAHYDPSTEPPAIPLWDVTYAKAVEIPCTSSMPAPTQSLDEPSQQPEDDDKYLQNPEPENEYVGVDEEGMYIDLGPQVQGNADQEDEYIPETNSNLDSNFESDGSDDEMVEDNVPPHTAEAVYDKAQFVEETRGPPKRKKKQVMPASTETSIVPVSAPRMVFPDLGLTPPVTKKRKSSSTTSKAAKKKKSSAMPVSTKVWRQNQSRGSASCGKKGKIQFLFHGPNQGHTGPFVILLPSVSTKWDGSGLNGMKNLGQWHGTNGRNSSGSYGIWIFYNGRKGIDSKKI

SEQ ID NO: 76763 - protein, 81 aa, Zea mays
  Coding DNA Sequence Number=SeqID_33388
MDKGPKLKLRFEGHVFVISEDKMSQDKKTVPEMKLTEEEKLLEEQTSGFVESIAKTNTEKITKEILEGLSEDIDDSDIYDM

SEQ ID NO: 76764 - protein, 32 aa, Zea mays
  Coding DNA Sequence Number=SeqID_33389
MRFGLTPGVTPIISVKGSKGDEEDFAEDVDEY

SEQ ID NO: 76765 - protein, 22 aa, Zea mays
  Coding DNA Sequence Number=SeqID_33390
MGKPVPSLLMLLLRRGLGFAQG

SEQ ID NO: 76766 - protein, 165 aa, Zea mays
  Coding DNA Sequence Number=SeqID_33391
MKDMREYTFGKHKSKGSDKELETQVEDKLNKLCFLANTTGGLFIMTLGEDSVGGDDRNISDDSTSDVSHAANDLAAKVDELMGVLASQEKLLRLSPHEMKDYKSKYESTLSELEFAIAFVVVSNDIECDERALHMSNITTLQTKYATLLDECDKLGSRSRLLGAC

SEQ ID NO: 76767 - protein, 221 aa, Zea mays
  Coding DNA Sequence Number=SeqID_33392
MARVVCTLRGKRLDGGVSVLSVGVNPFWYGVYQDHPMKGNWTSRRAPHQLAPRHEGSSSGSNDPIWDLEARVVRLMSELRHGNRERARDSRRIAELSAEVNCLQQEIVERDTAIDWVVNSRAFAWDCEANALTRVVELSVALENLQAYCNTLHEEVHVLYDRLHPKVPPEVAAMGAGTSGAASGGPDGELDLFGAPPSMNLADERSPKAGIGARAAKDEDN

SEQ ID NO: 76768 - protein, 376 aa, Zea mays
  Coding DNA Sequence Number=SeqID_33393
MGLGVCGLVYQGGDEDDGFGYDYGNGKWYSFRLERMARLRHTARKSVNPFLPSPLAERPLRRPVDGQSSHLERLHHHLHEEQERRRQELEWHGSSFLLQQEIESVRSCSPVPPLEVPPTPPLGVPSTGVAVGGDLDGEGDDSSSSHSTDLSEEQEPEPEGWVARPITRDAACRCHFHDALNTLLRQALDRRTWSIEYRCVVFQHSRGVYPDRWEATCLVRRPENSLWGAEVCSEHYSISEWDSAEAAMQDAARRALLHYCSVLGGVADGLNQKYYPRRPSGSTRGVVVSPVGEENPRLSSTVNLAVVLNTELDHALDELSRAHAEIAQMWAERAEHRQLEDGSPAPVGTQHPYRSPQRGHHAYGNPVCRTKINLEP

SEQ ID NO: 76769 - protein, 465 aa, Zea mays
  Coding DNA Sequence Number=SeqID_33394
  Gene Ontology: Mol. function=3'-5'-exoribonuclease activity; Cellular component=cytoplasm; Biological process=regulation of transcription, DNA-dependent
  Homolog annotation: Hit_ID=Q7XC99; Match level="QueryCoverage=79%, HitCoverage=16%, E-value=1e-147, Identity=69%"; Hit description =Transcriptional regulator, putative, expressed
MDRKEEEGPLDRHRWPWRHSVPCPSRPTGQDTQVICFFSQISYKSTNEINGKCIRIEGLPRQPSYTTGFGTALNIETLVAAAEQRDTPIEICLAMLRYTNHCSANRASIEPNFHDLYLKFFDKVNSKSMNKEILKATYENCKVLLRSDLIKSSSEERSLLKNLGSWLGKFTIGRNQALRAKEIDPKSLIVEAYEKGLMIAVIPFTSKILEPCQSSIAYRSPNPWTMGILSLLAEIYNLPNLKMNLKFDIEVLFKNLTVDIKDVKPTSLLKDRLCEVEGNPDFSNKDVTASQTPVVAEVPSGTIPSLTHMEQQPEINITSRAMSLPNILNQYAAPVRLPTNSTVEDDKVALMMPEQVPSLTQVSPAQTQSTSPSPFSVNQLMAAIPREEIRFKINPKLGSLGPQLQYSKIMDLALDKANREIILPVIQRSVTGGRNTGRVGVIKNREKHKGSFETIHVLLGPFCYV

SEQ ID NO: 76770 - protein, 123 aa, Zea mays
  Coding DNA Sequence Number=SeqID_33395
MRGEFVEDGTDTRGPHASEEWKRYYMKQEEEEALRQYTEWCEKAKEKYLSHFTMSCHHKIIRQGEIKTASLLASLQGPTACPIKDQCTSMTYNFDRRVDHNVLKAHIISSFQRAQQMAANESS

SEQ ID NO: 76771 - protein, 138 aa, Zea mays
  Coding DNA Sequence Number=SeqID_33396
MRRPRHRSSLGDVWDEGFMLLRSAFCTVGLRFSLGASKRSTFCFFGDDDSLGARKVWTYIRAVERAGLEGSDESEYSSDEENSSDSSEEGGGGDGDNDGGDSEGGGDSGKGGDNSGKGGDGSGKGGSDDSKGSNKASG

SEQ ID NO: 76772 - protein, 166 aa, Zea mays
  Coding DNA Sequence Number=SeqID_33397
MARSMAITPSSTLKPTRATPFARRGGDLIGANRAAPRDQYVPRMVPTPRDNPGEHIGDIHTSIYGDNRAVHGAGRIRDKTETPAEDPLMLTSKNDDSGTSSSLSPNRELTVGAGSTRREGEDARRYLYIVGRVQVVATTSRFPRASRFWRRIPRIKRASVVLVALG

SEQ ID NO: 76773 - protein, 134 aa, Zea mays
  Coding DNA Sequence Number=SeqID_33398
MNKNRNLKNGIGVQMGQIQAIEIKETTEERRNGKSKSADKKRNVNDGFVGVFYRNSDPTADPPRTELLWRKNSDRNEMKKVRFRDNRHMVLTIVIDGGNDCDRRLELSLGRHLNCRDHARRRSLRKETASAEAA

SEQ ID NO: 76774 - protein, 94 aa, Zea mays
  Coding DNA Sequence Number=SeqID_33399
MALMGSTSEKMYLCQVPDFGLKIIKLRPGGRLAREESLGVVSPSESIKDHLDVGLMIDVSFASGRLRSTLVSISATESLTIDKPYLDSLKPAYP

SEQ ID NO: 76775 - protein, 31 aa, Zea mays
  Coding DNA Sequence Number=SeqID_33400
METRCPDEKRLWRSNIHCDDMEIRKKNGEVE

SEQ ID NO: 76776 - protein, 215 aa, Zea mays
  Coding DNA Sequence Number=SeqID_33401
MTAAPSLRSTNLALLVFHLPVLPLSHYCSIDQMLKGIEDRGPCFSVRNSSFLAIIKPSRTWYRWKLSLNSSQVIASGSAWVARVAVEATAAGVSHLVGHAALAGHAFRLGSCCQTSVESIHTLELTSQSFSIRKGPIVRGAISMMTTGRRAVRVLSPNRGGGTILLMAALCALSTQLHNLRTSLAQLVKGVVQLGVEHDDRVHHATQSGIALTNG

SEQ ID NO: 76777 - protein, 145 aa, Zea mays
  Coding DNA Sequence Number=SeqID_33402
MHDLLLALELLGCSGWLLGQEGEVPGCSDASTNFLPAGCSNATTAAVEGTVSGIAAGADTDVGAGIIALSIKCWKSFRHMVTTKVVPKLLLGDSFRVSMGGEAPMASKLAIGVEVGVAAAAPSTLLLRSDQSIGLIEFASGTSAQ

SEQ ID NO: 76778 - protein, 152 aa, Zea mays
  Coding DNA Sequence Number=SeqID_33403
MGKNNKRKRELTPPSEDFGDSEYSEEEFSSESEGSPAPVSPPASSDDSDDSQGIAAEVWTYIRAVERSGLKGSDESEYSSDEEDSDGGGEDEDDDDDDDDDDGGDDGDGSARGSNGGSRSGNGGSSRGSGGGGSSKGGGGGGSSKGSNKASG

SEQ ID NO: 76779 - protein, 122 aa, Zea mays
  Coding DNA Sequence Number=SeqID_33404
  Pfam annotation: Domain name=Transposase_28; Domain location=1-122; Score=-55.8; E_value=0.017; Accession=PF04195.3; Description =Putative gypsy type transposon
MTSLGHLDRFQSEATLNLVRNLLGWGMPALAGRIRAGAAPLGDLAAGEFVLFISYLSYGLALLISPFFLLLLEELRLQLQQLTPHSILQAAIFVHLCEMFMGVAPLHLPLLPFLRVGEVWEG

SEQ ID NO: 76780 - protein, 234 aa, Zea mays
  Coding DNA Sequence Number=SeqID_33405
  Homolog annotation: Hit_ID=O40947; Match level="QueryCoverage=75%, HitCoverage=21%, E-value=3e-11, Identity=24%"; Hit description=ORF 73
MYTVSSGGGGPNCAHPAIRGDAGGASSSIPPPTLEEPDVALHETEAAILWEWGVLEAEHQRLSDWRTQLEECTKAASRQFTSKQSELERDRKDYKKDLQRLYTQELEASRKEKRLVKREEALDQREAVVTELRAKLSALNEILEEQRIQQTTAVERIQKWERELEDKASNIALAEENLKEKDASLDMREADLAWREKDLAFREEMFERQDKLLAEHELEAEEKEKKLEERVHQF

SEQ ID NO: 76781 - protein, 111 aa, Zea mays
  Coding DNA Sequence Number=SeqID_33406
  Subcellular localization annotation: CTP_CleavageSite=77; ConfidenceScore=5.25e-01
MEAKSHHQPFPECTRGQVVSLAARSRRFESSFNLARPHRLGIQCSTNPGCRRVVTALVPTIASMGDPVSGRMRDKVRARLHSGILPGSKSIDQHRSRYQDEYNQFLASREC

SEQ ID NO: 76782 - protein, 209 aa, Zea mays
  Coding DNA Sequence Number=SeqID_33407
MKLPKKCVISRKTTKDEGHIRESFVKKAQAMTINDVVFFPLPRNDHVVAKAEGHAEEGSTLGMSEQSTIPTQATIEETTLKAISKAPSLQGRNKVRTSHQLREPEEEEASEEGSVSNLEGCSVYSVGRIRDIQQGRAKSRSRIKKEIAEAEARQNQLKQVLHTASCYSPYIPGMWANQQPTASVASSSHSQALWGSATNTTTYGINFDP

SEQ ID NO: 76783 - protein, 51 aa, Zea mays
  Coding DNA Sequence Number=SeqID_33408
MGSRHSTCSTEAGCIRSLTWFCYSPFLWGEFSGGDAGNMEDFEEFQDYDES

SEQ ID NO: 76784 - protein, 142 aa, Zea mays
  Coding DNA Sequence Number=SeqID_33409
MGKNNKRKREPTPPSEDFGDSEYSEEEFSSESEGSPAPVSPPASSDDSDDSQGIAAEVWTYIRAVERSGLEGSDESEYSSDEEDSDGGDEDEDDDDDDDDNGDGDGSGSGRGGGDDSRGSTKGGSSRGSTKGGGGGRGRASG

SEQ ID NO: 76785 - protein, 619 aa, Zea mays
  Coding DNA Sequence Number=SeqID_33410
  Gene Ontology: Mol. function=ATP-dependent helicase activity; Cellular component=intracellular; Biological process=DNA recombination
  Homolog annotation: Hit_ID=Q6ZFX9; Match level="QueryCoverage=56%, HitCoverage=85%, E-value=1e-170, Identity=87%"; Hit description=ATP -dependent DNA helicase RECG-like
  Pfam annotation: Domain name=DEAD; Domain location=237-361; Score= -25.0; E_value=0.0031; Accession=PF00270.20; Description=DEADDEAH box helicase
  Pfam annotation: Domain name=Helicase_C; Domain location=437-514; Score=87.6; E_value=3.9e-23; Accession=PF00271.22; Description =Helicase conserved C-terminal domain
  Pfam module annotation: Pfam domain module=DEAD::Helicase_C; Domain location=237-361::437-514
  Subcellular localization annotation: CTP_CleavageSite=30; ConfidenceScore=5.63e-01
MARSRAACSRAAWTRPTGAVSTSASACSTRAKAARRASWRVEASSITGAMEPTMDEDEARQRLRVARWKGVVAPGWQHARAKEGWGGGAWGLRVGDGGGAGVPRTTRRRGKEVAAPRAACRGSGEGSSLAGVGVLNLAPTSKFIVRVPGSGRGRKLAREGGEAPKYLIVVEVELRRRTHSSGFPSVHSAPQSGSAMPDPRLGATGFVRGRHSAFGVDDLSLPESRGVGEFRTSLNIRPTDDQILGGDVGCGKTIVAFLACMEVVNSGFQGLKTGEIGMVIGTHCLIADKTEFSALRISVIDEQQRFGVVQRGRFNSKLYTSSSKLSGENTSSDEASDSETFMAPHVLAMSATPIPRTLALALYGDMSLTQITDLPPGRQPIKTLALEGNDVGFEAVFQMMRDELIDGGKVYLVYPIIDESEHLPQLRAATAGFDSIKQKFEGYPCGLLHGRMRSDEKEETLNSFRSGETRILLSTQVIEIGVDVPDASMMVVMNAERFGISQLHQLRGRVGRGERKSRCIFLASTSSTLPRLKVLEKSSDGFYLANADLLLRGPGNLLGKKQSGHLPEFPIARLEVDGGILQEAHLAALKVLVASNDLSLYPRLKVELIMRQPLCILGD

SEQ ID NO: 76786 - protein, 281 aa, Zea mays
  Coding DNA Sequence Number=SeqID_33411
  Gene Ontology: Mol. function=ATP-dependent DNA helicase activity; Biological process=DNA recombination
  Homolog annotation: Hit_ID=A3AAM2; Match level="QueryCoverage=95%, HitCoverage=27%, E-value=3e-86, Identity=61%"; Hit description =Putative uncharacterized protein
  Subcellular localization annotation: CTP_CleavageSite=27; ConfidenceScore=5.15e-01
MSFTGSAPVVRIISLEFRRGRARRMVSKMRFRNALGSRPFQCCSRENHTYVRKLLDRVSERSKLLKKVSVLVGYSNPQDLVEKQRAPGESSAELISALKEIDFPEITAKFPCIKVGDASPVELYEDSTNMKFKEAALSEKLTNFIQGSARNLESAYEFHNDCHPLNQTPTTAGDLSISEEIPLIEPIVDTKSPESLSDAITSDNSILDKSIRCLPGTTSRQYRQLEDGGFHTVRKLLQHFPRTYADLQNPQGPIEYGQYIMLSGTVISSRRAAYQYIKKKG

SEQ ID NO: 76787 - protein, 147 aa, Zea mays
  Coding DNA Sequence Number=SeqID_33412
MARIQGRRCQAMQIEEAHEPTLAPRSRRGCTSPEEPAARAAPWPPLPRDEAPCRAPPSRFPRRGRRGRAAMDGPSRPHCQGVAPRAVEARGCHSRAELRGAAPMHSRARGKCRPEREEPPGGRRRLRWWRLLWGGRRPVATVGFRKP

SEQ ID NO: 76788 - protein, 77 aa, Zea mays
  Coding DNA Sequence Number=SeqID_33413
MGLPWDVHMEAHLLDSVSDVGPGEVEHASLLQDVEGVLALMQEETLGPAFGGDAKEVMERPQVLHRELPLEGNDRTM

SEQ ID NO: 76789 - protein, 161 aa, Zea mays
  Coding DNA Sequence Number=SeqID_33414
MEEGVLDVESMDRPVSGEDSANLTTGLKVHKGSTQTNKKIEVRDQIQRSKETEYALFWRTGLSGVPPDSVRCTRTVQRPTLHSRVSLGVLCYNSPDCLVCQWSNGSFAQRSTAKVEDSEEQCATMRGRAEPPVRGAPDSEQYLSSAAPDCPVSLEYKASNG

SEQ ID NO: 76790 - protein, 261 aa, Zea mays
  Coding DNA Sequence Number=SeqID_33415
MAIQRQRSTLTGAIVSNSAMQKSEGHQIVRFRLFTPPLGDFQYIDARDPSRVTKRVITEEDVMGRIEMILRGIIVNDGAPHAYSAWNHSLVECALRRWCEANSRGGQSNASGLRGFGRRTEDGVMKLQVQGIDVSPFDFLFEEAILEDAMSEIPEVHVIDVDVHQASEPQVLATPCKSQVKGKGENGSEGIVPPLLRCLLVRWSTCCMLPNQRKAVRRTGEMAVQHATPSPAPKDMRVDMMSAEGRSTFPDSPLAPEGEGA

SEQ ID NO: 76791 - protein, 65 aa, Zea mays
  Coding DNA Sequence Number=SeqID_33416
  Homolog annotation: Hit_ID=Q944B0; Match level="QueryCoverage=75%, HitCoverage=30%, E-value=7e-07, Identity=53%"; Hit description =Peptidyl-prolyl cis-trans isomerase
MKTINPCIGHISETLQLIRVLKGVLIPMKARGKRRSLIPSKVGYITETLQPIIEEVFEVQLLMVL

SEQ ID NO: 76792 - protein, 370 aa, Zea mays
  Coding DNA Sequence Number=SeqID_33417
  Gene Ontology: Cellular component=anchored to membrane
  Homolog annotation: Hit_ID=A2X8U3; Match level="QueryCoverage=84%, HitCoverage=85%, E-value=6e-57, Identity=45%"; Hit description =Putative uncharacterized protein
MSPLRRARSTLLLLHYVAASHFLLCAPIQRTAAATLPDPAPLDPALILPSATSVQPTATTIPGGTIPAFPEQSDSLAGSSSACPLAPSPALLPAVRSSCATDDGALPPRLRCCPALAAWLFAAYAPTALAERPPAAAAAAATVDMPLPPDDSETCAGAADRALRAAGAALPRPPGAGGNGTCDVAFCYCGVRLRRLACGSPPAEGGMWSPADAAARELEKDCAQPGVPGCSKCLLALTTIKATNPEGGAGAKAPGKKKEQIDRSTASDRDCELMGLMWVLQRNATRYGAAATTVIQALMAVDEAFAAGVTVAADDTGGSRGVLAARGRRHAPPGRARPYDAPRWWLWCSGCTGELVLRLSPFSFLFVPTI

SEQ ID NO: 76793 - protein, 143 aa, Zea mays
  Coding DNA Sequence Number=SeqID_33418
MAKVQPVLKQVQPVFALFTFLKILVQPDTQPDTQPVFVWWKQATFNGDQQVRVAPGRLLQGADEVQTPHSKGPGADNSSGVCHRCWPVEALSEGIPDKSSRRCVMAASPRVYLLQEFLTFGDGDASLEDARGAAVVDLLLIAQ

SEQ ID NO: 76794 - protein, 299 aa, Zea mays
  Coding DNA Sequence Number=SeqID_33419
  Homolog annotation: Hit_ID=A2X8U8; Match level="QueryCoverage=80%, HitCoverage=40%, E-value=3e-31, Identity=43%"; Hit description =Putative uncharacterized protein
MENHGKLDGWDEVLEEEDELASVCKYPISTSYLSYGTSRRGKSVKKPRFSLRGYDFVPLDVKTDNLCIGEQDGSSAVPSTKASQTMVAERLENVEEQTEDLAPEFALPPKANTLVSELLDNLQRRGGSFVRTPSLLHQHAPSISIREQEVSSGVPPTKASQALMDEPFENDNGQTEELPSELPCSIKRPKFSVAELLEDLQGRSGSYVETASLSHQHTRAKHWKPKFLSSEKKTIAILGDRSIDSEDPLEHPCSVAELVTMEECNRLCTWRKIGMWNSRGSIAESTVIQVVLLVAVGIT

SEQ ID NO: 76795 - protein, 869 aa, Zea mays
  Coding DNA Sequence Number=SeqID_33420
  Gene Ontology: Mol. function=nucleotide binding; Cellular component =endoplasmic reticulum lumen; Biological process=response to hypoxia
  Homolog annotation: Hit_ID=A3AAM3; Match level="QueryCoverage=96%, HitCoverage=96%, E-value=0.0, Identity=77%"; Hit description =Putative uncharacterized protein
  Pfam annotation: Domain name=HSP70; Domain location=28-712; Score =121.3; E_value=2.9e-33; Accession=PF00012.11; Description=Hsp70 protein
MSQPRSYGILVAVLVAAAVAVPPATAAVASIDLGSEWLKVAAVHLAPGRAPIAVAINEMSKRKSPALASLADGNRLSGEEAAGITARHPSKVFARARDLLAKPLSYVQSVTDSLFLPYDLVPDARGAAAVRADDGQVYSLEEIVAMVLHYAAGLADAHVGAPVRDAVIAVPPYFGQAERRALTQAAQLAGINVLSLINEHAGAALQYGIDKDFSNASRHVIFTTWALVKDVRWNSELGGVQMEMRLVNYFAAQFNKQLGDGVDIRQSPKAMAKLKKQVKRTKEILSANTAAPISVESLYNDVDFRSTITREKFEELCEDLWEQALTPVKEVLTHSGMKIDDIYAVELIGGATRVPKLQAKLQEFLGRRGLDKHLDADEAIVLGASLHAANLSDGIKLNRKLGMIDGSTYAFVLEIDGLDYVKDESIDQILVPRMKKMPIKMFRSIRHTKDFDVSLNYDKAYELPPGIPSHKFAEYSVSGLTDASEKYANRNLSAPIKANLHFSLSRSGIIALDRAEAVIEITEWVEVPKKILTLESNITNQNSSSEVGAANSTTDSKENLSSGSNTNSSTPIDESNAQEIITEKVLKKRTFRVPLKVVEKTTGAGTILSKELYSEAKNRLEALDKKDAERRKTAELKNNLESYIYSMKEKLEESADILTVSTEQERESFAEKLSEVQDWLYMDGEDAQANEFKERLDQLKAIGDPILFRLNELKTRPTACENARLYLDELQKIVKNWETNKPWLPQKRVDEVVSEAEKVKAWLKEKENLQKNTPVFNPPVFTSEEVSEKVLDLQDKVSSVNRIPKPKPKVEKKTAKEEEPASKEKTTYTESAPDEGEYTETSQKSKAQEEDQSASANTSDSEPEPHDEL

SEQ ID NO: 76796 - protein, 333 aa, Zea mays
  Coding DNA Sequence Number=SeqID_33421
MTVAGGREQRSRRQPSSRPIQGQQENPLSRREDDAPVIRYSNGSRTRDDRPANHSPRRINSAAGQAALLAGEAGDASPSPDRERGIPRKGSFPVKEPGSEPPTDQRFEGWPPEGFNSRLRSRGPYTHYWSEVRRPAPRRVPRPPQATRAPRPLLIRGSKAGPRRVHSRLRRRARDDQGYVRYITKARATLPRSPVGTFGRASGDRVRQNTPFEARGLLSGTIIRGTLKTPNSQLKDSAACATPTAVPLDRVRLTGSQALPKAPRETPLRPTQGSDSGSAPEDDELRSARPRARTRAKSRKTTNSAPPNPGLGLGLSPGRRRTPLRPTQGSDSS

SEQ ID NO: 76797 - protein, 168 aa, Zea mays
  Coding DNA Sequence Number=SeqID_33422
MSYPPSSPSALDVPPHALRCCRRNEFGLLWKLPFAHAPSPDGCGIASAAPFATRSVAAARAVQEVDAGGSRSVVWLENVTSGHGDTHGLLMICMVVYASGGKAHERYTMFDNVIDSSQVRVQCGGPSRFVARSSRRSTQDPAKVEQLREKLNGGIDHHSSLYPDGDQL

SEQ ID NO: 76798 - protein, 181 aa, Zea mays
  Coding DNA Sequence Number=SeqID_33423
MQDAARWALSQYCSLFSGVADGLDLKYYPYRSTGSAEGVIVSPVGEGNPRLNSMVNLAVMLNTELDHALDELGKVRAEVAELRAECAARHFLDGGSLAPVGIQHPYRSPPSGRFDYAKVSSVWVHRTVSGGAPDSVWRTRRSREMINGVRLKFTGLSGEPTVDQANGRPRDLHGTRGRAND

SEQ ID NO: 76799 - protein, 91 aa, Zea mays
  Coding DNA Sequence Number=SeqID_33424
MLVDYTTGASLAEVQGKAASQTPPPAEARGRSPAAAGPAPAPTPGIGAPAPHAGDDAVSPGDWTDLAPCDVVDAPPGEKAKRGSQTYVQCT

SEQ ID NO: 76800 - protein, 152 aa, Zea mays
  Coding DNA Sequence Number=SeqID_33425
MHDFLLALALLGCSGWLLGQEDGLLGCSDAGIGFLPAGYFDGTTTAAEKTASGTAATGSDADASAGAEGRESVVHQLVMEGINQSSQEAGEKLLLPHYHQSLGHMVATEVVPEFFPSDGFRVGMGGEALVASRLALEAEAGVAAAALAALLL

SEQ ID NO: 76801 - protein, 28 aa, Zea mays
  Coding DNA Sequence Number=SeqID_33426
MAPPWGSPFAVVGFGRRVGGEGNPNLST

SEQ ID NO: 76802 - protein, 220 aa, Zea mays
  Coding DNA Sequence Number=SeqID_33427
MELGGGTAVGAVESLLTSSCFRKGAESRRRHRACGAPSLPIWRSEPDGTPVGRCGSSSEAEVESEPPGRARRRLPAGAGAESEPWGRAKRSSSSSGAEPKSEPWVGRGGDRRLLGPSPSPSPGRGGDRRLMGPSPSLSPGSGGVRRLPGLSPSPSPGSGGVRRLPGLSPSPSPGSGGAEFPMVPSAGPDCLSVLLCQVALQSEWRRRRCPSVRPVSGAAK

SEQ ID NO: 76803 - protein, 110 aa, Zea mays
  Coding DNA Sequence Number=SeqID_33428
  Gene Ontology: Mol. function=protein disulfide oxidoreductase activity; Cellular component=extracellular region; Biological process=cell redox homeostasis
  Homolog annotation: Hit_ID=Q0IMV4; Match level="QueryCoverage=89%, HitCoverage=94%, E-value=3e-40, Identity=81%"; Hit description =Putative glutaredoxin-C14 precursor
  Pfam annotation: Domain name=Glutaredoxin; Domain location=19-83; Score=53.5; E_value=7.1e-13; Accession=PF00462.15; Description =Glutaredoxin
MDLSEELAGFSLLVSERAVVVFTLSSCCMCHTVTQLMADLSVNALVHELDSDPRGKDMERALLKMLGGRAPAVPAVFIGGKLVGGTNNVMSLHLGGELVPMLMNAGALWV

SEQ ID NO: 76804 - protein, 287 aa, Zea mays
  Coding DNA Sequence Number=SeqID_33429
  Homolog annotation: Hit_ID=A3ARW5; Match level="QueryCoverage=29%, HitCoverage=11%, E-value=1e-09, Identity=43%"; Hit description =Putative uncharacterized protein
MPVGAHVRDCPPPMTVYNKPSAITSSLCAPSDDAASILAATQAAVTTARQRAQDAAHALEQEQTVVDANERQYAENYHRLSGKGVSDGYPTFARHCADTFEPTPAPASTLRASLHAQAAALTSIWATVTDVLAPDSTQYPQWRDQVLQTLHRYALADHVLSPVTDPTEDWLLMDEVVLSWIYMAPSRPNFSTLFVCQTIRLTGSGVPLRLSSSVTARLRFCTLRPLSTSLLRAFYIYEGVRSIENLRTYYNRINYFLYHLCRRSRCNMVLVIAFRISSSTPIRLYIV

SEQ ID NO: 76805 - protein, 189 aa, Zea mays
  Coding DNA Sequence Number=SeqID_33430
MARRVAGQTQMLLFRHGWKTSSSSPPPSELTAVVVAIALRGEEYHVVAAVEGHELETPEAEHCPGLKRLLRTTHLELNGKLFVNTQQAPAWRANCRRFDPGGSLDRRVNLSLRVPAQMGWCEKEHNGENAARVTPRQRECARSRGYKRSRERERGERLQYVEIPRKREKSKEKKNTVVFKLIIGSLERS

SEQ ID NO: 76806 - protein, 116 aa, Zea mays
  Coding DNA Sequence Number=SeqID_33431
MGSVGHLYIRTGPPGKVQDLHGHEPDSWYGSRTPLCRVRATHGRVPGFWDKEYPGLNQDQAGVQSRHVSGPCRVRFCSPLRRRPDAATWPTARDIQIQITQEHASHPGGYWPSHVR

SEQ ID NO: 76807 - protein, 132 aa, Zea mays
  Coding DNA Sequence Number=SeqID_33432
MQFRNLHPNLAQLVKGVVQLGVEHDSQVDHVVQHGIAFTNRRDNHTSSTAGRAARGASLAEVQGKAASHTPPPAEARGKSPAAPGPALGVGAPAPRAGDDAVSPGDWTDLAPCDAVGAPAGEKAKRGSLTYV

SEQ ID NO: 76808 - protein, 57 aa, Zea mays
  Coding DNA Sequence Number=SeqID_33433
MAKGSPRRNEEYSGEQLRAAKCETGKRQGRGRESTAEGTSEQGEVCEQGAGSKGARA

SEQ ID NO: 76809 - protein, 136 aa, Zea mays
  Coding DNA Sequence Number=SeqID_33434
MGRAAQGLVGGDEDGRSRSDAQRTVERRMCSEAAPMRLHRPRWPHLGNPRRMSRLGTGTLRRACTLAALAADEQRGQWRGSWCSDREERGYVQGENVGRLQGIMHVLVEEGEGPTGGPAGQGMQHMQATTRGTVAA

SEQ ID NO: 76810 - protein, 78 aa, Zea mays
  Coding DNA Sequence Number=SeqID_33435
MANWRPTVGLKPYREPMALGQDGGQARTWRPQRYAHDAGVRELKMDSTEPDPISKGRVWARRRWLNPNDTGFDVSKDY

SEQ ID NO: 76811 - protein, 175 aa, Zea mays
  Coding DNA Sequence Number=SeqID_33436
MPMLLHQPQLLLNASADHHLPWRMSSPISSCQGAVAELALPQPWTPSGHPSPISPRPHPLAAAPSYNWWLSLIPWMLAMLPSLVLTSAPCVGWPVAPALGLSSANSTPSIPARILLIGPVQIILMPDHGTTATMKPHRVAPSTCSMKYRSELQLDLHSPCATSQTPVKPRCPCCS

SEQ ID NO: 76812 - protein, 108 aa, Zea mays
  Coding DNA Sequence Number=SeqID_33437
MARVACTLCGKRLEGGVLYSRKHGGHHGENNHTLESLFFSRLYEVFETRTGACEPDNLGGSATAGIGAELSIIRPFSFEWIDAQGKVYLRLKGDESTSVTQKANAKSA

SEQ ID NO: 76813 - protein, 140 aa, Zea mays
  Coding DNA Sequence Number=SeqID_33438
MANWRLTVGLKPYREPMALGQDGGQARTWRRTHKVLCVQFAFSDETVLSESVERAIDMRIYPNRIRCTILGKTQKEVYQQVVMLQVSQNQLVVPFLTLGMSSQYHRYLRIQVGVTADQSNTKVDTTPKVYAGKLRRDNKK

SEQ ID NO: 76814 - protein, 98 aa, Zea mays
  Coding DNA Sequence Number=SeqID_33439
  Subcellular localization annotation: CTP_CleavageSite=85; ConfidenceScore=5.18e-01
MDVVGPPVSYLPSPSSSSCCPFLFLVAESYSMDAGRAALPGAHLCPLRWMAGCSCPSSLSMSCFVHRVFDENPKSMDSTCTTQIRSARLFDVYFTHLI

SEQ ID NO: 76815 - protein, 172 aa, Zea mays
  Coding DNA Sequence Number=SeqID_33440
MARRLAIRARETEREREHAGEVTGADRSAPAGSERERDASKLGKMGGLSTLRSKRGRDPQGPNWVLSRRCHRDVVPKGLRQSSWQKSQWFSHGIFHFSSAMVLEEPSCAEDRLRALDAEHFGQSTTIDLVCGHLRVPRSGELSAQISRMTLIVGCICELEVRPLDEDSIERD

SEQ ID NO: 76816 - protein, 119 aa, Zea mays
  Coding DNA Sequence Number=SeqID_33441
MGRRPGSSSGVRGRGASSSCAEEASSSHAGEGELLLLGQGAAVTGLAEGANIDNAGPGRLSRRAQVGHVCGPSRVADCTGGSSKTSYAARAAFVFLDCLVLSLERRLHVEAGADPSART

SEQ ID NO: 76817 - protein, 26 aa, Zea mays
  Coding DNA Sequence Number=SeqID_33442
MPPCGSSSSADCSDSGGGGGRDMGVR

SEQ ID NO: 76818 - protein, 259 aa, Zea mays
  Coding DNA Sequence Number=SeqID_33443
  Homolog annotation: Hit_ID=Q6QP51; Match level="QueryCoverage=67%, HitCoverage=83%, E-value=3e-08, Identity=31%"; Hit description =Putative growth-regulating factor 1
MDTAWGIDPFLKAALPTRILKRHGQSLHRCAPGSSPYDKGAGSHTSCKGKRHLWQAKRASFHLRHDDRVKKAAPEHSGSAPTTDQGFEGWPLGRVKASSTQGTQSRLARAQPRAGTVVPDEVTSRPRASSGSGHTLGTPEAQLGQASSRSNLGQIASPTDRVENSAAHPAPTAVPATRARLTTASSASGATGSSASPDLRLGLARRSPPRPTPRLGLSLGLGRNHVLARPRPRPQEKSPPRPTLGSDRLCHKGYIITLP

SEQ ID NO: 76819 - protein, 147 aa, Zea mays
  Coding DNA Sequence Number=SeqID_33444
  Homolog annotation: Hit_ID=Q6QP51; Match level="QueryCoverage=87%, HitCoverage=57%, E-value=1e-17, Identity=46%"; Hit description =Putative growth-regulating factor 1
  Subcellular localization annotation: CTP_CleavageSite=74; ConfidenceScore=5.45e-01
MASGGGPVGPRGEPDAARGSTVVSGTVIRGTPNTPKHGTVQVKASSTQGTRSRLARAQPRAGTVVPDEVTSRPRASSGSGRTLGTPKAQLGQASSRSNLGQIASPTDRVAGKQLRSPRSDYCASHSGKADNSKFSLGRNRKLRLARP

SEQ ID NO: 76820 - protein, 818 aa, Zea mays
  Coding DNA Sequence Number=SeqID_33445
  Gene Ontology: Mol. function=protein binding
  Homolog annotation: Hit_ID=A7NZ85; Match level="QueryCoverage=97%, HitCoverage=97%, E-value=0.0, Identity=56%"; Hit description =Chromosome chr6 scaffold_3, whole genome shotgun sequence
MDAELLELQRQLEAAQSARSSVRLSERNVVELVRKLQERGIIDFDLLHTVSGKEYITSDHLKHEIKMEIKKRGRASLVDLSDTLGVDLYHVERQSQKVVSDDPTLMLINGEIMSQSYWDTVTEEINEKLQERSQIALAEIAAQLHIGSELVISILEPRLGTIVKGRLEGGQLYTPAYVSRITAMVRGAARGITVPTNLPSVWNSLQQQLHEMHGASGVSVEGSFFQSIFNGLLKEGAVLGSVRAGGQWTPAVFAHAQKESVDAFFSQNSYIGYDVLQKLAIPQPKQFLEARYPDGIALDAVFVHTSVVDMLDTAVGDAIENGHWIDSLSVLPSYISGPDATKILSICPSLQKAIKSSKAVVFGESCVFSNMFIKGIFDRLEKDMDSFGIRLSVGQGRPVNTNLGSEHKTGSGQHSDTKDLGGNGTSSTGASSDRGSKKKRGKGTGSTKGGSLEKDDDNEESIPVKGKKSHRKNKDAGASGDIKHGGKKTSEKMIEENANIFPDELIEEKVLAVAPELEELGGSDDSNAPLKLLSSHLRPMLVDSWAKKRNTMLSGNAERRRRLLDNLQKQIDEAVLEIQLYEKALDVFEEDPTTSGILHKHLLRSMGTPIVDKVLITLDKDNKLKNGMEVEDSEDHVQLSTADRSSLAKDLPSALSLKAQALIEALEGKRFDSFMDALRDILEESGLTFKKLDKRLERTMLHSYRKDLTAQVSSENDPVAFLPKVVALLFLQAYNKAIQAPGRAVGAVITLLKDKLPAATYKVLTDYHSTTVKLLALQAAATDDEEDCTSDRMRERKEDLEERLMPELKSLVLGTNKE

SEQ ID NO: 76821 - protein, 103 aa, Zea mays
  Coding DNA Sequence Number=SeqID_33446
MALRYVLRWHKRTSWRLRGTELGAIDLGAELSFASRPSPHHSSRRTCAAAAASIAALCASIASSSRLRASLLSPARGAYKAATAVSRGGCSRWASLPERHMER

SEQ ID NO: 76822 - protein, 859 aa, Zea mays
  Coding DNA Sequence Number=SeqID_33447
MAEMCSHYYSAYPPFEVAEEDADEGALRCAAGLSSGRDLVEEFVAYGVWPLAHGWALGEVCPRQMPSHGGKLVRSPAFALDLHSRDPAAFMREAEDGAVRIVGRYVPKTEGQCSWDIRGSNDRLNRVFELNHLPYGGYPGQDDVDRRGKKPVVETGDDPAPAAAPSSKKRKLCIAMGGLGVSDGFARELMRTCAAPGGRMSSPELRESSARMLRVTGGWWPRNVPIPCAAGEDFFTSRMVRDWRVFPYGRNIAAVVSVVMDKDRQGATQKRQAVVRLHEARPKRPRGTAKAAAPGGSQPPLAAKSAAPASSRAPEAAKAAAAGGSKSAKAAPVSSRVSEAAKAARELPPPGKRVADFTTDISVEDYLVGSDEGQLVVVPPAVATTAVAMVSRAKGSALGAGGEIPALTAVRDEAGAVSRRLRELKGALSQAADFVDRAASGALTTVVSAEVERLRTQHADAVREKSATDSKCRKLADKVAALEGEKTDLRRQLAEERKEANEALTKAQSAQAEANLARADGSLARQRAEQLEERLSALQTRVERAEASTRLEAERTRKQLMDLYHELGARTADFEVPDREPGLCCLEWIQKELLALPAIVEGFMSYASLVTCEGTMNALSREGCRHYEVFDQADEDFERDIYKVEDPVVKESAGALYDQMWGPHGREVVRERAETARGQAARGERVDDFGALNSALPDPEPNPAAAVSEAALEPPPETAEGVPDAPAATAASGGPSPTTAPRAEDPVKVAAEPTAEDPATAGSSQVQDFGPAHATATTNFLAASTVDDGNKSDGSASKFSNFGDSGSSVEWTEESSDEDLDYFAALDVAAAEASPHAADAEVVPGPSTGRRRRRAVAKR

SEQ ID NO: 76823 - protein, 392 aa, Zea mays
  Coding DNA Sequence Number=SeqID_33448
  Homolog annotation: Hit_ID=A3FQN2; Match level="QueryCoverage=39%, HitCoverage=10%, E-value=3e-07, Identity=31%"; Hit description =Putative uncharacterized protein
  Pfam annotation: Domain name=TolA; Domain location=1-360; Score= -151.8; E_value=0.066; Accession=PF06519.2; Description=TolA protein
MRGGGVQLHPAAHSGGAEGGFWSAAPALHETEAAILREWEVLEAKHQRLSDWHTQLEERTKAASRQFASEQSELERDRKDYKKDLQKVYARELVASRKEKRLAKREEALNQREEVFTELQAKLSAMNEILEEQRIQQTVAVERIKKWEREDKASNIALTEENLKEKDASLDRREADLAWREKDLAFREEMFERRDKLLAEHELEAEEKEKKLEERIRQFHATQAAPSPQAVEATKKALEDLQAEHRAGVQRIAAWAGEASTALVPLGMSPIPVSELPTSISDALPILGARLEAEGSRLCRAVIEYILTCFRSHDPAISLEPDLHDLAWETKPYARTYKITAPNTRAPVVEWWRCRLRVRDQAKRLHSSGPLQETSAHSLDPDPQVVGPPVSG

SEQ ID NO: 76824 - protein, 171 aa, Zea mays
  Coding DNA Sequence Number=SeqID_33449
MARPSLGRLLWASDSTRPLHVDGSGAATWLEKMIYSKVSTLSLDPHGKVSDPCIDRPGLRVRSRTPTGANWTPRMGSGPLYVGSGPLTAGSRDSGTENTQALIEARRGSGADTCPDLIVYASAPRPGGDPMLSRGLLHVTRCAASTFIEPCPFHCQGRTVWTRGVDRPRSA

SEQ ID NO: 76825 - protein, 466 aa, Zea mays
  Coding DNA Sequence Number=SeqID_33450
  Gene Ontology: Mol. function=protein serine/threonine kinase activity; Biological process=protein amino acid phosphorylation
  Homolog annotation: Hit_ID=A2Z261; Match level="QueryCoverage=25%, HitCoverage=37%, E-value=1e-31, Identity=47%"; Hit description =Putative uncharacterized protein
  Pfam annotation: Domain name=Pkinase; Domain location=275-457; Score=- 81.1; E_value=0.00093; Accession=PF00069.16; Description=Protein kinase domain
  Pfam annotation: Domain name=Pkinase_Tyr; Domain location=275-406; Score=-161.7; E_value=0.016; Accession=PF07714.8; Description =Protein tyrosine kinase
  Pfam module annotation: Pfam domain module=Pkinase::Pkinase_Tyr; Domain location=275-457::275-406
MALGGGMAVVTVVRDNIVVMLLGAAECDDIAVIVNCPNQNDLAATSATPSRVRSPHHSLARALCAPAAKPANSLQSAARAAAPTKESPTPPSPSPRGCSKEGNSNPTIPVPALLSRAIMEGSLSLAIPARLLQGRKVRPRHRHPRAAAFPSRHPRTAAPRKEGPTPPSPQWEIPILCARARHGAGVPEAQERAPVCSATRSLQDLASRKRAYRGSEPQQSHCTDAPVPAVVMTAPAASGASASARVLSGRELKRKVGCIDNAMRIGRRKRLESEYDLGDEIGHGKFGSVRVCRPKAGTRGEEEFACKALPKNGERRAANVIKELMVVLKYCHEMGIVHRDVKPENVLLTRSRRLKLADFGLAVRVADVLQNAARYLDQHEQAHALAQPDKSHLLVKWADSLIHNELNDPMSAKYFGGGMKITPIADPSSNNLEVVILYDFKWYFLLKQHSLYGGTHLSVNGVSSMR

SEQ ID NO: 76826 - protein, 165 aa, Zea mays
  Coding DNA Sequence Number=SeqID_33451
  Homolog annotation: Hit_ID=Q7FS90; Match level="QueryCoverage=23%, HitCoverage=6%, E-value=1e-07, Identity=71%"; Hit description =Putative aldose reductase-related protein
MGVNKQALRRSGALEAEKEEKVWAPLVPLIKFLGSCVEACDEGGWTTRLWVFSYRVIQDIVLPLITPLNLLCSLCHALGVPMDRLVKAADSVSKYEQYLEAKNLRKTLGGGMRQVGVLCADSHTLWESLLFQVAVFIAYLRHCSVLQLNLKLSSTCYFRLNLKLS

SEQ ID NO: 76827 - protein, 115 aa, Zea mays
  Coding DNA Sequence Number=SeqID_33452
  Gene Ontology: Mol. function=nucleoside-triphosphatase activity
  Homolog annotation: Hit_ID=A2YPT9; Match level="QueryCoverage=72%, HitCoverage=8%, E-value=3e-15, Identity=51%"; Hit description =Putative uncharacterized protein
MDPQKLESDLINRSLGPLILEAVVSLIMAYYVQFASEESQQVPVILFVKDVEKICGNNYTYHGLKNKLESFPAGVLLLGPRFRQMLGKISQTMGLLGSSSHTAKQQYLTLHFRCS

SEQ ID NO: 76828 - protein, 49 aa, Zea mays
  Coding DNA Sequence Number=SeqID_33453
MAGAGGGEDAGERTRARMEQPGRRQMQQHHRVKGCHGPAVADHAARRTR

SEQ ID NO: 76829 - protein, 310 aa, Zea mays
  Coding DNA Sequence Number=SeqID_33454
  Gene Ontology: Mol. function=transferase activity, transferring glycosyl groups; Cellular component=cytoplasm; Biological process =metabolic process
  Homolog annotation: Hit_ID=A2X4Z4; Match level="QueryCoverage=94%, HitCoverage=60%, E-value=4e-87, Identity=53%"; Hit description =Putative uncharacterized protein
MRLIDFPSFIRTTDPDDAVLALVLRSMECHRTVPSAVIFHTLEEMESQVMSALSAILPPAYAIGPLPLLLSGAGGGGDPAIHVSGSSTSLSKENRACLEWIDGKRHNSVLFASFGSLAKLAHEQLVELAWGLANSGYEFLWVIRSDQQGLVDGGAVLPPEFLAETEGRGCVTSWCPQEAVLRHDAVGAFLTHCGWNSMLQSVCAGVPMLCWPVAADQQTNSRLACTEWRVGVELGENASREEVETAIRQVMGGERGEELRRSAMEWKEKAALAARPGGSSWANLEKVANEVLAPLIAAHRKECDDAMELS

SEQ ID NO: 76830 - protein, 41 aa, Zea mays
  Coding DNA Sequence Number=SeqID_33455
MAEQHMLSFSPALYRKLLKPFVADAGGCGDRAIAGGAPEEE

SEQ ID NO: 76831 - protein, 569 aa, Zea mays
  Coding DNA Sequence Number=SeqID_33456
  Gene Ontology: Mol. function=3,4-dihydroxy-2-butanone-4-phosphate synthase activity; Cellular component=chloroplast; Biological process=riboflavin biosynthetic process
  Homolog annotation: Hit_ID=Q6Z234; Match level="QueryCoverage=77%, HitCoverage=79%, E-value=0.0, Identity=80%"; Hit description =Putative riboflavin biosynthesis protein ribA
  Pfam annotation: Domain name=DHBP_synthase; Domain location=139-352; Score=402.4; E_value=6.7e-118; Accession=PF00926.10; Description=3,4- dihydroxy-2-butanone 4-phosphate synthase
  Pfam annotation: Domain name=GTP_cyclohydro2; Domain location=357 -526; Score=407.7; E_value=1.7e-119; Accession=PF00925.11; Description=GTP cyclohydrolase II
  Pfam module annotation: Pfam domain module=DHBP_synthase::GTP _cyclohydro2; Domain location=139-352::357-526
  Subcellular localization annotation: CTP_CleavageSite=55; ConfidenceScore=5.82e-01
MPSIAPPSSSVAALTRQPVQFFKGCSVSKETKGPVRSFFTANSKSTKVKSAGLKVASSFKNDGGYPAGGVSWKDDTLLPKSTTIRGQDHSVADPVLPMDSMITPEILSANVERVIDMFADDDTDTELDLDSPTEGFTSIAEAIEDIQQGKLVIVVDDESRENEGDLIMAASLVTPEAMAFIVRHGTGIVCVSMKEDDLERLSLPLMVTTKENEEKLCTAFTVTVMMTLQQLCSIELNSKDAKEGTTTGVSAKDRAKTVMTLASPDSKPEDLNRPGHIFPLKYREGGVLKRAGHTEASVDLAMLAGLPPVAVLCEIVDDADGSMARLPKLRVFAEKENLKIISIADLIRYRRKRDRLIERASVARLPLKWGNVHAYCYKSVIDGIEHIAMVKGDIGDGQDILVRVHSECLTGDIFGSARCDCGDQLAMAMEMIEKAGRGVLVYLRGHEGRGIGLGHKLRAYNLQDDGRDTVEANEELGLPVDSREYGIGAQILRDLGVRSMKLMTNNPAKYSGLKGYGLSIAGRVPLITPITSENRRYLETKRTKMGHVYGLANAQANLANGSQSTEENH

SEQ ID NO: 76832 - protein, 61 aa, Zea mays
  Coding DNA Sequence Number=SeqID_33457
MNFAKLDSILVRKARRNRVNNKEVGCGRTPDHTKWIGFFSSKQDFIDVVEKTETRKMQIFG

SEQ ID NO: 76833 - protein, 153 aa, Zea mays
  Coding DNA Sequence Number=SeqID_33458
MGLPLELYRCDLCRIRTQHRNRNQTEDQHQRFSWRRRVGDRYGCSSRSAFSADPRKPIKKPEKGREERAVQRPEPVLTTLSKETRGVVQPAKPRFKVKKVRRYKLLAEGDMVDRIIVKLPKEIAQPSFSNTSLFMTQILGHVVKASSFHDDFL

SEQ ID NO: 76834 - protein, 543 aa, Zea mays
  Coding DNA Sequence Number=SeqID_33459
  Gene Ontology: Mol. function=hydrolase activity; Cellular component =cytoplasm; Biological process=regulation of transcription, DNA -dependent
  Homolog annotation: Hit_ID=Q10PD0; Match level="QueryCoverage=45%, HitCoverage=84%, E-value=1e-99, Identity=62%"; Hit description =Purple acid phosphatase 1, putative, expressed
  Pfam annotation: Domain name=E2F_TDP; Domain location=238-292; Score =47.6; E_value=4.3e-11; Accession=PF02319.11; Description =Transcription factor E2Fdimerisation partner (TDP)
  Pfam annotation: Domain name=Metallophos; Domain location=305-462; Score=15.2; E_value=0.019; Accession=PF00149.19; Description =Calcineurin-like phosphoesterase
  Pfam module annotation: Pfam domain module=E2F_TDP::Metallophos; Domain location=238-292::305-462
MKAQISNGRGGCLALKLAEHEGRGGNLSKLLPLFLTEQSLHEAKADPAKATANGVPNGTGHSYSGTVPSQQNSALTPDGNYRAPLLGGVPSAGYLDTTYGYDSTGAQFAWYDGSAYANGQQRTTTTNRFPSSSFSGNGSSARYQNKSSTTQQMGMQNRRPTTTSAAPTYPNRMYPSPRPYTQYGNSVKTGLPYGSNGYDSRINGRCGLGMDNRYRPRACSGYYGYGNESQDGTIELNRGPRSGRFKNQKLYGHTVTIDPVMVQKRRIYDITNVLEGIGLIEKKLKNNIRWKGVDDSRPGEFSDDMSILQMGRVREKLDIDFVISTGDNFYKNGLKGVRDQAFKESFMDIYIAQSLQKPWYSELVDFFFVDTTPFQLEYWTHPGKHRYDWRGVAPRGKYIANLLKDMDVAMKRSTARWKIVVGHHTMRSVSEHGDTEELLELLLPVLKDNGVDFYINGHDHCLEHISSRDSPLQYLTSRGGSKAWRGVFHPNKDKLRFFYDGQGFMSLQLNQDQTHFIFYDVFGNILYRWSSRHPQSSTYLDEE

SEQ ID NO: 76835 - protein, 217 aa, Zea mays
  Coding DNA Sequence Number=SeqID_33460
  Gene Ontology: Mol. function=RNA binding; Cellular component=nucleus; Biological process=rRNA processing
  Homolog annotation: Hit_ID=A2Y0X0; Match level="QueryCoverage=70%, HitCoverage=65%, E-value=8e-43, Identity=57%"; Hit description =Putative uncharacterized protein
  Pfam annotation: Domain name=Fibrillarin; Domain location=1-164; Score=90.5; E_value=5.5e-24; Accession=PF01269.8; Description =Fibrillarin
MQNEDGTKVECRVWNPFRSKLAAAVLGGVDNIWIAPGTHVLYVSHVSDIVGPSTLLSSLRSGRDLVNMAKKRTNVIPIIEDVRHPARYQMLVGMVDVIFSDVAQPNQTHENSEDIVFLQPLDNEIYILVKLVLTQYLIPRLQAQDSKRDYLDRSSGSGVGLYGCTECEADVVALIEEEVPRVGEAAHRFEWIGGEVLLFLPLQSQQILNGNTSPCSR

SEQ ID NO: 76836 - protein, 170 aa, Zea mays
  Coding DNA Sequence Number=SeqID_33461
  Homolog annotation: Hit_ID=Q69RL4; Match level="QueryCoverage=48%, HitCoverage=27%, E-value=2e-18, Identity=60%"; Hit description =Putative uncharacterized protein P0003B09.20
MGSPGSANGRRGEYVRIPEEVEVASKGEGDAAAAIKAAVAAECPRVLRCRAIRWWAKVAVLGIFLAGAEAAVVVFLGPLVIKKDVVVQRAYLALFPTETHKEKCFANSLSFDIRQCLTVMKGISNSKFVELKFLLPIHCRWLEKASSAQETEMLLIVAPFCAAARVNPGF

SEQ ID NO: 76837 - protein, 125 aa, Zea mays
  Coding DNA Sequence Number=SeqID_33462
  Subcellular localization annotation: CTP_CleavageSite=17; ConfidenceScore=5.12e-01
MAPAACKQKGADMYKPRGMTRRPACKQQQGSSLLFGRLAVPGWVGGSSAGQRRRGVDDDGGGARGGIDGGGNARRGGLKDDQIILFVRFEVNGTERDCESGMGTERLRSVDFLERNGSRSEENIP

SEQ ID NO: 76838 - protein, 115 aa, Zea mays
  Coding DNA Sequence Number=SeqID_33463
MGKSNKRKREPTPPSEDFASSDDSDDSQGIAYIRAIERSGLKGSDESEYSSDEGDSPEEDSDGDDDDNDDDGGDGSDDGDGDGRGGNGDGKGGDGGSNRGSNGGGSSMGSNKASG

SEQ ID NO: 76839 - protein, 143 aa, Zea mays
  Coding DNA Sequence Number=SeqID_33464
MGKNNKRKHEPTPPSEDFGDSEYSEEEFSSESEGSPAPISPPASSDDSDDSQGIAAEVWTYIRAVERSGLEGSDESEYSSDEEDSPEEDGEGDDDDEDDGGDGSDDGDGGSRGGNGGSRGGDDGSSRGSNGDDGSKGSNRASG

SEQ ID NO: 76840 - protein, 90 aa, Zea mays
  Coding DNA Sequence Number=SeqID_33465
MAARMLIADPPRILRRQAPKPHAPTSPATPPAAKKPDLVERTADFAVIVSSRLPSPAPGGPPPVCSDDIELVPETPQFRFNYKTNYTDKG

SEQ ID NO: 76841 - protein, 135 aa, Zea mays
  Coding DNA Sequence Number=SeqID_33466
  Gene Ontology: Mol. function=cation transmembrane transporter activity; Cellular component=integral to membrane; Biological process=cation transport
  Homolog annotation: Hit_ID=A2XYD7; Match level="QueryCoverage=32%, HitCoverage=11%, E-value=1e-10, Identity=84%"; Hit description =Putative uncharacterized protein
MAVTCARLAAAAPLPGALRGGTEELAGSCILLPIVGKGNAAEHASSIMFAMKNKLDITLGVAIGSSTQIQLPCRLSRSMVQILCQSMLYTVVPNENGYLCWITFLTALCCFLDSGVLLFPGHAAIGDSRGKTNVF

SEQ ID NO: 76842 - protein, 278 aa, Zea mays
  Coding DNA Sequence Number=SeqID_33467
  Gene Ontology: Mol. function=nucleic acid binding; Cellular component= nucleus; Biological process=activation of protein kinase C
  Homolog annotation: Hit_ID=A7PWA0; Match level="QueryCoverage=79%, HitCoverage=35%, E-value=6e-32, Identity=36%"; Hit description =Chromosome chr8 scaffold_34, whole genome shotgun sequence
  Pfam annotation: Domain name=PPR; Domain location=78-111; Score=27.5; E_value=5e-05; Accession=PF01535.11; Description=PPR repeat
MDDDDVSPDARDVYVANATVSSYFAASDVASTDRLFAEVSTDVADVVTWTTMVVGHASSGGLGRARHFFDAMPERNVVSWNAMLRAYACAGMLTEARDLFDAMPTRNAATWSCMISDLVLSGRCWEALHDQGLFGDMVRSSGIVLNEPALELHGAMSVVLASAIVNMYGKCGGIHSAIRALYFVKSMLVEPHPGLWGALASACKMHGKVELGEEVAKKLIELEPRHGSRYILLSNLYGSVNRWDDMTSVRKILKRSKVPKGTGNAVVGMTSASCVSNG

SEQ ID NO: 76843 - protein, 685 aa, Zea mays
  Coding DNA Sequence Number=SeqID_33468
  Gene Ontology: Mol. function=unfolded protein binding; Cellular component=chloroplast; Biological process=response to stress
  Homolog annotation: Hit_ID=Q02028; Match level="QueryCoverage=97%, HitCoverage=94%, E-value=0.0, Identity=77%"; Hit description=Stromal 70 kDa heat shock-related protein, chloroplast precursor
  Pfam annotation: Domain name=HSP70; Domain location=47-644; Score =1241.6; E_value=0; Accession=PF00012.11; Description=Hsp70 protein
  Pfam annotation: Domain name=MreB_Mbl; Domain location=45-427; Score=- 248.2; E_value=0.0006; Accession=PF06723.4; Description=MreBMbl protein
  Pfam module annotation: Pfam domain module=HSP70::MreB_Mbl; Domain location=47-644::45-427
  Subcellular localization annotation: CTP_CleavageSite=43; ConfidenceScore=5.45e-01
MATTTFPTSTPFFAAHHGPRRSRPSISAAVYARGRRWRPLRVACEKVVGIDLGTTNSAVAAMEGGKPTIVTNAEGARTTPSVVAYTKSGDRLVGQIAKRQAVVNPENTFFSVKRFIGRKMNEVDEESKQVSYLVIRDDNGNVKLDCPAIGKQFAAEEISAQVLRKLVDDASKFLNDKVTKAVITVPAYFNDSQRTATKDAGRIAGLEHMVLRKKNNETILVFDLGGGTFDVSVLEVGDGVFEVLSTSGDTHLGGDDFDKNPLFVEYVKFSGVKERIVDWLAGNFKNDEGIDLLKDKQALQRLTEAAEKAKMELSSLTQTNMSLPFITATADGPKHIETTLTRAKFEELCSDLLDRLRTPVDNALRDAKLQFKDIDEVILVGGSTRIPAVQELVKKMTGKDPNVTVNPDEVVALGAAVQAGVLSGDVSDIVLLDVTPLSLGLETLGGVMTKIIPRNTTLPTSKSEVFSTAADGQTSVEINVLQGEREFVRDNKSIGSFRLDGIPPAPRGVPQIEVKFDIDANGILSVSAVDKGTGKKQDITITGASTLPKDEVERMVGEAEKFAKEDKEKRDAIDTKNQAESVIYQTEKQLKELGDKVPGDVKGKVESKLQELKDAVAGGSTQTMKDAMSALNQEVMQIGQALYSQQGAPGAGPGAADASSAGSAGTSEKPGDGGDVIDADFTDSK

SEQ ID NO: 76844 - protein, 107 aa, Zea mays
  Coding DNA Sequence Number=SeqID_33469
MDSNIPYGDTPTNKVEIMLRALVLDKVDREVDKVLLVRGLWSSFKSWWNQNASTTPFASAQHFSLSARVRDHMLPLRQPRDVIAPKNAVARGGPTCVRVTAALWWKG

SEQ ID NO: 76845 - protein, 152 aa, Zea mays
  Coding DNA Sequence Number=SeqID_33470
  Gene Ontology: Mol. function=carboxyl- or carbamoyltransferase activity; Cellular component=ornithine carbamoyltransferase complex; Biological process=amino acid metabolic process
  Homolog annotation: Hit_ID=Q8SA97; Match level="QueryCoverage=81%, HitCoverage=21%, E-value=1e-17, Identity=44%"; Hit description =Ornithine carbamoyltransferase
MAPPVDVAGLRPRLGDVEAPPKPRSSLSSVAEVESEPLGRARRRPSAEARAKSEPWGRAKRSSSSSGAEPESEPWVGRSGPESEPWVGQSGVRRLPGLSPSPSPGSGGAEFAVFRDLAQVRALGRAERSGAVLLSGRSVERRSDGGHFGSAD

SEQ ID NO: 76846 - protein, 81 aa, Zea mays
  Coding DNA Sequence Number=SeqID_33471
  Gene Ontology: Mol. function=voltage-gated chloride channel activity; Cellular component=integral to membrane; Biological process=chloride transport
  Homolog annotation: Hit_ID=Q10ER1; Match level="QueryCoverage=95%, HitCoverage=11%, E-value=2e-27, Identity=75%"; Hit description =Chloride channel protein CLC-d, putative, expressed
MARLAWTRLPTADGEGAGPSTSEAADDELLSGAAIESLDYEVIENYAYREEQAQRSKFWVPYYVMLKWLFALLIGVGEHSV

SEQ ID NO: 76847 - protein, 154 aa, Zea mays
  Coding DNA Sequence Number=SeqID_33472
MVRERRTQTNTMSKNTRDTRFIPRFGHTTKVPYFLVEAPTKSWVSFNPNPPFADHKGQAHTIIFAQTSGAGSTAWGSQWQPVCQSGGQTGQVTLTPVEPPLGPVQPVLTSEVRGKYPGRTFPGYWLNLSGPRLNLPWTPVEPLWTPVELALDPG

SEQ ID NO: 76848 - protein, 98 aa, Zea mays
  Coding DNA Sequence Number=SeqID_33473
MAAVPKMKMSTEYHFPWYSVCTGSDRQRGCLHRRRPIFAVIRATAVVIHVDDDPIRPPSKSHAPGDNSGDSPPYPSCSAAVADKFTDESRRPTVRRVS

SEQ ID NO: 76849 - protein, 174 aa, Zea mays
  Coding DNA Sequence Number=SeqID_33474
MATTTALKSLLSTWILNQEGMNEILEFYNLQIGHLTPNSILTLSTFVYQAFWWCSHYLGAAIEATIGVLVAIVGAGLRSAGDETNVEESSKTVLVGATGDASARADRPANEDPPYPNAETHQRHRRYEGGLHRVKNTRSNVTSNVGDPFSGRPSFKCGSNWSQASRSPTWYRRV

SEQ ID NO: 76850 - protein, 396 aa, Zea mays
  Coding DNA Sequence Number=SeqID_33475
  Gene Ontology: Mol. function=voltage-gated chloride channel activity; Cellular component=integral to membrane; Biological process=chloride transport
  Homolog annotation: Hit_ID=Q10ER1; Match level="QueryCoverage=80%, HitCoverage=50%, E-value=1e-155, Identity=79%"; Hit description =Chloride channel protein CLC-d, putative, expressed
  Pfam annotation: Domain name=CBS; Domain location=210-374; Score =71.7; E_value=2.4e-18; Accession=PF00571.19; Description=CBS domain
  Pfam annotation: Domain name=Voltage_CLC; Domain location=2-220; Score=-102.4; E_value=4.5e-06; Accession=PF00654.11; Description =Voltage gated chloride channel
  Pfam module annotation: Pfam domain module=CBS::Voltage_CLC; Domain location=210-374::2-220
MGCQSLHSLLSSYRANHSQYKIFEACLISLVTSTISFVLPLLRKCSPCPKLETNSGIECPHPPGTDGNFVNFYCSQDREYNDLATIFFNTQDDAIRNLFSAKTFHEYSAQSLITFLFLQVMFYFLAVVTFGTAVPAGQFVPGIMIGSTYGRLVGMFVVKFYKKLNIEEGTYALLGAASFLGGSMRMTVSLCVIMVEITNNLKLLPLIMLVLLVSKVVCLPRVSRVVDIISVLRTNKHNGFPVVDRGQNGESLVIGLILRSHLLVLLQAKVDFQNSAFPCGPGVLNRHNFSDFVKPASSKGKSIDDIHLTEDELGLYLDLAPFLNPSPYIVPEDMSLAKVYNLFRQLGLRHIFVVPRPSRVVGLITRKDLLLEEDNNNVMPELQSTSGLAERQNARG

SEQ ID NO: 76851 - protein, 330 aa, Zea mays
  Coding DNA Sequence Number=SeqID_33476
MTTKCKNKQPTLNSRSFRIEKAHLARSLQGLLKTSIIIQVHTKKRNRLTTDRLNKLVYIQFNNRLINKRTKIKSKKITDVLLSSGTTEAQGFLQENGDDCALVSFRDDEDEEEVMEGAGIPWSVLGDAVGAEEQLELRRSARAILCCWSVLNGWEKAVLEDSMISRSAKTKDLSPLPGWTLLDALPFIVAIVGSVTVAAFSAGSVVVMAFSARSSVSLAISSSSWLDQSMSWPSRPDPSLPLLFCRRHLPWSEAEVTPLAGATTLINIDLVGSYLRLFSNLIVCGDRCDWGWRAPPLLPPRLLIGQPTLTVVADTATTVVGAVPLTMVLP

SEQ ID NO: 76852 - protein, 199 aa, Zea mays
  Coding DNA Sequence Number=SeqID_33477
MHILFIPSFFSTNNTRAAQGEGHWELADAEPLSLGNDLPNGLVPHSGNMCGLLLALEMLGCSGWLLGQEGEVPGCSDTGTDFLPVGCSDGTAAAAAEETASGTAAAGSGADAVMIALSIKCWKVGKVWFISWHMVMMKVIPELLLGYGFTVGMGGEALVASKLAPEVEVRIAVAAPAASLLKSNQSLGLLEFASGTSAQ

SEQ ID NO: 76853 - protein, 181 aa, Zea mays
  Coding DNA Sequence Number=SeqID_33478
EQQDSSPSPQQEVESGSQPSPAPQPESLVQYHRASLLLEETLTETTTMTLVTTSIVTDYTRINGRLLACGIADGLDLKYYPRCSTGSVGGVIVSPVGEGNPRLNSMVNLVAVLNTELDHALGKLGNVWAEVMELRVERVARHYQDGGSPDPVGIQHPYHSPLRGRFDYDTPECRTQIDLEP

SEQ ID NO: 76854 - protein, 198 aa, Zea mays
  Coding DNA Sequence Number=SeqID_33479
MGMVGKADHIVPIPMRPERGYVSLQFVGLSGKPEIKWLSKRELQDLLQEGAKMLGVRVKEEAAVVERAADPLQAGHEVHAAKVAATPLTLSAEAIPDPSAKTEGKRVADADEAGPSRRPEVPVMGRTALFPDDEKDGEPMYVLNNKEEQEMWSKFQLMARGLMVKFVAKSIFLRYEHDIWDTLLHQRGLLDQLNEQLA

SEQ ID NO: 76855 - protein, 60 aa, Zea mays
  Coding DNA Sequence Number=SeqID_33480
  Subcellular localization annotation: CTP_CleavageSite=33; ConfidenceScore=5.06e-01
MEAGAAGWAAPPRQAAESGWGGSPGRAATPVPRRAAESGPRVRARRLLLRRQKKRRKAKN

SEQ ID NO: 76856 - protein, 271 aa, Zea mays
  Coding DNA Sequence Number=SeqID_33481
METSIYRLKESLQACQGLLRTERRHGRAPVVGGCPVPVFASLTEQSIEARAEGSVTYPSLSGGEDDQVVVVGVVMGSGVVETAVPWRGDLRRDKDFLEKRTIGNVLARAAKTLLSLEHRTVRWCTGQCPVRQAGSGELAALGKNLTAYGYNSPDCPVSQRSAGPTVGCAICARHVAEPTVGRGHRTVRCTPDSVRCANGSQAPTVGFARKGKKSAPDSVRCAPDCPVRQATEGKICLPGMLSTAPSCLGAIKGTPRRMEEYTKHSLSIPKH

SEQ ID NO: 76857 - protein, 60 aa, Zea mays
  Coding DNA Sequence Number=SeqID_33482
MPMPCTLLVLAPPSSPPMELCVKGPPLTIYGKGAEAFQDYLVSIQVCSYGVYYVASYFTS

SEQ ID NO: 76858 - protein, 674 aa, Zea mays
  Coding DNA Sequence Number=SeqID_33483
  Gene Ontology: Mol. function=oxidoreductase activity; Cellular component=endoplasmic reticulum; Biological process=electron transport
  Homolog annotation: Hit_ID=A2X275; Match level="QueryCoverage=73%, HitCoverage=89%, E-value=0.0, Identity=82%"; Hit description =Putative uncharacterized protein
  Pfam annotation: Domain name=p450; Domain location=80-534; Score =193.7; E_value=4.7e-55; Accession=PF00067.13; Description=Cytochrome P450
MGEDMDAAGAGWLSWRAAAVAVLAWLALHVAARVADALWWRPRRLEAHFAAQGVRGPPYRFLLGSVKEMVGLMAEASSKPMSPPTSHNALPRVLAFYHYWRKIYGPNFLIWFGPTPRLTVAEPELVREIFLTRAEAFDRYEAHPVVRQLEGDGLVSLHGDKWALHRRVLADAFYPDNLKRLVPHVGRSVAALAEKWRAMASASSSGEVEVDVAEWFQAVTEEAITRATFGRSYDDGRVVFAMQGRLMAYASEAFRKVLVPGYRFLPTKKNWQSWKLDREIRRSLTRLIARRSDEAEAEEEEMGSHSGGFRDLLGAMINAGERKTPPAGAIPVADMLEECKTFFFAGKQTTTNLLAWATVLLAMHPEWQERARREVLDVLGPDELPSKEHLPRLKTVGMIINETLRLYPPAVATIRRAKTDVQLSNGCLIPRDTELLIPIMAIHHDARLWGADAAQFNPARFAGGAARAAKHPLAFIPFGLGARACIGQNLARLEAQLTVAVLLQRFEIRASPNYVHAPTVLMLLYPQYGAPQHNSAKQNQAELQRHGMASSSQHQGGEDEGEQCEDEDEAAPWLLFPMDRMLARCHATLPDLNRAQHICRAGAGLLELPLAGKQALARHQIGLESAREGRTAHCSSRLVGRYCNTATEKGQGSSCRNAKLVQANMLDVVDLAKE

SEQ ID NO: 76859 - protein, 119 aa, Zea mays
  Coding DNA Sequence Number=SeqID_33484
MHCSLSGADHLPKLAQPTVEDLEPLAHRTLSGAHRTVRCPHQTVGSATRHAWIARSTVGAADYWLTGQSGAPPDSPTTFAPLVLFLQILLEKSFQNLFQIVKAQAFLFSPETDKSSEVL

SEQ ID NO: 76860 - protein, 158 aa, Zea mays
  Coding DNA Sequence Number=SeqID_33485
MRRPPSGRRGRRKPGRRLRHAGGDDARRRSAPRYRSPRRPQGQRTPLPPSATGKGDPRTHAEGTGKGGYPERDPSPRRNRAPSPPLLIRGSKAGPPRVQQSPQIAWARHPLLVRGSKASPPKGFMAASGYSGSAPITDQGFEGWPPKGSQSPQTPSEG

SEQ ID NO: 76861 - protein, 140 aa, Zea mays
  Coding DNA Sequence Number=SeqID_33486
MGKNNKRKRDPTPPSEDFSDSEYSEEEFSSESEGSPAPIPLRESSDDSDDSQGLAAEVWTYIRAVERSGLEGSDESEYSLDEEDSSEEDGGGDGEDDDDNEGGGGDDGDGGSRGGSSGSKDGDGGSSRGGSSKDSNKASG

SEQ ID NO: 76862 - protein, 292 aa, Zea mays
  Coding DNA Sequence Number=SeqID_33487
  Subcellular localization annotation: CTP_CleavageSite=68; ConfidenceScore=5.53e-01
MSSRSLVHRVSPPSKPPDGGYPPSFRLIVGGTQLRGSWYLSAIVRLQGFSSCSPAAPLRRRSPEMVTSSLMVGESEPGCGLCPSLSLKDFHHQSWGGECAELGCTVPCSRTRVALEPLAAPASATAAGRGSSAGERAKASHGPTSNSTAFCPSLPHEFGHGRGPPGSSTRPEVSAAAVRPPGAEVVVVAAAGADDGTPFVGLLLLRRPTPIEWGYSPVDYLNRFTKYESPRVKVTSELLSGCGDDVVLRSGGLRTTSPSEARSNLAEVIVDAEGAAAPFQRQDPSLQDQIVL

SEQ ID NO: 76863 - protein, 175 aa, Zea mays
  Coding DNA Sequence Number=SeqID_33488
MALVVTYVLISFDMDERSPASCAVPVHALVSRSYFRRQYKASEREKNKEFNEKAHRIPVAVDACGSGFIHKQNVQRHNVRGSGCLTPNVGRAAAAHRDHAIALMHAESCESSAHTSGTTARPYDARSHPRHGICGRHAMDMDMDMDGAARRDIAVAPRRARERLRRPPARPLAHH

SEQ ID NO: 76864 - protein, 1173 aa, Zea mays
  Coding DNA Sequence Number=SeqID_33489
  Gene Ontology: Mol. function=transcription regulator activity; Cellular component=nucleus; Biological process=regulation of transcription
  Homolog annotation: Hit_ID=A2Z2B6; Match level="QueryCoverage=89%, HitCoverage=95%, E-value=0.0, Identity=53%"; Hit description =Putative uncharacterized protein
  Pfam annotation: Domain name=HLH; Domain location=837-887; Score =66.4; E_value=9.5e-17; Accession=PF00010.17; Description=Helix-loop -helix DNA-binding domain
  Pfam annotation: Domain name=PPR; Domain location=446-480; Score =29.4; E_value=1.3e-05; Accession=PF01535.11; Description=PPR repeat
  Pfam annotation: Domain name=PPR; Domain location=549-583; Score =28.4; E_value=2.6e-05; Accession=PF01535.11; Description=PPR repeat
  Pfam annotation: Domain name=PPR; Domain location=654-688; Score =47.5; E_value=4.8e-11; Accession=PF01535.11; Description=PPR repeat
  Pfam annotation: Domain name=PPR; Domain location=689-723; Score =10.5; E_value=0.44; Accession=PF01535.11; Description=PPR repeat
  Pfam annotation: Domain name=PPR; Domain location=725-758; Score=2.9; E_value=3.5; Accession=PF01535.11; Description=PPR repeat
  Pfam module annotation: Pfam domain module=HLH::PPR::PPR::PPR::PPR::PP R; Domain location=837-887::446-480::549-583::654-688::689-723::725 -758
MGQEWPGPNLEHMRGPVAVSIHGMPAIPGLIVMCLPSPHLSKPSRNKAATHEHDFLSLYAAAAAKDAPLLLHDSKAPPPSQGNFLLKTHDFLQPLDQKPGAPPEPSPLPASAAESRHQPQQQVVVANQHALPLPGGVGTFSISPAPVSVALPAAVVKSEPPFVLWGQPAATLHPGARGHQQQWALPFAGAGQVRLPPQQAPPDRKGRGGAGGGVMESGSRSSGGAGFDDDDGLTTRREVSSSLQDAPSLFSSGVVFRVRVAELTVRKRMTGVEGMSPHALVATGAGWQWQPAHVHRLHAHLLVSGRLSGSPTLAALTLLRVACRVPASPCLRPLAHHLLDRIPHLSPHLLHAAARLASRLRLPSLALRHYLALRARHPAFLPPAPAIADVLKSAPGRAAHAHALRVAAHAVDARFLDNTLISMYFACGDGWSARQVFEGMSDRDVVTWTSLISGLVQNGCPLQGLRHFASMMHSEVCPDFVLLISVLKAYMELDDFPGATAAHALVVKSGFDNELDVIITLTAMYAKFGCIVSARTLFDRVPTPRVNVVLWNAMISGYSKNGLANEAVQLFKQTRKVARSMTPDSVTLRSVIVACAQLGSVELAEWMDCYVQGSKYRDDVLVNTALIDMYSKAGSIARAHTVFERMDVQERDVVVWSALIGGYGVHGHVKEAVALFDDMKHAGVKPNDVTFLGLLSACNHAGAVDEGWSYFHSMKRDYGIEPRHQHYACIVDLLARAGHLDRAYRFIMDMPIKPEMSVWGALLHGCRMHGRSDMALAECAAQHIFELEHSNAGHYVQLANLYASAGMWSHVADLTVRVDRKGGSCSDGGTDQRPNTPRSKHSATEQRRRSKINDRFQILRELLPHSDQKRDKATFLLEVIEYIRFLQEKVQKYEATFPEWNQENAKMLPWSKGQISGDSPPDPSHFMRNGSSPGSNFTGKLDDNHNIVTSAAASGAQDQVETDHMASGCYRSAETTANFTNNAMSQSQPQWTGPSPVDDSAVNSETLNNQQLVIDEGTIRVSSNYSQEILAQKALCVWAWAANDLLSSPKININMGKRAAKRPAAGVSSNSKHACLRQTCDFASRDWYPVAIMRRSIGTAKTARRLGVGDAWGPDKALTEPPPTHEGSNSHAGVGARRSRVQMQATAVEEEEPRCLSGQEWIQQNSKRSRSFC

SEQ ID NO: 76865 - protein, 663 aa, Zea mays
  Coding DNA Sequence Number=SeqID_33490
  Gene Ontology: Mol. function=nucleotide binding; Cellular component =Golgi apparatus; Biological process=proteolysis
  Homolog annotation: Hit_ID=A7PAF3; Match level="QueryCoverage=66%, HitCoverage=93%, E-value=0.0, Identity=67%"; Hit description =Chromosome chr14 scaffold_9, whole genome shotgun sequence
  Pfam annotation: Domain name=DUF246; Domain location=272-595; Score =642.9; E_value=2.7e-190; Accession=PF03138.5; Description=Plant protein family
  Pfam annotation: Domain name=Peptidase_S9; Domain location=65-204; Score=-7.3; E_value=1.7e-06; Accession=PF00326.12; Description =Prolyl oligopeptidase family
  Pfam module annotation: Pfam domain module=DUF246::Peptidase_S9; Domain location=272-595::65-204
MQLVKTSQNWSDLSKLFSCERVEVISHDGVSIPLVILYSWGAHCHGESPGILYGYGAYGEDLDKSWCSERLSLLSRGWVLAFADVSAGGLLVGAVINMLPDLFSAAVLKVPFLDICNTMLDPTLPLTVLDYEEFGDPNSPDEFEAISSYSPYDNLAPDDSTRDVRRASDEMGGGGGGGGGGKSEKARRSSARVRLWVARASTVLLWTCLVQLAAYRELWAPSVLSRWPGCLNQPHVVQRPSERVADAGQTQAARALVVLPPKRIYRNNGYLMVSCNGGLNQMRAAICDMVTIARYLNVTLIVPELDKASFWADPSDFQDIFDVDYFIASLRDEVRILKQLPPRLKRRVEMGSLRSLPPVSWTDARLANNGLPVEMQRLRCRVNYNALRFTPEIEDLGRRLVRALRRNGPFVVLHLRYEMDMLAFSGCTHGCSSMEAQELTKMRYAYPWWKEKVIDSDAKRKDGLCPLTPEETALVLQALGIDRGYQIYIAAGEIYGGQRRMAALTSAYPNVVRKETLFPWEVGLFQNHSSQMAALDYMVSLESDVFIPTYDGNMAKVVEGHRRYLGFRKTVLLDRRRIVELVDEYRNGTLRWTDFSSAVMASHTSRMGEPSRRQTVPDRPKEEDYFYANPHECLHQPEDVSAFRRSREDNNNSSRIVVKKSLE

SEQ ID NO: 76866 - protein, 212 aa, Zea mays
  Coding DNA Sequence Number=SeqID_33491
MREQGDTRGQENSRRGGQRARPGIGQSQDATQEGENPSRGRSRLAEDTTVRREIRQGRAASREALGSTGRKAGEQMVKRLGSRTRHGWSWSFGRLEGEARRAALGKTEPADRTWDQVASAREQARRQGKARSERAGERERAAGRREIQAPSVEFRRAARQPWEGESELKLATQGASVRRNRTGTQGEEEGDAVAQEDGWAEEEDRGERRLDF

SEQ ID NO: 76867 - protein, 279 aa, Zea mays
  Coding DNA Sequence Number=SeqID_33492
  Homolog annotation: Hit_ID=Q6J9V9; Match level="QueryCoverage=13%, HitCoverage=13%, E-value=6e-11, Identity=89%"; Hit description =Putative uncharacterized protein
MKRLVGTPNPRSWKGMKLSTYPGGGVGLLKPKKKASANGRVKNQHRPLFRVYKGPGEIHPRLRPNPPWNSNSKGKRHLRQEKRAPFHLRQDDRVKKGTGKGGILKKDPSQRRRRAPSPPTDQGGSKAGPSEGFDNRPRACRVRDDPGYVRYMAEARATLLRELHLARPQASASASASEEDLRLARPQASASASASEGVTTSPEPSLSLRRSLRLARPGPRTDCARGDTSLPYSYLAASGYEGTRPVSHLRLLQQQGSRHFSDGHVSSCIGLKALLRQLR

SEQ ID NO: 76868 - protein, 335 aa, Zea mays
  Coding DNA Sequence Number=SeqID_33493
  Gene Ontology: Mol. function=zinc ion binding; Cellular component =intracellular; Biological process=regulation of transcription, DNA -dependent
  Homolog annotation: Hit_ID=A2X734; Match level="QueryCoverage=94%, HitCoverage=95%, E-value=3e-87, Identity=58%"; Hit description =Putative uncharacterized protein
  Pfam annotation: Domain name=CCT; Domain location=257-301; Score =88.6; E_value=1.9e-23; Accession=PF06203.5; Description=CCT motif
  Pfam annotation: Domain name=CCT_2; Domain location=256-281; Score =14.9; E_value=0.048; Accession=PF09425.1; Description=Divergent CCT motif
  Pfam annotation: Domain name=zf-B_box; Domain location=25-69; Score =33.5; E_value=7.6e-07; Accession=PF00643.15; Description=B-box zinc finger
  Pfam annotation: Domain name=zf-B_box; Domain location=70-112; Score =43.7; E_value=6.5e-10; Accession=PF00643.15; Description=B-box zinc finger
  Pfam module annotation: Pfam domain module=CCT::CCT_2::zf-B_box::zf-B_ box; Domain location=257-301::256-281::25-69::70-112
MDTAAELELGLELEQKPAAGYWSVVGARPCDACAAEPARLHCRADGAFLCPGCDARAHGAGSRHARVWLCEVCEHAPAAVTCRADAAALCAACDADIHSANPLARRHERLPVAPLFGALADAPQPFPSPAFAAAAGAEAPAQGEAVAEDYGSSEAEAASWLLPEPDNSHEDSAADTFFAESDAYLGADLDFARCMDGVKAIGVPVAPPELDIGAGSFCYPEHSMNHILSSSSEVAVVPDAQAAGLPVVVVVSRGEEREARLMRYREKRKNRRFDKTIRYASRKAYAETRPRIKGRFAKRRSAEGEDEALEHEEGACFSPTGSAPAASDGVVPSFC

SEQ ID NO: 76869 - protein, 173 aa, Zea mays
  Coding DNA Sequence Number=SeqID_33494
MVVRFACRRPDGGGVRERRWRLDAWFVWPWCDDTTFQLASIYDSLMLRSGVLCSADINGCFMHEHGKKVEARLVFLDLEKLMGVELVKTFDLAFVGWVIAIATFLYVVFFLKMLLMESINLDSSFVWLVVVVKTVERLEVLAGARLRMAMGWGGAGGRPLPDPHWTFLALSLK

SEQ ID NO: 76870 - protein, 136 aa, Zea mays
  Coding DNA Sequence Number=SeqID_33495
MAPPVDVAGPRPRLGDVEAPPKPRSSLSSVAEAESEPWVGRSGVRCLLGLSPSPSPGSGGAEFAIFRDLARVRALGRAERSGAVLLSGWSVERRSDGGHFGSTGGTRVRIKVSGHLCIKCSCDLVGRCGVLVRVAS

SEQ ID NO: 76871 - protein, 201 aa, Zea mays
  Coding DNA Sequence Number=SeqID_33496
MVTSSSWMGRGKPGCDLDPALNVEGVRHPRWGGERGEPGLYLLRGWFASLEREREREPSSGRVHPGPWLLLQRSLVGLPMFVAPQARDSPVGCLNRFTKRESPCVKVTSEPTPRVGLAPSVEGWPRPQGDRPSRPLGPGSRRRPWQRWPGRGDDVVLRSGDLRTASPSEARSDLADGVVDAEGAAAPFQRQDPSLQDQIVL

SEQ ID NO: 76872 - protein, 40 aa, Zea mays
  Coding DNA Sequence Number=SeqID_33497
MTGRKSVKVIKVKKMPVAVYERLHRGKAGGAKGGFKNEYK

SEQ ID NO: 76873 - protein, 233 aa, Zea mays
  Coding DNA Sequence Number=SeqID_33498
  Homolog annotation: Hit_ID=Q6ZBZ9; Match level="QueryCoverage=39%, HitCoverage=10%, E-value=3e-25, Identity=64%"; Hit description =Putative uncharacterized protein P0493A04.31
MGDDNIAAAFPLNPELDDCTNVDAMAILPAPQKINHLEVLAMSGIQSVCDKFVKGLIPVHGSNLKELAFAGCLELTSASIKTVGEYCQELTSLDLRNLNRLRDSALWHLRGCRLLRKLRLQRNAFRTRGFSCESGQHGDAVKQVVDVPSVDDGSAESNLLEAGEHGSAAPRERGGVWEAPEAKVEGAEGGKVEDVDEAIDSVATHGHTPSLNIFIMVFKAARRAKALDHRLDA

SEQ ID NO: 76874 - protein, 489 aa, Zea mays
  Coding DNA Sequence Number=SeqID_33499
  Gene Ontology: Mol. function=nucleic acid binding; Cellular component= ribonucleoprotein complex; Biological process=RNA processing
  Homolog annotation: Hit_ID=A2X733; Match level="QueryCoverage=100%, HitCoverage=100%, E-value=1e-174, Identity=68%"; Hit description =Putative uncharacterized protein
  Pfam annotation: Domain name=La; Domain location=17-89; Score=94.2; E_ value=4.1e-25; Accession=PF05383.8; Description=La domain
  Pfam annotation: Domain name=RRM_1; Domain location=122-192; Score =25.8; E_value=0.00016; Accession=PF00076.13; Description=RNA recognition motif. (a.k.a. RRM, RBD,
  Pfam annotation: Domain name=RRM_3; Domain location=333-454; Score =94.1; E_value=4.3e-25; Accession=PF08777.2; Description=RNA binding motif
  Pfam module annotation: Pfam domain module=La::RRM_1::RRM_3; Domain location=17-89::122-192::333-454
MAAPAAAPLDEGKAKKVLRQVEFYFSDSNLPRDKFLRETVEQSDDGLVSLPLICSFSRMKSHLGLDADVKPETVPEETVLAVAEVLRPSPALRVSEDGKKIGRASELLKPDEIIEQVDSRTIAVSPLPCNVKQEDVQSFFTNYAKVNSVRLPRNIANKKHFCGTALVEFSEEEEAKRIMETALVFAGANLEIRPKKEFDAEQKSKKEAYEKTHLKKDNQYEGYQKGLIVAFKLEKATADTVVQQDNIDKENDSATKLDVSSSMEKPSGQGPEESILESDVIKQGMSSDDMTKEKDLNTGEATESEKCISDVPIESDKHGDSEPLSREGKIISGNVNVKNQISREDLKEAFKKFGAVRASPQCPYLSFFHPVLSMPFGVGSMVCNIGDNSGYLRFEDSKAAEKARMSAVLADGGLIIKDHIVTLEPVTGEAEKDYWDTIRSIQGKYKDSRSYKGRASNNQRGGKRFNAKRDRNPDSEKNSNKARKVEAIA

SEQ ID NO: 76875 - protein, 143 aa, Zea mays
  Coding DNA Sequence Number=SeqID_33500
MGKSKKGRSSSPRSGDKRKREPTPPSEDFGDSEYSEEEFSSESEGSPAPVSPPVSSDDSDDSQGIAAEVWTYIRAVERSGLDGSDESEYSSDSSKEGSGGDDDDDGGDDDGGGDNGRGDDGGSKGGNGSGSKGSSKGSNKASG

SEQ ID NO: 76876 - protein, 228 aa, Zea mays
  Coding DNA Sequence Number=SeqID_33501
  Subcellular localization annotation: CTP_CleavageSite=44; ConfidenceScore=5.04e-01
MRPISVVPALPHPRDLDAFPRDSRRARTRTHSLRNSSPAELEVRISALETENAIQAVARRESTGNTGKEEDPISHQLAEHLCGIEHWAVEKPGWGVTRRDAIEVSDDDEGAAAVGANKGESPDEGVGAVPALRKRVVARESVGEADAEDVEGGGGNNGESSVGLEDDYVSVTPRGKKRGRRSAVAQVVTSDSEDDGGYEIHGSGYDYGAGEDEAVEGDFQEFQDYDEF

SEQ ID NO: 76877 - protein, 272 aa, Zea mays
  Coding DNA Sequence Number=SeqID_33502
  Gene Ontology: Mol. function=binding; Cellular component=cellular _component; Biological process=signal transduction
  Homolog annotation: Hit_ID=A2XE28; Match level="QueryCoverage=48%, HitCoverage=19%, E-value=9e-57, Identity=86%"; Hit description =Putative uncharacterized protein
  Pfam annotation: Domain name=HEAT; Domain location=113-149; Score =18.9; E_value=0.019; Accession=PF02985.13; Description=HEAT repeat
  Pfam annotation: Domain name=HEAT; Domain location=72-108; Score=2.7; E_value=11; Accession=PF02985.13; Description=HEAT repeat
  Pfam module annotation: Pfam domain module=HEAT::HEAT; Domain location=113-149::72-108
MLAYCKSLDELSQNGATIVHWIKKVVRGDFIIYFNKKFDALCKLSVDSDANVQSAAHLLDRLVKDIVTESDQFSIEEFIPLLRERMNVLNPYVRQFLVGWITMLDSVPDIDMLGFLPDFLDGLFNMLSDSSHEIRQQADAALFEFLQEIKNSPVRLLYIAQSFISLDVKDIQISARAFSISFDLSACTFDWCRVGIEMPTIKVRSAIVASPPSSIASSTVNTPELKTVTKFQRIKVDSVRFEDEKLQDTSYWANITIPMAPLPFHVSNALRV

SEQ ID NO: 76878 - protein, 215 aa, Zea mays
  Coding DNA Sequence Number=SeqID_33503
  Homolog annotation: Hit_ID=A9PEA5; Match level="QueryCoverage=25%, HitCoverage=14%, E-value=2e-08, Identity=63%"; Hit description =Putative uncharacterized protein
  Pfam annotation: Domain name=DEK_C; Domain location=116-171; Score =21.3; E_value=0.0036; Accession=PF08766.2; Description=DEK C terminal domain
MAPKLEVLAVCDAMKAYISAPNLSVVSWDSDTGYNPLCHHFANAARHLRLLHLGSKCVSASLMRQFDEVDVLKLKLNLLNFKELQQYKEDFDKGRFWHDGNNKKTHFFPHAPAMVSDQEIASCVESVLRGSADGPGEVSLAVMLQQAEATLGVDLSHKAGFIRDQLDLFFGPRLQPLTTPQPMPPPPQAVVAPIDVVPQPQHQHQVLPQAPPSAQ

SEQ ID NO: 76879 - protein, 57 aa, Zea mays
  Coding DNA Sequence Number=SeqID_33504
MAFYLPPPPLAFRYTIDLAGAATGGTVSFQQSAPGAGGTASPTAAPQVTGDNKEMMW

SEQ ID NO: 76880 - protein, 63 aa, Zea mays
  Coding DNA Sequence Number=SeqID_33505
ALSFVSHLPVLEEEGDSSMGEGGEDDIMRDDEDVDSQDEGPIKPENGEDSTTNSNNELMDEYA

SEQ ID NO: 76881 - protein, 226 aa, Zea mays
  Coding DNA Sequence Number=SeqID_33506
  Gene Ontology: Mol. function=zinc ion binding; Cellular component =nucleus
  Homolog annotation: Hit_ID=A2XBP2; Match level="QueryCoverage=51%, HitCoverage=6%, E-value=1e-26, Identity=51%"; Hit description =Putative uncharacterized protein
  Pfam annotation: Domain name=AT_hook; Domain location=96-108; Score =14.2; E_value=0.083; Accession=PF02178.10; Description=AT hook motif
  Pfam annotation: Domain name=PHD; Domain location=127-175; Score =11.2; E_value=0.00064; Accession=PF00628.20; Description=PHD-finger
  Pfam module annotation: Pfam domain module=AT_hook::PHD; Domain location=96-108::127-175
MDGGTGPGAEVLSPGEAEWPPELRLPPLPSVPEPPGPPPPAPASASLRLRSVGVAPHLHGEVFDDDPQFLGSIMGAAAPPPPQQQQQQPAAAAPVKRKRGRPPKNRDGAAPVPAPVKPGNKKDEEEVCFICFDGGSLVVCDRRGCPKVYHPACIKRDESFFRCQGKWDCDLCLNTEPKAICQRPAKGVPLAAIKTHSKISTQERPLHLGISALGTFLSLIREGLAQ

SEQ ID NO: 76882 - protein, 722 aa, Zea mays
  Coding DNA Sequence Number=SeqID_33507
  Gene Ontology: Mol. function=serine-type peptidase activity; Cellular component=cytoplasmic vesicle; Biological process=proteolysis
  Homolog annotation: Hit_ID=Q337C3; Match level="QueryCoverage=63%, HitCoverage=90%, E-value=0.0, Identity=76%"; Hit description=Prolyl carboxypeptidase like protein, putative, expressed
  Pfam annotation: Domain name=Abhydrolase_1; Domain location=101-345; Score=-13.1; E_value=0.06; Accession=PF00561.11; Description =alphabeta hydrolase fold
  Pfam annotation: Domain name=Peptidase_S28; Domain location=43-471; Score=153.4; E_value=6.3e-43; Accession=PF05577.3; Description =Serine carboxypeptidase S28
  Pfam module annotation: Pfam domain module=Abhydrolase_1::Peptidase _S28; Domain location=101-345::43-471
MGSRVRIVFLLLAFLFARAAEPIAAAAPAGSRHLTKDERWMNQRLDHFSPTDHRQFKQRYFEFLDYHRAPGGPVFLRICGESACDGIPNDYLAVLAKKFGAAVVTPEHRYYGKSSPFKQLTTENLRFLSSKQALFDLAVFRQYYQESLNARYNRSGFDNPWFVIGVSYSGALSAWFRLKFPHLTCGSLASSGVVLAVYNYTDFDKQVGESAGPECKAVLQEITELVDEQLRLESHSVKALFGAQTLKNDGDFLFFLADAAATTFQYGNPDALCPPLIKAKKNRKNLVEAYAQFVKDYYIKKMETPPSSYDREYLKETTPHDSSYNFLLGSRLWWFQVCSEVAYFQVAPKNDSVRSARINTRYHLDLCRHVFGEGVYPDVFMTNLYYGGTRIAASKIVFTNGSQDPWAPCLQAEIIERQCLTTHAVPSYIMKCRNCGHGTDLRGCPQWPFRIEGDASNCSSLAVVNTARERIAKHIDLWLSQCSKPSVGYGLCLWLRSRGEISDPVLLFSIDAEPGNRGLVVHPLGKSGKSLSILLANFQSTIRVTARPVFIWVRVETSLTVTAISLPRRPNTHTDNISCRCAGLSGPDSGGQLEGGTWDESSTHTQQAQHSTQNQHVQKIQAGVGYGTSAKHVVAAMRAGRQWSRFASKDGSELLRSACPSRAQTGERAREVVENPRPLCHARQTVYWTRCGPIKCSDQPRHPVPFPSSTDYKQGNTHVLDL

SEQ ID NO: 76883 - protein, 167 aa, Zea mays
  Coding DNA Sequence Number=SeqID_33508
  Subcellular localization annotation: CTP_CleavageSite=30; ConfidenceScore=5.52e-01
MAPAARGPSQAGSLGPGPGSAVAQPRRTARAARPWRGCGRLGGHGARPRWLAAWLRDDARRRLRLAGSRPQPRHGTGGPGAAGAALNGARACALMAARQERGPPAWAGTILAALRRLAAARRLAGVTRRGMARRPVPACHCSVVHAAQRAPDASTRESLRGSVRRGT

SEQ ID NO: 76884 - protein, 158 aa, Zea mays
  Coding DNA Sequence Number=SeqID_33509
  Subcellular localization annotation: CTP_CleavageSite=71; ConfidenceScore=5.24e-01
MADIPVLHSAEVAPFTHKSCIPSSQGFKALRHFRGRAIAKLPKSSVVNKPPRSGIELTSGPPSGDTIQRVRTTQRSGPHVAVEAEVWLDPGSTRQRDMEEVYTELPLLANLSQGLVEPKKILNRRMVLVKWTGLPTAHAWGQASFDDRGDVMTQGGIA

SEQ ID NO: 76885 - protein, 96 aa, Zea mays
  Coding DNA Sequence Number=SeqID_33510
  Subcellular localization annotation: CTP_CleavageSite=46; ConfidenceScore=5.75e-01
MAGGNTLAGAKGTVGWPMRRYGARKSGLSPCPNPRQIPSFVVSRARVPMPSSGTRQRGSNGSWCGFLRETLGDTGVSQPSPLKESRPEIQARVLPG

SEQ ID NO: 76886 - protein, 142 aa, Zea mays
  Coding DNA Sequence Number=SeqID_33511
  Pfam annotation: Domain name=TSP_1; Domain location=4-44; Score=-0.8; E_value=0.082; Accession=PF00090.10; Description=Thrombospondin type 1 domain
MWGHRAAELSFCSLTCGPKETSDRARACVPLLAAQTTACPPARCSGGSPTREPVWSATGCPCAVIVTDPWTRVDRLSAFLVTMIRRSISTDTSSPSPFTNGSLCLVEIEPAVHRGLNLSLGYFYTLAPELLCIVCIVHETGK

SEQ ID NO: 76887 - protein, 55 aa, Zea mays
  Coding DNA Sequence Number=SeqID_33512
MATIMARDHWQRYTESGDLRQLYKFAMLTKSKILKNSEIWSSKVDPSQLNLDLDI

SEQ ID NO: 76888 - protein, 186 aa, Zea mays
  Coding DNA Sequence Number=SeqID_33513
MSSPIHQIIEIPIALSAQLCLHTKAWALVDLPKQPFLFYAYTADGLRLHLYYEWPSNPSNFLRLSWQLLDSHDIVDQKSLDDTRYDHCIIVGIILELKILLGEGDCSELEPPVIGSTSFVAECAIAWLLCEAIITVVEMKVMKDIPSSFQHINVNVNKQVKEHKGIKARDKAKIKLHPCPRTLVYK

SEQ ID NO: 76889 - protein, 36 aa, Zea mays
  Coding DNA Sequence Number=SeqID_33514
MAMMGSTSNKMYLCQDRTDVGLLTEDPLTGHMPHHG

SEQ ID NO: 76890 - protein, 21 aa, Zea mays
  Coding DNA Sequence Number=SeqID_33515
MAAIVTGASATILRAGLFQFM

SEQ ID NO: 76891 - protein, 414 aa, Zea mays
  Coding DNA Sequence Number=SeqID_33516
  Gene Ontology: Mol. function=carboxyl- or carbamoyltransferase activity; Cellular component=ornithine carbamoyltransferase complex; Biological process=amino acid metabolic process
  Homolog annotation: Hit_ID=Q8SA97; Match level="QueryCoverage=28%, HitCoverage=23%, E-value=3e-13, Identity=44%"; Hit description =Ornithine carbamoyltransferase
MAPPVDVAGLRPRLGDVEAPPKPRSSLSSVAEVESEPLGRARRRPSAEARAESEPWGRAKRIKWHRSRSGAGGAVLLSGRSVERRSDGGHFGSAGWGARVRIKLYADGGYQLRIRNLEDVHICHGARFCHRLHTHADILSVTHADLSFAPPSSPRHRRRNHRIHPSRAPFHPTMPLPASASSSPPTPEPRAPPELRRIIPSFPSEPRRSVCEEEDDSPEPVLICLLESVGQVVDDLRAATAGLLSHANKALRIQALLSAPNPDDPLSDNTAKHWKSNEVEAVETGKLKTPSLPVLGSLVPIVGGVVLASMTEVSFNCDDSSYRGCGFMSQSQKFCGGSGRICDALCDDSPPPPTPAPPSPPSSSSRRVSKAWIAFCVLIFPFVDLDIKYFDLGLPHRDATDDKVTVEAAEATLK

SEQ ID NO: 76892 - protein, 69 aa, Zea mays
  Coding DNA Sequence Number=SeqID_33517
MSGEESQGKEMDNHKEKEVDKTQDEKPIDSHRKKDGKKKRMKKVVYYKTDSSTSPSTSNQEQGNTIVNG

SEQ ID NO: 76893 - protein, 45 aa, Zea mays
  Coding DNA Sequence Number=SeqID_33518
MRIILELKVFLREELEPPMIGSTSFVAEGATTWLLCEAIVTTVEV

SEQ ID NO: 76894 - protein, 124 aa, Zea mays
  Coding DNA Sequence Number=SeqID_33519
MAHQESRLPVVRVFPTTMMVDHTAILDGPSVSVMCSVQQGVKCIVEVTPVSGVTSDGSGDPSLQLLLLGEGTPPAGAHESNTSQILPPAEARRKSPAAPAPGADAPAPRAGGGATSPSGWTGSH

SEQ ID NO: 76895 - protein, 210 aa, Zea mays
  Coding DNA Sequence Number=SeqID_33520
MQDATWRALSHYCSVLGGVADGLDLRYYPRRPLGSTGGVVVSHVGEDNPRLSSIVNLAAVLITKLDHTFDELDSDSHAIGAATAAPIPTSTASVDASDSLHYPLMNHTFPAFQHLIDRAIMTKKKREEMDDRKRRLVDLSLGATIAPISHVIHLSNSSRVTLRDISSRPNVCISSSTARTVSQKGVSSRGRIIRHLVFLSQQPIRAVKQP

SEQ ID NO: 76896 - protein, 181 aa, Zea mays
  Coding DNA Sequence Number=SeqID_33521
MHEYATRFQARGGGMAPPRNEDPMAQLLAKIEEGNKETHRRMETIQSSMASVEATVKGMMKEQGEFRKWRPEVEAKVAEVAEALKTIQSKVDQFGPQPLEGDPSGVSKAKGTASTTAQLGVPPIDATQGQNRHRFTENHRRSGVGMETIHTPPPVGGRRAVARRAPGHQKIRVQLPFSTVL

SEQ ID NO: 76897 - protein, 130 aa, Zea mays
  Coding DNA Sequence Number=SeqID_33522
MAGRNTLAGAKERWLADEGECGAKRGINLHGKVTRVSRVITNEQLCSYCEDPFAQSLGSSMSSSPPNQVILPHGRSGLAFYIVVSRIRLPVRERHYQGVICTGIKSDWDPKISEQSVFGVIISHFRYPNR

SEQ ID NO: 76898 - protein, 247 aa, Zea mays
  Coding DNA Sequence Number=SeqID_33523
  Subcellular localization annotation: CTP_CleavageSite=47; ConfidenceScore=5.13e-01
MANGPKTDFRPRPRKRARGRARDPPVVPPRETWKFGTSPEVPGRGVSSAEPRTPSRPSRGRSAPYRAQLRLALLAAWPAVRLRWRMSCLGPVTAWRTPAAVRPTPGARVPSLVRASCACCVEKCLRAATRPTGSRARYTLPSSSSPPGVRLVGSRAPAAFASCRRRPMAGGTEDTSLALLVSDVAHAEGRRRVGVTRPRIGPPERTTSSPARRLRAEAGAGPSARTCYLVDPASSHMLVSKIKPCMC

SEQ ID NO: 76899 - protein, 196 aa, Zea mays
  Coding DNA Sequence Number=SeqID_33524
  Homolog annotation: Hit_ID=Q0WWS3; Match level="QueryCoverage=20%, HitCoverage=51%, E-value=5e-17, Identity=95%"; Hit description =Putative uncharacterized protein
MKNVAKCDTWCELQNPANHRVFERKLRPKPSGGGHVCLGVTPKDTPNTPPRGEGRGVWPPAPHGEVGRSRGCRRTAPGAAREASSATDRAQVLWKGTPGRVRAPSGPDPVAPRGAVNESGCLGMQPKSGGFELEHACRDPKDGELCLSGAKPEETLVEARSDTDDSWSPHEFYRVKPMIRGIGGATPSTYSQTLNR

SEQ ID NO: 76900 - protein, 201 aa, Zea mays
  Coding DNA Sequence Number=SeqID_33525
AVRPCAWAENKGFAMAHGPKTENSPKSWEGVSSAEPRTPSRPSRGRSAPYRAQLRLALLAAWPAVRLRWRMSCLGPVTAWRTPAAVRPTPGARVPSLVRASRACCVEKCLRAATRPTGSRARYTLPSSSSPPGVRLVGSRAPAAFASCRRQPMAGGTEDTSLALLVSDVAHAEGRRRVGVTRPRIGPPERTTASPARRLRA

SEQ ID NO: 76901 - protein, 393 aa, Zea mays
  Coding DNA Sequence Number=SeqID_33526
  Gene Ontology: Mol. function=guanyl-nucleotide exchange factor activity; Cellular component=plasma membrane; Biological process =embryonic development ending in seed dormancy
  Homolog annotation: Hit_ID=A2WX03; Match level="QueryCoverage=55%, HitCoverage=47%, E-value=1e-105, Identity=74%"; Hit description =Putative uncharacterized protein
  Pfam annotation: Domain name=PRONE; Domain location=1-281; Score =156.9; E_value=5.4e-44; Accession=PF03759.4; Description=PRONE (Plant-specific Rop nucleotide e
MDEREAQPRHLHELSDVSRVAERFQSADSQFFHRLSVECSQKERQRKVSWGGAMERQHSPSSLEIGMEILESFRDPEFWYVEQGIAAPDCDGSASFRMAFHRRDEKWWLPVPRVPPGGLHNKTRKQLQHKRDCANQILKAAMAINSNTLAEMEVPEPYLDSLPKNGRSTLGDIIYRYITSDQFSPECLLDCLDLSMEYQALEVANRVEASMYVWRRRVAAKPQRFPGLTQTSLDMSKIQYNKDVGKSILESYSRVLESLASNIVTHIDNLLNIDELNGHAEHFAATEFRNTRLERSEALKNDLEWFRQQGHTIPKPSAPGTTYTSLLEDLSEEDPQAFICHFYNVYFAHTAGGRMIGKKGFREDSKDLEFYKWEGNLSQLLQNVRNKLNQVAS

SEQ ID NO: 76902 - protein, 273 aa, Zea mays
  Coding DNA Sequence Number=SeqID_33527
  Subcellular localization annotation: CTP_CleavageSite=68; ConfidenceScore=5.32e-01
MQAACSRTKGAHPFDFNASSKEAQAHTSCGRKQQSSRQQAHVPSWDSERALSHGVKTTRPCSVPRTARARTTAAPRTTRAVALTLRQDRRHIWQSKQAMLHLHHDDRVKKGTGKGDTPKGILLPEGSGPRAPLLIRGSKAGPSEGFNSRLRALGLRAHYWSEVQRRAPRKGSTAASGHPGSAPTTDQGFVGWPPKGSDILLRALRARDDPGYVRYITKARATLPRAALANPAPAKPLTASTYQPENLGLDYAPRLRPVRMREQPDRPKHHETC

SEQ ID NO: 76903 - protein, 319 aa, Zea mays
  Coding DNA Sequence Number=SeqID_33528
  Homolog annotation: Hit_ID=Q6J9V9; Match level="QueryCoverage=31%, HitCoverage=32%, E-value=7e-11, Identity=44%"; Hit description =Putative uncharacterized protein
  Subcellular localization annotation: CTP_CleavageSite=56; ConfidenceScore=5.35e-01
MATARGINPFLKAALPQASGAKSSPTCSRVLPLRRGGWVPHVMQAGPGWKKPKPPHAERVTAPRLQALLHPRRNQRLKGRTDMQVACNRTAGAHPFDFGASSMEAQAHTSCNRRAGTGKGDISKGILLREGSGPRALLLIRGSKAGPSEGLAPQKGSTTASEYSGSVPTTDQGFEGWPLKGFDSRPRARRARDDSGYVRYMAKARATLPSLRRNRKLCLARPWASTSGGGLRLARSQGSAPASASEGGLRLARPQGSASTSASEDGLRLARPQGSASTSTSEGITSLPNPGLGLRRSLRLAQPWARTDHDTGGTSLPYP

SEQ ID NO: 76904 - protein, 434 aa, Zea mays
  Coding DNA Sequence Number=SeqID_33529
MGSARVAFVLLLEKRNLAEVGALQPSLGFKDFHQGRGRAEPEFYLPHGPAGHLFLQHSGERALTGLAEGRTLTTRGRSAASVVSSSMPGSLAQLALALLPVPPPTAGAERGCPPTVRAAVALCAPGDRPRRRTPLGRRSCSRIVLSLLRHDASARRSVPARPRGLEWGSAGAGWGVTREQTSGSLALTACHRPSCGDVGEGLPTTAFALRSSLLLFSRLRRRSLSLLLQRSPASHPEFVVPQALQCGGCSYPREWNRSSVCNGTLGAGSALPLKASLAQLRNPWLLCDEPEPEAAVSAWTEAESARKGASSTKEQVASQAEEVQQRRLEPGQVIRERDQLWSHASEAVSGADVLGGQLAEATERPAEASARAGTLEETLAAMAQARITYPSESYLSLKVMSEDPAIEAIEKRERCSGRKTFSEENFDAEGVPPF

SEQ ID NO: 76905 - protein, 167 aa, Zea mays
  Coding DNA Sequence Number=SeqID_33530
MGRGKPGCDLGPALSLEGVRHPRWGGERGEPGLYLPRGPAGHLFFQLLVVANILQLCGGDVLQPCRGRRTIAAQLGCNIPPSSSLSRQGRQRGPTGALWSSPLFGFNSWFASLEREREREPSGGRVHPGTMAAAAEVAGGSPGVRRPAGSPVWRLFIPARTEPEFRL

SEQ ID NO: 76906 - protein, 266 aa, Zea mays
  Coding DNA Sequence Number=SeqID_33531
  Homolog annotation: Hit_ID=A7PLM7; Match level="QueryCoverage=61%, HitCoverage=36%, E-value=4e-40, Identity=49%"; Hit description =Chromosome chr7 scaffold_20, whole genome shotgun sequence
MSSPSGAVSASPELGLGCLLHRESRRDADASRKQAFYPYRSPVTTTTAWTSPPLGARAYSPPLGLGSQQENNKLKSTTQRKVMSPTGRQDISPGNATPLISNNADGRYAQLSVIYPCFLASRMLGSAGFPWFYGAIAPFRNEDSLTIAYVGAGLALSIVAYDYQEIAPLVIVFCIFHACVGFILPSLARLRTMYLPNELRGGMMSFSMSLANAATFVFLIQGSAHHRHVANSTILSLASYGLLGAGGCVHMLRRWRKHTRLNARSL

SEQ ID NO: 76907 - protein, 558 aa, Zea mays
  Coding DNA Sequence Number=SeqID_33532
  Homolog annotation: Hit_ID=Q6YXT2; Match level="QueryCoverage=100%, HitCoverage=100%, E-value=1e-124, Identity=51%"; Hit description =Calmodulin-binding protein family-like
  Pfam annotation: Domain name=IQ; Domain location=123-143; Score=30.2; E_value=7.5e-06; Accession=PF00612.18; Description=IQ calmodulin -binding motif
  Pfam annotation: Domain name=IQ; Domain location=145-165; Score=15.5; E_value=0.21; Accession=PF00612.18; Description=IQ calmodulin-binding motif
  Pfam module annotation: Pfam domain module=IQ::IQ; Domain location =123-143::145-165
MGKKAWLTAVKRAFRSPSKDDSSSPARKASRLREDADGEDDKGKRERRRWLFRRSSSPSPAPAPPAPAPAAVTEEQRHAIALAVATAATAEAAVATAQAAAEVVRLTRPGGHAAAPSFARRDHHAAVAIQTAFRGYLARRALRALRGLVKLQALVRGHNVRKQANMTLRCMQALVRVQARVRDRRMRLSQESVLSMSGGGGGAGAAPCGSSKSSYSVDTSAFWDPKYAHDYADRRSVERSRDGSSFAADDWDDRPRTIEEIQAMLQTRKDAALKRERALSYAFSHQFITHRSFMVANKTKIRRNPAAPSADMDVDVDVDGQPRWAERWMASRASFDTSRSSVRGAAAAAPGRASMEQHREPVKTLEMDTARPFSYSTPRRHAGASSPMHRAQQNQHHPAVATPSPVKARPPIQVRSASPRVDHHHRGTGGGGGSYTPSLLHSQRHAAAVPNYMAATESAKARVRSQSAPRQRPATPERERDRGAKKRLSFPAQLQHQVLAAEYAQSLRSPSFKSAAGRFSSEQRSTVSSSCADSLGGGCGGDVGSPSSSAADLRRWLR

SEQ ID NO: 76908 - protein, 178 aa, Zea mays
  Coding DNA Sequence Number=SeqID_33533
MGRLEPRAEWESWLVGKMARIRCTARKSVIPFLPSRLAELPLHRTVSGQSSHLERLHRRLHEEQERRRQEQEQQDSSPSPQWEVESERPPSPAPQPVMPPAPPQGILVAGGDPDEDRDDDGPEAFSEHYSITKRDTAEAAMKDAARQSLSQYCSLFSGVADGLDLEYYPRVRPTVLEV

SEQ ID NO: 76909 - protein, 176 aa, Zea mays
  Coding DNA Sequence Number=SeqID_33534
  Subcellular localization annotation: CTP_CleavageSite=51; ConfidenceScore=5.49e-01
MGAIKVKAQSTQGTRSRLARTQPRAKAADPGGFTSRPRIPSSNGRTFDSPEAQLGQASRRSNLGQIATPTDPKSSLGRHRKLRLARPQGSDSTSTSDDGLRLARPQGSNSTSTSEDGTPPRPTPGLGLTLDLGRRSPPRPTPGPGLSLDLGGASTSPDLGLGPTTSQGGHHYPTPS

SEQ ID NO: 76910 - protein, 444 aa, Zea mays
  Coding DNA Sequence Number=SeqID_33535
  Gene Ontology: Mol. function=nucleic acid binding; Cellular component= ribonucleoprotein complex; Biological process=mRNA processing
  Homolog annotation: Hit_ID=Q53JL6; Match level="QueryCoverage=92%, HitCoverage=92%, E-value=1e-144, Identity=63%"; Hit description=RNA recognition motif. (A.k.a. RRM, RBD, or RNP domain), putative
  Pfam annotation: Domain name=RRM_1; Domain location=107-178; Score =97.5; E_value=4.3e-26; Accession=PF00076.13; Description=RNA recognition motif. (a.k.a. RRM, RBD,
  Pfam annotation: Domain name=RRM_1; Domain location=187-262; Score =39.9; E_value=9.2e-09; Accession=PF00076.13; Description=RNA recognition motif. (a.k.a. RRM, RBD,
  Pfam annotation: Domain name=RRM_1; Domain location=283-330; Score =13.7; E_value=0.008; Accession=PF00076.13; Description=RNA recognition motif. (a.k.a. RRM, RBD,
  Pfam module annotation: Pfam domain module=RRM_1::RRM_1::RRM_1; Domain location=107-178::187-262::283-330
MSDRQPSEEPEEQVDLEGDDDGMDDDDAGYRRRGSRDDSEEPEEDDDNDERHGDADDDAGMEPEPAGSKGGDDTGKGPDVAGGGPEDEEERSKWDDMLALPPHGSEVFIGGLPRDITEEDLRELCEPLGEIYEVRLTKDKDTKENKGFAFVTFMDKEAAQRAIEDVQDREFKGRTLRCSLSQAKHRLFVGNVPKGLSEEELTNTIKGKGPGVINIEMFKDQHDPNRNRGFLFVEYYNHACADYARQKLSSPNFKVDGSQLTVSWAEPKGSTDASSAAAQVKTIYVKNLPENVSKEKIKDLFDKHGEKDQSALKAVKGSEKYEIDGQVLEVSMAKPLADKKPDHSHRPGGGPNYPLPPYGGGGYMGDPYGAYGGGGPAYNQPMIYGRGPAPAGMRMVPMVLPDGRLGYVLQQPGGMPPPPPPRRGSDRRDSGRGGEGHSRRYRPY

SEQ ID NO: 76911 - protein, 593 aa, Zea mays
  Coding DNA Sequence Number=SeqID_33536
  Gene Ontology: Mol. function=oxidoreductase activity
  Homolog annotation: Hit_ID=A3BP16; Match level="QueryCoverage=95%, HitCoverage=96%, E-value=0.0, Identity=73%"; Hit description =Putative uncharacterized protein
  Pfam annotation: Domain name=ALO; Domain location=230-532; Score= -36.2; E_value=1.6e-07; Accession=PF04030.5; Description=D-arabinono -1,4-lactone oxidase
  Pfam annotation: Domain name=FAD_binding_4; Domain location=61-202; Score=69.4; E_value=1.2e-17; Accession=PF01565.14; Description=FAD binding domain
  Pfam module annotation: Pfam domain module=ALO::FAD_binding_4; Domain location=230-532::61-202
  Subcellular localization annotation: CTP_CleavageSite=77; ConfidenceScore=5.38e-01
MAVMQGQAGATRVAVSLVLLLLASLTGGSPPPEPVSCARGTSDCTVTSTYGSFPDRAVCRAANATFPRTEKELVAAVAAAAASRRKVKVATSHSHSFPKLACPGGRDGTIISTERLNRTVRVDAARRLLTVESGMLLRDLVRAAADAGLALPHSPYWYGLTVGGLLATGAHGSSLWGKGSAVHEYVVALRIVTPAPASQGFAVVRELVAGDPDLDAAKVSLGVLGVISQVTFELQPQFKRSVTFVTRDDKDMAEKLSVWGGLHEFGDVSWLPRQGKAIYREDDRVDVSTPGNGLNNYIGFRAQPTLGLLTARKAEERLEENGTDVARCLAARLPAATFELQAYGFTNDGFFFTGYPVVGFQHRIQASGTCINGADDGLLSACTWDSRVRGPFFYQSGFSVAMPKVPAFVADMQRLRDLNPRAFCGMDAKMGVLMRYVRASSAYLGKAEDSLDFDVTYYRSYDEGTPRKHADVFDELEQMALRKYGALPHWGKNRNFAFDGVIARYPAAARFLEVKDRYDPDGIFSSEWSDQVLGIRGSPNVVGPGCAIEGLCVCSDDLHCAPEQGYFCRPGKVYTDARVCALERRRTRLVDEL

SEQ ID NO: 76912 - protein, 293 aa, Zea mays
  Coding DNA Sequence Number=SeqID_33537
  Gene Ontology: Mol. function=microtubule motor activity; Cellular component=microtubule associated complex; Biological process =microtubule-based movement
  Homolog annotation: Hit_ID=Q2R2P7; Match level="QueryCoverage=96%, HitCoverage=50%, E-value=2e-81, Identity=54%"; Hit description =Centromeric protein E, putative, expressed
  Pfam annotation: Domain name=Kinesin; Domain location=24-258; Score =110.8; E_value=4.1e-30; Accession=PF00225.14; Description=Kinesin motor domain
MEKISVAVHFRPPNLVAANTSPASSGGGSDREWRIDDTHVSLLRRAAGPVPGASFTFDHVFDDATNNEQIYGTVVQELIGAVVGGFNGTAFAYDQTSSGKTFTMNGSDADPGIIPRAVRDVFDTVLQADEREFLIRVSYMEIYNEEINDLLTLEGQKLKIRESLDVIESSGKDQTDDGDAIRVSVLNLVDLAGSERIIKIGTEGVRLNEGKYINKSLMILGNVINKLSENGKQSTSGIFQKGKIDAVVRDVSRSHQVADSKQPLFICEKGLPRFIPSPDSIHVEAFGIGSTLF

SEQ ID NO: 76913 - protein, 37 aa, Zea mays
  Coding DNA Sequence Number=SeqID_33538
MAVPQPMHVPINKKSNTGQNRLPGPKMYDMNMDGIAA

SEQ ID NO: 76914 - protein, 82 aa, Zea mays
  Coding DNA Sequence Number=SeqID_33539
MALPGKEAGYLGEYRRSIMAPNEAGAATSALDVAGGSPDAGDGCCLGAAAELMIVETFDTILVGAAFSMLTICFRCNARAPT

SEQ ID NO: 76915 - protein, 121 aa, Zea mays
  Coding DNA Sequence Number=SeqID_33540
  Subcellular localization annotation: CTP_CleavageSite=54; ConfidenceScore=5.03e-01
MTTVPIDSPFASRPHHLGIQCSTDLGCRRAVTALVPTIASMGDPVSGRMRDKVRARLHSEITTLEVYDLLELNQVNFTYVRPLGGILGKLGQTLSKGRRGALNYNYYLTVGNSLKLIFAGF

SEQ ID NO: 76916 - protein, 155 aa, Zea mays
  Coding DNA Sequence Number=SeqID_33541
  Subcellular localization annotation: CTP_CleavageSite=55; ConfidenceScore=5.56e-01
MKPWARTRRVRVHRVAPATNGSVNRVLRRRTSVTPSTQKRILLRVRGVSGLRFPPASSDDSDDSQGIAAEVWTYIRSVEHVGLEGSDELEVSLNEENSSDSSEEGSGGDGNDKCDDGNGGDDGDDGDDGGKGGQGDGGGKGGSGSSKASGKAPLA

SEQ ID NO: 76917 - protein, 48 aa, Zea mays
  Coding DNA Sequence Number=SeqID_33542
MGAEHGVSGELQAGSLEDMVAGVTWSSILPPGWTVEWDPASAEEEHEE

SEQ ID NO: 76918 - protein, 173 aa, Zea mays
  Coding DNA Sequence Number=SeqID_33543
  Subcellular localization annotation: CTP_CleavageSite=41; ConfidenceScore=5.31e-01
MAQGHISLSGFKDFHQPVQLYPPPAVTQDASRMFIILAGVEAGLSRSSTSRAGSWVTLSCGVRGRGALAGLAGGSDFDNAGLVDGGRRQPQRVELVGLAPDAPSCRKAAVAPGRCPIRPGGSEWGSAGGLTAPVVGAEVDAAREVPVADGITATISASGLRLFVLVLAPRASA

SEQ ID NO: 76919 - protein, 77 aa, Zea mays
  Coding DNA Sequence Number=SeqID_33544
MGKNNKHKREPTPPSEDFGDSEYSEEEFSSESEGGGSRGGNGGSSRGGDGSSRSGNGGSSRGSGGGGSSKGSNKASG

SEQ ID NO: 76920 - protein, 38 aa, Zea mays
  Coding DNA Sequence Number=SeqID_33545
MQAACNRAKWARFSDSQHAQHGGPGIGKGGNPEKGPSP

SEQ ID NO: 76921 - protein, 53 aa, Zea mays
  Coding DNA Sequence Number=SeqID_33546
MSRAFDDYYIEDCGVILASEVTQRRIDNSDQFVILATVRGYYTSFIMAIGGGA

SEQ ID NO: 76922 - protein, 486 aa, Zea mays
  Coding DNA Sequence Number=SeqID_33547
  Gene Ontology: Mol. function=sugar binding; Biological process =aromatic compound metabolic process
  Homolog annotation: Hit_ID=Q7XBE1; Match level="QueryCoverage=19%, HitCoverage=11%, E-value=8e-27, Identity=63%"; Hit description =Putative uncharacterized protein Z013I05_4
MTLDVKLILDEFNRRFDEWETRWDRRFSSAAYIDQPPSVNHPSDAAARTPPTRAAAVGVVVIADNWGGCFDDGERYCAAPSVIADDWGGLFDGEVATVNTEFADHWYGPTSTDPDAPHDADANSFFINTGEGPVEPVFGDTAVGALGDVGAVPDLVAEEEVPVDTPTKCLMRVLNRGDYYGPDASSAVDAAVVLLAEAGCTLLIPPHHPSVPAPCLLEGLAAFAASLPARLHQMLLPTALHMPRLARALLSFPALHCSLEHSQRSSAWIDVQQKSPWPPPTLGFMHSDVVQLRPTPWPPFRLHGGVDWITSYGGYMHANGDNILHQELGVVNQCSYNWAVGKFLELLDSTNNITKQKPFTSLQQIEEGILVGASINNEGRKIEINVHYGLLGADGARSTVHELAGISLEGERDLLKLVLVYPPQRMFEEFSAKLSLNKDGGAGKNLYIITTVLFQLEVLLHITVFCEVSAVSNKFITFPWNPGVSK

SEQ ID NO: 76923 - protein, 38 aa, Zea mays
  Coding DNA Sequence Number=SeqID_33548
MGEEQLKGGTYKDAEPRHVGPGAKWKEYIIGVTNASNA

SEQ ID NO: 76924 - protein, 131 aa, Zea mays
  Coding DNA Sequence Number=SeqID_33549
MARLRLAVVAVALALCCCLMIHAPTTGAAAAADDASFPPGLEVAAQQQDTRVAAPPPSSSPGAQHHQLNTLYWIGVTTSSFSYVIQEAAGGAVAAEAAPVGRKRTELELVEDYPGSGANDRHSPWAQKRRN

SEQ ID NO: 76925 - protein, 227 aa, Zea mays
  Coding DNA Sequence Number=SeqID_33550
  Gene Ontology: Mol. function=structural constituent of ribosome; Cellular component=intracellular; Biological process=translation
  Homolog annotation: Hit_ID=Q10RZ3; Match level="QueryCoverage=19%, HitCoverage=27%, E-value=5e-09, Identity=73%"; Hit description=60S ribosomal protein L21, putative, expressed
  Pfam annotation: Domain name=Ribosomal_L21e; Domain location=120-213; Score=-24.9; E_value=0.032; Accession=PF01157.9; Description =Ribosomal protein L21e
  Subcellular localization annotation: CTP_CleavageSite=48; ConfidenceScore=5.72e-01
MPSSRRSSAGTISLVRTTANSAWPLSTSRSPRASSSLVCGPPLMLVQLAEMDSSWDPATESMGMSSGAGDDGGAAMDGSWDCATKSGARGRDIIMPNLKSSVTTTASAVEYTDEVDSLEEAAKAKEAGVDGIIDQGCEAGGHVIGQIIDYVDVKVNSTVHKGMPHMFYHGHTSRVRNTKCDIDVEINKQSNFYLKNNSVIAMFVVVVEVTVAGVFNRSLVPFSRLVS

SEQ ID NO: 76926 - protein, 142 aa, Zea mays
  Coding DNA Sequence Number=SeqID_33551
VAKPPVFPQIEIAGVKDSGYQQQLVHIPHALCPCVSVGWCCPWPARWLGLSCASLVMSPAKSHWWPVPAQVVRERAPWHGGQQGSNPARPAARDQRSQQSLARAQPLGRLPSELPVPGAQTTGVAPACRLCVPLLCSHEPRP

SEQ ID NO: 76927 - protein, 97 aa, Zea mays
  Coding DNA Sequence Number=SeqID_33552
  Gene Ontology: Mol. function=metal ion binding
  Homolog annotation: Hit_ID=Q2R1L5; Match level="QueryCoverage=31%, HitCoverage=11%, E-value=1e-10, Identity=96%"; Hit description=Zinc finger protein, putative, expressed
  Pfam annotation: Domain name=zf-C3HC4; Domain location=68-97; Score =1.8; E_value=0.057; Accession=PF00097.16; Description=Zinc finger, C3HC4 type (RING finger)
MAGDDHVVVDVNGLAKSKDDGGSKKLSEDANGSAPAAASLSAAVDLVQEEEEEEGDGEEEPLIQAAECRICQEEDSVKNLEKPCACSGSLKVYTLLN

SEQ ID NO: 76928 - protein, 82 aa, Zea mays
  Coding DNA Sequence Number=SeqID_33553
MDQTSLNDSLYDHTIIMRVISELKVLLGEAGSEHEPLVIENTSFVAEDASAWMLNEAISSKVEVSSPDVGTNVGDLFSNAMN

SEQ ID NO: 76929 - protein, 114 aa, Zea mays
  Coding DNA Sequence Number=SeqID_33554
MVNSIRDRTKVQDMERTTCSLISEQVKLDQREGVEVEVQRCGTTARLMRFAGTAAVWVAHAWLMAGDGCWRFEENHITDLKFAFGPKTIGLQLHAVLGCRKLLPQHQGKLSPFR

SEQ ID NO: 76930 - protein, 137 aa, Zea mays
  Coding DNA Sequence Number=SeqID_33555
MSDDLVVPVHFEVSQELCFRLLDHSLLVLLELELLVSRQGFPSRLYDVLGEISELSLELAIGGRFDKLRYVFPSGVAKKYVDAFSERQILKKNGRRCSLHRGGRYASAGVCLASIMTMGAMMENVESKGVEPEEAEV

SEQ ID NO: 76931 - protein, 145 aa, Zea mays
  Coding DNA Sequence Number=SeqID_33556
MAPKKANSKADEAAKAALLAARKGKALALTQSTHQEATEDDVLRTCEDDTLRTCGPEGQSQPPPGFAPLEGADLTEDGEVLGVLAERTATARQKEILEAKRQRVSALAKVRQMIHDEEQKAQDLEREIALMQREGHLGLQHGPPL

SEQ ID NO: 76932 - protein, 72 aa, Zea mays
  Coding DNA Sequence Number=SeqID_33557
MAVLQGIPALELPITVAGFLKLVELCKGLVVLPCLASSVEQCSALTILFGKPYTSRELPPLASSCTIFPTTC

SEQ ID NO: 76933 - protein, 317 aa, Zea mays
  Coding DNA Sequence Number=SeqID_33558
MPASPPPPSAGKVTGQTRMLLFCHEGKTSSIPPPAGGLMATIVVVARRRKEYHVVAAVEGHELQTPETKHRPGLKRLLETTHLELDGKLFVNKQQAPTWRANCRRFDPGGSLDRRVGGSSEVEVESGPEGRARRRPSSVVEAESEPWGWVRWRPSSEVKAESEPWGRARRSPSSEVEAESEPWGRVRRSPSSEVEAESEPCGRARRSPSSEVEAESEPWGRARRSPSSEVEAESEPWGRARRSLSSGVEFELEPWGRARRSFLWRPRLDLAAVSLTLSSGTAVGAAQAALFSCQVGQWSGEVTAVTSALSIEDRASG

SEQ ID NO: 76934 - protein, 66 aa, Zea mays
  Coding DNA Sequence Number=SeqID_33559
MGTVDVCGDGVPLHVVCLGLPGKVFLEGVNLGTLQDMVDGVTWPTTLPPGWTVEWDAAPAGEEQEE

SEQ ID NO: 76935 - protein, 204 aa, Zea mays
  Coding DNA Sequence Number=SeqID_33560
  Gene Ontology: Mol. function=kinase activity; Cellular component =ornithine carbamoyltransferase complex; Biological process=amino acid metabolic process
  Homolog annotation: Hit_ID=Q6QP54; Match level="QueryCoverage=68%, HitCoverage=44%, E-value=1e-17, Identity=42%"; Hit description =Putative kinase
MEHAGRHHYSFIGASQMARQSCSPYPELARGRPEVGRDGGSSEVEVESGPEGRARRRPSSVVEAESEPWGRARRRPSSKVEAESEPWGRARQSPSSEVEAESEPWGRARRSPSFEVEAESEPWGRARRSPSSGVEFEPEPWGRARRELPMAPKAGLSCCQPHSVEWHNSRSGAGGAVFLSGRSNGGAKVTAVTSALSTEERASG

SEQ ID NO: 76936 - protein, 249 aa, Zea mays
  Coding DNA Sequence Number=SeqID_33561
MQIIERKCEAQKGAGIRSNLNFYVVLWTVGKKTLDKLTDQPGNLIPIDEAEVPDLSASRDNSDLAEDDPCDPTTTSKPEAPMQSLNQLPVFNSLARARVTGPGGRGGAWAGEGAAGVDVLVLVLMSASASTPPLAESDPASNGNTVGGSPPRRNLLAPRLGHRRRGLLREPSPSRRVGRPLRSLSQLSPEDISPARGLGNPTPGSVPPVDGPARLRPTKLLFEPTLPLSVLAPLPPALAHRRAAKGSFN

SEQ ID NO: 76937 - protein, 114 aa, Zea mays
  Coding DNA Sequence Number=SeqID_33562
  Subcellular localization annotation: CTP_CleavageSite=52; ConfidenceScore=5.28e-01
MSSGDSWLRLRSGRPTRLLGLGSRRRPRRRWPRRGANRFLRGGDPPTVLPFEAGSDSAKGGVDADADINTNTSTSTPAAPSPAQAPPLPPGPVTRARARELNYIMLLKNEGPEE

SEQ ID NO: 76938 - protein, 200 aa, Zea mays
  Coding DNA Sequence Number=SeqID_33563
  Homolog annotation: Hit_ID=Q6QP51; Match level="QueryCoverage=24%, HitCoverage=22%, E-value=3e-13, Identity=71%"; Hit description =Putative growth-regulating factor 1
MQATCNRTKGAHPFDSDASSMGAQAHTSCNQHAGYYVRETAPPLALIPHLLDCGTSAATRGDPAHDPIVPTEHIDHGTSGTFGRRSRRRFTSAVMTASKKGPGKGILRKGSFFVKEAGPEPPTDQRFDGWPLGRVRQPPQSTRATSPPTDQRFEGWPLGMVRQPPQSTRAPRPPLVRGSKAGPSDGFNNRLRPLGLRAHY

SEQ ID NO: 76939 - protein, 31 aa, Zea mays
  Coding DNA Sequence Number=SeqID_33564
MVNSSRDRTKVQDMERTTCSLIGEQETAVGR

SEQ ID NO: 76940 - protein, 267 aa, Zea mays
  Coding DNA Sequence Number=SeqID_33565
  Gene Ontology: Mol. function=nucleic acid binding
  Homolog annotation: Hit_ID=Q67VD5; Match level="QueryCoverage=84%, HitCoverage=71%, E-value=1e-60, Identity=54%"; Hit description =Putative uncharacterized protein OSJNBa0052G07.38
MAAAEVTGALYAKAVHFRIWLTYRILIPYEYLIDQEQQPTSILLAKFDINTNDAPVQKACSQMMKNAIRQQRYRLKKKFFDPFPLHLVTKTSPIRSMSNEEWNDRVEYWKSQKKMETSQKNKDNRSKVKFHQTTGSHSYMVHDGNLTQMDNKRSATTECEKSMSATEVFANVLAENTKKNLFLQNVGIQNVGSRSSLRNIEARLEVEKRANSDLKSIVDAQHEQLDALLKQMQETKENGIKEQVEVKKKQAEMETKMQLVLSQIHSS

SEQ ID NO: 76941 - protein, 230 aa, Zea mays
  Coding DNA Sequence Number=SeqID_33566
  Subcellular localization annotation: CTP_CleavageSite=86; ConfidenceScore=5.59e-01
MGAIKVKAQTTQGTRSRLARAQPRAKAADSGGFTSRPRAPSSDGHTFGSPEAQSSWRSNLGQITMPTNRIAGAFNARIDSHLILTRALQSTEPNLERHRKAPPRPTSGLGLKIDAGRRTPPHPTLGLGLSLDLGRRTPPRPTTGLGLSLDLGRRTPPRPTPGLGLSLDLGRRSPPRPTLGLELSLDHGRRSPPRPTLGPRLDLDLGGASASPDLGLRPTTSQGGPSLPYP

SEQ ID NO: 76942 - protein, 192 aa, Zea mays
  Coding DNA Sequence Number=SeqID_33567
  Homolog annotation: Hit_ID=Q6QP51; Match level="QueryCoverage=25%, HitCoverage=22%, E-value=3e-13, Identity=73%"; Hit description =Putative growth-regulating factor 1
  Subcellular localization annotation: CTP_CleavageSite=33; ConfidenceScore=5.28e-01
MAQQCQLSTSITGQSAAGEGATVNMAKSGPVVMAATRGRKQRSSRLQAHVPSWDIERALTHGVKMTRPCSIPRTARACTTAAPRTTRPVALTLRQGRQHLWQAKQATLHLRHNDRVKKGTGKGDTLKGILLREGSGPRAPTNQKFEGWTLGRVRQPPQSTRAPRPPLVRGSKAGPLDGFDSCLKPLGLRTHY

SEQ ID NO: 76943 - protein, 118 aa, Zea mays
  Coding DNA Sequence Number=SeqID_33568
  Subcellular localization annotation: CTP_CleavageSite=43; ConfidenceScore=5.13e-01
MVNTRKGGSIHLPANNRRRRIVNQPQPERNPPPNPPQGGTDPVATAQMQLLQQMANTMMEMQAQMRQERQEMHQERQEIRQEMRQERQDMHQERQERQQLPPPPPPAPPRDKHREFYE

SEQ ID NO: 76944 - protein, 47 aa, Zea mays
  Coding DNA Sequence Number=SeqID_33569
MQPNKGINVRRKINGPVRYAQTVIFSFEIKISIKGRLSSEAPWAQER

SEQ ID NO: 76945 - protein, 313 aa, Zea mays
  Coding DNA Sequence Number=SeqID_33570
HLARRLRDAWAWASMLACWESEKRVHLARLHAACMAARPFRPLVWAKVGVACNCWAVGELPLKGGRPLSEGDHVFSLPYASRLSTFQAPGWGPGCTPPPAVTQDGDLQLNGGGKRAGLRPLPLPQPQGFSSPGLGRGVCRVEVGPRVGGGPLLHSVIGGKGGRRPWRWQLHRAWLSDASGFGAFGTARGAGVRHGSLKRGLLAAAPALRSVLPLFGPPEQKSSSSPLLEQPGCPSAGPMPELISRGLGPGWRPRRMVGRGPWGNRTSRLLGPDSWRSPWTTSPSEAGSDLTEGVVDAEGATAPFQREDPSLRD

SEQ ID NO: 76946 - protein, 111 aa, Zea mays
  Coding DNA Sequence Number=SeqID_33571
  Gene Ontology: Mol. function=kinase activity; Cellular component =ornithine carbamoyltransferase complex; Biological process=amino acid metabolic process
  Homolog annotation: Hit_ID=Q6QP54; Match level="QueryCoverage=87%, HitCoverage=45%, E-value=1e-14, Identity=42%"; Hit description =Putative kinase
MEHRPGPERSLETAHLELDGKMFVSTQQAPTWRANCRSVETGGVMMALPVDVAGLCPRSGDVEVPPKPRSSLSSMAEAEPEPLGRARQRSFDRGQGGVRALGSGGAEFAVF

SEQ ID NO: 76947 - protein, 92 aa, Zea mays
  Coding DNA Sequence Number=SeqID_33572
MALSDDAVGGDGSASEVSHSVDDLAIEVKELTVPLSSQDKMLRLAARERKDFKFKYESMLKELKSARASVVVSGETECDEHDELRSRPSLLD

SEQ ID NO: 76948 - protein, 273 aa, Zea mays
  Coding DNA Sequence Number=SeqID_33573
MTSHGSSDEGNAQSHTDGLAREGFPRILWELFEKHRVPRCRVRMTLEPHPLQPGWRSLDSESFGYRAEDTMEAIALHGLTTFCGFHPLELSTYPIGLFPTEKEDDPMWKDRVEHAKDIWAIYPGQTAHLTVRCMNALYRLQVMRGEAMSHLMALLEATKITLDNREELVVDLSTEMVEKDLQVEQLSNEIQELEELMGTRENTIEVLEDQLINTQQQLAEANQHLDMHHQEIQDMEANEDVDIEGGEEPASSLDTAGSGRPPSPESSVASFAH

SEQ ID NO: 76949 - protein, 164 aa, Zea mays
  Coding DNA Sequence Number=SeqID_33574
MASNNNVHIGNVAELPELFQLKCLSPALEARPHLIRNNTSIPRIESDEATNRIKYHILTRCSMDQAVSLAARSRRFELSFYPYKIRAHRLGVQCLTDPDCRRAVTALVPTITGMGDHVSGRVRGYVCWQVQSDHHHYDIKNGYNQFPDLVRVLEKSLDFYEIPN

SEQ ID NO: 76950 - protein, 238 aa, Zea mays
  Coding DNA Sequence Number=SeqID_33575
MVQCPEMDQTASAAVLTADDPLATICAAAGPTRTRGKSITLRGQKIFAAVELDVTWASRGTPPLAHRPWIMGLTASCHLHVRRVSLSIYRVTVTPYRRPIVDENEEEIEVTEEKTPPPSDYQAGNCFYFDICGSEPDSPTNEGKPRIHFSKHFCKIESLNIEKPYLDSLNQHTLESLFFSRVRKRQIFVAFAPRWFPRKKNKSEAAGGLGPPYRTFMKELLGRSFYLPWYCNNITLHS

SEQ ID NO: 76951 - protein, 122 aa, Zea mays
  Coding DNA Sequence Number=SeqID_33576
MVRQSEVLLISMEWVIAQVDKKSLNTSFPLMSLSRSGEVMELPLDAQSSGRRLDVDERVEQCRAVAGVLHVLARFVQVLQMQHLRGIHAYREEAPRTELLGSRRRLGEGERWAAAVSSLVAN

SEQ ID NO: 76952 - protein, 137 aa, Zea mays
  Coding DNA Sequence Number=SeqID_33577
  Subcellular localization annotation: CTP_CleavageSite=35; ConfidenceScore=5.21e-01
MADVADSVVGTRGPISSGHKKGVARSLPSPPLRPRANIRNQADLHYRRVNREGRDPPPGIAVAGGGLRSRSRLVEYRLRLGKPSVSSNWVVRLRCDANRSPLMSLHRESAPRRVPVYWVFILGKLPPTNPALCFASH

SEQ ID NO: 76953 - protein, 322 aa, Zea mays
  Coding DNA Sequence Number=SeqID_33578
MALMVAGFVEKQPWPNRLSNRPYRRRIQCEDRLTPYPDTRASVVKVEPQAQQEAPPRPTLGLGLGRRSPPRPTPGLSLNLGLGRWSPPRPTSGLGLNLGLGRNRYGEQDWRPIWLAPVTSNDGSPRLRRSSDGHVIAYAGLKHFSDSHVGIGTLVWRTGLSGMPPDSVRCTRELDAELFTFGKMGGRSAIIHRTVRCASGATATSHAMVDCNVFNARLCAQRTEHARKAHRTVYRTCPVHHRTAQRPHQSELQRSEPNDRLTWLAHRTLSGGTPDCPVRHATDSLPTATFGGWGYKYPNHPTFNCIQVFQLPTPYKSYSIQF

SEQ ID NO: 76954 - protein, 324 aa, Zea mays
  Coding DNA Sequence Number=SeqID_33579
  Gene Ontology: Mol. function=carboxyl- or carbamoyltransferase activity; Cellular component=ornithine carbamoyltransferase complex; Biological process=amino acid metabolic process
  Homolog annotation: Hit_ID=Q8SA97; Match level="QueryCoverage=23%, HitCoverage=21%, E-value=5e-14, Identity=50%"; Hit description =Ornithine carbamoyltransferase
MALPVDVAGLCPRSGDVEVPPKPRSSLSSMAEAEPEPLGRARRRSFGRGQGGVRALGSGGAEFAVFRGLARVRALGRVERIEVAQAALSFCQTGQWSGEVTAVTSALPGGARQDKGLLLSEGKASGEPEMCPPLKGGLGRDGNPSGPLQLYADGGYQLRIRRLEGVKGSHTANKKIKFWIQQRSKGVNRRHLWSGAPDCPVCHRTVSGAPPDMSGVPEDSNANSPPSGISRGTRAIIHRTVRCTPDSVRCAKEERPQELASFGNLQRLVHYNSPDMSGVPILAHRTMNSACPVRHRTSRRAQKSELQRSESNGSDDVAGAPDMS

SEQ ID NO: 76955 - protein, 752 aa, Zea mays
  Coding DNA Sequence Number=SeqID_33580
  Gene Ontology: Mol. function=iron ion binding; Cellular component =integral to membrane; Biological process=transport
  Homolog annotation: Hit_ID=Q6H7J6; Match level="QueryCoverage=92%, HitCoverage=91%, E-value=0.0, Identity=83%"; Hit description =Oligopeptide transporter OPT-like
  Pfam annotation: Domain name=OPT; Domain location=67-724; Score =586.4; E_value=2.7e-173; Accession=PF03169.6; Description=OPT oligopeptide transporter protein
MAPHTTAGGGGGAEDEVSEAAAASPALRHRHAGKGEGLGGNGGAGADGQASVERVFADKAVPSWREQLTLRAFVVSALLAVMFSVIVMKLNLTTGIIPSLNVSAGLLGFFFVRMWTAAAERMGFLRQPFTRQENTVIQTCVVSAYGIAFSGGFGSYLFGMSDKIAKQATEAKDANNIKDPHLGWMIGFLFLVSFIGLFALVPLRKIMIVDYKLTYPSGTATAYLINGFHTPEGAKLAKKQVKTLGKYFVFSFFWGFFQWFYTAGDECGFKNFPTLGLEAYNNSWAVGVGEKSVEGHFRLANRQFRGIVSNAKHGLLSFRFFFDFSPTYVGVGMICPYIVNVSVLLGGILSWGLMWPLIAKKKGSWYPANLEDSSLHGLQAYRVFISIALILGDGLYNFIKVLIRTIAGFISMVQQNSKSMLPVSDNGSSMSSMEAVSFDDERRIENFLKDQIPKSVAYGGYVAVAAISIGTLPQIFPQLKWYYILVAYVVAPVLAFCNAYGSGLTDWSLASTYGKLAIFVFGAWAGLSHGGVLVGLAACGVMMSIVSTASDLMQDFKTGYLTLASPRSMFISQVIGTGMGCVIGPCIFWLFYKAFGDIGESGTEYPAPYAIVYRNMAILGVDGFGSLPKNCLTLCYIFFAAAITINLVRDLTPYKVSRFIPLPMAMAIPFYIGSYFAIDMFLGSAILFVWERLNKAKADAFGPAVASGLICGDGIWTLPQSILALAKVQPPICMKFLSRSTNAKVDSFLGLS

SEQ ID NO: 76956 - protein, 150 aa, Zea mays
  Coding DNA Sequence Number=SeqID_33581
MTSHGFSDEGNAQSHTDGLAREGFPRILWEVLQGAGYTTPPQAEDTMEAIALHGLTTFCGFHPLELSTYPIGLFPAEKEDDPMRKDRVEHAKDIWAIYLGQTAHLTVRSMNALYRLQVMRGEAMSHLMALLEATKITLDNREELVGDLST

SEQ ID NO: 76957 - protein, 122 aa, Zea mays
  Coding DNA Sequence Number=SeqID_33582
MAVAPWVRYLSQEYDPMLTWAASTYRSPSCPYFRAQEARSLGIGRGKERGCSASRQRGRGAEGPSGLARGLVLARMQLDHGRAGRLGQPGSRGGARCRGAWAGRLGRGEAPRGAMAPWAAGG

SEQ ID NO: 76958 - protein, 147 aa, Zea mays
  Coding DNA Sequence Number=SeqID_33583
MGDKGLGWEVLGAVEQGRSAERSRWMPGCARWKLEGRNYGEERDPAGRREKQGRRDMASAPGNSGREQSKGMREGAESFGELEERRVPEQEDEAARAWAQRSKRAARIRKEERSAEEKGWRQDFYCRLKRRLEKSQGAARRFSPPFG

SEQ ID NO: 76959 - protein, 95 aa, Zea mays
  Coding DNA Sequence Number=SeqID_33584
MAPCSYLDITTSSKSLSVLVLLSVEHVLNAKLIEFNTRDQTTDQAKDGGNKNFDVSSAWEKVKETEVPKARGEENTCKVKVDQVEKSYGASRITT

SEQ ID NO: 76960 - protein, 219 aa, Zea mays
  Coding DNA Sequence Number=SeqID_33585
MADMSYKRAPTSGGRLLQVRPRRAVNESRALGAGDAASTDEIEDGFGFVDAGCEGMAGCADGDKESRGRADVGPTWGEPTTASGTGGSRGVEQLQRSSRTRPVRWLLLSCPRSVTSLAAVAMFAKFSSSGGELADVVIRQLEELAKSEVAAMAASYAELLERGDGEQLPPWASPDLDNGAVADFGALDADVDAARHDAATIAFAAVPSHEVCCTHYSIY

SEQ ID NO: 76961 - protein, 53 aa, Zea mays
  Coding DNA Sequence Number=SeqID_33586
MDPKGKGIVINDKEKEKETLYVDEPKEISILSFGVDDSLGAPEVYPMGVAPEL

SEQ ID NO: 76962 - protein, 93 aa, Zea mays
  Coding DNA Sequence Number=SeqID_33587
MSSDDSDNSQGLVAEVWTYIWVIERAGLEGSDEWEVSLDEENSSDSSEEGGGSDGDDEGDDNGRGDGDGDGDGGKGDGKGDDKGGSGSSKASG

SEQ ID NO: 76963 - protein, 325 aa, Zea mays
  Coding DNA Sequence Number=SeqID_33588
MKGRLTVGRLHAPCTAVRLRDRWLPQKRRDSCTLLNRGAAARSFLGMFIIHAREEGEPSGSFAFRVGWRSASSSSIRGRRAFAGFVEEANSGRCLLPLGWSMAACPPHGQQLHLARVGHIHGFSRATGRTGRSYKTSYAAGVAAVFLDGLDLTPVVRTGAKTSSCALVQRWSLPLVGLMWSPPLVRLPTVEVVASAGESISATCHRTFGSLVLMASLSPPVGGRGRGPIRSSTHPEVTAAAGEPLGAEVVVAAGVEVDAVVSEAVRNQLPALTVRDQAKRPHGFRTPQETSARSSDPDLQGGGACRPTVRDQAERLHGLRTTPGD

SEQ ID NO: 76964 - protein, 170 aa, Zea mays
  Coding DNA Sequence Number=SeqID_33589
  Homolog annotation: Hit_ID=Q8S474; Match level="QueryCoverage=57%, HitCoverage=10%, E-value=2e-07, Identity=42%"; Hit description =Putative pol protein
MVRERRTQTNTMSKNTRDTRFIPRFGHTTKVPYFLGEAPTKSRVSFNPNPPFADHKGAKGSQKANKKTKKRVQQKEQGTTEVCPGLAHRTVSGAPPDNVRCTRGLRAKLHTFGNSQRRFAIIHRTVTAAPEESDSELASFGNPLRYNSPDMSGEPAEQRLLHANGRLQAH

SEQ ID NO: 76965 - protein, 129 aa, Zea mays
  Coding DNA Sequence Number=SeqID_33590
MARTRVSTGPLLIPGSSSFRDPAGVRTYPGAPDLLGCVVSPCHVAPFGLPMRWGQAPSPVWLGDVAWVRRLHAVEEGTPDLGYDLRDILLVAFVQSSLNPSGDNASAGEALENKYPTLAPTSGELTSTL

SEQ ID NO: 76966 - protein, 62 aa, Zea mays
  Coding DNA Sequence Number=SeqID_33591
  Gene Ontology: Mol. function=adenylosuccinate lyase activity; Biological process=purine ribonucleotide biosynthetic process
  Homolog annotation: Hit_ID=Q10MD1; Match level="QueryCoverage=69%, HitCoverage=7%, E-value=7e-14, Identity=88%"; Hit description =Adenylosuccinate lyase, putative, expressed
  Pfam annotation: Domain name=ASL_C; Domain location=6-62; Score= -15.5; E_value=3.2e-06; Accession=PF08328.2; Description =Adenylosuccinate lyase C-terminal
MKLPISRLQLDLTDSTVLRNLGMGLGHSLLAYKATMRGISKVQGARSAPPDLAISMFVASCI

SEQ ID NO: 76967 - protein, 868 aa, Zea mays
  Coding DNA Sequence Number=SeqID_33592
  Gene Ontology: Mol. function=helicase activity; Cellular component =nucleus; Biological process=protein amino acid phosphorylation
  Homolog annotation: Hit_ID=Q2R0Z1; Match level="QueryCoverage=99%, HitCoverage=44%, E-value=0.0, Identity=50%"; Hit description=AT hook motif-containing protein, putative
  Pfam annotation: Domain name=DUF889; Domain location=286-542; Score =322.8; E_value=6.3e-94; Accession=PF05970.5; Description=Eukaryotic protein of unknown function (DUF889)
ATSFVDIRTFQNTVYETFREACEARGLLEGDNEWNLLFDEAIVSASAFQLRQMFVTIVVHCPVCNVRALFDKYWIYFPDDIQRGLREALGNPHYTAPHEQLLTLLLRKLADTVWQPADKRRTEPEPLLLREHAAAAISQLNADQRLIFEKLTKSALSCLPGVFFVCGHGGTGKTFLWNAILMHLRSQQKIVLAVASSGVASLLLPKGRTAHSRFKIPFDLDEGGVCGVKRGTMLSELIQRTFLIIWDEAPMTHRHCFEALDRTMRDILSEHRAENANIPFGGKPIVLGGDFRQILPVVRRGSRSAIVNASITSSPLWQHATVLKPRTNMRLSNPSLHGKERADLEQFSKWVLDIGDGALPAMTRGDESEPTWITIPEDLLIHTDGDATAALVSEVYPELLEKYMNPTYLATRAIVCPNNLTTDKINDYIVSMLPGHGVQCLSCDTISKASERIPDFDMLYPTEFLNSINAANFPCHKLVLKRGVTVMLLRNLNQTAGLCNGTRMLVTEVGQRVLKCVVLTPSGVDEEVFIPRIALNTTDVKCPFTLQRRQFPIRICYAMTINKSQGQTLSTVGLYLDRPVFTHGQLYVAVSRVTSRSGLRILIENPDGSCGSQTRNVVYREMGDILIPSLMVGDCSRTLCLRVSRLWEFLDPQDDSRLLHTDLVLLDEEGNNIHAQIYPPLCQQFSALLDEGGIYNLNANVLAISMVDVLGVVSVISRVSSLRTRGRQAEVMKRTITISNARDTGPTVDVVLWGERATAFPAEQVHRDSESSPQIIIFVGTLMRSYAGSSCKWYINAPVPEGKVVAESTVIAVPEHKKLKDIKYLHPFENKKKEWLVIVKVLKIDSSWWIAYPKVSSYTFLPFLLGSC

SEQ ID NO: 76968 - protein, 59 aa, Zea mays
  Coding DNA Sequence Number=SeqID_33593
MDMSRMETLYHADKEKTKALILELAGRVASSSNQQIRKLQWRRKEYFNEAPDTQLTATI

SEQ ID NO: 76969 - protein, 51 aa, Zea mays
  Coding DNA Sequence Number=SeqID_33594
  Subcellular localization annotation: CTP_CleavageSite=33; ConfidenceScore=5.27e-01
MGGGLLAAAPALRSVLPLFGPPEQKSSSSLLLEQSRVFSSFSSTKTRLLVV

SEQ ID NO: 76970 - protein, 288 aa, Zea mays
  Coding DNA Sequence Number=SeqID_33595
  Homolog annotation: Hit_ID=A2XNG1; Match level="QueryCoverage=50%, HitCoverage=33%, E-value=3e-59, Identity=76%"; Hit description =Putative uncharacterized protein
MRSFITVVQENYPNRLGVLFVIRLPPVVRVIAQTFLQVLKPATKQKLRFEGDSYKKALAEFLQAVPAFLGGKCSCPRCESPRDDSVIQAGEGSKKQPRLVSVDDGLPVTDLDFDLDEEIPSPYSCENAIRAAIIGLLMGAVFLGRLLVCCRQTAIERFLPVCSWRSSNRSCSSAGKASHVGVMILLVETSELSFEPAIEGRFDRSICVLPSGVAKKYVDAFLEAPITQENQRRCSLVRRGRSAAKGRTVRDLARGGGALWSGGDGAAEDHRRRLDLAPGRDPVGEERS

SEQ ID NO: 76971 - protein, 115 aa, Zea mays
  Coding DNA Sequence Number=SeqID_33596
MAAAHRRTGGNVGCPVRLCDGHHRSSVCGVVPCAQGQRQQEGGGARGRVGAGEQVLEVDDNSVDRAVITRILRGSRIRVTAVELATRALELLALGLLPDVSMIIRRLLDAWDDWS

SEQ ID NO: 76972 - protein, 53 aa, Zea mays
  Coding DNA Sequence Number=SeqID_33597
MFGLQVAMRMMVLGFDSGNGRDIGELEARRAIGAERVLGPSSPTRRATEIGRS

SEQ ID NO: 76973 - protein, 436 aa, Zea mays
  Coding DNA Sequence Number=SeqID_33598
  Homolog annotation: Hit_ID=A2YWA2; Match level="QueryCoverage=22%, HitCoverage=10%, E-value=3e-09, Identity=40%"; Hit description =Putative uncharacterized protein
MHDCPLSPSVSAVPKDNPVSVRLEARDDCWGGEGWMDGIKVKGEQGPEPKTAPPCQRLNGFGRRHKAVRFGRASQHRPNVFRFATLGASRGCRGVSSHDELDVVYVAVTNLFFVSGVYNHANLSQSDVCPTGRHDDEEEKAEVGRAAKENVLVGVKQVAEMNKPVVGSETSDANHDLKSSNGKSKHMPSEATLFPYELFVKLYSKVELHPFGLHNLGNRHSAMVRVVSLSHQVADDDDASAADEPLVDVADLTTPPEPYTSVPSDEPVASGFLYDWDGARADVAACFTGSAHLCDYVSMQVWVEPSATKDMMDKVEQVRQRRKAEKSLLTLQRRLATTSAEELENSGCQKTYASPGKSGEASFANASMMDMQQLKLADNRVLQEQLLQKEAKIEKMKYEHQTREAALTENELLEEEYKKKLDEANKELSLENDLAG

SEQ ID NO: 76974 - protein, 828 aa, Zea mays
  Coding DNA Sequence Number=SeqID_33599
  Gene Ontology: Mol. function=aminomethyltransferase activity; Cellular component=cytoplasm; Biological process=glycine catabolic process
  Homolog annotation: Hit_ID=Q5VNV1; Match level="QueryCoverage=43%, HitCoverage=89%, E-value=1e-148, Identity=74%"; Hit description =Glycine cleavage T protein-like
  Pfam annotation: Domain name=GCV_T; Domain location=372-621; Score= -49.3; E_value=0.0066; Accession=PF01571.12; Description=Glycine cleavage T-protein (aminomethyl transferase)
  Pfam annotation: Domain name=GCV_T_C; Domain location=629-724; Score =45.6; E_value=1.7e-10; Accession=PF08669.2; Description=Glycine cleavage T-protein C-terminal
  Pfam module annotation: Pfam domain module=GCV_T::GCV_T_C; Domain location=372-621::629-724
MDRGQNGRDDVFGRRDPFSGFGFGPHRSLFSGLLGGRDPFDDPFFTHPFGGRMMGDHDMFVPSPFGPMGGPFGDMRNGGFIEQAPPRGNRRRPVITEVEEDGGENAEHGNQQPNQDPYVQEPDDGIDETEGGQVELHRDLSRANSGGQPQARTFTYQSSSVTFGGINGAYYTTSKSRRTGSDGITVEESKEADTTTKEATHRISRGIHDKGHSLTRKLNSDGKVDTTQTLHNLNEAGFEQSWKGNAGHYLPDWNHNAGAPNSDNSGDRSSNGRDRRSASGWALPGTEQGRDPRRNGKPKSRLVCTTMQGLGSRSFQGNDLRSRPVSDTHPCRRRRSRAAYSSSRCRAARAPSTRPRPRAAARGCWPAAWRPRAVVRFAGPEAARFLHSLLTNDLLSAFSAAGASSPQRYAPTPNAPARGPAAPAYAALLTPQGRFLYDLFLYRPPPRSQMLDRTGSAPETGEAPEGHPHPQEVLADVDAAEVDDLVACFKRYRLRSKVEIDNVSENFACWQRFGHDVVHTEPSTQEPEAQSIGWGQGVDHAGESAAQGNGHGWQWLKDPRLDYLGYRGIFPADTIPPLVESDKEADERHYQLWRIENGVAEGSTEIPKGEAIPLEYNLAGLNAISFEKGCYIGQELIARTHHRGVIRKRLMPMKFVDGNGQELEQAVAPGSEVVDEASGKKVGAVSTALGSRGMGLLRLEEALKPGSVLRAGGNRDVRVQAIKPDWWPAEWTQKTRKAGGPVSLPLCLLLCSAAASRSERDEQTLWSFVTDHGLDHTRLGSRHTVFRKSSVPASSAIRDGNGDPIPDSPRGIPLLGDGDGGVSSPTGM

SEQ ID NO: 76975 - protein, 104 aa, Zea mays
  Coding DNA Sequence Number=SeqID_33600
MGIPTHICRASLSQRWQCEQVPLKNTLAGALTISGGSGGHGRTGAAGRHVDGAVAANEAGEGNTRVRGEAGASGLGCGVGVRLLRGGKVCGSPVHLAEIGDLQQ

SEQ ID NO: 76976 - protein, 107 aa, Zea mays
  Coding DNA Sequence Number=SeqID_33601
MGLGVWASLDQSLFAPCRGIRRTLETSIAGTAWGNHWKAKAVIPKRISLFVTNADSSFTGRKGIPTLGGNENDGFGIDSGDGCQHCNPCSGEDEAVKGDPQEFQDYD

SEQ ID NO: 76977 - protein, 29 aa, Zea mays
  Coding DNA Sequence Number=SeqID_33602
RARGKAAGRGRAGEGCREGSPGQGKGARG

SEQ ID NO: 76978 - protein, 318 aa, Zea mays
  Coding DNA Sequence Number=SeqID_33603
  Gene Ontology: Mol. function=nucleic acid binding
  Homolog annotation: Hit_ID=Q60EK4; Match level="QueryCoverage=80%, HitCoverage=52%, E-value=5e-14, Identity=26%"; Hit description =Putative uncharacterized protein OSJNBa0032D15.11
MARRRSQKNKKTPPTNATQKEVTLEILFDDCSNYDSWSTSVINAFRTIHPQLEQIIDKSIFPSSFNGKINSEEDQRCYRLNYLAFDILNNSLSKEDYRAFISNYDESIPDAHDIWTRIKIKFDESKHNSSFNASTSFSFCDTNPCKEEGENERWRPNDESTSPKANENDSGSTNEDEEEERSFVHLYARLSQEDKAVMLKLLERAREQSEARQRLEDILSIKMQHFDELTKEHEELKCSHVDLVQSKSSFELESAGTNDDSYQKLKEENERLKKSLTQLKGKCIAQPSQDNRDHMVKKLETGTTVGMHYIPLKKMSRI

SEQ ID NO: 76979 - protein, 175 aa, Zea mays
  Coding DNA Sequence Number=SeqID_33604
  Subcellular localization annotation: CTP_CleavageSite=91; ConfidenceScore=5.20e-01
MAPCDVVGPSPRSGEAEAPSRSRSSLGLGVGRGGDRLPESRLSPSPRVGRGGDRRPRSRLSPSPGGRARRSPSSGVEVESEPWGRARRSPSSEVEAESEPWGRARRSPSSGVEVESEPWGRARQSFLWRLRLDLAAVSLTLSSGTAVGAGQATLFSCQVGQWSGEVTAVTFGPVD

SEQ ID NO: 76980 - protein, 425 aa, Zea mays
  Coding DNA Sequence Number=SeqID_33605
  Homolog annotation: Hit_ID=Q6QP51; Match level="QueryCoverage=44%, HitCoverage=95%, E-value=8e-19, Identity=35%"; Hit description =Putative growth-regulating factor 1
  Subcellular localization annotation: CTP_CleavageSite=28; ConfidenceScore=5.07e-01
MQAACNRTKGAHHFDSNAPSMGAQAHTSCNRRAGYYVRETAPPLSPVPRLLDCGTGAVTRGNPAHGATVPTEHIGHGPVSRGRMRDGRYGQKWAGSNGGGRRAEAAVKSSASSRLLLGQRENPLPRREDDAPVSHSSNGSRTRNDCPANRSSRRINSAAGQAAPLAGTGKGDTPKGILLREGSRPRALLLIRGSKAGPSEGFNSRLRALGLRAHYWSEVRRLAPRKGSTVASGHSGSAPTTGQSFEGWPLGRVRQPPQATWAPRPLLIRGSKAGPPKGSTAASEHVERGMTLGTSDTWSRLGLRSRGTLGHFRDQQERFCNGIPSEGGIEPSNPIKRDRVRQITCRKLRLARPQGSDSTLTSDDGLRLARPQGSDSASTSEDGLRLARPQGSDSTSMPDDGLRLARPQGSNSASTSDDGLRLARP

SEQ ID NO: 76981 - protein, 99 aa, Zea mays
  Coding DNA Sequence Number=SeqID_33606
  Subcellular localization annotation: CTP_CleavageSite=56; ConfidenceScore=5.07e-01
MALCSAVKLRLFMGVCAVASPCRTDARELGISSPVRVLRRSTTDLRGQGILLTESRVSVFWVGRNSSELPGWSSVLPPPLPGDELVRVMWVRDAGRRIS

SEQ ID NO: 76982 - protein, 48 aa, Zea mays
  Coding DNA Sequence Number=SeqID_33607
MAGFTNPTPLKNNLVLEIFLVSLSRGQGISSELGHMVEIVMGEMDYMM

SEQ ID NO: 76983 - protein, 476 aa, Zea mays
  Coding DNA Sequence Number=SeqID_33608
MQATCNRTKGAHPFDFDASSMEAQAHTSCNRHAGYYVRETAPPLAPVPRLLDCGTGAATRGDPAHDPTGPTEHIGHGPVSRRRRHDGRYGQKWAGSNGGGRRAKAAVKSSASSRPLLGQRENPLSRREDDAPDRRHLWQAKQATLHLRHNDRVKKGTRKGDTPKGILLREGSGPRALLLIRGSKAGPSEGFDSRLRALGLRAHHWSEVRRLAPRVGSTAASGHSGSAPTTDQGSVGWPPKGSIAASGHAEREMTLGTSDTWPRLGLRSRGSGAALANPAPAKPLTASTYQPENLEPDYAPGLWPENSVACPAPTAVPLDRVRLTAANTSLEHHRKLRLARPQGSDSTSTPDDGLRLARPQGSDLASTSKDELRLARPRARTQPRPRKTDSASPDPRARTQPRPRKTGSHTRKLAAREDELADSLSLSLSLADACNPLLQAHPTWAQDNTEDAGFPFAVLPSFVLRLAPTHLGWDTR

SEQ ID NO: 76984 - protein, 380 aa, Zea mays
  Coding DNA Sequence Number=SeqID_33609
MSRAEAERTRQLLVDTYRGLGAGTGDFEVPDREPGLRCLEWVQEELQALPTVVEGFMAYASLVTCEGAMNALSREGCRHFEVFDQADEDFERDIFKVEDPVVKESAGALYDRMWGLHGREVVRERAETARAQALRGERVDDFGALNSMLSGPEPTPRTAENAPGASASAATGEGLPAEAAEGAPDALAAAAPSAGDPAAVAAEAAAETTAEPTAEAPATSGPSQVQDFGPAHTTAATKFLAASTAEDGNECGGSASECFDCADSGSSVEWTEESSEEDLDYFAALDVAAAEASPRVADAGDAPGPSTGRRRRRAIAKRRVSGAEGARLRVSGAGRQELLSLPAAVNTGEGELRSLFAGEELRIMLFNYREMGIIPKVEPM

SEQ ID NO: 76985 - protein, 304 aa, Zea mays
  Coding DNA Sequence Number=SeqID_33610
  Subcellular localization annotation: CTP_CleavageSite=63; ConfidenceScore=5.46e-01
MQGHSVPTHINRPHRFPVSRSGLTALAYNASLTPTGRRAVTALVPTITGMGDLVSGRVRGYVHCQVLWCRLGCWIRGYLLSSSLLRHEDVLSVSKVTVYRDAMNIPSPYANSNRGKEKGGAAYRRRGRFGEGWGWLGEALAVTSRYGLTSGMAGIARSTRAGGCSRRRRVYRPNHGELVQSKGTVSFTGSRRRPPPPVLVARVAPTTSDADPHTDVTVVTSRTSPTPPPELYCRRGHIPSCDLRRGLPFRLWWVQVRSLHDGQSGSVRHCSLEDMVAGVTWPSILPPGWTVEWDPASAEEEHEE

SEQ ID NO: 76986 - protein, 47 aa, Zea mays
  Coding DNA Sequence Number=SeqID_33611
MSMIFLNKYDEQLLSGGNYIRHDQSKVFEILDKDLKWLLVVSRLFNE

SEQ ID NO: 76987 - protein, 95 aa, Zea mays
  Coding DNA Sequence Number=SeqID_33612
MDESGVKKEIGLLGLVIVSHLSPRGLGTLQSLSSNKINPPSREYYSLCLGDLAPRPLNFLEFEAQSREDEQAIVDPEVQQIEVAEQELIEGKLCP

SEQ ID NO: 76988 - protein, 258 aa, Zea mays
  Coding DNA Sequence Number=SeqID_33613
  Subcellular localization annotation: CTP_CleavageSite=40; ConfidenceScore=5.29e-01
MARHSVPTHINRPHRFPVSRSGLTALAYNASLTPTGRRAVTALVPTITGMGDLISGHMRGYVHCQAAEVVGGSCSGQITTRLTRSTCAGGSLNSGEHDCAVPVTRVLGSSFTASPGSYLKAWIERRRTGKGLATVVALGWHWRVAGRSPELRAGLGKSGEVRGRQRGRQPSTGAGLIAVAWAWSRAAVGARGFAHGRALSAPPDVSPRRTRGSLLLPWFNSGFEHQSVRILAKSLCTVASLLHILPFCCEFQVEIRSG

SEQ ID NO: 76989 - protein, 457 aa, Zea mays
  Coding DNA Sequence Number=SeqID_33614
  Gene Ontology: Mol. function=receptor activity; Cellular component =integral to membrane; Biological process=ion transport
  Homolog annotation: Hit_ID=A2Y5H5; Match level="QueryCoverage=91%, HitCoverage=90%, E-value=0.0, Identity=75%"; Hit description =Putative uncharacterized protein
  Pfam annotation: Domain name=Lung_7-TM_R; Domain location=145-434; Score=115.8; E_value=1.3e-31; Accession=PF06814.4; Description=Lung seven transmembrane receptor
MAAPARRLLLLVVTVAGALALPVAAQIKEESFKEDPRSSIMFEKFGFSESGAVRIIVSGASVSSPVARADPRQLGFFLLSDESLLHAIDEAQEGPTREKRAAATNGGGEDPDGGSTGCVLNSPYVKKLFTFKNMKGGHYNMSFPVTRPDEYTLFFANCAPEALVSMAVRTEMYNVNADGSKDYLPVGQAPLPAIYGFFAFCYAAFLAAWGYLTLSRARVSAHQIHHLMSGLLVARLLYCLSAAEDQHYIRVTGTPHGWDVAFYLFQLVKGVILFAVIALVGTGWSFLKPVLQDREKKVLMAVIPLQVTANIAAAVIGETGPFMQGWVTWNQILLFVDVVCCCAVLFPVVWSIRSLRETSKTDGKAARNLSKLTLFRQFYVVVIGYLYFTRIVVYALKAVASYKYRWVSILAEEMATLAFYLFMFYTFRPAEKSHYFSLDDDEEEAAEMVLREEEFEL

SEQ ID NO: 76990 - protein, 281 aa, Zea mays
  Coding DNA Sequence Number=SeqID_33615
  Gene Ontology: Mol. function=oxidoreductase activity; Cellular component=cytoplasm; Biological process=response to stress
  Homolog annotation: Hit_ID=Q7FS90; Match level="QueryCoverage=35%, HitCoverage=17%, E-value=2e-49, Identity=91%"; Hit description =Putative aldose reductase-related protein
  Pfam annotation: Domain name=Aldo_ket_red; Domain location=1-216; Score=43.0; E_value=1e-10; Accession=PF00248.12; Description =Aldoketo reductase family
MVGLTLICRCPQRHIALFIEPFFSWWCTELAPDRVRPALQKTLKDLQLDYLDLYLAERRGAHAPGSRGGAGVRHGRGVEGDGRPCERRARQGYRCLQLHGHQAQPPVRSANVPPEVCQMEMHPGWKNDRIFEACKKHGIHVTAYSLLGSSEKNLAHDPLIEKVANKLDKTPGQVIVRWALQRGTSVIPKSTRDKRIKESIQVFGWEIMQTPKQPLTVKELEVPRVTNPHTVKFATSPRTREWENRDEIDSEFDRVHLTPRVLQMIEGNAIAGVKGEMNALV

SEQ ID NO: 76991 - protein, 1093 aa, Zea mays
  Coding DNA Sequence Number=SeqID_33616
  Gene Ontology: Mol. function=protein binding; Cellular component =cytosol; Biological process=protein modification process
  Homolog annotation: Hit_ID=A3B4U5; Match level="QueryCoverage=92%, HitCoverage=96%, E-value=0.0, Identity=49%"; Hit description =Putative uncharacterized protein
  Pfam annotation: Domain name=SAC3_GANP; Domain location=748-948; Score=215.0; E_value=1.8e-61; Accession=PF03399.7; Description =SAC3GANP family
  Subcellular localization annotation: CTP_CleavageSite=40; ConfidenceScore=5.30e-01
MASHGAGVAAGSDAPHAEVVSMGQTNLSPYPLSSSHHSWSSATGSATVSWNNTVDKLSQDTVYYDPQRDVSDSGGNQNVESSVPHVAQSSRGMADVAHSHMSYSSSDQHVYNPVEYANYYYSYPQATNDSSVQQGANQHPGAAYQPLTSFQNSGSYIDPTSNTYYNAGGHQTVPGYGSSSYYYQNNTWNGGSTGNTFAQSYQNYSSSDTNAQQSSTSVPANSLPYQQQYNQWPYYYNQSVPSASSNPVAGNSTTDNLTGNMPSGYSYPSSQPPPPGTTSWKSNSVASVAPPMQKNNHLNFTTLQVPGVPGQQSQYGNQAEGHYNQGPGVQWSQNHYAYQTQPYPQKTNSNHPQLSNHEDQQETVYSNSPSTNLSSNHVSENFKPNLQDSVTMDTSSEGKIQVPINPQIAPGFSMVIPKNEKKHSGLDLSKKPAYVSVSMPTNDAKATQVGLDARLPFSLRNYATRNLNRCKNDAQREACRSIMNEITKKAFAEGTLLTKNWDTEPLFPLPESTVGMTGTSVSRSSKYSAIMTTDKLDWEESPSSVNNLSPFSSVSTPRKRVKSRWEPVVDENVTNKVEQIAKGLIGSNVHSTSDPKNRMGSSWDHRKFLQSSQAPSNKVNQRSAKKQKMGSNLSQIQNGNASSDSEKEHDLTKYYASATALANSPEEKKRREHRSKRFEKSKDSSFKSRNVSANKDAMTNLRARRAILSFRTRTYEGGTLAVEDMDWDALTVKGTCQEIEKRYLRLTEAPDPAKIRPEDVLEKALAMVETSQKNYLYKCDQLKSIRQDLTVQRIQNELTIKIAYFQVYETHARLAMQAGDLHEFNQCQSQLKRLYAQGIKGCYFEFSAYNLLCVMLHSNNKRDLLSSMASLSKEAKQDAAVKHALAVHASVLSGNYVLFFKLYKKAPNLNSCLMDLYVERMRFEAMKCMSRSYRPTVPVGYVAQILGFMRTDTGCATNGDDGLEECEKWLKAHGIVLSEGNSGELQIDMKASSSTLYMPEPENAVAHGDASLAVDDFLARTDGHLKRCSSDEPTSCRDVDALHFSRRNCKGGMKWSCPTKLAELRESEQLNKDVVIGFCHLRKLIQSSRVAPR

SEQ ID NO: 76992 - protein, 160 aa, Zea mays
  Coding DNA Sequence Number=SeqID_33617
  Gene Ontology: Mol. function=sequence-specific DNA binding; Cellular component=intracellular; Biological process=regulation of transcription, DNA-dependent
  Homolog annotation: Hit_ID=P25209; Match level="QueryCoverage=35%, HitCoverage=31%, E-value=4e-25, Identity=98%"; Hit description =Nuclear transcription factor Y subunit B
MKFGVVPGDGHAGVQDVVTKLAGDAAHGDRDAGCQDGVTKVACGAAHGDGDVGCQDGVTKVTCGVVHGDGDADCQDDAAKLAAEAMGSDRNPSSLIPDVMVARSGDSKLTAKSSDGSIKKDALGHVGASSSAAQGMGQQGAYNQGMGYMQPQYHNGDISN

SEQ ID NO: 76993 - protein, 1345 aa, Zea mays
  Coding DNA Sequence Number=SeqID_33618
  Gene Ontology: Mol. function=nucleic acid binding; Cellular component= chromatin; Biological process=regulation of transcription, DNA -dependent
  Homolog annotation: Hit_ID=A3B4V2; Match level="QueryCoverage=98%, HitCoverage=90%, E-value=0.0, Identity=40%"; Hit description =Putative uncharacterized protein
  Pfam annotation: Domain name=AT_hook; Domain location=466-478; Score =13.7; E_value=0.1; Accession=PF02178.10; Description=AT hook motif
  Pfam annotation: Domain name=PWWP; Domain location=242-315; Score =57.6; E_value=4.3e-14; Accession=PF00855.8; Description=PWWP domain
  Pfam module annotation: Pfam domain module=AT_hook::PWWP; Domain location=466-478::242-315
MSSGTVAASDPGGGETKLVAGDDVTISEAAGDMPAFAADLKVEEKATLTMDVAHERGDMAVSDPLYATESAGMVGTEGHGDEPVEDVDAVNGEDGGEEGTQEAGAGGLLTETERKPVLVVDVPAAAGSAAPEHAEAESNKVEENHVNAEPGRKNNESDHGVVPSDKEIQNNVPGDMEESSEEHEGDGAPVVDQPNNTSEMLPQTGEQFPDSGNSPDSNLEAASLGNVDQGARYRLPPLDKGRFQVADLVWGKVKSHPWWPGEIFDPTDASELALKHRKKGSHLVAYFGDSTFAWCDESQLKPFVTNYSQMEKQSSSDGFVGSVNNALEELSRRVLSGLSCSCLAEELADNGMSYTVDNAGLKDGVTCSAVNRPEILNCFSPENLLNYIKELALFPGQGGDLLELVIACSQLTSFYRSKGCPELASFQTSDAWVEDDLDGIDTLSTQNVMVEEPVINEVQPTQDKPKRGRGRPRKQKAGHDQVVMEKRSTSNQVNDTSYNEKKRNLKSFEDSEKSSAPTGGGSFKIGECIRRAASQLTGSSSIMKAQNEPTVYNNAAEGENGEFDVSSDDAGDELTVEKRAKRRRLHINHAADPRELLSQLCLVATEPMNGYSFSAMIIGYFNDYRNYIVSTTTEANIVDKGTSRRGRKRKEVIPSPEVETTDHMQDSYWSGLSLYNHPVHDLKRESPTTRPRRKRRSSRHAYIPLSELGEPVPKKQIQVMERSIIHVDEKMVDELKPTALVLTFGRSASIPSELDLVKMFSLYGPLKERGTKVHRETNTVKVVFKKRVDAERAFSAAGKYSTFGPSLRSYRLVSMPLSPETQSANNPENHGLEIPGLNMSEAPKDSMEVDLVQKTDKVKVTGELSSEEVETVRQTCLVEAADSTFVSEVDRLEKAGNIDAELIVHVNQIGEGAEAASVSEESSQQVGDIEQAYTQKAASVSDLPTEIETLHSDAIIKELPQKAPDNMQTDIATAPKQSHNPGDNAVFEAVTEVPSTAQDHSEDDVGDEVPEEHTVFPVLQSQTPGEKLVGQSETEQKVGPEDPKSQAENLTVEPVVQGAVEQVEIELESKTTVEVSCEQGYSIEQTVNMEAVIEASGGQLEVGRRISEDESMADANIEHSMVMVDETVEAKVVPLEESTENNAATIGVVEETAEGETKEEAPDEKGKIENNEDADKLAGETRAGEITVEAPDEKTEIKADADTPAGETKECEITVEAPDEKIANKGIVEPIIREITEDQTAAGEPDEEATTTEETVEDVKVLDDKSTADGKPVENATVATNEDSTTVENTLKDAMVAPPGTNTTNAEETALGATVKALDEDALAVEKTIEDTSVEASDVQAGRCK

SEQ ID NO: 76994 - protein, 979 aa, Zea mays
  Coding DNA Sequence Number=SeqID_33619
  Gene Ontology: Mol. function=phosphatidate phosphatase activity; Cellular component=nucleus; Biological process=regulation of fat cell differentiation
  Homolog annotation: Hit_ID=A2Y5H4; Match level="QueryCoverage=100%, HitCoverage=100%, E-value=0.0, Identity=64%"; Hit description =Putative uncharacterized protein
  Pfam annotation: Domain name=LNS2; Domain location=768-924; Score =317.3; E_value=2.8e-92; Accession=PF08235.4; Description=LNS2 (LipinNed1Smp2)
  Pfam annotation: Domain name=Lipin_N; Domain location=1-106; Score =172.3; E_value=1.2e-48; Accession=PF04571.5; Description=lipin, N -terminal conserved region
  Pfam module annotation: Pfam domain module=LNS2::Lipin_N; Domain location=768-924::1-106
MNVVGRVGSVISQGVYSVATPFHPFGGAVDIIAVEQPDGSYRTTPWYVRFGKFQGVLKGAEKVVTIRVNGVEANFHMQLDNSGQAYFMRELVPGGEDSGTGSDDETVNEPEPPARSKSDGELYIGPSDRLGSQELNVEHQEKQTRDEFESYDGYGRLEESEDLSTQADGGNSEVVLVSVDGHVLTAPISSTEEGMEDVQLCDPQFHLGPGQSSSGEFTRSGEVWDADILDGLYISQEKVKINSGHQSEVLTENGEVPVEKDGSHHISVDKDEVHVSINDDEAHAVSTNEVEVQDVSRSGNGDVVYQTMTSEGESHSILGDIDVGHQTLTREDDSPGVSGENVVGYQPLTNEHKAHDILENNDEDQPPLNNEDESCDVPVLEKDKDCNSPANKDEVCDLNNEDTEDTSASFGKNDAFQSCLDLTSQIDDGDSGNELFSPGSDSQRDAEHNLGNCSVAETDLEEGESKTAYCGQYGPLQEGVNVSLFTLEVDKTQNKESSPAGGSHDRDKEIASEIEAAASDGLQSSMATSGKDKLGSIPEHSEVEDEQNKEEHSQSQNGLGVEISLCGNMLRPGMGRESAEEVFQQNLVHEEDFKSSGSTMIKNANLIVKVDNNYFPWNKVSHVILGKAVYGSKFPLEPTDAVPVEQQETPKSREDSLRMSPSSRRWRLWLNPFRITRSLQRSNSDSSEDIFLDSESVLSPMDDQTLENNKNQSPRKQFVRTLIPTSEQVASLNLKEGQNLVTFSFSTRVLGKQQVDAHIYLWKWNAKIVISDVDGTITRSDVLGQVMPLVGRDWSHSGVARLFSAIKENGYQLLFLSARAIVQAYLTKNFLFNLKQDGKALPNGPVVISPDGLFPSLYREVIRRAPHEFKIACLEDIKALFPSDYNPFYAGFGNRDTDELSYKKMGIPKGKIFIINPKPLKSRPMGSQGEVAVNSSVDVKSYTSLHTLVNDMFPPTTLVEQEDYNNWNYWKVPLPDVDL

SEQ ID NO: 76995 - protein, 361 aa, Zea mays
  Coding DNA Sequence Number=SeqID_33620
  Homolog annotation: Hit_ID=Q6L4Z5; Match level="QueryCoverage=93%, HitCoverage=95%, E-value=5e-82, Identity=54%"; Hit description =Putative uncharacterized protein OJ1281_H05.19
MAGRREDVDGEVQRRDEEEEEEYIDMDLSSAAPGAREFEFMSAPLDRWGEPLASPADELFYKGKLLPLHLPPRIQMVEELLVDGRGRGDLLFPLHHGTTTSSSSTAPATPYESCAASPADSRYVSGELSVEAYFQEYAAARLALADAAEPGERRPTTTWSRKLRFVRQLNLGLRLKASKAYLKTIFAAAKPGQQHTDARMDDVGAPTGAQEELARGHLRAWRKNPFAQIRSNRCVASQSHAAPAAGGGRCKEREHGHRRSFSSVIVRYSSSNKTSPVPALPPPPSSSESDCAGPALRRSSSASSEVENPIQGFIAYCKKSQQLASVRKSASDAGFRFLSAAASKIAAESDGLDDLTEICRG

SEQ ID NO: 76996 - protein, 180 aa, Zea mays
  Coding DNA Sequence Number=SeqID_33621
MSIYEHQFGFGIQNQKVGRDWQNEYQAADRPPMDRGPSAASGRFKSKRPRGNDDDYTPTTDSEAQSSAGGTESMDAEDFLHVHPDYPIDIQGWTYPKRRFSMAEYCSRRTVNQYALPSDTNIQFFHTQLQFDVFWGTLVDTNFHKHQVIDWSFVTPGFRRQTECEPCTCQDQLFTYTAVT

SEQ ID NO: 76997 - protein, 167 aa, Zea mays
  Coding DNA Sequence Number=SeqID_33622
  Subcellular localization annotation: CTP_CleavageSite=44; ConfidenceScore=5.04e-01
MKAQSRGSPVTRKRRCAKSLVGAVNAPPSRNINRLGGQGALDVRSRLGPAAWKALDPVPSERTSGTDPGSFQMWFGRFTTGSQVLGVGNTRTLPWKGSGADTCPGLASRPPPPPRRKPAVTTWLVAHDMSQRKESDVGSLESRSHCIYCSRDATPTPSQRKMCPLGI

SEQ ID NO: 76998 - protein, 288 aa, Zea mays
  Coding DNA Sequence Number=SeqID_33623
  Gene Ontology: Mol. function=serine-type endopeptidase activity; Cellular component=chloroplast; Biological process=proteolysis
  Homolog annotation: Hit_ID=Q2QM57; Match level="QueryCoverage=78%, HitCoverage=79%, E-value=8e-96, Identity=74%"; Hit description =Protease Do-like 5, chloroplast, putative, expressed
  Pfam annotation: Domain name=Trypsin; Domain location=96-273; Score= -3.9; E_value=0.00016; Accession=PF00089.17; Description=Trypsin
  Subcellular localization annotation: CTP_CleavageSite=54; ConfidenceScore=5.61e-01
MALRPQLLRLLLPSPPHRNPPPPPSSPSVAPIGRRTAAAAVLLLAAGVSAPPPRAARAEPDGEDVDEARIVRLFQEASPSVVFIKDLVVAGPQGRRVGEDEDGDEEGGGAKVEGTGSGFVWDSTGHIVFLEGSGGKSYSKEARLIGCDPAYDLAVLKIDADRDQLRPALIGTSRSLRVGQSCFAIGNPYGYEHTLTTGVISGLGREIPSPNGRAIRGAIQTDTAINAGNSGGPLIDSYGHVIGVNTATFTRKGSGISSGVNFAIPIDTVVQSVPNLIVYGTSVSNRFY

SEQ ID NO: 76999 - protein, 567 aa, Zea mays
  Coding DNA Sequence Number=SeqID_33624
  Gene Ontology: Mol. function=helicase activity; Cellular component =integral to membrane; Biological process=viral genome replication
  Homolog annotation: Hit_ID=Q8LML8; Match level="QueryCoverage=32%, HitCoverage=12%, E-value=6e-84, Identity=81%"; Hit description =Putative DNA helicase homolog
  Pfam annotation: Domain name=DUF889; Domain location=1-90; Score= -21.7; E_value=5.2e-10; Accession=PF05970.5; Description=Eukaryotic protein of unknown function (DUF889)
  Pfam annotation: Domain name=Rhomboid; Domain location=377-509; Score= -17.2; E_value=0.017; Accession=PF01694.13; Description=Rhomboid family
  Pfam module annotation: Pfam domain module=DUF889::Rhomboid; Domain location=1-90::377-509
MDDPHNYYPPEFLNTLTPNGLPPHVLKLKIGCPVILLRNIDPANGLCNGTRLVVRGFQRNSIDTEIVLGQYAGKRIFLPRIPLCPSDDEIFPFQFKRKQFPIRLSFAMTVNKAQGQTIPNVGVYLPEPVFSHGQLYVALSRATARLNIKILAIPAVDGKKRSRKGVRKNPTVDCGTYTKNIVYKEGGKNIIKFEGDHNSPRPQSYYDSVFIFFYKSLHPPLLSAARSKLHMGAFKIGNITNETVFGMTALSAVGLVTGVVVYYINVPGLHCLLVDVSKTYVTYAIKFVKLHDVGYLSDWKTKKACNYFFFVPICEAVAGGEMNSCYWYFNCSRTVPTCDLLNLHALKRFGDQANKHRSKIFNNSLPCMSDHDVQHHNDEPDYMDRPKLVGYPVLNAIPYYALTVKPVGEAIHSNLKQLIMSGECKLVRSASCCDCREIMWKIMEQVKAESDQWTEMQDMLEQAAAIITLLFIIALNLAIGILPHVDNFAHIGGFATGFLLGFVLLARPQFSWMESHELPHTNQPPKYKAYKYILWVVALVLLLVGFVISLVMLFKGKNGMAAIGATT

SEQ ID NO: 77000 - protein, 574 aa, Zea mays
  Coding DNA Sequence Number=SeqID_33625
  Gene Ontology: Mol. function=helicase activity; Cellular component =ribonucleoprotein complex; Biological process=translation
  Homolog annotation: Hit_ID=A2Z8X5; Match level="QueryCoverage=14%, HitCoverage=9%, E-value=2e-23, Identity=58%"; Hit description =Putative uncharacterized protein
  Pfam annotation: Domain name=Ribosomal_L37e; Domain location=46-99; Score=70.6; E_value=5.4e-18; Accession=PF01907.10; Description =Ribosomal protein L37e
  Subcellular localization annotation: CTP_CleavageSite=28; ConfidenceScore=5.82e-01
MAPSSRPHSQLAAAPTTSTPSANLAQLRATTFPAGSLTCSCCGLQGKGTGSFSKRRNKTHTLCILCDRHSFHLQKSTCSSCGYPAARIRNSSFGKRKHGFSQFRAFFYGVTGILLIMDQIGYNAGRTPFTDISNTIITGNQNESNSLGPIVDAKECKRQRDRERYVAMTVEEKNEKNRKRREARQRNKGLSIEPLSSREDANTDQACEVVSFPDDCSTIDFTNLSTQDIADEQVNLDPDDDSDWLHRNETFQANNIVTSKDLLTPGYVHETVDNIPKHTMKRAAYFSERYKNMTSVERESRRVRLRLYNKTPRRKDANKECNRKRRALRANTLNQESIAMEDPVYTPEVVRPTTYGIEPYRSSVTTCDWVIPEFVMTPFLPTSTCTKNILSPTKRVSAGMVKQGVDHTHTKPKFISNGDDDEGVIFEEDEDDDENDGYLFVGQCAYLNLYYDTTTYITTHDETDEDIEIDGTQDESTATDLPGLYDKVYSNVPEETHMLKSVRKCGYCTAKKFEYEPPGFCCRGGKVELAPLETPPQLRKLWDSTDSDARHFRDSIRFLMAISLSLHCIVASIV

SEQ ID NO: 77001 - protein, 800 aa, Zea mays
  Coding DNA Sequence Number=SeqID_33626
  Gene Ontology: Mol. function=solute:hydrogen antiporter activity; Cellular component=integral to membrane; Biological process =regulation of pH
  Homolog annotation: Hit_ID=A3CJG8; Match level="QueryCoverage=92%, HitCoverage=97%, E-value=0.0, Identity=72%"; Hit description =Putative uncharacterized protein
  Pfam annotation: Domain name=Na_H_Exchanger; Domain location=36-423; Score=289.3; E_value=7.4e-84; Accession=PF00999.12; Description =Sodiumhydrogen exchanger family
MAAAAMCPGPMKATSQGAFQGENPLDYALPLAILQICLVVVVTRGLAYLLRPLRQPRVIAEIIGGILLGPSALGRSHRFLHAVFPAQSMTVLDTLANIGLLFFLFLVGLELDISAIRRTGKKALAIALAGISAPFALGIGTSFAFRATIVKGTPQGPFLVFMGVALSITAFPVLARILAELKLLTTDLGRMAMSAAAVNDVAAWILLALAIALSGSGSPIVSLWVLLTAAGFVVAVSLFLRPVLAWMARRSPEGEPVKEVYICATLAIVLAAGFVTDTIGIHALFGAFMVGIVVPKDGPFAGVLIEKVEDLISGLLLPLYFVSSGLKTDVATIKGAKSWGLLVLVIANACLGKIGGTVITSLLVKIPVREAVTLGFLMNTKGLVELIVLNIGRDRKVLNDEAFAILVLMALFTTFITTPIVMAIYKPARRAVPYKRRTVECAAGDADGELRVLACFHTNRHIPTLLNLVEASRGTARRRLTMYAMHLVELSERSSAISLVQRARRDGMPFFSGGKEQRAEQVVVAFEAFQQLSSVRVRAMTAISDLDTIHRDVIDSAADKRAAIVVMPYHRALGHDGSFASLGSAYHAVNKRVLREAPCSVAILVDRGLGGHAQVSAKNVSFSVAVLFFGGPDDREALAYATRMAEHPGVAVTLARLQPSRPPLLDEAESAADEAAVEAFKARVGAVKDGSVRFEEPEACTREQVLETIESLSGFNVFVVGRMPPVAPLVERPDELGPVGSYLVSPEFRTSASVLVIKRYDPATNPKSKRFDPKAGPPVATEEDVLDEEMGMGRATVVPV

SEQ ID NO: 77002 - protein, 87 aa, Zea mays
  Coding DNA Sequence Number=SeqID_33627
MCVLRNPKSLHKHKINHHLPCKHPLQLKMRIKLKTMKKKIKTMSHLKRRTMIKGEMTMIKTKKMIKKYRVQDRLTQESTKQFKEITP

SEQ ID NO: 77003 - protein, 88 aa, Zea mays
  Coding DNA Sequence Number=SeqID_33628
  Subcellular localization annotation: CTP_CleavageSite=5; ConfidenceScore=5.29e-01
MPGCRARAVARRQRAAATPPAASAAPSPSPAHCAAHRALHALARRRALMLARPPPKCTSGKCTWPTSNPRAPSSRPRPAVTPATKPPR

SEQ ID NO: 77004 - protein, 84 aa, Zea mays
  Coding DNA Sequence Number=SeqID_33629
  Subcellular localization annotation: CTP_CleavageSite=66; ConfidenceScore=5.22e-01
MAAELLSMARLPFFPCSLFSAGSRAPLLMALGWPGRQPSPAIFSMAEQQPYAAPSLPWTPRVFPVPCSSSSQQQSLRSSISPWP

SEQ ID NO: 77005 - protein, 115 aa, Zea mays
  Coding DNA Sequence Number=SeqID_33630
MVKRGRRGCRPPWLVARGMEARVVGLRKGEERWTPWLLACSLRLLYRRNGAMDMSWRRLLQGARPAPKQRGEGAMYRERRQRKEEDSVGEKEAVGGGWKNDRGGSGKCPSEHPYL

SEQ ID NO: 77006 - protein, 324 aa, Zea mays
  Coding DNA Sequence Number=SeqID_33631
  Gene Ontology: Mol. function=hydrolase activity; Cellular component =cytoplasm; Biological process=mRNA catabolic process, nonsense -mediated decay
  Homolog annotation: Hit_ID=A7PCF0; Match level="QueryCoverage=60%, HitCoverage=15%, E-value=1e-101, Identity=94%"; Hit description =Chromosome chr2 scaffold_11, whole genome shotgun sequence
  Subcellular localization annotation: CTP_CleavageSite=47; ConfidenceScore=5.76e-01
MAAISPSCACPSSSSFDAAPSSLLLSISAACQPATPSLSSLSLTPALAMNAVRPPGLQPVLATNHARSDPRLSGWEMLTKWSSSNHTNVDVKQVVLVGDHCQLGPVIMCKKAAHAELAQSLFERLVILGVKPFRLQVQYRMHPCLSEFPSNCFYEGTLQNGVTVNERQSSGIDFPWLVPNRPMFFYVQMGQEEISASGTSYLNRTEAANVEKIVTTFLRSGVVPSQIGVITPYEGQRAYIVNYMSRNGSLRQQLYKEIKVASVDSFQGREKDYIILSCVRSNEHQCKQLIHETIKALLMWNIPGWDLLFIYLYLWREALEVYNL

SEQ ID NO: 77007 - protein, 109 aa, Zea mays
  Coding DNA Sequence Number=SeqID_33632
MLLDHYQDVAAGVKCGEGVEPVHGEQQKGRAASMAPWGGERQGGEAGSGGLTSCRDGEEQRRWGGVKAAGTRASAARADGGHGRDAERGLERMRLGRAQEIEDRIREIG

SEQ ID NO: 77008 - protein, 67 aa, Zea mays
  Coding DNA Sequence Number=SeqID_33633
MAVLNLLRKVPVEYAHCYYETVLLFAVRHRIQGLRLPLWAQGGQGPTRLVHILRERNCEPCVGKVED

SEQ ID NO: 77009 - protein, 175 aa, Zea mays
  Coding DNA Sequence Number=SeqID_33634
MGQEEKKDTKKTPSSSSSSEEEEYGEGDDEDDQASTSSSKDEETVQCIRKVEDLFFNIDRKRHGDSSFDWVADGRERVAVREHVTEGALPVVVIAGGAADVAGGGLPAAVVAGEIADWWERVADAAVAGGALPAAVVTGVGEELADGAGFGGGGQFVGALPAVAVAEQFADDLPT

SEQ ID NO: 77010 - protein, 139 aa, Zea mays
  Coding DNA Sequence Number=SeqID_33635
MAKSKKGSGSSPRSGDKRKREPTPPSEDFGDSEYSEEEFSSESEGSPAPVSPPASSHDSDDSQGIAAEVWTYIRAIERSGLEGSDESDYSSDEEDSSDSYEEDSGGDGGDGGDDSGKGSDGGSKGDHGGGSKGSNKTSG

SEQ ID NO: 77011 - protein, 595 aa, Zea mays
  Coding DNA Sequence Number=SeqID_33636
  Gene Ontology: Mol. function=DNA topoisomerase (ATP-hydrolyzing) activity; Cellular component=mitochondrion; Biological process=DNA topological change
  Homolog annotation: Hit_ID=A2ZRL7; Match level="QueryCoverage=88%, HitCoverage=69%, E-value=0.0, Identity=77%"; Hit description=DNA topoisomerase 2
  Pfam annotation: Domain name=DNA_gyraseB; Domain location=259-429; Score=255.5; E_value=1.2e-73; Accession=PF00204.16; Description=DNA gyrase B
  Pfam annotation: Domain name=HATPase_c; Domain location=59-210; Score= 107.7; E_value=3.5e-29; Accession=PF02518.17; Description=Histidine kinase-, DNA gyrase B-, and HSP90-like ATPase
  Pfam annotation: Domain name=Toprim; Domain location=456-562; Score =28.8; E_value=2e-05; Accession=PF01751.13; Description=Toprim domain
  Pfam module annotation: Pfam domain module=DNA_gyraseB::HATPase _c::Toprim; Domain location=259-429::59-210::456-562
MSTRSLLGRCGVLLCGLFALLIWHLGVGSCWTIKLKGGKEVLEALDGVRTRPGMYIGSTGPRGLHHLVYEILDNAVDEAQAGHASKIDVVLHDDNSVSVTDNGRGVEIPTDMHPQTKKSCVETVLTLMHAGGKFGGSKSGYSVSGGLHGVGLSVVNALSETLEVTVWRDGKEHRQSYSRGKPTTRLTSSTLTGETSSRQGTRIRFWPDKDIFTTTIDFDFNTISSRIRELAFLNPELTIILTKEEGHTVQRNEYCYAGGLVEYVKWLNTDKKPLHDPIAFRKELDGITVDVSLQWSSDSYSDTVLGYANSIRTIDGGTHIDGLKASLTRTINNLAKKSKTIKDKDITLSGEHVREGMTCIISVKVPSPEFEGQTKTRLGNPEVRRIVEQSVQENLTEYLELHPDVLDSILSKSLNALKAALAAKRARELVRTKSVLKSSSLPGKLADCASANPEESEIFIVEGDSAGGSAKQGRDRRFQAILPLRGKILNIERRDEAAMYKNEEIQNLILALGLGVKGEDFKKEALRYHKIVILTDADVDGAHIRTLLLTFFFRYQLRIGAENRSNMKESLWRFFMGKSFQYSIGNVEKSTNKTG

SEQ ID NO: 77012 - protein, 114 aa, Zea mays
  Coding DNA Sequence Number=SeqID_33637
  Gene Ontology: Mol. function=DNA topoisomerase (ATP-hydrolyzing) activity; Cellular component=mitochondrion; Biological process=DNA topological change
  Homolog annotation: Hit_ID=A2WN97; Match level="QueryCoverage=56%, HitCoverage=19%, E-value=6e-13, Identity=68%"; Hit description =Putative uncharacterized protein
  Subcellular localization annotation: CTP_CleavageSite=66; ConfidenceScore=5.69e-01
MALLLRPIPPPPRLRALLGRLLSTGASLFPSRMLPAPRSTAAVPRLLFGPSAVAAAATRRNGVRVRAFMASTTASEAMHEKQVSAEYTAANVQEWGIYLLLLPTAECCLQRAYL

SEQ ID NO: 77013 - protein, 273 aa, Zea mays
  Coding DNA Sequence Number=SeqID_33638
  Gene Ontology: Mol. function=transferase activity, transferring glycosyl groups; Biological process=sucrose metabolic process
  Homolog annotation: Hit_ID=P31927; Match level="QueryCoverage=29%, HitCoverage=7%, E-value=1e-36, Identity=98%"; Hit description =Sucrose-phosphate synthase
  Subcellular localization annotation: CTP_CleavageSite=36; ConfidenceScore=5.10e-01
MKAARGRRWESRTSTPPSIPPTTKLAAYQTRQLRARSATVMPREGDGGIAAGQIRLLARERKEGRSGGNAGRAATSAPPPIPPPTNPVLEPAPLQARPIPYSATGFTALPSAPAIKRMDTGDPSNPSPLSSDPPIHSRSCISQREFRIFALRFSPSADASELCYEQLELEGIQRISARRKEQEQVRREATEDLAEDLSEGEKGDTIGELAPVETTKKKFQRNFSDLTVWSDDNKEKKLYIVLISWYMPEEIPKVLEISGERSLIYNFFSYPVY

SEQ ID NO: 77014 - protein, 45 aa, Zea mays
  Coding DNA Sequence Number=SeqID_33639
MVALSNYLGVLPDCLSVASQNLHSNEGDVHIYFPLRIITIVYVKQ

SEQ ID NO: 77015 - protein, 34 aa, Zea mays
  Coding DNA Sequence Number=SeqID_33640
MEVVEQEMGLRYKTSAPSLVLLIIEVGECRLADY

SEQ ID NO: 77016 - protein, 116 aa, Zea mays
  Coding DNA Sequence Number=SeqID_33641
MEEARRGRGHGERNSDQKGRGGILYRQAEPAQKREQQAGCGSFSAETPAKAQADHASAAQVAPLLICDGDKGGYIRIRSLIMQLIKANKQEAAASRSEQANSKVMFSAAKAKVELV

SEQ ID NO: 77017 - protein, 258 aa, Zea mays
  Coding DNA Sequence Number=SeqID_33642
  Homolog annotation: Hit_ID=A2Y911; Match level="QueryCoverage=55%, HitCoverage=66%, E-value=7e-15, Identity=78%"; Hit description =Putative uncharacterized protein
  Pfam annotation: Domain name=Auxin_inducible; Domain location=178 -255; Score=71.1; E_value=3.7e-18; Accession=PF02519.5; Description =Auxin responsive protein
  Pfam annotation: Domain name=Auxin_inducible; Domain location=89-177; Score=66.1; E_value=1.2e-16; Accession=PF02519.5; Description=Auxin responsive protein
  Pfam module annotation: Pfam domain module=Auxin_inducible::Auxin _inducible; Domain location=178-255::89-177
MSRALLSHVLHRPPHFAYTCAVEAVPGPTEEVPAPHARKSRMRRLHQIQKTEVKKRSEPKQASFKNKVLDQQLLADSILEFVLIRSSLPIQRCPIRFHFVFLCAAAGEGEEEEATGLPSDVPRGHFAVYVGERRRRFVVPIALLDRPEFRSLLRRAEEEFGFAGAGGGGGLVLPCEEGRGRRRRPRGCRPTCRAAAVYVGERRRRFVVPIALLDRPEFQSLLRRAEEEFGFAGGGGALVLPCEEVAFRSLTSVLACTR

SEQ ID NO: 77018 - protein, 264 aa, Zea mays
  Coding DNA Sequence Number=SeqID_33643
MKGPRSPSASVLGGTGLNVGLNATEENAVTTVQETEFSSAASVDAIQLAPQAAETNILSYVHKQFFDKLAKEVSSLLATPDDPSLTLKSAQSSAVIPQRSCRLAGVGVQYDKQDLCSRFTKRVMKALKVIGDSEGISQQAIEDYLKVFSKELPLSHVEALAAFFGWASAVYEDSDHCPLILGLNSKCSGKRRFMWLNSKFIKVGVIKRVDKSMTVDLDFLGLPSHDLTDLDASIYEKEVLESIKKQPSYKAPGPDGFILHRKVL

SEQ ID NO: 77019 - protein, 322 aa, Zea mays
  Coding DNA Sequence Number=SeqID_33644
  Gene Ontology: Mol. function=metal ion binding; Cellular component =early endosome membrane
  Homolog annotation: Hit_ID=Q10NB6; Match level="QueryCoverage=79%, HitCoverage=85%, E-value=1e-123, Identity=82%"; Hit description=DHHC zinc finger domain containing protein, expressed
  Pfam annotation: Domain name=zf-DHHC; Domain location=144-207; Score =20.5; E_value=1.9e-06; Accession=PF01529.11; Description=DHHC zinc finger domain
MSRLASGLQRLRRSSSQWEVLWSALASCGLVLFSQLAVAMVPRLFPFLSLLAMLPIAGLVFIAAIVLGRLWRRFIGVAASAPLFVLFNILLLWGVYVFVIRRETSSLLDMLINAECALLLWGFYRILSGDPGIVACDSSYLEEAGCKDFVEAIYSSEKLPMLSRVRQCTWCKANIRGYDHHCPAFGTCIGQKNHRLFMALLTGFVVAESTYTMCSTKYITRCISSGTIRSENPVSLNIVISTTLFSILQVLWQIVFLMWHIYCICFNIKTDEWLKGEIFQINWKKYPEFQMKEQPRSDSEVKFVNPYDKGMLCNIREFLKPE

SEQ ID NO: 77020 - protein, 62 aa, Zea mays
  Coding DNA Sequence Number=SeqID_33645
  Gene Ontology: Mol. function=iron-sulfur cluster binding; Cellular component=chloroplast; Biological process=iron-sulfur cluster assembly
  Homolog annotation: Hit_ID=Q10MC1; Match level="QueryCoverage=90%, HitCoverage=25%, E-value=6e-14, Identity=69%"; Hit description=NifU -like domain containing protein, expressed
MSEAVNWRLDILRPPIGNYSGSVDALAVDGEDCLARYDILESIGSDIKASIMEKFPTIFSKQ

SEQ ID NO: 77021 - protein, 241 aa, Zea mays
  Coding DNA Sequence Number=SeqID_33646
  Gene Ontology: Mol. function=protein serine/threonine kinase activity; Cellular component=integral to membrane; Biological process=protein amino acid phosphorylation
  Homolog annotation: Hit_ID=O22040; Match level="QueryCoverage=19%, HitCoverage=7%, E-value=1e-13, Identity=83%"; Hit description =Mitogen-activated protein kinase kinase kinase ANP1
MEGLGSMAGYGSAKTRCWEERRRRAAGPRRGRLAPRYPTPWSTLGGAAGAADAMGAEQDEFSMPTSRVMFKEVDAPSPSPALWNGPQEAGKKVEEEFSTYPLSVLMMSVKNNTKYYYDTDTESKDGLFSRAAAAEGVGPLTEAERRTHRFGGAHIKEPEEVKLLKNLSHPNIVRYLVTVREEDTLNILLEFVPGGPINSVAFGEARFIPRAFYFFKATLDENSSLADIEVALIPILARSCE

SEQ ID NO: 77022 - protein, 166 aa, Zea mays
  Coding DNA Sequence Number=SeqID_33647
MEHTDLSVLCRQRTEDFSIGEETGERSKQQGVSPVSAQGGGLRRPCREGVSSIRAGGVRAGSSGVRAGRGSPASAQGEGSPASGGEASRGYPVLRRPQAGGKPIASSLCLMRRSLIPSHTRALPLSRTFPRAFPARTRAARLGARLYDRLASGRRGIRVESTPSAA

SEQ ID NO: 77023 - protein, 107 aa, Zea mays
  Coding DNA Sequence Number=SeqID_33648
MEESLKLLGTFGIRRSSKTGFNSISGVQCVNRYLRTKVGIAVDRNNTKVDTEPKVNSIPVLFTLTGHSLFASRLYCHPLSIEGTSFITFVRKSLYPKGNNASEDEGL

SEQ ID NO: 77024 - protein, 100 aa, Zea mays
  Coding DNA Sequence Number=SeqID_33649
MQPKLSSVWHTGLSSGAPDNVRCAKLVSGEKAALGKSLAAYGYNSPDCLRFELYSSQGLPELSFELKSSLVCVALLRAFIVIFVVRARDSNLVQIPRKRE

SEQ ID NO: 77025 - protein, 601 aa, Zea mays
  Coding DNA Sequence Number=SeqID_33650
  Gene Ontology: Mol. function=phosphatidylinositol binding; Cellular component=clathrin coat; Biological process=clathrin cage assembly
  Homolog annotation: Hit_ID=A3AGK1; Match level="QueryCoverage=100%, HitCoverage=98%, E-value=0.0, Identity=80%"; Hit description =Putative uncharacterized protein
  Pfam annotation: Domain name=ANTH; Domain location=29-321; Score =341.4; E_value=1.6e-99; Accession=PF07651.7; Description=ANTH domain
  Pfam annotation: Domain name=ENTH; Domain location=29-150; Score= -3.4; E_value=5.5e-05; Accession=PF01417.11; Description=ENTH domain
  Pfam module annotation: Pfam domain module=ANTH::ENTH; Domain location=29-321::29-150
MSSSTIRKALGAVKDQTSIGLAKVTSNIAPELDVLIVKATSHDDEPAEERHIREILHLTSGSRAHVAAAVAGCSRRLSRTRDYVVALKSLMLVHRLLADGDPSFHRELLHATRRGTRLLNLSDFRDEAHSGSWDHSAFVRTYALYLDQRLEFFLHERKQGSNAGSSSSTNGPSPRDRDRWGSPDPYGRRSPSYSSPPGVLARMHHLQQLLDRFLACRPTGGAKHSRMVLVALYQIVRESFQLYADICEVLAVLLDRFFDMEYAECVKAFEAYASAAKQIDELCAFYAWCKDTGVARSSEYPEVQRVTDKLLETLEEFMRDRAKRPKSPSPEPEPEPVKEEPEPDMNSIKALPAPEDYKEPEPEKVEEEVKPEPPLQPQGDLVDLREDTVSADEQGNRLALALFQGPPAAGGSNGSWEAFPSNGGNEVTSAWQNPAAEPGKADWELALVETASNLSNQKPAMSGGMDPLLLNGMYDQGVVRQHVGAQVTTGSASSVALPAPGQKTQMLALPAPDGSMQTVGGDPFAASLAVPPPSYVQMADLEKKQQLLTQEQIMWQQYQRDGMQGQSSLNRLDRAPNPAMPYGMPMAYNTNPMPMAYTGNT

SEQ ID NO: 77026 - protein, 538 aa, Zea mays
  Coding DNA Sequence Number=SeqID_33651
  Homolog annotation: Hit_ID=Q6JAD6; Match level="QueryCoverage=57%, HitCoverage=49%, E-value=1e-115, Identity=62%"; Hit description =Putative uncharacterized protein
  Subcellular localization annotation: CTP_CleavageSite=17; ConfidenceScore=5.19e-01
PTGDLLSGRAPATSGAPAQASSSLFLKKAARSGVWMEQPEQLYQQQQLSRLREERDETEVRPLAVDPRLFDLQCATAARLSAQIALQAHRLLGLPAFLLAASADSEVHLSYLPRLLTLLTSSGRYVEEWVRVFYASVCIDPDHQWMRFCFEREDVILHANQIHQLFGFNESSTRLHSLCYGTSDPPRRPHGGVPPATSHVAALFRPPFSDGLRHSPADFTTAAKYLYQLMRRTLLPWMGYREAATHIQLWLLGALISHSEFDVVDFLICEIEDMVLDGLRARRQLPYAHYLCHIFAQLIWPPQFQGTLEASRLFFGSYRPAPEDPLPAPDPMTDTQGATVPDDDDDDDFGIPPSPPRSHDHEAGSSSVVPAAPPAVDPALSVILQALTQQQTLMASEQARLASEQARQAAEQAHRAEHRAFMTHILQHTGVQIPLVQSTPPPALQAAVVPAIQAGPPLPSVGPSSSPLWPVTLVFSSPVISSISAQPLVPLAPAITTAVVAVSVTSSAPVAFATQPPSESVPAPGSTADPESETDSDP

SEQ ID NO: 77027 - protein, 167 aa, Zea mays
  Coding DNA Sequence Number=SeqID_33652
  Gene Ontology: Mol. function=hydrolase activity, hydrolyzing O -glycosyl compounds; Biological process=carbohydrate metabolic process
  Homolog annotation: Hit_ID=A2ZTT0; Match level="QueryCoverage=95%, HitCoverage=21%, E-value=3e-67, Identity=75%"; Hit description =Putative uncharacterized protein
METSRTRPKAAQGAQSGKRASVWSRGTSEANKEQAMLPPRGWNSYDSFSWIVDENAYLQNAQIMTEKLLPHGYQYAVIDFLWYRKYVDGAYTDSYGFDNIDEWGRPFPDLQRFPSSRVDRGFSQIASKVHGMGLKFGIHLMKGISVQAVNADTPILDIKTEDCTSLY

SEQ ID NO: 77028 - protein, 90 aa, Zea mays
  Coding DNA Sequence Number=SeqID_33653
  Subcellular localization annotation: CTP_CleavageSite=81; ConfidenceScore=5.14e-01
MTSSGVDTQPEAQQAHYLESHSPTTQCHSTPRKCLPPALCLSYQFQLSSALFCSRSTSTEHPRGSESCSVSGWKAMGAPTSSGSGEAARV

SEQ ID NO: 77029 - protein, 146 aa, Zea mays; identical to SEQ ID NO: 71615
  Coding DNA Sequence Number=SeqID_33654

SEQ ID NO: 77030 - protein, 141 aa, Zea mays
  Coding DNA Sequence Number=SeqID_33655
MSERNWAETHWIARSTRGGGRPKSGEVDLGPPVKSGRVRGLGKLHGLLAELAEALACPEDGWGGLATVAKALAAMAGGIKLAGAKGKWLAGEAAVEHVFPLPLPLFKRRLGANLRKFGQDHCKGFVHQTKLCLLCMDDVRF

SEQ ID NO: 77031 - protein, 256 aa, Zea mays
  Coding DNA Sequence Number=SeqID_33656
MASRSHHAVQANMARILEDAIAYVGVLRATVAGLEARAAFARSARTAAPADVLVARKASCFVVRLAEAPRRADARAGGVPTARSARPHGRGDQRWRGGRGHDHHRASAAEIPGLSPSPSPGSGGAEFVVFRGLARVRALGRAERSSPSSGALPESEPWVGRSGVRRLPGPNPSPSPRSGGAKFVVFRGLARVRALGRAERSFLWRLWQGLTSCQSHSVKWHCSRSGAGGAVLLSDRSVERRSDGGHFGSAGGRTSG

SEQ ID NO: 77032 - protein, 67 aa, Zea mays
  Coding DNA Sequence Number=SeqID_33657
MKEKERVIVPSGNAREQQQLGRGDLNRNAGENGGSGSREGKDGANNARGVEERMENISVIKHDPCAN

SEQ ID NO: 77033 - protein, 411 aa, Zea mays
  Coding DNA Sequence Number=SeqID_33658
  Gene Ontology: Mol. function=nucleotide binding; Cellular component =integral to membrane; Biological process=transport
  Homolog annotation: Hit_ID=Q2QQ91; Match level="QueryCoverage=100%, HitCoverage=92%, E-value=1e-170, Identity=73%"; Hit description =Ureide permease 2, putative, expressed
  Pfam annotation: Domain name=FAE_3-kCoA_syn1; Domain location=14-359; Score=675.0; E_value=6e-200; Accession=PF07168.2; Description=Fatty acid elongase 3-ketoacyl-CoA sy
  Pfam annotation: Domain name=Voltage_CLC; Domain location=51-405; Score=-172.5; E_value=0.021; Accession=PF00654.11; Description =Voltage gated chloride channel
  Pfam module annotation: Pfam domain module=FAE_3-kCoA_syn1::Voltage _CLC; Domain location=14-359::51-405
MFVVEDKGGAIALMLASLLFLGTWPAVLTLLERRGRLPQHTYLDYSVTNLLAAVLIALTFGQLGGARRGMPNFLTQLGQPNWPSVLFAMAGGVVLSVGNLSTQYAWAYVGLSVTEVVSSSMVVVIGTTLNYFLDNRINRAEILFPGVACFLVAVILGSAVHASNAADNEEKLSASTNAYQLGCSLSEGEDKKKSLISDVAKDLENGVSGTKQADKAEAGTAEYLIQLEERRSIKVFGSNTFIGLGIVFFAGACFSLFSPAFNLATNDQWRTLRGGVPHLVVYTAFFYFSVACFAVGVGLNVLFLYRPMAGVPRSSLGAYLGDWDGRHWALLAGLLCGFGNGLQFTGGQAAGYAAADAVQALPLVSTFWGVLLFGEYRKSSRKTYLLLGFMLFMFVAAVAVLMASSGHRTTE

SEQ ID NO: 77034 - protein, 423 aa, Zea mays
  Coding DNA Sequence Number=SeqID_33659
  Gene Ontology: Mol. function=sugar:hydrogen symporter activity; Cellular component=integral to membrane; Biological process =carbohydrate transport
  Homolog annotation: Hit_ID=Q10B99; Match level="QueryCoverage=88%, HitCoverage=94%, E-value=1e-176, Identity=82%"; Hit description =GONST2 Golgi Nucleotide sugar transporter, putative
  Pfam annotation: Domain name=TPT; Domain location=236-367; Score= -37.6; E_value=0.092; Accession=PF03151.7; Description=Triose -phosphate Transporter family
  Pfam annotation: Domain name=UAA; Domain location=105-368; Score= -173.0; E_value=0.094; Accession=PF08449.2; Description=UAA transporter family
  Pfam module annotation: Pfam domain module=TPT::UAA; Domain location =236-367::105-368
MSLEFRSECDDIEEAKSPSNTSVAAVAVKNGDASVYKIIHGYLKQKNNSIIKVAANVARKAASNKLSRKTSDVFDTLLQKQQSKWGNKAGPLLSGICYCIASCSMILLNKVVLSSYNFDAGISLMLYQNLISVLILLILELFRVISTEELTWKLIKVWIPVNLVFIGMLLTGMYSLKYINVAMVTILKNMTNIITAIGEIYIFRKGQNKKVWAALFLMIVSAVCGGITDLSFHLVGYTWQILNCFLTAGYSLTLRRLMDTAKQSTKSGSLNEVSMVLLNNALSIPFALILVIAFNEWEYVYQAEVIREPMFWVVATASGLLGLAISFSSVWFLHQTGPTTYSLVGSLNKVPISVAGILLFNVPFCNMTMPRQEELCKANQQLELQYSTTLIKKLSRTIIILHNKGRICVSDMVANRALFRNSW

SEQ ID NO: 77035 - protein, 167 aa, Zea mays
  Coding DNA Sequence Number=SeqID_33660
MAAPDDGGGVGDEGTTNVAAKVATAAREPKRCWRMILNCGHVTSRSSCSSRQNQMGKEGGAAVVDMVGSTPGAGTPVLVYMVAPSVVSHAAGDEDSPEGATQLPRKQIVEVRLVGNPRTHERQRRSRGPLILRDVGVGVPVVEVAGAYNGAARPDEPLPLDIGSGWV

SEQ ID NO: 77036 - protein, 92 aa, Zea mays
  Coding DNA Sequence Number=SeqID_33661
  Subcellular localization annotation: CTP_CleavageSite=20; ConfidenceScore=5.05e-01
MTLLRANAGLGLAFVSPLVSGSAHHSWWTTFAMMRLMKWLTGGVNLTCVWLLEDNSNLESHYVRLEVDGGDLKHIGTCRVLMEATSNAMGET

SEQ ID NO: 77037 - protein, 374 aa, Zea mays
  Coding DNA Sequence Number=SeqID_33662
  Gene Ontology: Mol. function=DNA binding; Cellular component=nucleus
  Homolog annotation: Hit_ID=A5BPV8; Match level="QueryCoverage=52%, HitCoverage=81%, E-value=1e-15, Identity=31%"; Hit description =Putative uncharacterized protein
  Subcellular localization annotation: CTP_CleavageSite=28; ConfidenceScore=5.09e-01
MQSGSAGHQPRRLKLKALSKTTPRRRIPASISPAEAALPMLESDVQLGSSRAYPGVRAPGASKEAQEGHRGPVAQARDAELGGGASGRGRRGGVGTARGRGGAVGGVRAQPSPRRRLGVAGDGDPVVVILYPNNMPFLVGRAKIVCIFHFSCVINSETKKKPQISTKKHIGIDPVRCQAAVPEWINDPSEECKANYRNDNDTLQRMGTVVRLPPTLEPPKARKAVNDMCKCYHPGSEAYVEVNVKEAWKRVKYQLGEQAFKNCGFGAMGERVLKLWTAEDKKKLADFEKLIPQSKSTIEDFMEVALKQFSSERTTDLAKYCYNVFLPRRFASLNRAGSTNSIDAISDDEGNSQDDNKVHLSEENGKSSGSSLKR

SEQ ID NO: 77038 - protein, 461 aa, Zea mays
  Coding DNA Sequence Number=SeqID_33663
  Homolog annotation: Hit_ID=Q7F0P6; Match level="QueryCoverage=16%, HitCoverage=53%, E-value=2e-09, Identity=49%"; Hit description =Putative uncharacterized protein P0039H02.135
MDFHSLSRRELQALCKSNGIRANMSNAAMAEALRCLPAVDRIDEIGSTAPPPVSAMKEQTPDAEEAVGGEQEHGCPLPRGGRARGKRRKAGARKSKTEGDEEEVMVPGPQTLPGPKMTVAREAAAAPVDDAEEAAVGIRTRRSARSKVKVALDQKEEDVQAAAARKEQKVSDKSCEDSEEHAIVVGVVEEEEVRKPQEGQNVTRRAAPYKTHEDLQPDQRTAEELSMAKKRTRRSTRSKVAAAAQKGQKADSSDTTVGPEIDPKYDEVVPKVEEATKPQEGKNVTKRATAYIYKAHEEVQTGQVTAAPEATAEEVATTKRRRRRSTRSKVGAAARKAQKVNGSTVSDDPKEEQVVEVIEEGTTKHNEEEREQINNVRQFASLPKLEDSPILGIVSKPNTADASDKAPVAHQEASKEDRFTFTGEADVSNLLVNTLDRFAKPVYESRVKEEKKCSECWWMLL

SEQ ID NO: 77039 - protein, 168 aa, Zea mays
  Coding DNA Sequence Number=SeqID_33664
  Subcellular localization annotation: CTP_CleavageSite=69; ConfidenceScore=5.12e-01
MAEKRTDLKGKRLSGPRWVVHKSIVNMKGMNHLRNKSPTLAPTSGVLTSTTFGKALIFVMPPKKITAPGAAALQPLDTNQETLSLSERLEARRERPPVQRSRRRSWTKKSGTWKSSINKCKGRRRRWLGWPIFKGRSTKLLKKCAILLKMTKTEDPKIGSFIKRAYST

SEQ ID NO: 77040 - protein, 250 aa, Zea mays
  Coding DNA Sequence Number=SeqID_33665
  Homolog annotation: Hit_ID=Q6J9V9; Match level="QueryCoverage=33%, HitCoverage=29%, E-value=9e-07, Identity=45%"; Hit description =Putative uncharacterized protein
  Subcellular localization annotation: CTP_CleavageSite=33; ConfidenceScore=5.39e-01
MNKNTGTQSAITNGTPVPPPQVRTTPFHGGRPAEQQKTDEQLGTGGASGRRSGRRFAFAVITAPKKGPGKGDTPKRILPCEGTGLRAPLLIRGSKAGPPRGSTVASDRVGPTPTTGQRGSKAGPRRVHSRLRRRARDDQGYVRYITKARAALPSSPETPCSVPIEGNMALSPLLLAERRRRGVCKKAESVPDRPLTLCGGSRAALANPAPAESLTASTYQPESLGPDRAPGLRPVRMREQPDQPKHYARH

SEQ ID NO: 77041 - protein, 92 aa, Zea mays
  Coding DNA Sequence Number=SeqID_33666
  Gene Ontology: Mol. function=kinase activity
  Homolog annotation: Hit_ID=Q6QP54; Match level="QueryCoverage=72%, HitCoverage=32%, E-value=2e-10, Identity=49%"; Hit description =Putative kinase
  Subcellular localization annotation: CTP_CleavageSite=24; ConfidenceScore=5.07e-01
MAGPRPRPGDVGAPPKLGSSMSSVAEAEPEPLGRARRRSFGRGQGGVRALGSGEADPSPSPGSGGAEFAVFRALARVRALGRTERSSPSSGS

SEQ ID NO: 77042 - protein, 100 aa, Zea mays
  Coding DNA Sequence Number=SeqID_33667
MPRLKDEKTDWPMIICVMIVTSCKGHEYYHMLGAFFSAEGPLSKNTFGKAICKQAQNEVSAFRDRGVPEPMSECAACPSPDGSSAWASAKGGERGGRRRA

SEQ ID NO: 77043 - protein, 42 aa, Zea mays
  Coding DNA Sequence Number=SeqID_33668
MPLCRSFMDDSFGTAFERICRRMVVTKIDNPKHIPKAAEATL

SEQ ID NO: 77044 - protein, 513 aa, Zea mays
  Coding DNA Sequence Number=SeqID_33669
  Gene Ontology: Mol. function=phospholipase A1 activity; Biological process=lipid metabolic process
  Homolog annotation: Hit_ID=UPI00015558E9; Match level="QueryCoverage =53%, HitCoverage=26%, E-value=5e-08, Identity=27%"; Hit description =PREDICTED: similar to splicing coactivator subunit SRm300, partial
MAEGLRVFPIRGLGSRRGLSLLQHAPRSSPYGAGLGPTRHAGWPRAEEAKPPRAVHATAQRLRAFLHFCPDRRVKGRTAMQSACNRAKWAHPFDSNAPSMEAQAHTSRNRRASCVVRAAAPPLAPLPRLLDCRTSTATRGNPAYDPTVPARRIDHGPVSRGRRRDGRCGQKWADSNGGGRRAEAAVTSSAMLTPRASLLIRGSKASPSEGFNSRLRALGLRAHYWSEVRRPAPRKGSTAASGHTGSTPTTDQGGNDLVTESHQREASSPRTPSKGDQLRQITRRGSGAALANPAPAKPLTASTYQPENLGPDPDPEGFTSRPRTPYGDERTFGSPEAQSSPRSNLGQIATPTDQIIGAFNAKGSDSGSAPEDDELRFARPQGSDSGSAPEDDELRFARPQGSDLGSASEDDELRFARPQGSDSGSAPKDDELRFARPQGSDSGSAPEDDELRFARPQGSDSGSAPEDDELRFARPQGSDSGSAPKDDELRYARPQGLDSGSAPEDDELRFARP

SEQ ID NO: 77045 - protein, 124 aa, Zea mays
  Coding DNA Sequence Number=SeqID_33670
MAMNAVCCRWEDEPPGRPHSLNGGPLNARNIIIVSRQRAQGRCFLDLRHSEAFEFFADRACYEKRSSTTKGLVLGAFFSAEGPLRKNTFGKAICKQAQHEGICQSCNQGSVGMMTRLRRRAAPT

SEQ ID NO: 77046 - protein, 191 aa, Zea mays
  Coding DNA Sequence Number=SeqID_33671
MARTRKTTRKPTRPFGLPRHQLAPRHEGSSSGSNDPIGDLEAKVEQLRSELCHRNRAWVQDNQCIVELSADVGRLQYEISEWDSAIDLAVNSRSIAWDREAKARARVAELSAALDSLQVYCNTLHEEVHTLYARLHPNVPSDAAAMGAGPSGTTSEGPNGELDLFRALPSMNLADERSPAAGSEATKDDED

SEQ ID NO: 77047 - protein, 162 aa, Zea mays
  Coding DNA Sequence Number=SeqID_33672
MVAAPSLPNAGVGTAPHPLHRVGSLLLLADAAPGAPAAGRWPWLPHGSGSHDNAHAGPAAGPDPPPTANAAACLAAGVTNLPHLGTGAGLRPAVLVAMGSLPLFTVRPQPGAAGAAAPPPAPSAPVLPHGGSVPCHRRRPLLHATIFPGVALKPLGHRSGSP

SEQ ID NO: 77048 - protein, 149 aa, Zea mays
  Coding DNA Sequence Number=SeqID_33673
  Subcellular localization annotation: CTP_CleavageSite=46; ConfidenceScore=5.26e-01
MGQHPNSGAGPHTHGLTSPLSRNGGTAHDETGVEAKGRSRRAQIPRSSSVVRETGSSSLFFERGRRSSINGRQGDTTKEHQQADLLASSIVLMSRSPAREAGGSARVCAGHGGHARRRIDGVTADPAGKATTATNPAWKTAIRPKGQRI

SEQ ID NO: 77049 - protein, 343 aa, Zea mays
  Coding DNA Sequence Number=SeqID_33674
MPGSGKLWPDRDLHIIEPGLNTLGKRCLTYKINGSGDQETQDPRARRPSGSQDRQRPVHLRLGPQQIVGSARVAHASVARALTPPCILKKVPESAGAAPGTEATIDEVGGNIDGDLPSSEPCNLNTGALTLAQQMAPSLPSAGTAPGNEAAIDDGVGAGTEATIDEAEGNIDGDIPSSEPCNLNTGASTLAQQMAPSLPSVETAPGNEAAIDDGVGEFNGPLDPPRLFSPQPLLSGLLGTAAQGSPHLFCTEEHLSLPQFLDGPPELAQLAHVSPQHTPGSPETMPLVPVSPHLEVGWLERTPPMHVLPQPTSEPPETGICDVPPPDSHNLKVYSRRKAMIDA

SEQ ID NO: 77050 - protein, 260 aa, Zea mays
  Coding DNA Sequence Number=SeqID_33675
MAAPSSPAGDLHPNDTGALGVNALLPGVHGLGPGAFLHGTHGTASDLPSAGVLTDAANSGTGLLTAAAAVLLPAALGTEPTTTTAPFGVLSPARLPTTWLKLSASFLVASIRPSPLAKWPTPPLGSTPPPPSLFTLRRPNLKARADLRRRGPLCALLPPPPPGPLISLPALMAVTGPTRAPHGRWLHRAWQRSSVAVVLQPLDRDHLHVVGPGHGYPLAVSSPAGSPGDATLRHSPFDDFGSAPSPASKDCYPDTLVPTS

SEQ ID NO: 77051 - protein, 275 aa, Zea mays
  Coding DNA Sequence Number=SeqID_33676
MAAPIVVFAASLLIVLVVALPAILVIAMLEDIEGGNGRKKHGMGWAVRCSTFSKEEEKEKTTVWQRLGKKSVRVPVWQRLFLFKEALPAAGAGSGLQSKKVWARINSPREDMKKGNLPLMANEVVAQRSTCNKRKRRSKKGKGLMETGHGARQVSPVPSDEDVATQSQKLISSSDSILALRPSCVMEFTPEMAREDVLLRRALLVTIVGTRPEVMSAKVLEEVAHSFDVNVQAMSIHHTRPEDFLLLLPDEESASKVFNGGNILRGPLFSLLFKR

SEQ ID NO: 77052 - protein, 304 aa, Zea mays
  Coding DNA Sequence Number=SeqID_33677
  Gene Ontology: Cellular component=intracellular; Biological process =signal transduction
  Homolog annotation: Hit_ID=Q10NV4; Match level="QueryCoverage=36%, HitCoverage=18%, E-value=2e-37, Identity=70%"; Hit description=PH domain containing protein, expressed
  Pfam annotation: Domain name=PH; Domain location=7-100; Score=17.6; E_ value=0.035; Accession=PF00169.20; Description=PH domain
MTILLMDVHITIFKRLCTNIAITPNFLIYLQSVPPPRGSEPIVTLGGIDLNNSASMIVKEERKVITVIFPDGRDGRTFTLKAETIEDLNEWRSALENALAQAPSVANTAGQHLAVSTDITEPVEAAVEQLDALTSSIQKLKILGEDIETGSELGEYTGRKPLGEDVDKLRSGREAENTNIIDGDTLANEVKVDLRVLRALMMHEISGEVDRVDVNAVDEGGALEGVVELLKVAEPGGLDNAIGHNTILGLSAGAGDDALPLRGPGNEVGAQKHSVVGYGLVHVRASSPVGIDVDHQLISQGGSK

SEQ ID NO: 77053 - protein, 362 aa, Zea mays
  Coding DNA Sequence Number=SeqID_33678
  Gene Ontology: Cellular component=intracellular; Biological process =signal transduction
  Homolog annotation: Hit_ID=Q10Q51; Match level="QueryCoverage=66%, HitCoverage=30%, E-value=8e-89, Identity=65%"; Hit description =RhoGAP domain containing protein, expressed
  Pfam annotation: Domain name=RhoGAP; Domain location=54-174; Score =49.3; E_value=1.4e-11; Accession=PF00620.18; Description=RhoGAP domain
MRETGVVAPDDWCGRGGELAAGRRWGGRAGGWVEDKSVIGRPAEFALVDADGTTAFLEKALKFIEDYGKNEFSPEEDAHVIGDCIKCILREMPSSPIPAPCCTALVRAYRTDKTRRLDAMNRVIYEVFPEPNRQLLQRILKMMQIVGSHKAENRMSPSALAACMAPLLLRPLLLGECEIDSEFNMAGDGSFQLLQAAAAANHAQAIVIIMLEEYDQIFDDIEDGSYSSDAYTESDIDKEYSTDNDIPEDDGSYGCGEDVEEDLNDDTEHSSGIRIDNADDKHSELIFLKETIQKKCNHSVFTGLIVLVKFSKEAVISLWRNKNCCSGYVLILLLPYLNRLGLSYSPSFLKQSLLFLDSGYAA

SEQ ID NO: 77054 - protein, 144 aa, Zea mays
  Coding DNA Sequence Number=SeqID_33679
MEVVAALAAAAAVLGVSSEAKEQEDDRRGRPRWVVKVRGLGLTGRFRRERRREGGAEGYRSESCGGSHQGDGEREVAVGRVAELPEEPRQARMGKEVRARQQREARELLRTDERASCASGLGTERLRPIDFLEFDGSGFEENIS

SEQ ID NO: 77055 - protein, 340 aa, Zea mays
  Coding DNA Sequence Number=SeqID_33680
MAAMKGEGDGAGPAEQGPAPDLTRGPAQHQRQEKLEVGGAAEALAWTARARTQRRGGCTCGVLSEEEDADQGRPGSHARAELRGAARSVLGGCGSAWSGRARPGWCRAPVDAAAEAAGVRAAVDVGRAGSSVARGRWARLLGAASRGESWGGALGGERSSQRWKKGAEHRELWTPWNREGAAGGASAALDKWSPRHGWRAPAPGELGHGGRWEMGAAARLQGTRPWGGGLGFFSLPTAAAARSSRLPPEPPPPPGGSSLPGRPLPLARLCTGAAPRSSAQAWLPSLGAAAPSSDGARRGCAWKRTTLFSLDPRRRWRIRQHLPWPPCSYTEHHNSSHVER

SEQ ID NO: 77056 - protein, 451 aa, Zea mays
  Coding DNA Sequence Number=SeqID_33681
MGGTRGLTGGPRLPAEERRERERGGVADRWGRGVRRRRAMLGCLGRERERGRGGRAARLIRNKCRGRAAQRPYVRLRPLAYVTGSRPRGSIGSPPERGAEANTVWSGHVSAPDPRLALIKAWVSFVPESRDPAMSGPDPTQRDPGPVPGVRFAPVGVLDLTRRFGLYMQGSGTFPWGFGPSVDTLEDIVFSGHVVAPEPSTWRGQARFRDSRVGTASSYCSKGYPYFKELTPKEYDSWARAPTSKTGLLFLAVEVKRRTTTGGGLLLAWRFAFSTLGDPHTSCMTCGPGPPCQRLGCFGARWARFFAASRGAGGRVFLEKGFTPCATVTLSHFLHSLLPFAFELSAPLCIRALLLHTYATADAMTSLSQPDRFQTEAMLNVVRHLLGWSAPVLARRIRAGTVPLGDLAAGEFVLFTSYISCGLALPISPFLLLLLEEFGLQLQHLTPHSIL

SEQ ID NO: 77057 - protein, 575 aa, Zea mays
  Coding DNA Sequence Number=SeqID_33682
  Gene Ontology: Mol. function=nucleotide binding; Cellular component =intrinsic to membrane; Biological process=defense response
  Homolog annotation: Hit_ID=A2ZJ01; Match level="QueryCoverage=97%, HitCoverage=41%, E-value=2e-93, Identity=37%"; Hit description =Putative uncharacterized protein
  Pfam annotation: Domain name=LRR_1; Domain location=177-198; Score =7.3; E_value=14; Accession=PF00560.24; Description=Leucine Rich Repeat
  Pfam annotation: Domain name=LRR_1; Domain location=257-278; Score =6.6; E_value=18; Accession=PF00560.24; Description=Leucine Rich Repeat
  Pfam annotation: Domain name=LRR_1; Domain location=280-310; Score =9.6; E_value=5.2; Accession=PF00560.24; Description=Leucine Rich Repeat
  Pfam annotation: Domain name=LRR_1; Domain location=331-354; Score =9.2; E_value=6.1; Accession=PF00560.24; Description=Leucine Rich Repeat
  Pfam annotation: Domain name=LRR_1; Domain location=357-378; Score =5.8; E_value=26; Accession=PF00560.24; Description=Leucine Rich Repeat
  Pfam annotation: Domain name=LRR_1; Domain location=380-401; Score =4.3; E_value=49; Accession=PF00560.24; Description=Leucine Rich Repeat
  Pfam module annotation: Pfam domain module=LRR_1::LRR_1::LRR_1::LRR _1::LRR_1::LRR_1; Domain location=177-198::257-278::280-310::331 -354::357-378::380-401
IGEFAIGRLTSLRELHKYRVQGDAGNKISDIKNLGAIRDLDVFSIENVESLEEADNAKLKEKPYLNYLSLMWSARADTKNGKDDLILDHLEPHAHIRNLNISGYCGARPPIWIENLHVKNLVSLELARCMYWEQLPSLGELECLKKLLLECLPSLQQIGQPSQLSNISCIGSYLPPHLDTLIIRHCKELKQIPILPPCLVHLEICRVGLTEFPSIGNIHGESIESRPSKMQFVSVEECESLTLPKGSPLLQIHYIRTIHVLHISDCKELESAPLFDEMRNLRELSIINCPKLRASSETEGKNLSPSLKNLIIKQCGDLVHFLIKSLHGLVNLSELVLENCPGLLSLPSADVFKSLKSLKFLEVIGCENLSSFGGLSSLCSLVTLKISSCSKLAAPPVLGGAASGPANYDDDVIEEENMVLPVNSLQIDYLEVDLPCVLNIEPLSRLCHTKGLVIGGGTQMVSLPEQWLLQNHKELQSLKVLCASSLESLPPSMRALRALNFFLLSGAGKLTSLPDMPSSLQWLHVIGCCPELVTQIRVKDNPEWRKISTVPKVHIAAAKTVHSSPHTFHGIYAPL

SEQ ID NO: 77058 - protein, 196 aa, Zea mays
  Coding DNA Sequence Number=SeqID_33683
  Homolog annotation: Hit_ID=A1Y2B7; Match level="QueryCoverage=94%, HitCoverage=30%, E-value=9e-69, Identity=74%"; Hit description =Leafbladeless1
VSQWRGEDVGTSEDCQQLNDLQNKMVKTEQRSKAVEETLGIITQKLRETMEENGFVRRKAKEKHLEYEEEMKHQEEFFHSQIEGIHKATEDKEKRFEKLLQEERSKARRFDVDSGTTEEDRKLRKEHVQKFIDCQVKNVAEFEAERDELIKGHEEKKMKLKKQYMEKELELERDHDAALTALMEKHKPDTFEASSS

SEQ ID NO: 77059 - protein, 317 aa, Zea mays
  Coding DNA Sequence Number=SeqID_33684
  Gene Ontology: Mol. function=protein transporter activity; Cellular component=clathrin adaptor complex; Biological process=intracellular protein transport
  Homolog annotation: Hit_ID=Q0DJ99; Match level="QueryCoverage=94%, HitCoverage=58%, E-value=1e-140, Identity=81%"; Hit description =Coatomer subunit delta-2
  Pfam annotation: Domain name=Adap_comp_sub; Domain location=66-307; Score=194.2; E_value=3.2e-55; Accession=PF00928.12; Description =Adaptor complexes medium subunit family
MSISGSGFGSGSGLGGLSTDMDSFASKPKAILLQVVHLQQLLHLVKVLSLKAEGEVILEDVQPSAVSTRSSALPPSDPVTVNIEEKLNVVVKRDGGISNFDVQGTLALQVLNDTDGFIHLQIESQDMPGLSFKTHPNINKDLFNSQQILGAKDPNRPFPSGQNETPLVKWRIQGMDESSLPLSVNCWPSVSGNETYVNIEYEASEMFDLHNVVISIPLPALREAPSVRQIDGEWKFDSRNSVLEWSILLIDQSNRSGSMEFVVPPADPSSFFPISVGFSASSTFSDLKVTGILPLKEGNPPKFSQRARLLTANYQVV

SEQ ID NO: 77060 - protein, 276 aa, Zea mays
  Coding DNA Sequence Number=SeqID_33685
MHRVLPPSEPPDGERLCCFRLAVVGGVQLRGSWYLSAISRLQGFSSGSPAASPRRWSPKTVTTSLMVGRSKPGYDLCPTLSFKDLHHPCWGGGRAEPELYLPYGPAGHLLLQHSGERALAGLEEGANFDNAGPIGCKRCQLQHAWFAGSAGSGAASGATSHRWAECGYLPAVRAAVAPRAPGDRPRRCALLGRRSCSWAVLPLLRYDASARRSVLACLGGPEWGSAGGQMAAVVGAVVVAAEEVLVADEIATAICASGLRLFGFDSSSSPLEWGRG

SEQ ID NO: 77061 - protein, 69 aa, Zea mays
  Coding DNA Sequence Number=SeqID_33686
MSKNTRDTRFILRFGHTTKVPYFLVEAPTKSRVGNEVLCVLYCGEECGRTDWQTGSDRGEQCRNRLNRF

SEQ ID NO: 77062 - protein, 146 aa, Zea mays
  Coding DNA Sequence Number=SeqID_33687
MGKNNKCKREPTPPSEEFGDSEYSEEEFSSESEGSPAPIPLRESSDDSDDSQGLAAEVWTYIRVVERSGLEGSDESEYSSDEEDSDGGGEDEDDDDDDDGDGDGDGSGRSGSGGSKGGDGGGTRGSNRGGSSRGSTRGGGSNKASG

SEQ ID NO: 77063 - protein, 194 aa, Zea mays
  Coding DNA Sequence Number=SeqID_33688
MVSYSSLSGTSSCISKVTSEGGGVGGVLVASSLISSEGARILFMGSTLIMGDQVGINQLLDVLILAFLQGFNSNNFMTFQGNCMGLSCGEIHMELTVAPFYIFCSGDHLTVVPSQEIILCIQGKQGSSCEGQAPQSSNFVESRAISMRKWCFASGSYRTLPAVSTMELPVETSWASFASIHGGGRDINSIFTIS

SEQ ID NO: 77064 - protein, 83 aa, Zea mays
  Coding DNA Sequence Number=SeqID_33689
MWHLRCYDRWVKKKLLSLGHAFTCEEHKKMKGKKNVENSSFKVKNRNLKKKMMKMINSLHHPSRTKIQYNGLESSTLLSLTLT

SEQ ID NO: 77065 - protein, 577 aa, Zea mays
  Coding DNA Sequence Number=SeqID_33690
MEVVELVPCAHNKWGNWYEFWFYVAEGTVEDHPGLPVAEMCSHYYSAYPQFEVAKEDADRGALRCAAGLSSRRDLVEEFVVYGVWPLAHGWALGEDGAVRIVGWYVPKTEGQRSWDIRGSNDRLNRVFELNRLPYGGYPGQDDVDRRGKKPAAETGDDPAPAAAPSSKKRNLGTATGGLGVSDGFARELMRTCAAPGGRMSSPELQESSTRMLKVTGGWWPKNVPIPRTAGEDFFTSRMFRDWRVISYGRNIAAVVSAVMDKDRQGAAQKHQAVVRLPEARPKRSRGTAKAAAPGGSQPTLAAKSAAPGSSRVPEAVKAEPSLPRSELRRPENCLRRASALPTSPPRLAWTIISLVSRSGEGQLVVVPPAVATVAAVVVPRARGSALSAGGEIPALTAVKDEAGAVSRRLKEALSQAADFADRVASGALTAVLSAKVERLRAQHADAVREKSVADSKCRKLVEKVAVLEGERTDLRRQLAEERREANEALAKAQSAQAEANLARVEGSLARQRAEEWEERFNALQTRVKRAEASTRSEAERTRKQLMDSYHELGAQTADFEVPDQEPGLRCLEWLQE

SEQ ID NO: 77066 - protein, 294 aa, Zea mays
  Coding DNA Sequence Number=SeqID_33691
  Gene Ontology: Mol. function=RNA-directed DNA polymerase activity; Cellular component=cellular_component; Biological process=RNA -dependent DNA replication
  Homolog annotation: Hit_ID=Q6ZFT2; Match level="QueryCoverage=87%, HitCoverage=35%, E-value=1e-28, Identity=36%"; Hit description =Putative receptor-type protein kinase LRK1
  Pfam annotation: Domain name=Lectin_legB; Domain location=20-262; Score=122.1; E_value=1.6e-33; Accession=PF00139.10; Description =Legume lectin domain
MAKSTPLLSFVYLLCIAHVTSISFDYNFSIPGVLTSANIKYMSNGSRGTDRIDLTKDAIWSTGRVAYGQPLQLWDDTAKVASFTSNFTFAIKPHNSTNQATYPKKLLFKLSPCSQLGKLRALVGMKDSNGGFLGLFNNPIGTNIDFPPTIAVEFDAFRNDWDPNNTMNHIGVDVKSITSRAYTPLPDGSFNGTMSAWVRYDANVSTLSATLRFDDLPQLGLYNVSAIVDFKDAGLPPYAAVGFSGATGDFIERHQILSWSFESTLTGVVVNVNNTGKCLSLSLLSLAILLQKEN

SEQ ID NO: 77067 - protein, 124 aa, Zea mays
  Coding DNA Sequence Number=SeqID_33692
  Subcellular localization annotation: CTP_CleavageSite=8; ConfidenceScore=5.12e-01
MAGPTAPSAGSGSNTATRLTRLDATRGTAAPDALNGAGLGRRRRGLQGYDGCGLRRCGKASCGWVKLSGCNHHNTAQRARQRSLDYKRWEARGTAQVDSVKVRRATQGDFGWLLCVEWLGMGVG

SEQ ID NO: 77068 - protein, 173 aa, Zea mays
  Coding DNA Sequence Number=SeqID_33693
MGSKTLTTKCTFASLNRLKKKTLKDMLAFWESRYGSTRIKDSICRKAFYEWILKNPFLLVSKAKHHKNPFQKGYQGRIARKLLGGREFAKDATGTTLHAGRGQASWHDRENTGEVMALASSKDRGGAAKIGMPRAESRAQAELETKRRRAGAERRGGRRTGARFELGPGLPAS

SEQ ID NO: 77069 - protein, 99 aa, Zea mays
  Coding DNA Sequence Number=SeqID_33694
MELVGGPTYSPPLDDYQLVSELDTSFRVLQPKVMSEQSEKYKMATSEDKGKDKEFVHSRSKKTHEKKGTRKPKKKIIISDDDDTSISSSSSDDEIVYTK

SEQ ID NO: 77070 - protein, 94 aa, Zea mays
  Coding DNA Sequence Number=SeqID_33695
MAMMGSTSEKMYLCHVKKQPIFVASVPRWCPKKKTKTEATGGIIAAQAGAVTPPRPAPMAGVATEDGPHELFRQRVHPLEREHSCRHGANGGPC

SEQ ID NO: 77071 - protein, 110 aa, Zea mays
  Coding DNA Sequence Number=SeqID_33696
MCSSDLVKGVDRGEITSDVAPSREPSQNEEEIEVEEARTTPSPEEPQAGNCFYFDICGAEPDSPIIQGGGMFSKTKLDGGSIVAMMGSTSEKLYLCQVKKQQIFVASVPR

SEQ ID NO: 77072 - protein, 131 aa, Zea mays
  Coding DNA Sequence Number=SeqID_33697
MANKARCFSSWEEDLIMTEERLDKMTNEHEELKCSHGDLVQRIKRLNKKAKQPRRRRHAQPPQDIHGRMVKMLKKGETIAYARLHQTHVPGATKETSNLNNDKGNKSSVHVVCTNNVSMTFKNRKRMRKGK

SEQ ID NO: 77073 - protein, 451 aa, Zea mays
  Coding DNA Sequence Number=SeqID_33698
MALPVDVAPESEPWGRAERSFVVFRVLARVRALGSGGAEFAVFRVLARVRALGSGGAEFAVFRPESETKGSGGAEFAVFRVLARVRALGSGGAEFAVFWVLARVRALGSGGAEFAVFRVLARVRALGSGGAEFAVAALSFCQTGQWSGGVTAVTSALPGARVRMELYADGGYQLRIRRLEAPEPLHRARGRSGTDSTFYICPYVTFPQGGGGECAMLPSMGTEHGVSGELQADPVPWRRGPRARCLPPMGFCYKIVPAGLGNVLGQQLARRLLDAWAWVPKLACQKLEKRVHLARLHAACMAARPFCPLVWAEMGGRFPWRLGAHVGRVAFKRRETPFRKATMSSPPLSAVSSHLSSPRMGGIRRLSASSLEERNSMGVGTSQPSFGFKDFHHAAWPRSATGGHPRWPRWKMRRVGGPPPRGSAALFFPPRPGVKGVLEPHGDFLQPCRDM

SEQ ID NO: 77074 - protein, 699 aa, Zea mays
  Coding DNA Sequence Number=SeqID_33699
  Gene Ontology: Mol. function=nucleic acid binding
  Homolog annotation: Hit_ID=Q10M01; Match level="QueryCoverage=97%, HitCoverage=97%, E-value=0.0, Identity=54%"; Hit description=Zinc finger C-x8-C-x5-C-x3-H type family protein, expressed
  Pfam annotation: Domain name=RRM_1; Domain location=370-438; Score =17.3; E_value=0.0037; Accession=PF00076.13; Description=RNA recognition motif. (a.k.a. RRM, RBD,
  Pfam annotation: Domain name=zf-CCCH; Domain location=231-256; Score =21.6; E_value=0.0019; Accession=PF00642.15; Description=Zinc finger C-x8-C-x5-C-x3-H type (and similar)
  Pfam module annotation: Pfam domain module=RRM_1::zf-CCCH; Domain location=370-438::231-256
MDAYEATKVVFSRIQALDPDHAAKIMGLLLIQDHGEKEMIRLAFGPESLLHAVMAKARKDLGLLLPASPTSVAAAGHAPFLQLPRQNSGRAGAPSPLSVSSPSSWGHAPAFSRSNSTSNGTGTAEEAAGAGEELPSPVNGGAAPFFPHQSGDALLDDLQLQEQLAFLNEGSANPAHQLPGFVGGECRSPGPGDASGMFAFGLGWPNGGPAHRRSSSVNEFCLGGGGGGDGFGWKPCLYYARGFCKNGGSCRFVHGGLSDDAAAFAGAKMEAAADQQQQQQCQDFLIRSKSQRLGSAAFPYSSTGSLPGSPSAASKCLSFLLQQQQQQHDRAAAAASLMLGGGDEAHKFMGRPRLDRADFANMMNPGSRQIYLTFPADSTFREEDVSNYFSIYGPVHDVRIPYQQKRMFGFVTFVYPETVKLILAKGNPHFICDARVLVKPYKEKGKVPDKCRHALRVHPLLAPSDRNGGRPTCMQLLRGLTDLLFSLRRKPQQGDFSGCTTPTGGLDGGYPFDLHQLGGRMLQHSSSANELLLRRKLEEQQQAIELQSRRLMGLQLLDLKARAAAAAASPLPTPIGDAFASSQPVSTTAVESPSPPESGQQLLKLRSGFALEGKVNGGDKEESAREASPDAADSDQSFTATETESTAASRVGVDAGVGSKIDGGSNHLRPPALEIPSPSSYFFPMHRNTRSQEKRWWNI

SEQ ID NO: 77075 - protein, 164 aa, Zea mays
  Coding DNA Sequence Number=SeqID_33700
  Subcellular localization annotation: CTP_CleavageSite=39; ConfidenceScore=5.37e-01
MAAHAHAQSQRRSRTEPRGVRVRPPPLPSPSLAVALTTSANAAGARFLAPSPALARYAAYVDAVGMGAWLRSHARPGRVSRSPSSGRLLASSSLSTPQAQRRAWVAVSRGRGCEILPNRQLLQQLSSSAASQNTLKAANKQKLLFTSFSDKLLFQQAPAVPNRA

SEQ ID NO: 77076 - protein, 781 aa, Zea mays
  Coding DNA Sequence Number=SeqID_33701
  Gene Ontology: Mol. function=hydrolase activity, hydrolyzing O -glycosyl compounds; Cellular component=integral to membrane; Biological process=cell wall organization and biogenesis
  Homolog annotation: Hit_ID=P0C1U4; Match level="QueryCoverage=74%, HitCoverage=97%, E-value=0.0, Identity=73%"; Hit description =Endoglucanase 9
  Pfam annotation: Domain name=Glyco_hydro_9; Domain location=117-567; Score=671.4; E_value=7.4e-199; Accession=PF00759.10; Description =Glycosyl hydrolase family 9
LLEGGEMSMYGRDPWGGPLEICHDSATDDDRSRNLDIDRAALSRTLDETQQSWLLAGTADQPRKKNKYVDIGCLLVSRKLFVWTLGVLLAAAVFAGAVAGIAKAIPRRHRPLPPPDDYTVALHKALMFFHAQRSGKLPKHNNIHWRGNSCMKDGLSDPAVRRSLVGGYYDAGDAVKFNFPAAFSMTLLSWSVIEYSAKYDAVGELGHVRDIIKWGSDYFLKTFNSTADSIDRVIAQVGGGATSPGSTQPNDRYCWMRPEDIDYPRPVVECHTCSDLAAEMAAALAAASIVFKDNKAYSQKLVHGATTLFQFARDRRGRYSAGGSYAAKFYNSTSYWDEFLWGSSWMYLATGNSSYLTLATNPKLAKHAGAFWGGPDYGVFSWDNKLTGAQSVYYTVTSALTVQFTELPSITGGLIQLNHGKPRPLQYVVNAAFLASVFSDYLEAADTPGWYCGPHFYSVEVLRSFARTQIDYILGKNPLKMSYVVGFGKRYPRHVHHRGASIPKNGVHYGCKGGWKWRDAKKPNPNTIAGAMVAGPDRHDGFKDARRNYNYTEATLAGNAGLVAALVALSGDGHGGVDKNTMFSAVGQPEPRHHLGSLLPDGVPPGSEIQAPSAIFRRPCVRADRPAPGRGPSGRQAGALAAHQAADRPAPGRGQSALAQRAPPRLAPGRGSSGPCAQTVRPYAEGTATVLDWVFGAPKRRQHTFWRLRWGHTYLSSSNRPSMAGSRDSSDISPSNIIEPTWETLPADEQLQFEEHKERMIQEAKTKFLANFKVDRNNKVV

SEQ ID NO: 77077 - protein, 192 aa, Zea mays
  Coding DNA Sequence Number=SeqID_33702
  Subcellular localization annotation: CTP_CleavageSite=45; ConfidenceScore=5.27e-01
MNFNASNRQRVGVRPVGRERSHCFRKSRRIRTRGVLLLPCFFSFRVSHGRREKRQERAPPRRWEEQAPPSPPSEDSRDSEYSEEVSSEYDHSPAPASLVASSDDSDDSMGLSTVERAYIQSVERAGLGGSDDSEEVSSEDVEDSSDSEEGSDSDDDEGEGGSSDGCDDSRRGGDDSGDGDGESSGEGSKRGS

SEQ ID NO: 77078 - protein, 47 aa, Zea mays
  Coding DNA Sequence Number=SeqID_33703
MWLLLNHLLFSCGGGVRQQGILSNGLFYSPQYKQAQDIGKINITPSM

SEQ ID NO: 77079 - protein, 176 aa, Zea mays
  Coding DNA Sequence Number=SeqID_33704
MGARNWAETHRLALSTRGGGRPKSGEVDLGPPVKSGLVRGLGKLHGPLAELAEALARLGGGWSGLATVAEALAAMAGGIELAGAKERGLAGEALSFVYGTSRGFRLGTGSCSVTKVPVSECLVPRSNCAKTVSNEFGLSSNFSRTCSREFGTTLIFGSSSFEFRKIENAVDLWKEV

SEQ ID NO: 77080 - protein, 78 aa, Zea mays
  Coding DNA Sequence Number=SeqID_33705
MGDPVSGRMRDKVRAWLHSEITTLKVYDLLELNKVNITYVRPLGGILGKLGQTYLSGLVLVYVSLSQKLGIRKCYNMT

SEQ ID NO: 77081 - protein, 74 aa, Zea mays
  Coding DNA Sequence Number=SeqID_33706
MTLLEIWKPRWSSFEWSYVTKIVCGSRMDNNFLNKAGGLIRKDPTYLDFSETRPPLFVKAEDPLEADEWVWVIE

SEQ ID NO: 77082 - protein, 154 aa, Zea mays
  Coding DNA Sequence Number=SeqID_33707
MSRSAEERRRELHGEREREAPRAEEGAVGKTNRESRRGTDFREGKTQRREDKIPRDEDDRGKYQTGDKAEEGAGNIPRRDETDGWNSAGSFCRRAGRAEDELGGGIFFPELERRRRKHRLKKKSKKETAKNICWGGASDSVDFRRSPSVIRTLG

SEQ ID NO: 77083 - protein, 98 aa, Zea mays
  Coding DNA Sequence Number=SeqID_33708
MAESTGLISSRPRGSRCVGAPIHELHAHAVSATIPPGAVFVGGEIAANPGPTSQSTSASYAEEVFASIPAVAEPPELFQLKCPSHVLEVATHLNRNNP

SEQ ID NO: 77084 - protein, 127 aa, Zea mays
  Coding DNA Sequence Number=SeqID_33709
MRNRASPSPLLLLLLSCWSSIPLDRPTRWQGGRPSHTINHILKRTCKNYATSKAEYTNTQLDLPGYKGSSSLISCEKQTIQIEFLNLARLCIRIGACLQLLGLWGDPRWQARELDPDLPRGQLLAQE

SEQ ID NO: 77085 - protein, 199 aa, Zea mays
  Coding DNA Sequence Number=SeqID_33710
MGWAQGPGSRVHERRKGKAGKASSGHREEDADELEPGTERAGITGKALDAKVATRVGGATSRAQGRILRRAGTRLGEMGAPESMRCRGQLRNDAGSSTAREREAPRAEEGVVGKTNRERRRGTDFREGKTQRREDKIPRDDDRGKYQTGDKAEEGAGNIPRRDETDGWNSAGSFCRRAGRAEDELGGGIFFLELERRRR

SEQ ID NO: 77086 - protein, 117 aa, Zea mays
  Coding DNA Sequence Number=SeqID_33711
MWSIYFSGNSVPHGCVWVYRHGTTEKCNVLVTTHLRSGTLTSKTNRNDIELQMYLQLEGDESTSVTQGRMPNQREQYGDCDMDEGFYAEGPKKHLPFARIATFTDKRGLSIFNVLGV

SEQ ID NO: 77087 - protein, 183 aa, Zea mays
  Coding DNA Sequence Number=SeqID_33712
MEAGRVLQGQTRRTEGQAELGQTAMGGQGRAPGECRELRRLGAQGKEPGSLDQEVALVTNGGDPVRGRMQGAVKCWLPWRPVLREFGRRARRTARWGATTKGAVTRAGRGVKQSLGAMDRKGQFPGEHQGWRCPRRWAGRRGQARASMRDGKEKQGKQAADTGRKTPTNWSRAPSEQGSPTRL

SEQ ID NO: 77088 - protein, 148 aa, Zea mays
  Coding DNA Sequence Number=SeqID_33713
  Subcellular localization annotation: CTP_CleavageSite=46; ConfidenceScore=5.49e-01
MVAVHASWPWTVLAQATVVPREMVRVPAPGFRFCRTDLCSVLAVFSASNLGAVASLSATVVLSTPARVHGRVGQVRQRSITSSTIVARSRSLSPARPHRQASPCQSSFFAQQGFVLSAALQVRVLGGLAPPCRVRSSMLSTRTNIGSR

SEQ ID NO: 77089 - protein, 77 aa, Zea mays
  Coding DNA Sequence Number=SeqID_33714
MRLHILRGMKAEVILAFADICTHEFDIILLAEMCHLTLVLLNAGSTINIILRSSPPVTSSWGRLGFGSRHHVVNKRT

SEQ ID NO: 77090 - protein, 79 aa, Zea mays
  Coding DNA Sequence Number=SeqID_33715
MAVTGWIDHCGGINCSSEKEGRRGLRLSVDRPHLDVTAAEEDPAAARSVVVPGRRRHALGGREVEDGCVPLDPGASVMI

SEQ ID NO: 77091 - protein, 997 aa, Zea mays
  Coding DNA Sequence Number=SeqID_33716
  Gene Ontology: Mol. function=nucleotide binding; Cellular component =myosin complex; Biological process=keratinization
  Homolog annotation: Hit_ID=A3C5Y3; Match level="QueryCoverage=97%, HitCoverage=86%, E-value=0.0, Identity=87%"; Hit description =Putative uncharacterized protein
  Pfam annotation: Domain name=Myosin_head; Domain location=78-735; Score=968.5; E_value=2.6e-288; Accession=PF00063.12; Description =Myosin head (motor domain)
MRTVFFLEVVDYNVNSYSTLYVLQKHRVFCQLRNGDWALCTVLATSGDESVLKVSEGKVLRLKTESLQPANPEILDGVDDLMQLSYLSEPSVLYNLQYRYSQDMIYTKAGPVLVAVNPFKKVSLYGNEYIDAYRNKSMDSPHVYAIADAALCEMKRDEVNQSIIISGESGAGKTETAKIAMQYLASLGGGSGIEYEILQTNPILEAFGNAKTLRNDNSSRFGKLIEIHFSTTGRICGAMIQTFLLEKSRVVQCAVGERSYHIFYQLCAGAPASLREKLNLKKVDEYKYLKQSCCYSIAGVDDAQMFRTVTEAMDIVHISKEDQENVFAMVSAVLWLGDVSFTVIDNENHVEIIADEASKMVAELLGCSIEDLNLALTKRHMKVNNENIVQKLTLAQATDTRDALAKSLYASLFEWLVEQINKSLSVGKRRTGRSISILDIYGFESFDKNSFEQFCINYANERLQQHFNRHLFKLEQEEYVEDGIDWAKVDFEDNQDCLSLFEKKPLGLLSLLDEESTFPNATDLTFANKLKQHLNSNSCFRGERDKGFAVRHYAGEVAYDTSGFLEKNRDLLHMDSIQLLAKCKTFLPKMFASKMLVQPDDSMSVPYRSSAADSQKLSVAMKFKGQLFQLMQRLESTTPHFIRCIKPNNLQLPAIYEQGLVLQQLKCCGVLEVVRISRSGYPTRMTHQKFARRYGFLLLEDVASQDPLSVSVAILHQFNILPEMYQVGYTKLFFRTGQIGKLEDTRNRTLHGIRGSLVRRCNGNIDLINVLREFESKQEAEGDQILIKASVLAELQRRILKAEATVREKEEENETLHQRLQQYENRWLEYEQKMKAMEEMWQKQMRSLQSSLSVAKKSLALHETPRMSDSSVDQSWESNGNHVSSGSQLVPRTGGREMSAGLSVIGRLAEEFEQRSQVFADDAKFLVEVKSGQADASLNPDMELRRLKHNFDSWKKDFSGRIRETKMILNKLGNGNESSPNSVKRKWWGRLNTSKFS

SEQ ID NO: 77092 - protein, 75 aa, Zea mays
  Coding DNA Sequence Number=SeqID_33717
MGSRHSACSAEAGCRGSFVLLLLVTLLREERYLIRDGWFTDDDDDDDDGYDYGNGKEEGVEANLQGFQDFDEFED

SEQ ID NO: 77093 - protein, 365 aa, Zea mays
  Coding DNA Sequence Number=SeqID_33718
  Subcellular localization annotation: CTP_CleavageSite=33; ConfidenceScore=5.23e-01
MHRALPPSEPPDGGPTTFPHQWSSRMMTTSSVVGRSKSGCGLCPALSFKDLHHPGWGGGRGKLGPTSAWVGDPLLPPAFGGEGHPPAVRRRRPPAMRGKANCCAPARVQLSVLRPSDDRRLHWEVTQHVVRREGGTRVLGRSRSRSCGESGSEDLLVRFGAAVARWCGVGGQVATVVGAEVVAARGGFPTDETNLRPLCDELEPEAAASAWTEGRVGLKRGFVGPGARGVPGRGGAAAAARAWPGQNPCGEPGREGPSAVLASFSEVEILPPESPSEAGPGSAEGGNDAKGAATPSADESLGSDDLAAYAHSYPFAGFCYRYSREGTKVVLAEKTPLSKQSKSTKDVLAKDFSEENFDAEGVPPF

SEQ ID NO: 77094 - protein, 111 aa, Zea mays
  Coding DNA Sequence Number=SeqID_33719
  Homolog annotation: Hit_ID=Q6J9V9; Match level="QueryCoverage=42%, HitCoverage=25%, E-value=1e-07, Identity=50%"; Hit description =Putative uncharacterized protein
  Subcellular localization annotation: CTP_CleavageSite=58; ConfidenceScore=5.18e-01
MATTRGIDPFLKAGLPTLILKRHGQSLHRRAPGSSPYDTGAGSHTPCKLTRNGRSQTTAREAGTGKGDISKGILLREGSGPRALLLIRGSKAGPLEGFDSRPRALGLRTHY

SEQ ID NO: 77095 - protein, 155 aa, Zea mays
  Coding DNA Sequence Number=SeqID_33720
  Homolog annotation: Hit_ID=A3C5Y3; Match level="QueryCoverage=91%, HitCoverage=13%, E-value=3e-17, Identity=41%"; Hit description =Putative uncharacterized protein
MASVEVRSVRKSTALRARGGPSKLQSARSMPLDYRYSDGPSAANGAGGGPAGNGVGRRAVAVEAGKEEKEGEVVRLEGDDADSPYSSNVVTAEEEAGNTGGGGDEVDSAAAATPRRLSPRAAASPTQVDARWGDTSSYGAKKVGGLPFISDDFEM

SEQ ID NO: 77096 - protein, 159 aa, Zea mays
  Coding DNA Sequence Number=SeqID_33721
  Gene Ontology: Mol. function=identical protein binding; Cellular component=spliceosome; Biological process=mRNA processing
  Homolog annotation: Hit_ID=A3B8B4; Match level="QueryCoverage=65%, HitCoverage=25%, E-value=6e-40, Identity=77%"; Hit description =Putative uncharacterized protein
  Pfam annotation: Domain name=PRP38; Domain location=1-153; Score= -13.6; E_value=3e-06; Accession=PF03371.6; Description=PRP38 family
MEKVLSVNILSSDYFKELFKYKTYHKVVDEIYNQVDHVEPWMTDNCRGPSSAFCLLYKLFTMKLTVKQMHGLLKHQDSPYIRAEWLEANKDYQAIVDGANIALYQQNFVEGGFSLTQMTCKGCVYIFLLPFLDWERFQLGCQVVGLFQHFSMLSLLVEL

SEQ ID NO: 77097 - protein, 360 aa, Zea mays
  Coding DNA Sequence Number=SeqID_33722
  Homolog annotation: Hit_ID=A3AGP3; Match level="QueryCoverage=42%, HitCoverage=23%, E-value=3e-44, Identity=62%"; Hit description =Putative uncharacterized protein
  Subcellular localization annotation: CTP_CleavageSite=36; ConfidenceScore=5.65e-01
MSASAGTMVHQSLIYVFVAHATSSPTTAIATPSTTSSRMDSGSRSYKSTKVAAKRLEEAALSCKGDERVQLLRRWLVALKETQRVTMVVREPQLGDNPDQAASLLAPNHLCSRELQDLYIDYDSGVEPMNFFHVFLYSQALECVVLSLAKRDELLQFAQGAISGLKINADIARLDNEITQLQQQIKSMDALHVSISSSVKSIHQPQGPVDLFWCTMWMKTTWSSGLWGLLDASGARGNSQEQYGTPMPHIGQTTVEVDLLKYGVIEGDESYGMNLTKEQRVEKIESQKLEKYEAKHDKRHDLKVDQSVQEEYINAYYEALRKKLEEKEAKSRMHHEGKIFVPDAQRECQVGNKYKQDDDE

SEQ ID NO: 77098 - protein, 257 aa, Zea mays
  Coding DNA Sequence Number=SeqID_33723
MSRAFDDYYIEDYGVILALEVTQRRINNSDQFVILATVRPTKTTHVVCALDLINRQGPQSTLVLPPTNHHRPPRRLRFKPSIATAPLSAPLFLDRSSIKLHPRRRRQRLRPSHTAVQPPPDSPPHTAAASTAHPPCLPPWPPGGGFGLPESPPNQSEKSTWRSFCTSRTGAGRGARQHSALAGRVSTGPMASAKSSRSRPTGHFGVFPVNVVAGAGSSDGGVQLADKLKIIKTDNSDTHSASDEIHLSTGDNKGLSL

SEQ ID NO: 77099 - protein, 508 aa, Zea mays
  Coding DNA Sequence Number=SeqID_33724
  Gene Ontology: Mol. function=ubiquitin-protein ligase activity; Cellular component=ubiquitin ligase complex; Biological process =protein ubiquitination
  Homolog annotation: Hit_ID=Q67VC1; Match level="QueryCoverage=93%, HitCoverage=94%, E-value=1e-155, Identity=62%"; Hit description=Arm repeat-containing protein-like
  Pfam annotation: Domain name=Arm; Domain location=195-235; Score =22.5; E_value=0.0016; Accession=PF00514.14; Description =Armadillobeta-catenin-like repeat
  Pfam annotation: Domain name=Arm; Domain location=236-276; Score =29.4; E_value=1.3e-05; Accession=PF00514.14; Description =Armadillobeta-catenin-like repeat
  Pfam annotation: Domain name=Arm; Domain location=277-318; Score =19.3; E_value=0.014; Accession=PF00514.14; Description=Armadillobeta- catenin-like repeat
  Pfam annotation: Domain name=Arm; Domain location=371-415; Score=1.2; E_value=7.7; Accession=PF00514.14; Description=Armadillobeta-catenin -like repeat
  Pfam annotation: Domain name=U-box; Domain location=34-115; Score =39.7; E_value=1.1e-08; Accession=PF04564.6; Description=U-box domain
  Pfam module annotation: Pfam domain module=Arm::Arm::Arm::Arm::U-box; Domain location=195-235::236-276::277-318::371-415::34-115
  Subcellular localization annotation: CTP_CleavageSite=15; ConfidenceScore=5.39e-01
MATGTGRPWWAPAPPAAARSAPLFPSPPSSFTADPPAEFLCPISGTLMADPVVAPPGQTFERACIQACAALAFSPPTVAVDLSESHSCSSAPLVLIPNVALRNAILNWCDRLALPHPSPMSPDTAHDIVRRLMPQDRQRSSLAQRPHPQVQQQPSSRQRGDALEEEIMAALGTEGATPAEQASAMALLRQATRENREVRRQLCTPRLLAALRPMLLSADADVQVNAAAAVVNLSLEPENKVRIVRSGAVSPLVDVLRGGHTEARDHAAGAMYSLAVEDENRAAIGVLGAIPPLLDLFAGAAAHRARREAGMALYHISLSGMNRPKIARAPGAVRTLLAVAAAEARRDRASDADAAALRRLAAMILANLAGCPDGRAALMDGGAVAAVVRLMRCGSAAPGSTEEEYCISTLYGMSRGSMRFRGLARAAGVEAALQPVAEGGGGVRRDLARRTLRAMRGEDDEAPAMDSGLLGRQWDDGSVVSEGLVSIRRPPPHRSNHAGPSGSNTTQF

SEQ ID NO: 77100 - protein, 138 aa, Zea mays
  Coding DNA Sequence Number=SeqID_33725
  Gene Ontology: Mol. function=oxidoreductase activity; Biological process=electron transport
  Homolog annotation: Hit_ID=A3BUP1; Match level="QueryCoverage=93%, HitCoverage=26%, E-value=2e-25, Identity=53%"; Hit description =Putative uncharacterized protein
MRLHLVAPVLLPHKAVEDGVKIGGYMVHIGSLVIFNLCEIMRDPMAWSFGRGHGPCRPSLGSTHGHGRGPIDEFLSVYMSRELDFLPIVERVVPLVMAYLVHAFECQLSDDMLAEQVDVSDEFTNTNVLAFLLSKSCP

SEQ ID NO: 77101 - protein, 276 aa, Zea mays
  Coding DNA Sequence Number=SeqID_33726
  Gene Ontology: Mol. function=nucleic acid binding; Cellular component= mitochondrial inner membrane; Biological process=activation of protein kinase C
  Homolog annotation: Hit_ID=A2X8B6; Match level="QueryCoverage=63%, HitCoverage=34%, E-value=6e-34, Identity=46%"; Hit description =Putative uncharacterized protein
  Pfam annotation: Domain name=PPR; Domain location=174-208; Score =34.4; E_value=4.2e-07; Accession=PF01535.11; Description=PPR repeat
  Pfam annotation: Domain name=PPR; Domain location=241-275; Score=4.6; E_value=2.2; Accession=PF01535.11; Description=PPR repeat
  Pfam module annotation: Pfam domain module=PPR::PPR; Domain location =174-208::241-275
MVNSMQNKIHMVTWCYCGNEREVVVTVAVAGDVTTIVQQSDISRGGIEILRSRSCHVNLMAGWTHAQQQWLRQSTVEDYDPRGGRTRFWRVIRDYDHLVARLRLFGILQLVIARLACGLARDEQLARMVHGYLVAGGFCGDPFVLSSLVNMYAKVGDVASARRLLLELPCRDVVSWTTIVSGCVLNAMLKEALGVFLMMLEDDVLPNNVTISACSHSGLISEGHKCFESMGRDHGIEPSMDHYACVVDQLGRSGRFAEAEQFIRDMHARPEIMLCA

SEQ ID NO: 77102 - protein, 138 aa, Zea mays
  Coding DNA Sequence Number=SeqID_33727
MVQPVAHQTLSGAQAEGPRELATLEFSQSHSTKIHRTVRCANEATINFANDRLQYSLTVRSQSQSAKLERTGLSGVPPDCPVPQEDKELQRSIAPNPNGRLMWHAPDNEQCSVRCTTGLSSVLIDSKVSQQLGSGWRL

SEQ ID NO: 77103 - protein, 107 aa, Zea mays
  Coding DNA Sequence Number=SeqID_33728
  Homolog annotation: Hit_ID=A2X8B6; Match level="QueryCoverage=59%, HitCoverage=4%, E-value=1e-15, Identity=67%"; Hit description =Putative uncharacterized protein
MPRRDAATYAPLISAHCRLGAPLDALRAFLDMLAWGCSDEEGADDVVRPIEFTAAAVVQACGLARDERRRRRVVGVLRGRSESRPCLAEERIISTKHRSDRLSVNIQ

SEQ ID NO: 77104 - protein, 76 aa, Zea mays
  Coding DNA Sequence Number=SeqID_33729
  Homolog annotation: Hit_ID=Q5NKP3; Match level="QueryCoverage=47%, HitCoverage=14%, E-value=5e-12, Identity=91%"; Hit description =Putative uncharacterized protein 9C20.7
MSCAFHDYYIKDYGVILAPEVTQRRTDNNDHSPSSGDALAHHTKCISTTNLSANEPFAVHYDHLRVGPDPGDPTRQ

SEQ ID NO: 77105 - protein, 270 aa, Zea mays
  Coding DNA Sequence Number=SeqID_33730
MGTLGCLGSTMAGLRLHGENAGEHGPGKTEGLGAIQRVSRAAGEDAELTEATDATDARQRLWNNDGSWQSSTGARVERESEGVRLRAQLGEGSKQLCEAYRRSSRTASLGGWVYLLQLWKWSHIPVSRPREFAPCDWFVVATPEAHDFLPLGPGPGALRTTLACLRGVLQRAGHTYAFDDVGKITINLYGNSNPFQIFNEFLKEVSTFSRFDRQRQKKVTDFKTHHRDYIDEWDQESHLNYNNYQPHTNYHFRRYLTWYAGATRCKLKGH

SEQ ID NO: 77106 - protein, 93 aa, Zea mays
  Coding DNA Sequence Number=SeqID_33731
  Gene Ontology: Mol. function=kinase activity; Cellular component =ornithine carbamoyltransferase complex; Biological process=amino acid metabolic process
  Homolog annotation: Hit_ID=Q6QP54; Match level="QueryCoverage=47%, HitCoverage=15%, E-value=6e-11, Identity=81%"; Hit description =Putative kinase
MALPVDVAGLCPRSGDVEAPPKPGSSLSSMAEAEPELLGRARRRSFGRGQGGVRALGPSPSPGSGGAEFAVFRGLARVRALGRAERSSPSSGA

SEQ ID NO: 77107 - protein, 233 aa, Zea mays
  Coding DNA Sequence Number=SeqID_33732
  Gene Ontology: Mol. function=ligase activity
  Homolog annotation: Hit_ID=Q6ZD68; Match level="QueryCoverage=26%, HitCoverage=8%, E-value=2e-09, Identity=59%"; Hit description=DNA ligase-like
MMVGKGDWEGRLTHVSPEILAADDAAPSTRFHVLPFPRLSERATEILVQARATRQLEPLIIRPSSQWSRLPQPSMESRGGSVRWGRGEWIVGWRDEDQERGQRSGLRQRGLRERGSHSGEPGRRHGAESVGIPSVGEGRTRRRDGRGADDDARSFEGATDLGTAGVVGKECAARPSIDGLRTAGEALMAQTAGAAGPSIDGRRGIAGRGAGRERSARWQRWQNQSVDAYSPHI

SEQ ID NO: 77108 - protein, 213 aa, Zea mays
  Coding DNA Sequence Number=SeqID_33733
  Homolog annotation: Hit_ID=A3AWA1; Match level="QueryCoverage=58%, HitCoverage=4%, E-value=3e-33, Identity=64%"; Hit description =Putative uncharacterized protein
MEGKGGWKHLFLHGSCMERNYWQKTNFDQILECAKGISRCQQIMQRPNGAELQYYQKLNRLLLELEQRSGGVSEESYQTEVIAATVAGVAAEGLSPKEAKIQAENAAHLSVALAENAIVILMLVEDHLRSQAQHFCTSLTGDSITSSTSMTSLAASRSNSLNTAGKDPMAAGVPRRASLSSDAGGLPLDTCKLFANSDPLEKWGHGNKQNEND

SEQ ID NO: 77109 - protein, 556 aa, Zea mays
  Coding DNA Sequence Number=SeqID_33734
  Gene Ontology: Mol. function=transporter activity; Cellular component= membrane; Biological process=oligopeptide transport
  Homolog annotation: Hit_ID=Q67VA7; Match level="QueryCoverage=96%, HitCoverage=100%, E-value=0.0, Identity=63%"; Hit description =Putative oligopeptide transporter
  Pfam annotation: Domain name=MFS_1; Domain location=19-484; Score =23.1; E_value=0.0011; Accession=PF07690.7; Description=Major Facilitator Superfamily
  Pfam annotation: Domain name=PTR2; Domain location=82-476; Score =146.0; E_value=1e-40; Accession=PF00854.12; Description=POT family
  Pfam module annotation: Pfam domain module=MFS_1::PTR2; Domain location=19-484::82-476
  Subcellular localization annotation: CTP_CleavageSite=50; ConfidenceScore=5.21e-01
MSGKTTPTKATLSRPCVLVIVMAGVERFANKGVGSNLVTYLTSVVGMSTAAAAKSVIAWNGVSFMLPLVSAVLADSAHWDRYCTIAASSLLYVLGMVALTTWALLGTRMPRSTLFFPLYLMSIGQGGYQPSLQAFGADQLSIGDDDDDGDGDTEPGASSTPEEKAKVKSMFFRWWYFGMCSGSLLGNSTMSYVQDNLGWGLGFAIPCAVMALSVAAFFCCTPLYKRHRQVQQPKGTGIRPSPSSVFNFKSVLGASRKISLPPSRSSDDNGDAISELEYVVVLQEKPLKTDEASESSPDEAAAAPGVAKVILGLLPIWAILLVFAVIFQQPMTFFTKQGMLMNHTIGVGVGSGSLVIPPAMLQSSITVSIILLVPMYDRMIVPLTNAVTGGSDGITVLQRIGVGMVLSVVAMVAAALVESRRLRAEPALLSIFWLLPQYVLLGVSDVFTVVGMQEFFYSQVPASMRTTGIGLYLSVFGVGGFLGASLITLLEMATARPGNARGWFSDDPREARIDNFYWFLALLCFVSFVVFTHLCKYYNDRSASGRAILARDSSSV

SEQ ID NO: 77110 - protein, 289 aa, Zea mays
  Coding DNA Sequence Number=SeqID_33735
  Subcellular localization annotation: CTP_CleavageSite=51; ConfidenceScore=5.56e-01
MSSSSLMRRVFPSSKPPDGGYPPPFRLLVGGTQLRGSRYLSAIVRLQGFSSCDSAAPPRRRSPRMVTTSSWVGKSKPGCDLGPTLSFKDVHHPRWGGGHAEPALYLPRGSAGHPFPRRSGVEALAGPAGGADLDNVGLIDGGHRHLQRVGVVGRAPGGPSCRRAAAAPGRCPTRLGGFEWGSAGGLASPAIGAEAEAAREVLVTDGITATIRAPGHCAGVLILAPRASAWARARLQQRPPTVAVVRTGGGEPLESLGSIGLVVWVPSSLVKETPRPLFDEPRPGVAISV

SEQ ID NO: 77111 - protein, 90 aa, Zea mays
  Coding DNA Sequence Number=SeqID_33736
MAWQWLKVGTLTELTACKLARVQIKQTFNHLEDFITAVSIFYHFIIIEGKQWMDRASRFRSSALKVGMKRPGYNASDSDSDDDANDDANQ

SEQ ID NO: 77112 - protein, 498 aa, Zea mays
  Coding DNA Sequence Number=SeqID_33737
  Gene Ontology: Mol. function=sequence-specific DNA binding; Cellular component=nucleus; Biological process=regulation of transcription, DNA-dependent
  Homolog annotation: Hit_ID=Q6IEM8; Match level="QueryCoverage=85%, HitCoverage=90%, E-value=1e-134, Identity=60%"; Hit description=WRKY transcription factor 53
  Pfam annotation: Domain name=FAR1; Domain location=367-425; Score= -29.9; E_value=0.093; Accession=PF03101.6; Description=FAR1 family
  Pfam annotation: Domain name=WRKY; Domain location=199-258; Score =143.4; E_value=6.5e-40; Accession=PF03106.6; Description=WRKY DNA -binding domain
  Pfam annotation: Domain name=WRKY; Domain location=364-423; Score =153.7; E_value=5.1e-43; Accession=PF03106.6; Description=WRKY DNA -binding domain
  Pfam module annotation: Pfam domain module=FAR1::WRKY::WRKY; Domain location=367-425::199-258::364-423
  Subcellular localization annotation: CTP_CleavageSite=52; ConfidenceScore=5.04e-01
MASSTGSLEHGGFTFTPPPFITSFTELLSSAGDMLGAGADQERSSPRGLFHRGARGVPKFKSAQPPSLPISPPPMSPSSYFAIPPGLSPAELLDSPVLLHSSSNILASPTTGAIPAQRFDWKKAADLIASQSQQDGDSRAAAGGFDDFSFHTATSNAVRAHTTTTSLPSFEEEQQQQVEKAAVPSSNRASGGGNGNTKLEDGYNWRKYGQKQVKGSENPRSYYKCTYHSCSMKKKVERALADGRITQIVYKGAHNHPKPLSTRRNSSGGGAAEELQAGNSSLSAVAAAGCTGPEHSGATAENSSVTFGDDEAENGSQRSDGDEPDAKRWKQEDGENEGSSAGGGGKPVREPRLVVQTMSDIDILDDGFRWRKYGQKVVKGNPNPRSYYKCTTAGCPVRKHVERASHDKRAVITTYEGKHNHDVPVGRGAASRAAAAAAAAGSGALMATGGGQLGYHHQQQQQPYTLEMLSSGSYGGGGGYAAAKDEPRDDLFVDSLLC

SEQ ID NO: 77113 - protein, 150 aa, Zea mays; identical to SEQ ID NO: 75622
  Coding DNA Sequence Number=SeqID_33738

SEQ ID NO: 77114 - protein, 38 aa, Zea mays
  Coding DNA Sequence Number=SeqID_33739
MDRIESRVVAGQRLDDGQEETIWERNNEWVRNRCHFYL

SEQ ID NO: 77115 - protein, 78 aa, Zea mays
  Coding DNA Sequence Number=SeqID_33740
  Subcellular localization annotation: CTP_CleavageSite=50; ConfidenceScore=5.19e-01
MAELPGSMPVPLLSPWPPAAMAASPWRAQEERTPCFAWRRQAARRSSMFEAMHKSESPSFLQTPIGFVYGEPMHVALD

SEQ ID NO: 77116 - protein, 420 aa, Zea mays
  Coding DNA Sequence Number=SeqID_33741
  Subcellular localization annotation: CTP_CleavageSite=62; ConfidenceScore=5.52e-01
MSLRSPHASRLLTFRAPGWGTLAVLPPCRRWRNTTSRKLVPFSHRLASRIFISQPSRIPSPVVTQDGDHQLLGGEKQAGLRPLPLPQLQGCSSSVLGRGVRRVGVGLRAGSGPLLLSAIGGRAFAVRGAGSCRVSGSLVRAASALLPVPPSAAAAGRGFSADEIVGAARGLTSNSTAFCSSSPLEGGRRRGPYGSSIRPEVIAAAVRPLGAEVVVAAAGAGGGEPSVGLLLLRRPSNRGGCSYLRRNPRPLFDEPKLEAAVSARTEAELARKEDFVGRSLAGPSTCGTSAGVESPRPRARLVSSEDSWLRLRGDRLSCLLGPDSWRRPWRWPGRSDDVVLRSGDPPTTLPSEARSDFAEGGVDAEGAAAPPPSTSEPAGSVHLVKVTSEVSVSRRHRSPSARSALATYVYFVVFRIPLSK

SEQ ID NO: 77117 - protein, 297 aa, Zea mays
  Coding DNA Sequence Number=SeqID_33742
MQAPCNCTKGAHPFDFDTSSMEAQAHTSWTGRGDTPKGILLREGNGPRAPLLIRGSKAGPSEGFNSCLRALGLRAHYWSGVRRSAPRKGSTAASGHSGSAPTTDQGFVGWPSKGSAAASDAELGMTLGAANPGGFTPRPRVPSSNGHTFGSPEAQSSPRSNLGQIATPTDRTAGAFNAKGSDSGSAPEDDELRLARPQGSDSASAPEDDELRLARPRARTRARPRKTTNSASPDLGLGLDLDHGSQTRPRPRRSLRLARPRARTDHVTGGAIITLPLASSGYGEQDRRPIWLAPVNK

SEQ ID NO: 77118 - protein, 72 aa, Zea mays
  Coding DNA Sequence Number=SeqID_33743
  Homolog annotation: Hit_ID=A2Y3E1; Match level="QueryCoverage=87%, HitCoverage=60%, E-value=8e-21, Identity=79%"; Hit description =Putative uncharacterized protein
MEGANGVGGSESERKPLSEVVGDCVQRWFQDAYKEARKGDIANQVLVAQMFFSGYGTPKNEYKVPYAVVCAR

SEQ ID NO: 77119 - protein, 152 aa, Zea mays
  Coding DNA Sequence Number=SeqID_33744
MPAINDNGPVVLQLGGDLNHGIRIPGVPSDRPQSASPVESDDTCYITSTGPLSPNLMLMSILPVAPIPQPSAREPWRGGRRAVLMFLLPRHLPSYPYLLGTTVPRRGNSTGGINYSPRSSLRASSHGGISEHHGKYFFLCVGHQIERRTVRP

SEQ ID NO: 77120 - protein, 321 aa, Zea mays
  Coding DNA Sequence Number=SeqID_33745
MAPPVTWSVRALGRERRRLLRGRGRVCLPWSRSSPSPGSGEAEFVVFRGRGRVQTLGSGEAEFVVFRGRGRVRALGRARRSSSSSGAEPEFEPWGWARRSSSPSGAEPESEPWGRARRSSSSSGVEPESEPWVGRGGVHRLPGPSPSLSPRVGRGGASYGARGRTWPLSASLCRGHSSRSDTGGAVFLSGWIRGQATFALNAPAVRSVGVAIWPRLLLGEDWASGEPKDRSAGHACDTSASLWRSKLVLIVAVDPNGYLLHLFHMPEPDGPYPIFLHLFSAFLLRSRWIWTPCHRQGHRGSRYSLPKISRVDPTVCAGESA

SEQ ID NO: 77121 - protein, 63 aa, Zea mays
  Coding DNA Sequence Number=SeqID_33746
MVAYGYLKGKCALGPFLSILVIECQCKYFCVDLCKVVDKVQIMSKGKDQLEMSWLEQPRLCSV

SEQ ID NO: 77122 - protein, 138 aa, Zea mays
  Coding DNA Sequence Number=SeqID_33747
  Subcellular localization annotation: CTP_CleavageSite=37; ConfidenceScore=5.28e-01
MPEARTHSSAPHPTSPAALGNAPSSPEALGPRPAYLAAALGPTPGIPSRRRPPLHRPMRVALARPAPRLGRPWWLGALTRRGKPRSPARTPAPGSAAPGRFNRPLTGSTAPAPTRPPVPRPGLARPYLRSPALAVIIC

SEQ ID NO: 77123 - protein, 93 aa, Zea mays
  Coding DNA Sequence Number=SeqID_33748
MSFNKNLAVVVGFTLALLIASNGEETSSYGGSALCDSTTGVACASDAVCVTICKRRAGQNYVYGHCYKEPSGGRSCLCTVRLRIAVSGNQNKM

SEQ ID NO: 77124 - protein, 63 aa, Zea mays
  Coding DNA Sequence Number=SeqID_33749
  Homolog annotation: Hit_ID=A5CAV1; Match level="QueryCoverage=65%, HitCoverage=5%, E-value=2e-08, Identity=71%"; Hit description =Putative uncharacterized protein
MLSSGRPSQAAAAFTEQQLKQFRAQCLVFLAVRNNMEPKKKHLEIALGEFSEEGVFECHRDNS

SEQ ID NO: 77125 - protein, 93 aa, Zea mays
  Coding DNA Sequence Number=SeqID_33750
MDKIKYEIREGEQEWVNEGRSRLGLKDKDTKNGPWVAHIRLMKSNHTCVIETTSTKTMRSTMASWHLVETHGSTWVMMASFKSRRKLKVAIMA

SEQ ID NO: 77126 - protein, 46 aa, Zea mays
  Coding DNA Sequence Number=SeqID_33751
MEEQAPSETTRRPSGLRCGPSVIDLQGRTVRTRGVDRPRSAERSNG

SEQ ID NO: 77127 - protein, 108 aa, Zea mays
  Coding DNA Sequence Number=SeqID_33752
  Subcellular localization annotation: CTP_CleavageSite=9; ConfidenceScore=5.13e-01
MSGVHRTVRCNRGATATSCQQSPARTFNARQKRAEVRHARAGTPDIEQYMSGVHRTPRRAQKSELQQSESNGIGDVAGAPDMSGVHRTVRCAIRQTASTNGHVWWLGL

SEQ ID NO: 77128 - protein, 234 aa, Zea mays
  Coding DNA Sequence Number=SeqID_33753
  Homolog annotation: Hit_ID=Q7XBE0; Match level="QueryCoverage=50%, HitCoverage=12%, E-value=3e-09, Identity=27%"; Hit description =Putative gypsy-type retrotransposon
MAGGKKGKKGLRPADGKRKRPPSPPSEDFGDSKYSEEVSSDTGLGGSDDSEEASMDSEEGSDSEGDDDEGDGSSTVAATAAAGAMMTATKEAVTAAKAALGAMPFSEFISNPHVQDDNPGHRVRPSSEDIEALIAVYQGLPKEEKQTHLQMQATADEAEVNVVLSMLAGESSEFARIESASAAAGRAFNGDEGACSPRGAHRKRSCQTGYPAMSAKGKKRKKETSAFIRLGVRG

SEQ ID NO: 77129 - protein, 152 aa, Zea mays
  Coding DNA Sequence Number=SeqID_33754
MNTLSSVFLHYRNSGLCRVSDALPRAALGKGGFAESRTRRIPSLGNELVYRVQDTRHRITLGKDMFAECGKGGARQRAVSGRHKVDGREPLPRAEGRHSAKKPLCRVPEKSTRQRRLCRCTHKLRLISGKHIPELSSTILMKYDRKLAIQLF

SEQ ID NO: 77130 - protein, 177 aa, Zea mays
  Coding DNA Sequence Number=SeqID_33755
MCGSGPSLATPIEPPTQQIATSHDKGKHLGEGPRVGHTEAKDFVNLDSWTFGTNNPSEGSEGSMDDNEGYVERDSPGRQLLKRTSGGVLWSGADGPRPKVGRSATWREAAVLSGQARTGRRKIAGGAWISLSGGTPSGRRDPRWCLGSGGDGLNHSRTHQGILHAPHPMVPVQDLWM

SEQ ID NO: 77131 - protein, 120 aa, Zea mays
  Coding DNA Sequence Number=SeqID_33756
METLGYSHVGYGRAAGAETTPRPNGEVVVFESLFAARLRLSCHQFLLGDRSQDIFVAKMVKELEDLVGLVTKREVEKGIELREGEVQSNLVFSQMGLVYEAHKARLKRKKRMPMGVPTQS

SEQ ID NO: 77132 - protein, 75 aa, Zea mays
  Coding DNA Sequence Number=SeqID_33757
MVDLNIILVIGSSAHDNGKATAVDPTTSNHNSECDATSVFPEEVAEEVPEQQLGEGKCPLTHYVLSIYNSLSRTT

SEQ ID NO: 77133 - protein, 42 aa, Zea mays
  Coding DNA Sequence Number=SeqID_33758
  Homolog annotation: Hit_ID=Q8H6I0; Match level="QueryCoverage=78%, HitCoverage=1%, E-value=4e-07, Identity=75%"; Hit description =Putative gag-pol polyprotein
MALIIKSFREILKQRRGLDYKPHSKRVCYQCVKVESRLEGGE

SEQ ID NO: 77134 - protein, 97 aa, Zea mays
  Coding DNA Sequence Number=SeqID_33759
MADESFEREVMGFGYAAMAPLCLNFVSSGWHRSVVDASSSSSGVDRAWRLRAPLRDSAGDQPSVVKVAMADDDDVNPVTGNDDLRATGLVLDDEDDI

SEQ ID NO: 77135 - protein, 597 aa, Zea mays
  Coding DNA Sequence Number=SeqID_33760
  Gene Ontology: Mol. function=identical protein binding; Cellular component=cytoplasm; Biological process=negative regulation of catalytic activity
  Homolog annotation: Hit_ID=Q9LJ20; Match level="QueryCoverage=95%, HitCoverage=72%, E-value=0.0, Identity=73%"; Hit description =Putative subtilisin-like protein
  Pfam annotation: Domain name=PA; Domain location=379-482; Score=68.4; E_value=2.3e-17; Accession=PF02225.13; Description=PA domain
  Pfam annotation: Domain name=Peptidase_S8; Domain location=123-595; Score=15.1; E_value=1.4e-07; Accession=PF00082.13; Description =Subtilase family
  Pfam annotation: Domain name=Subtilisin_N; Domain location=33-114; Score=77.6; E_value=4.1e-20; Accession=PF05922.7; Description =Subtilisin N-terminal Region
  Pfam module annotation: Pfam domain module=PA::Peptidase _S8::Subtilisin_N; Domain location=379-482::123-595::33-114
MVNTGRFVVLVLAYRLLVPLLSGSAEPDHTTKESYVVYMGSPSGGGDPEAVQAAHLQMLSSIVPSDEQGRVALTHSYHHAFEGFAAALTDKEAAALSGHERVVSVFKDRALQLHTTRSWDFLEVQSGLQSGRLGRRASGDVIMGIVDTGVWPESPSFNDAGMRDVPARWRGVCMEGPDFKKSNCNKKLIGARFYGVQPESSASNASSSAVATPAATGSPRDTVGHGTHTASTAAGAVVSDADYYGLARGAAKGGAPSSRVAVYRACSLGGCSASAVLKAIDDAVGDGVDVISISIGMSSVFQSDFLTDPIALGALHAHQRGVLVVCSGGNDGPNPYTVVNSAPWILTVAASSIDRSFQSTIALGNGDVVKGVAINFSNHSLSGEQYPLVFGAQVAAHYAPVAEASNCYPGSLDAQKVAGKIVVCVSTDPMVSRRVKKLVAEGSGARGLVLIDDAEKDVPFVTGGFALSQVGTDAGAQILEYINSTKNPTAVILQTEDVGDFKPAPVVASFSARGPGLTESILKPDLMAPGVSILAATIPSTDSEDVPPGKKQSAYAIKSGTSMACPHVAGAAAFVKSAHPGWTPSMIRSALMTTGTQ

SEQ ID NO: 77136 - protein, 150 aa, Zea mays
  Coding DNA Sequence Number=SeqID_33761
MDPGPHMLCIRFCPQNRMVRTIQTTRTNTNYIPSPRQVPVYPVVVEEIPVDLPRIRVENGVILEDSSEKFLPTPTPLAESLAFAAGSSSSAPPAPALQAPAPRGDDPDDSGDDDEDEEEEEEEEEEEEEEKEENINEEANGEQQDHFVGI

SEQ ID NO: 77137 - protein, 403 aa, Zea mays
  Coding DNA Sequence Number=SeqID_33762
  Gene Ontology: Mol. function=metal ion binding; Cellular component =integral to membrane; Biological process=multicellular organismal development
  Homolog annotation: Hit_ID=A7PTG5; Match level="QueryCoverage=92%, HitCoverage=86%, E-value=2e-71, Identity=40%"; Hit description =Chromosome chr8 scaffold_29, whole genome shotgun sequence
  Pfam annotation: Domain name=zf-DHHC; Domain location=151-215; Score =116.0; E_value=1.1e-31; Accession=PF01529.11; Description=DHHC zinc finger domain
MGEPPPDRRRLYQVWKGSNKFLFGGRLIFGPDAGSLFLSTVLIASPLAGLCFQCVTKLSSSGGSSPLGLPVLLATILLGLSDLAFLFLTSSRDPGIVPRNARPPEQQERGGVDDPVVADDDDIVSASTEWVAMSAANNPHLRLPRNRDVVVAGGHVVRVKYCDTCLLYRPPRASHCSICNNCVRKFDHHCPWVGQCIGLRNYRFFFLFISTSTFLCLYVFVLSWLNIAAQRASHGGSLLRPNHCYACNAIDVHVHPFRSSAQTTYENFRYRYEEKENPYNRGVLANMSEVFCTGMPPSMNNFRAWMELPAPAPEAFDAGPPLASRDKIDLEMGHKGGVQHHTGVPPILQGLHYAQMEKNYSASVHIKDRRSAEAPDPFMIPEAPRHAAAGEAWPPAVFHDDGV

SEQ ID NO: 77138 - protein, 53 aa, Zea mays
  Coding DNA Sequence Number=SeqID_33763
MAPKRKTANSSAAVIPAIDPNSQLPFAEHSAAERQGLSGISLPRAGRLNPSYQ

SEQ ID NO: 77139 - protein, 117 aa, Zea mays
  Coding DNA Sequence Number=SeqID_33764
MQESLAGPPSQQNPPEGLPRNPLQDRHHSKILPRAFPGIPCRTAITAKSSRGPPYTDHSPTALAPFGKVQGVLAQESRDTGNRVPGRRVEYWKPGGLFCKMSRGRRGISHHDPSDPH

SEQ ID NO: 77140 - protein, 113 aa, Zea mays
  Coding DNA Sequence Number=SeqID_33765
  Gene Ontology: Mol. function=zinc ion binding; Cellular component =peroxisomal membrane; Biological process=peroxisome organization and biogenesis
  Homolog annotation: Hit_ID=Q9AV73; Match level="QueryCoverage=74%, HitCoverage=22%, E-value=7e-27, Identity=75%"; Hit description =Putative peroxin
MGRWCKEKVSSRTMKAEDNIIHVPFVNRVFALRRPLLHIVLDYEDEFFALLMGVLESHSLRTTDGSFSESLYGLRRRPVKVVVKRKSPGTESNDKVYGSALRKRQKILSVIFW

SEQ ID NO: 77141 - protein, 282 aa, Zea mays
  Coding DNA Sequence Number=SeqID_33766
  Gene Ontology: Mol. function=transferase activity, transferring glycosyl groups; Biological process=metabolic process
  Homolog annotation: Hit_ID=Q2R1N0; Match level="QueryCoverage=38%, HitCoverage=22%, E-value=3e-27, Identity=58%"; Hit description=UDP -glucoronosyl and UDP-glucosyl transferase family protein, expressed
  Subcellular localization annotation: CTP_CleavageSite=62; ConfidenceScore=5.50e-01
MVRETTFLLGISPSTCSTSSRRLVLATTSFATARDIAVSARCLFMPMNLHMLSLVVHLSELAASLPGEFRDLAEPVRLPGCVPILGPDIVSSLQDRFDPSYVVMLHLVVRCREAAEAILINSFDAIKPEAVEVLRHPAKSGGHQCTLSTQILQAEPNDGGSVDVDFLQREEAERRERGDGGKEVSWGRKKWGGGDLLAAAGWEIWCLRLDRRTSTRQANWRGSARARDGGSARSQDLAGAADGIDDGAGQEIARRSRGAVPLSAREWGRTGGGTVDAHVTSL

SEQ ID NO: 77142 - protein, 598 aa, Zea mays
  Coding DNA Sequence Number=SeqID_33767
  Gene Ontology: Mol. function=molecular_function; Cellular component =integral to membrane; Biological process=Golgi organization and biogenesis
  Homolog annotation: Hit_ID=A3AMH7; Match level="QueryCoverage=87%, HitCoverage=65%, E-value=0.0, Identity=68%"; Hit description =Putative uncharacterized protein
  Pfam annotation: Domain name=Vps51; Domain location=60-146; Score =105.1; E_value=2.2e-28; Accession=PF08700.2; Description=Vps51Vps67
MATAGGAAPAAMDEKARRTRDLLASFYNTDPSAAAGGAAAPAFLARPSPTAAPASPLDSINSTSFDPDIYMNVLVQQSNLEGLLQRHVKMATEIKNLDTDLQMLVYENYNKFISATDTIKRMKTNIVGMEANMEQLLTKITSVQSRSDTVNTSLFDKRENIEKLHRTRNLLRKVQFIYDLPTRLNKCIKTEAYADAVRFFTGAKPIFEAYGDTSFRDCKKASEEAMDVVIQHLQTKLYSDSEPIEARAEAVVLLKQLKFPVDNLKSNLLEKLEECLLNFQNETTHASIGDISKTFRAYLIIFPDSERRLIELAQALFLNRYETVRENLKKRIPSTDLLAMLRSLWEDATIIDEVISEAALPAFSLEVSPPPTIVYSAFFSPELTSSGIEVQMCWYKYKEALVRTHSTSNEKLEESQLQTAMETSKIKVSQGCIDLLQEFHHLVDGNIELLVKLRDLIIDWVQEGFQEFFQKLDGHFHVLSGRSKTNLQEPTMDSMQTDKTPTVLVLMLAQLCVYIEQTTVPKVTERFYLTIKYGGLFSLFVINCCMELNNYIKIEKKASRVIVSLEILGLLVKKKSVPQYPWRYSTRGYCSQGGGYAG

SEQ ID NO: 77143 - protein, 148 aa, Zea mays
  Coding DNA Sequence Number=SeqID_33768
MGSRGFGASRKGSKGRLESVSDYCVCPVVVVRYPDDVADVGGDASGVTDELHTVPEDEPVYHDAPEVQKDKLVYANMKGKCALGPFLSILVIECKHKCLNVKMCSWLNKVQITSKGTPRRMEEITKHSYNLSKHQDIDLAHSIHCDSI

SEQ ID NO: 77144 - protein, 100 aa, Zea mays
  Coding DNA Sequence Number=SeqID_33769
MAAPRGSIEGRGIVGLYTQVNSVSGRTAEFGMTAQAASFGAGNKTASPPPKGGEPTVNRQSAKVQEEVAQVVCARKTGDDVGDVAEVEVERKRPGGCLVC

SEQ ID NO: 77145 - protein, 97 aa, Zea mays
  Coding DNA Sequence Number=SeqID_33770
MAAAEWSTRGWVLHVLRRSFLGAEPLTRLTSSKAVAKLGSKRPWVDRSGGGLLQEFRGKEEGVLERPTKVIEGITTVPHRRVAIAKTTFDVHRCRSR

SEQ ID NO: 77146 - protein, 134 aa, Zea mays
  Coding DNA Sequence Number=SeqID_33771
MEAIRALRYLVHGRRSKRLRNPKPGVKKKTCEVKVYRVEKIYEKLGEEWERGYFEIETSIRCDLLKGSFIPLRSSLRVDGDKSDDEEEHDDSNDEYTSSQGKKRPMMWVRKKFASSTPISAKKTSALDEIVEKK

SEQ ID NO: 77147 - protein, 216 aa, Zea mays
  Coding DNA Sequence Number=SeqID_33772
  Subcellular localization annotation: CTP_CleavageSite=50; ConfidenceScore=5.27e-01
MSSSSSSSPSAVTASSNAPSLEKTISDPKATVELLPGHTVEFGTSRIYSRRMQEMQRLGYFVNGVGHAPGGKEVLEPEGELVVFEAFFTAGLWLPAHGFLVEVLRRRSTPDSPVLQLRAPVVGLSAQTVWVSHQTVRCTPDRVPVTRPAQADLGLLGKGKENFGVVESVTSLLCQSLTGFNDGGSDFDSWSSGSEGLLSPFARMDNESSEEDLDFL

SEQ ID NO: 77148 - protein, 103 aa, Zea mays
  Coding DNA Sequence Number=SeqID_33773
MDKRSAAASRNSVWEKMEKNGRWRVGEKPWKKWRRGNRVPAPRKKADVGELLLPGMGKGVEEKGEHVLPFIEPSSGLGRLHQQVADLLACRAPALYNQSKAQV

SEQ ID NO: 77149 - protein, 104 aa, Zea mays
  Coding DNA Sequence Number=SeqID_33774
MRRPSSEVEVESEPWGRARRRPSSEVEVESEPWGRARRSFLWRPKLDLAAVSLTLAGGTAVGAGQATLFSCQLCADGGYQLRLGVLGVPLIMAPDKTVIPKRQK

SEQ ID NO: 77150 - protein, 290 aa, Zea mays
  Coding DNA Sequence Number=SeqID_33775
  Gene Ontology: Mol. function=3-methyl-2-oxobutanoate hydroxymethyltran sferase activity; Cellular component=cytoplasm; Biological process =pantothenate biosynthetic process
  Homolog annotation: Hit_ID=A2WM98; Match level="QueryCoverage=31%, HitCoverage=24%, E-value=1e-24, Identity=70%"; Hit description =Putative uncharacterized protein
  Pfam annotation: Domain name=Pantoate_transf; Domain location=159 -290; Score=-166.5; E_value=0.0018; Accession=PF02548.6; Description =Ketopantoate hydroxymethyltransferase
MATDVAGITRRGGGGDVAMSEHGCRRWQPARGARRRRSRGDRGRGEPSPIHSASSSLDGSGFKYPFHSHIVEIHGVVAWTRRGMVLTFQSLTYEDGVLDQRGRVHGTASGAALELEKGCVVTAEGTTQVSGGGVPLHNPPTPPLPSNHVGAEVYYLPYVTDAEYYTTGGKKISATSIYFESLPMSVTKGYINLIFVPSSSSAAAVCLILVLKRRVEWMQSKLEGCAPSRITAAKAIVKDGIVVMGHVGLTPQAITVLGGFRPQGKTVDSVVKVVETTLAMKETGCFSVVY

SEQ ID NO: 77151 - protein, 340 aa, Zea mays
  Coding DNA Sequence Number=SeqID_33776
MHRVLPPSEPPDGERPCCFRLAVVGGAQLRGSWYLSAIARLQGFSSCSPATSPRRWSPKTVTTSLMVGRSKPGYGLCLALSFKDLHHPCWGGGRAEPELYLPYGPAGHLLLQHSGERALTGLAGGGLRHRGADRPQASSAPACPVRWLSWLWHSFRCHLPPLGGVRLSVRRTGGCCAARTGGPPKTSRAARAAFVFLGCPALAPMAAVVGAEVVVAEEVLVADEIAATICASGLWLFGFDSLSSPLEWGRGRGPYRSSVCPEVIAAAVWPPEAEVVVAAAGVGGGEPPGFCRPAGPPINPRPLCNEPEPEAAVSAWTEAESAGEETSSAQEQGTSQAEEA

SEQ ID NO: 77152 - protein, 496 aa, Zea mays
  Coding DNA Sequence Number=SeqID_33777
  Pfam annotation: Domain name=DUF1639; Domain location=285-331; Score =9.2; E_value=0.0038; Accession=PF07797.5; Description=Protein of unknown function (DUF1639)
MDPCASRAPDCVACQRLMMEREDPDRAIHRGKRRRSGSGRAHLKGGIGDQRWSTLTERMVTADDEGHQQLSLVLGFARGLRMAAKGVEMGRRRAGGRRPRAMGETERDGSRSRRGVHIVHHVLPRITASAIPPRSSSSRPSGRLPSAATVLRHRYVAPTPSPRDARDIRGHRARPSPTPRATPDNHPTVKITVSMDPLTRESPTSRLTHPKPDKGGSPHISDYFAVQTHDFLVHPPPLWLPPDLAFARIDECCNVGDGGMTSEAAEGAPVPTMEAKKLASSIARSKQEITEDFSLIGGTSPPRRPKKRQGATTAQYSASTGSHRTLSPPRFRICRWRSRNFTLTPPHRADADGRDPPRPAPAILVLPRTPLHPSCPICLLDRGVPCPPRTTAALRPRQPSGPPMLGFALAASPAREVDEDGSKDASAAPLRAPPMAAAGLCPWVASRPTLAAFELRRPQSWQGAADAAMDMGSQSPLLAAEGERPGAATRSSSIQI

SEQ ID NO: 77153 - protein, 163 aa, Zea mays
  Coding DNA Sequence Number=SeqID_33778
MRERGRGIEDFDLYHGLRSTPALLTTGQSLLSVVYLCGNLGPECIIYAMLLFHRLLMFDPVNQVCHQEQEFNSAFCCILDGLCGEDQAYFPYLTLFSINWKGNPTKSFELIIQRELSRRMFSCRGVDASTGHVGLYMATLGNCFEIDEWDPIEFSIRAKHFGQ

SEQ ID NO: 77154 - protein, 625 aa, Zea mays
  Coding DNA Sequence Number=SeqID_33779
  Homolog annotation: Hit_ID=Q6JAD6; Match level="QueryCoverage=95%, HitCoverage=82%, E-value=0.0, Identity=68%"; Hit description =Putative uncharacterized protein
MPRTKNASASGGGDDEDPRRPFRQVKGKTVYLEQLEGRKKRRSDREARAAAAAAAAAAQAALGDQPDVPSDQIAFCARRLTSRSRSSTHTSASTPPPTLPAPITPIAPSTSTAIPTTSTTPASSASPAPAPASAPPVPPPRFRERDETEVRPLASDPRLFDLQRATAARVRRFRYVPVESWLPAQRDPAAGVLFSTRIQESFFRAQMSAQIALRVHRLLDLPAFLLAAGAEFEAHLTYLPGLLTLLTISGRYVEEWVRVFYASVWIDPDHHWMRFRFEREDVTITASQIRQLFGFPESSTRLHSLCYGTSDPPRRPHGGVAPGTAHVAALFRPPFTDGSRCSPADFTTAAKYLFELIRRTLLPRMGYREATTHIQLWLLGALVSHSEFDVVDFLICEIEDTVLDGIRARRQLPYAHYLCHIFAQLIQPPRFQSTLEASRLVFGSYRPAPEIPVPASASVFDSQAEDAALRQFDTQGTAAAADDDDDDFGVPPPPPPPMPPRSHDHEARSSSAAPPHPQALDPALASILQTLTQQQQTLTQQQQTLTQQQALLAAEQARLSDRMLSMFQSMQDRQDALQQQLLQDRAENRAFMTLMLQHSESSKQTTLTKLVGLSSITKKGEIESI

SEQ ID NO: 77155 - protein, 230 aa, Zea mays
  Coding DNA Sequence Number=SeqID_33780
  Homolog annotation: Hit_ID=Q6QP51; Match level="QueryCoverage=87%, HitCoverage=89%, E-value=7e-16, Identity=34%"; Hit description =Putative growth-regulating factor 1
MAERDWERGYSERDPSPRRKRAPSPPTDQRFEGWPLGRVRQPPQSTQAPRPLLVRCSKAGPSEGFDSRLRPLGLRAHYWSEEAPPRPTPELGLNLDAGRRTPPRPTPELGLSLDLGRRTPPRPTPGLGLSLDLGRRTLPRPTPGLGLSLDLGRRSLPRPTPGLGLSLDLGRRTPPRPTLGLGLSLDLGRRSPPRPTPGLGLSLDLRGASALPDLGLGATTSQGVPSLPYS

SEQ ID NO: 77156 - protein, 172 aa, Zea mays
  Coding DNA Sequence Number=SeqID_33781
  Subcellular localization annotation: CTP_CleavageSite=53; ConfidenceScore=5.24e-01
MGTLPGGLFASGKRLGKGAKGSQQTNKKTKKGFKQREQKTAEVCPGLAHRTARCTREPNSKLLTFENSGSRSAIIHRTVRCSIGLSGAPAEQRLLRANGRLQRAVNALQCTQKSEQSQKEHWTLYSDCLVHHRTVRWPSCQKLQRSEPNGRVTWLETPIMRWSLWGLSVPFD

SEQ ID NO: 77157 - protein, 199 aa, Zea mays
  Coding DNA Sequence Number=SeqID_33782
  Gene Ontology: Mol. function=carboxyl- or carbamoyltransferase activity; Cellular component=ornithine carbamoyltransferase complex; Biological process=amino acid metabolic process
  Homolog annotation: Hit_ID=Q8SA97; Match level="QueryCoverage=61%, HitCoverage=19%, E-value=8e-09, Identity=35%"; Hit description =Ornithine carbamoyltransferase
  Subcellular localization annotation: CTP_CleavageSite=46; ConfidenceScore=5.14e-01
MAPPVDVVGPRPRLGDAKAPPRSRSSPSSVAEVESEPLGRARRRPLAEARAEFESWGRAKRSSSSSGAEPKSEPLGRAERNSSSSGAEPKSEPWVGRNGVCRLPGLSPSPSPGSGGAEFAIFRGLARVRALGRAERSSSSSGVEPKSEPWVGQSGIRRLLGLSPSPSPGSGGTEFAVFRGLARVRALGRAERSSPSSGA

SEQ ID NO: 77158 - protein, 457 aa, Zea mays
  Coding DNA Sequence Number=SeqID_33783
  Gene Ontology: Mol. function=rRNA (adenine-N6,N6-)-dimethyltransferase activity; Cellular component=nucleus; Biological process=rRNA modification
  Homolog annotation: Hit_ID=A5AL25; Match level="QueryCoverage=68%, HitCoverage=82%, E-value=7e-78, Identity=51%"; Hit description =Putative uncharacterized protein
  Pfam annotation: Domain name=MTS; Domain location=141-304; Score= -86.1; E_value=0.025; Accession=PF05175.5; Description=Methyltransfera se small domain
  Pfam annotation: Domain name=Methyltransf_11; Domain location=175 -258; Score=18.6; E_value=0.0015; Accession=PF08241.3; Description =Methyltransferase domain
  Pfam annotation: Domain name=Methyltransf_12; Domain location=175 -287; Score=6.9; E_value=0.09; Accession=PF08242.3; Description =Methyltransferase domain
  Pfam annotation: Domain name=RrnaAD; Domain location=141-390; Score =222.0; E_value=1.4e-63; Accession=PF00398.11; Description=Ribosomal RNA adenine dimethylase
  Pfam module annotation: Pfam domain module=MTS::Methyltransf _11::Methyltransf_12::RrnaAD; Domain location=141-304::175-258::175 -287::141-390
MGVEETRPNRATASEGGSQSQQLPPGPLHAPYRIARRPGSNQRGKRRGESLTQANTTKLRVGRPWRADLVLPIHAGDIERLCSRTSRPTKQLCSRDMKRAVSALWARRAVRQAYLYTPTAATATSSSPEFGASTSEAWDGRFRLHKPRGQHLLTNPRVLDAIARHAAISPGDAVLEVGPGTGNLTARLLASQAARVTAVEIDPRMVEAVTARAAALGLAHKFKVIAGDAVEVEFPEFDVCVANIPYGISSPLIAKLLFGPYRFRTATLLLQKEFARRLVAAPGDGEYNRLAANVRLVADVRLLMDVSKRDFVPMPRVDSSLVEIRPRGTVPGVDVSEWLAFTRVCFGQKNKTLAAIFKQKRMVVELLRRSLRTERCAGGVSLGPLEVDDSGEDDCGGNDDGSNRVVGFSEEEVAAFKEKVAGALDTAELAGKRPSKVSNDELKRLLRLFNDRGVRFQ

SEQ ID NO: 77159 - protein, 414 aa, Zea mays
  Coding DNA Sequence Number=SeqID_33784
  Gene Ontology: Mol. function=oxidoreductase activity, acting on sulfur group of donors, disulfide as acceptor; Cellular component =chloroplast; Biological process=sulfate reduction, APS pathway
  Homolog annotation: Hit_ID=Q5EUC8; Match level="QueryCoverage=87%, HitCoverage=69%, E-value=1e-173, Identity=84%"; Hit description =Adenosine 5'-phosphosulfate reductase 2
  Pfam annotation: Domain name=PAPS_reduct; Domain location=1-188; Score=143.4; E_value=6.3e-40; Accession=PF01507.10; Description =Phosphoadenosine phosphosulfate reductase family
  Pfam annotation: Domain name=Thioredoxin; Domain location=249-360; Score=19.3; E_value=5.6e-06; Accession=PF00085.11; Description =Thioredoxin
  Pfam module annotation: Pfam domain module=PAPS_reduct::Thioredoxin; Domain location=1-188::249-360
LDTGRLNPETYQLFDRVEKHYGIRIEYMFPDASEVQELVRTKGLFSFYEDGHQECCRVRKVRPLRRALRGLRAWITGQRKDQSPGTRASIPLVQVDPSFEGLDGGAGSLVKWNPVANVDGKDIWTFLRTMDVPVNALHAQVILKLQHFFDSFLDVLAIDGSLLYHLWPCPSSLDQGYVSIGCEPCTRPVLPGQHEREGRWWWEDAKAKECGLHKGNIDKDGQAAAAAAAPRTANGNGSAGAPDIFESPAVVSLTRAGVENLLRLESRAEPWLVVLYAPWCPFCQAMEASYVELAERLAGSGGVKVARFRADGEQKPFAQAELQLQSFPTVLLFPSRTARPIKYPSEKRDVDSLLAFVNSLRALGEFPRARSSSLEQPGHRTVSGAPQAGTGAARPYVRFDLIAYVMGHKRRVSA

SEQ ID NO: 77160 - protein, 462 aa, Zea mays
  Coding DNA Sequence Number=SeqID_33785
  Homolog annotation: Hit_ID=Q6J9V9; Match level="QueryCoverage=26%, HitCoverage=43%, E-value=6e-10, Identity=41%"; Hit description =Putative uncharacterized protein
MTASKKGPGKGDTPKRILLREGNRPRASLLIRGSKAGPSEGFNGRLRALGFRAHYWSEVRRPAPRKGSTAASGHSGSVPTTDQGFVGWPSKGSQSPQTQSERERSCNGIPSEGGIEPSDTVERGPGLADHPQLTGNTMFGALRGQHGAFPPPPCGKVTQGPDPGGSMSRPKTPSSNEHTLGSPETQSSPRSNLGQLATPTDQIAGAFNAKGSDSGSAPEDGELRSARHQGSDSGSAPEDDGLRFARPQGSNSGSAPEDGELRSARPLGLGFGLSPGRRRTPLRPTLGLELGLGPGRRRTPLRPTPGLGLGLSPGRWRTPLRPTPGLGLGLGPGRRRTPLRPTPGLGLGLSLGRRRTPLRPTPGLRLGLSPEGRRTPLRPTLGLRLSPGISRRSPPRPTRGLGLDLDLGRQTRPQPRRSLHLAQPRARTDHVNRRRHHYPAPSLTQATGNKTGVPSGLTPPDK

SEQ ID NO: 77161 - protein, 134 aa, Zea mays
  Coding DNA Sequence Number=SeqID_33786
MAYRRRGRFDEGWGWLQEVLAVTTRYDSTMVILRAQGALRDAKESTYARNRRITHRGARSTFAGGRLKSGDLDPVSPPRQSSIPRSGSFTEARRVYSEGWTGLGMALLAGLRWWGLGGRWHAVCRANPGDLLLR

SEQ ID NO: 77162 - protein, 119 aa, Zea mays
  Coding DNA Sequence Number=SeqID_33787
MNRVGELDPGTALTESIHGGERVMRSAVGSMGAKSAIGPWRGTRLILGVFQGDAWHRRVEGVLGATLIAHRSAAVAVGTLLAVCRPTRYMFILMFGVMLILPIPFLSVLLHLAVRTRVI

SEQ ID NO: 77163 - protein, 160 aa, Zea mays
  Coding DNA Sequence Number=SeqID_33788
  Subcellular localization annotation: CTP_CleavageSite=38; ConfidenceScore=5.26e-01
MALSPSSLRKGDEGAYDKSRENSAACPAPTAVPPARVRLTTTKSRLRRNRRSLPRPTQGLGPRLGLRRRSPPRPTLGLGPHLGLRRWTPPRPTPRLGLDLDVGRWSPPRPTLGPGLNLDLGRNRVLARPQPWPHEESPPRPTLGSDRPHHRGDHHYPTPS

SEQ ID NO: 77164 - protein, 99 aa, Zea mays
  Coding DNA Sequence Number=SeqID_33789
MTVPNTPNAIEGKGPRQRPTVADSPLPSHLGDGGSILCARVCVYGIYAGYIGEESMVAGQLGVFALEGRFPSRSWKTGGDLPWCAAETSEVLQISDART

SEQ ID NO: 77165 - protein, 64 aa, Zea mays
  Coding DNA Sequence Number=SeqID_33790
MSGEAETFSRGLRSGEAELPVAPEADLGGGSLEDMVAGVTWPSILPPGWTVEWDPTSAEEEHEE

SEQ ID NO: 77166 - protein, 208 aa, Zea mays
  Coding DNA Sequence Number=SeqID_33791
  Homolog annotation: Hit_ID=Q6J9V9; Match level="QueryCoverage=61%, HitCoverage=44%, E-value=7e-54, Identity=83%"; Hit description =Putative uncharacterized protein
MYCDAYPDLSWRVQPPARTAIRTFFTSVDAVKNSAEKRWVHRDRERGYFERILFSEGNGPQALLLIRGSKVAPCEVRQPPQSTRAPSPLLIRGSKAGPSEVFNSRPRACRVRDDPGYVRYMAEARATLPRYPRTFQRLAETICNGIPPEGGTEPSDPIKWVRVQRITCRKTTLFTVAELPELFQLKCLSPALEARPHLNGNNPSIPQI

SEQ ID NO: 77167 - protein, 652 aa, Zea mays
  Coding DNA Sequence Number=SeqID_33792
  Gene Ontology: Mol. function=nucleotide binding; Cellular component =cytoskeleton; Biological process=cell division
  Homolog annotation: Hit_ID=A7QU90; Match level="QueryCoverage=100%, HitCoverage=100%, E-value=0.0, Identity=74%"; Hit description =Chromosome chr2 scaffold_176, whole genome shotgun sequence
  Pfam annotation: Domain name=Dynamin_M; Domain location=264-550; Score=356.3; E_value=5.2e-104; Accession=PF01031.11; Description =Dynamin central region
  Pfam annotation: Domain name=Dynamin_N; Domain location=80-255; Score= 111.4; E_value=2.8e-30; Accession=PF00350.14; Description=Dynamin family
  Pfam annotation: Domain name=GED; Domain location=555-648; Score =137.9; E_value=3e-38; Accession=PF02212.9; Description=Dynamin GTPase effector domain
  Pfam module annotation: Pfam domain module=Dynamin_M::Dynamin_N::GED; Domain location=264-550::80-255::555-648
MDNLITLVNKLQRACTALGDHGEESALPTLWDSLPAIAVVGGQVPFFPSRARFFALVLIGSGAVAPASWVWISRVAGGTARSSGKSSVLESVVGKDFLPRGSGIVTRRPLVLQLHRIDGDREYAEFMHLPRKRFTDFCCILAAAVRKEIADETDRETGRSKQISTVPIHLSIFSPHGKMQTLEGYIVTVALSHLNCPLPIVNLTLIDLPGLTKVAVDGQPESIVHDIENMVRSYIEKKCTVVDSGERTFGVLTKIDLMDKGTDAVDILEGRSYRLQTPWVGVVNRSQQDINKNVDMIAARRREREYFASTPEYKHMASRMGSEYLGKMLSKHLEQVIKSRIPGIQSLITKTIAELETELNRLGKPIANDAGGKLYTIMEICRMFDGIYKEHLDGVRPGGEKVYHVFDNQFPVAIKRLQFDKQLSMENVRKLITEADGYQPHLIAPEQGYRRLIESCLISIRGPAEAAVDAVHAILKDLVRKAINETHELKQFPTLRVEVGNAAFESLDRMRDESKKNTLKLVDMECSYLTVDFFRKLPQDVEKGGNPSHSIFDRYNDSYLRRIGQTVLSYVNMVCSTLRNSIPKSIVYCQVREAKRSLLDHFFTELGAREMKQLSKLLDEDPAVMERRTNLAKRLELYRSAQSEIDAVAWSK

SEQ ID NO: 77168 - protein, 124 aa, Zea mays
  Coding DNA Sequence Number=SeqID_33793
  Homolog annotation: Hit_ID=A2Y7A7; Match level="QueryCoverage=83%, HitCoverage=29%, E-value=7e-46, Identity=73%"; Hit description =Putative uncharacterized protein
LTCGLFTKNSMEVPCPDSAAGLYIRTRDNQVVKVVFDEDQLAYQIGETTEILSRGYLCATPHCVQAPSSENASNVDRSTFALFMQPDWNEKLKFPSEIPYHQENSRFLELSEVPAAFLMITAQH

SEQ ID NO: 77169 - protein, 459 aa, Zea mays
  Coding DNA Sequence Number=SeqID_33794
  Gene Ontology: Mol. function=oxidoreductase activity; Cellular component=nucleus; Biological process=electron transport
  Homolog annotation: Hit_ID=Q1EPI3; Match level="QueryCoverage=53%, HitCoverage=45%, E-value=4e-99, Identity=71%"; Hit description=Amine oxidase family protein
  Pfam annotation: Domain name=Amino_oxidase; Domain location=113-452; Score=-11.8; E_value=3.6e-05; Accession=PF01593.15; Description =Flavin containing amine oxidoreductase
  Pfam annotation: Domain name=DAO; Domain location=105-444; Score= -42.7; E_value=0.0069; Accession=PF01266.15; Description=FAD dependent oxidoreductase
  Pfam module annotation: Pfam domain module=Amino_oxidase::DAO; Domain location=113-452::105-444
MYSAVVIKSVYVWAGYNVFAFLSIVETLSTRSKLSIGVVCPYNAQVRAIQEKVGKACRRNDYFSVKVKSVDGFQGAEEDIIIISTIRSNGAGSCGENGRKPHTPSAIVIGGGFTGLAAADALRNASFQVILLESRDRIGGRVHTDYSFGFPVDLGASWLHGVCEENPLAPIIGRLGLPLYRTSGDDSVLFDHDLESYALYDTNGRQVPQELVEKIGKVFETILEETGKLREGTNEDMSIAKAIAIVMDRNPQLRQEGIAHEVLQWYLCRMEGWFATDADSISLQGCDQEVLLPGGHGLMVRGYRPVINTLARGLDIRLNHKVLEIVRHRNKVEVTWSLFPHLGKRAEQGKRAAAAVAMRTKLTGELRLGGSIVLLQKTFSPDSRCMLEAGDQSEMSRAMEVGQHAPEVEAAEASDEDVEAYIGKATGCTHLCSLRCINETVAKHGHTTSQVLKTLETNS

SEQ ID NO: 77170 - protein, 32 aa, Zea mays
  Coding DNA Sequence Number=SeqID_33795
MAHVVEVEAYIVFILGIFGLVSEREKLKRYEG

SEQ ID NO: 77171 - protein, 173 aa, Zea mays
  Coding DNA Sequence Number=SeqID_33796
  Homolog annotation: Hit_ID=Q7Y139; Match level="QueryCoverage=27%, HitCoverage=37%, E-value=4e-13, Identity=80%"; Hit description =Putative uncharacterized protein OSJNBa0078D06.29
MGALTLAPQLSSAPKGKIAGKKVQVDERFTEITKIVLRLYPLYLGVFNKYENKSSRILIELDDQKVAWTIWKKIQLESSVLDSKSAMRVTVLSHSPHLLFFTREKELAVVKINPVDVEIIASELELDKKIAERALCEHKGDVVAAVSFIDSWVLSLSPMRRAFLKAMRKSNNH

SEQ ID NO: 77172 - protein, 378 aa, Zea mays
  Coding DNA Sequence Number=SeqID_33797
  Homolog annotation: Hit_ID=A2YV67; Match level="QueryCoverage=47%, HitCoverage=36%, E-value=7e-27, Identity=45%"; Hit description =Putative uncharacterized protein
MEPGGGTAVGAVGSLLTSSCFLGVAQAALSFCPADYSKCVHGARFCPPPHTPRVKGKGADLVKSTKVSKTGAKSEVVVAVGKAKKPPAANSTADACAKPTKSGKKASMLADAKAKANATIISEESAVEVEVEDVVLTKQAEEGTDDLISEFRDLPSRLQETLIPDLARLSQHSKAYLSAANAGITDGVRPVLGGLWATMATSAASVAVLLLLPLFMLTALVRCMGPYLPLLHHALLLVQAYLTIYFAMLALTVAATGLAPLRFDHVASLLPTPGRRLRNHSASWPTSRSRWWTSSPSSRAPPPPRTMATGHRQGPRARADGGRGVHYYATVFHRAAAGAAPRANWLHNRVRLRACREDEKGLPLGHRPRRRGVEEELS

SEQ ID NO: 77173 - protein, 243 aa, Zea mays
  Coding DNA Sequence Number=SeqID_33798
MGEIRRLSASSLEERNSVGVGTFQPSFGFKDFHQLARLYPPPPRRQSPKTATTSPWVGRSKPGCDLGPTLSFKDVHHPRWGGGRAEPELYLLRGFVGHPLPRCSRERALAGPAGGPDFDNVGLVNGGRRQPQRVELVGLAPGGPSCWKAAAAPAAFVFWGGPAFAPVWRLRAEVGAPLVREDLSGDLPGAAPVVGAKVEAAREVPVADGTTATIRASGLRLFVLVLAPRAPTWARARLQQHPP

SEQ ID NO: 77174 - protein, 383 aa, Zea mays
  Coding DNA Sequence Number=SeqID_33799
  Subcellular localization annotation: CTP_CleavageSite=51; ConfidenceScore=5.35e-01
MDAFQGGHPPFKGGSPYSRPQPSRAESSPTHSKVLPYGAGLGPTRHASRLRAEEAKPPRAVHTTAQRLQATLHFCPDQRAKGWAAMQAACNRAKWARFSDSQYAQPRGPGPRVMQLARQLLRACSCTATCATTAPPRLRNQYRDSRRPSARLSSASLARRRSGRRFAFAIMTAPVKAPSLPTDQRFEGWPPEGFDSRLRSRGPYTHYWSERLGGCSRKPGFGRTVDSVNIPDRELGTRPYTRATASSHEGTTRPAEVLREALRPRRSETTPPRPRGLHPAGALARTHRNKTQPRKAGPLAKSATKASKASANTPFEARGLLSRTIIRGTLKAPNSQLSEADRQSGPVGGTIGSSASPDPGLGLGLSPGRRRTPLRPTQGSDSG

SEQ ID NO: 77175 - protein, 190 aa, Zea mays
  Coding DNA Sequence Number=SeqID_33800
  Gene Ontology: Mol. function=kinase activity; Cellular component =ornithine carbamoyltransferase complex; Biological process=amino acid metabolic process
  Homolog annotation: Hit_ID=Q6QP54; Match level="QueryCoverage=56%, HitCoverage=38%, E-value=7e-33, Identity=66%"; Hit description =Putative kinase
MNSESDPVYRRHIEHGTISELGNGGAVPGVPVPTSECRLVPQPRWVEHEGEREGGRARRPETGVREVGIPRPSCSSRAQVGGLRAAVVTEHAGRHHCLSGGASQMGRRSGSLWPESARGRVMMAPPADVAGLRPRLGNAEAPPKPRSSLSSVAEAESEPLGRARRRSSAEARAESEPWGRAKRSSSSSGT

SEQ ID NO: 77176 - protein, 199 aa, Zea mays
  Coding DNA Sequence Number=SeqID_33801
  Pfam annotation: Domain name=IQ; Domain location=115-135; Score=27.0; E_value=7.2e-05; Accession=PF00612.18; Description=IQ calmodulin -binding motif
  Pfam annotation: Domain name=IQ; Domain location=73-93; Score=25.1; E_ value=0.00025; Accession=PF00612.18; Description=IQ calmodulin -binding motif
  Pfam module annotation: Pfam domain module=IQ::IQ; Domain location =115-135::73-93
  Subcellular localization annotation: CTP_CleavageSite=50; ConfidenceScore=5.40e-01
MDRRSMTPGISSRLSSPPPTAHSSPPPAAAPSATTTPSHPPSPTPDAFTRLEEKWDQFVVMFHRYKEKTEKELQAAVRLQAAARGFLARRRVQSLRGEKHLAVASRATPWSSSHEQAVVRLQAAVRGFLVRRAVRKLHLLVSSSLHQLAACAPNHQVSSILFEPPAEVEIWKLEDELVLKGGDVMGIIGSERQQPGWDK

SEQ ID NO: 77177 - protein, 167 aa, Zea mays
  Coding DNA Sequence Number=SeqID_33802
MEDADGGRGWKVRGQIPGSATSSSIMDADGMSEISAQKEVPSDLEELYLQRQNPRGALKLFFPVFERGVCKKEGIRRLVDPDRTAGHRRGFAATHRRLPQLLRPSYLYGVSRLLLGAFVLRRYLRTQNYEHKVRSGRSLNQTKDGLITKLHEGWCTAEAVRREASSR

SEQ ID NO: 77178 - protein, 215 aa, Zea mays
  Coding DNA Sequence Number=SeqID_33803
  Homolog annotation: Hit_ID=A2Y7A7; Match level="QueryCoverage=98%, HitCoverage=58%, E-value=9e-60, Identity=52%"; Hit description =Putative uncharacterized protein
  Subcellular localization annotation: CTP_CleavageSite=49; ConfidenceScore=5.50e-01
MVLEVGTAVGIRTTSTWAAGPAARRRSRGQVVSFALAPASSRRVRHRCRAMQQHEEEQERPPTVRAVTIPFADLRVIFPGVECCRLGREGMIANLPEEVKKQLEDPDSRYNFGWSHGKEKLESGKLDTFKGSFYANPVLDVPTTDDVLISFPFFVAFKDLGKLMMEVGLMLAHHCDRYVMRQGVGSYDGDSLEQTIARSRCHKGRLLYYFPRQFR

SEQ ID NO: 77179 - protein, 154 aa, Zea mays
  Coding DNA Sequence Number=SeqID_33804
MRGSMKGLCPVGGRERRLKEKAADHVGGGANHALGSAILSRGVGTRETQLDAVSEEERTGGVVVELAAIVALQGTDRAPELGGYPGEEVSEGAGEAKDRRRPEITVDKIKGLNSPRRGSGKRKTGVTTELTSMTEVLRRAPEYRICLSGRQART

SEQ ID NO: 77180 - protein, 109 aa, Zea mays
  Coding DNA Sequence Number=SeqID_33805
MAVLAIAPPPVYGYNEEWGGGDYYNSGMRHGSPTLGVVEALDATRATAVTAEEARTAVREMEKKAATTAKLAANTMDKVGFVVVVVASAVAGEANALDLVAHRYLAVNL

SEQ ID NO: 77181 - protein, 188 aa, Zea mays
  Coding DNA Sequence Number=SeqID_33806
  Subcellular localization annotation: CTP_CleavageSite=26; ConfidenceScore=5.26e-01
MTNLSCTKERSWHPTALVARVPSPALASKSRQSPQSRWALNLAEHEGRGGVGTFSLSGNSLIIDILLEQVHLDRDTLFVSIHMDIRWSVRKTVADLRLGINREQRDRDITNSSPDFNSHGRTAALRRQASSEFNRWYITHPHPHCPICYVLHQLEQDKNYPFARMVCSGGTPPWARGCAAVVRPVWGR

SEQ ID NO: 77182 - protein, 415 aa, Zea mays
  Coding DNA Sequence Number=SeqID_33807
  Subcellular localization annotation: CTP_CleavageSite=81; ConfidenceScore=5.30e-01
MAPLEDLAARSGSDGGASGGSDPLRPWQGSRGRSSTLWTNLQRGKNVGKAQGSFTAPRCYVGDAEWRAVWPSTRMEGERWRSAAVGCGAARTMKGGRLRDAGLSADCEGGFSRGRERGSCDINYNPVIALSNSSRKSVKPLVLMDDLRLVKAFPHTYSKRRPCSKSSSLAPRSVSSEESAPYKLQGACKLVGALLPSPVFTKEDIRPLNLNAPFTEVDGLQGSALLTRAYDQSDAKKFMKSLGFGEHEKFDLEAQDIYNKLFRNLLAESHVSSLSALFAWTVGEGEQHPHKGITPPWSSQEPSAHYEMILCHSGAVDVTEPPKSLGPPTVVLVQRTSDNPVGAPESLDNKTYPTKERTLKGMLVIRESRFTPTESTDTPPSSLLPRRAYIDMVLNRLRWRHYTETLFSCKSLARS

SEQ ID NO: 77183 - protein, 494 aa, Zea mays
  Coding DNA Sequence Number=SeqID_33808
  Homolog annotation: Hit_ID=Q6JAD6; Match level="QueryCoverage=51%, HitCoverage=39%, E-value=6e-99, Identity=65%"; Hit description =Putative uncharacterized protein
MAMMGSTSKKMYLYQDLVDVGLLTENPLTGAPARLSEIRWTRTTIGGPNDLGGSVTLLDLPAFLLAAGADSEVHLSYLPGLLTLLTISSRYVEEWVQVFYASVWIDPDHQWMRFCFEREDVTILASQIRQLFGFPESSTRLHSLCYDFTITTKFLYQLMRRTLLPRMGYREAATHIQLWLLGALVSHSEFDVVDFLICEIEDTVLDGLRARQQLPYAHYLCHIFAQLIRPPQFQGTLEASRLHFGSYRPALEDPVSAPAPVVDTQAEDIAFHQFETQGTTVHDDDDDDDDDDDDDDDFGVPPPPPHSHDHEARSSSAVPVAPPAVDPALAAILQTLTQQQALMASEQARLAAEQARLAAHTGVQIPPILSAPPPALQTTVVPTIQAGPPLPTVGPSSSLLWPVTLVFLSPIISSISSHPPLPPAPAITTAAVAVSVTSLAPTAPVAQPPYESVPALASTTDPGSEIDSDPQLAFALLPRPRPDAPSPPPSSYGL

SEQ ID NO: 77184 - protein, 77 aa, Zea mays
  Coding DNA Sequence Number=SeqID_33809
MAIIEEGVSVGDENGGAEARRRCLTREETLTNTRNTEGGMGPSRGGGVGLRKEAMYEGILVDLPFATFFLTKLKQKC

SEQ ID NO: 77185 - protein, 91 aa, Zea mays
  Coding DNA Sequence Number=SeqID_33810
MAAIGELGTMDRVLIPTTKPILAADSRAVEAVCELIGDELRMGHTGLVVNMGHEVDLAQTREKLDILILDIYSRSPGTRSMTYFWLYHEQH

SEQ ID NO: 77186 - protein, 132 aa, Zea mays
  Coding DNA Sequence Number=SeqID_33811
MGERGSRAGQSNSGEESWPPEGTIGCDRARASFGRGGGTPCAKAWGTGRGRDGRTPREHGGPSWPSTGEPKLAEHRAQYGKLGTRTGVSPRGGARGGLAQSPASWVVGNTGASLRRLLAVWAEREREWSYAK

SEQ ID NO: 77187 - protein, 83 aa, Zea mays
  Coding DNA Sequence Number=SeqID_33812
MSFTTASSRRREQGLDGGYVGDEWQRHNNTLSRVDQRRGSARQQQQKGEMASRERGGVRGWRPRACYKSTPLKKNLVLEIKKG

SEQ ID NO: 77188 - protein, 307 aa, Zea mays
  Coding DNA Sequence Number=SeqID_33813
MMLVDYTTVLDGPSVSVEGPTQQGIESIVEMTPASSVTSDGPSDPPLWLRLLRALHAVARTVTDVVVVSVSVGGSSSSRDALWWCRGHLWLGCRGRRPLRLHLPLRRGGRVLLLLLLASALLLLMRDPGYLAGFGHGPHGGAGVPESADHDKVAHLEGKRWCREAMAEAQRLDGATTAGLQLREDCSADSEAELTVALDGARTRRWPQNRQRSTVGSGGAPCTRGQSEREGEGVWQRAQMSEGRWASRARGSKGARVHDRGRRSRGRGRVHGGEIVGERLETADWWGQQDRERAGAREGNNADRSAP

SEQ ID NO: 77189 - protein, 215 aa, Zea mays
  Coding DNA Sequence Number=SeqID_33814
MVSPVSCKRVIRVGVRAPFVGGRLGAQRHAQKYLRAINEDVEDLASLDSSVTQRDASAEAGAEEQTMLQGGVGEGPATVDASVQVERVIGFSCSGVSVEGRSPRSASDFEWCTPRARTWSSSIRSLEVESSTLGVAVELAHGDPCFSSCGIIASDPYIKRKGVNPVALDSIVFSAHMTSGSWSAHLPFLSSSSLFLMALKILPLARSTTPLDCGW

SEQ ID NO: 77190 - protein, 256 aa, Zea mays
  Coding DNA Sequence Number=SeqID_33815
MPPAPPQGIPTVGGDPDGDGDNDDLGDSSSHGMERLEEPEPEGWIARPITRDAARGCHFHDALDTLLRRAFNRHTWSIEYRCVVYQHHRGLYPDQWEATCLVRLPDDDLQGAEAFSEHYYITERDTAEAAMQDAARRALSQYCSLFNGVADGLDLKYYPRRSTDSAGGVIVLPVGEGNPRLSSMVNLAAVFNTELDHALDELGKVRAEVAELRAKCAARHYLDGGSPAPVGIQHPYRSPPHGRFNYGTPDCRTRID

SEQ ID NO: 77191 - protein, 115 aa, Zea mays
  Coding DNA Sequence Number=SeqID_33816
MGDPGTSDDPATHHHLTHRPPITFPANLGDLLLNLTTLSCKSPPSPLFKPYHAQPGHSGAKIQALSPTQQLIAAQLELWIVCIIAIVARAEQEDEVRALADQAAHIDVAAHAKVH

SEQ ID NO: 77192 - protein, 175 aa, Zea mays
  Coding DNA Sequence Number=SeqID_33817
  Subcellular localization annotation: CTP_CleavageSite=26; ConfidenceScore=5.22e-01
MANKMNYGLPTNGAPTMLVAPNRGSTAMTLPGNGDRSPWLTRHAFPATVGALIGITEQRIAHRRHRPADFRRVLRLAFPFADLGELSGSGALRVRGESFRGLGGANQESVREELLIGVSPTTENRTTTWAEKSPPQFEHRWVRSFYALECKVGAHQSWCRRAVLFRRRVFIVRVE

SEQ ID NO: 77193 - protein, 138 aa, Zea mays
  Coding DNA Sequence Number=SeqID_33818
MTKRSHGECGGAGVEQRSTKAKGRNRLGENAKGKSRSMGTKDQGNLVCDTGARVHRSYSLCAGFQKTKGYLLNEGSGNEVPRAWPDENTRRGAVGLSAARTDMAVDVTEGGLTAGASADALKRRANYRSGHVEAKYKL

SEQ ID NO: 77194 - protein, 98 aa, Zea mays
  Coding DNA Sequence Number=SeqID_33819
  Gene Ontology: Mol. function=nucleic acid binding
  Homolog annotation: Hit_ID=Q677E2; Match level="QueryCoverage=62%, HitCoverage=31%, E-value=2e-14, Identity=54%"; Hit description=Ring zinc finger protein
  Pfam annotation: Domain name=zf-CCHC; Domain location=38-55; Score =14.4; E_value=0.01; Accession=PF00098.14; Description=Zinc knuckle
  Pfam annotation: Domain name=zf-CCHC; Domain location=57-74; Score =14.0; E_value=0.012; Accession=PF00098.14; Description=Zinc knuckle
  Pfam module annotation: Pfam domain module=zf-CCHC::zf-CCHC; Domain location=38-55::57-74
MVLGHKEFSWCHAEEHNTAQKDMHPAITKQKHVCQSAVTCNKYNLLGHFAAECTSKPICWNFKEPEHIASECKDEALCHTSIKIGHLPCDCPTSWANV

SEQ ID NO: 77195 - protein, 280 aa, Zea mays
  Coding DNA Sequence Number=SeqID_33820
MHQLEVPSPPLWLAAPIPPWPPAPWTRAKGLQAVPLPQKRQRTVGEAEEASSQAHGAQRSVSPPVPPPPPPSRGDHPQGHHQQQLQQQPQQQQERRSPRFQGHWKVQGPKASSSTAPKVTPPPPDTRPIVGSGSQQQESAESGADGPPPAAAKTTPATSHALVAGPVAAVPASGGVAVVEEVPARGSAPTLDTGGDTGGTSSSNPPPTPEEMEVVFGRRLRSGAEQEAAPVPLPCMLSRAHQVLSDTGTAILREWEALEAEHQCLSDWRTQLEERTKTTS

SEQ ID NO: 77196 - protein, 165 aa, Zea mays
  Coding DNA Sequence Number=SeqID_33821
MEATRKALEDLQAEHRAKVQRIAAWAGEASTALVTLGMSLVPVSELPASISDALPVLDSTADRLRRLDQILGAHLEAEGGKLYRAVVEYVLTCFRSHDPAISLASLIAGPVAATEDATRESVQDTVELVAERFQHDPADDLETKQGFRWEATVLTFDFVRYSKNR

SEQ ID NO: 77197 - protein, 88 aa, Zea mays
  Coding DNA Sequence Number=SeqID_33822
MDVGQPRPDLIYNTHYRTNARFNVAKRSNGQEPSPTLHDATDGSTVPRDKDLTGDHRPDYSEHLTSITLAQNKEDDCTNTEVGCSPTI

SEQ ID NO: 77198 - protein, 60 aa, Zea mays
  Coding DNA Sequence Number=SeqID_33823
MARFVDLALAYHCSWRTTPSALADPALSMSVACFADPALVYHAANTEPLVYHPVGFHRDP

SEQ ID NO: 77199 - protein, 333 aa, Zea mays
  Coding DNA Sequence Number=SeqID_33824
MTASKKRLRASLLIRGSKAGPSEGFDSHLRSRGLYTHYWSEPTPSEWGTDVHSDYPPTAHRRHHVRRPPRRLGGCSRKPGSGRTVDSVNIPARVLGTRPYTRATASSHEGTTRLAEALREALRPRRSQTTPPKPRGLHPAGALARTHRNKTQPRKAGPLAKKCDESLQASANTPFEARGLLLGTIIRGTLKAPNSQLVTPISIKLQRPDGARTRAKPRKTVNSAPPNPGLGLGLSPRRRRTPLRPTQGSDLGSAPEDDELRFARPQGSDSALASADGLRLVRPRGSDSTSATEDRLDLGFGGASTSPNLGRRPATSTGGAIITLPQADSGHGE

SEQ ID NO: 77200 - protein, 53 aa, Zea mays
  Coding DNA Sequence Number=SeqID_33825
MAPITRRNDRMTLHYTARPQGRGVGVHGVALVPGGAVSIGSCRTRPRSASGLA

SEQ ID NO: 77201 - protein, 134 aa, Zea mays
  Coding DNA Sequence Number=SeqID_33826
STAGGLRDGAGAVDHYLGEAAGCGLEKDMAVVSSAMGEMAPAPWGRRALRLGASTASALGSEAEQGDGVGEKEERYNGSSSLISCEKQTIRIEFLTLQGLTALAYNAPLTPAAAVQWPHLYPPYLEWETQSQVA

SEQ ID NO: 77202 - protein, 673 aa, Zea mays
  Coding DNA Sequence Number=SeqID_33827
  Gene Ontology: Mol. function=acyltransferase activity; Cellular component=plastoglobule; Biological process=metabolic process
  Homolog annotation: Hit_ID=A2ZT32; Match level="QueryCoverage=66%, HitCoverage=96%, E-value=0.0, Identity=82%"; Hit description =Putative uncharacterized protein
  Pfam annotation: Domain name=Abhydrolase_1; Domain location=150-351; Score=-6.9; E_value=0.019; Accession=PF00561.11; Description =alphabeta hydrolase fold
  Pfam annotation: Domain name=Acyltransferase; Domain location=401 -538; Score=-19.7; E_value=0.065; Accession=PF01553.12; Description =Acyltransferase
  Pfam module annotation: Pfam domain module=Abhydrolase_1::Acyltransfer ase; Domain location=150-351::401-538
  Subcellular localization annotation: CTP_CleavageSite=29; ConfidenceScore=5.36e-01
MPVAALRPPPVAVGAGRRSARLQARFALRASSLEASAAVTVTVNGSAEAAVERKEKVQEDKDNEGLPVKEEQERGLEVLYDDGFGSVTVKDYFAAAKVLCRDDGGPPRWFSPVECGHPAVDQAPLLLFLPGMDGVGTGLILHHKSLGKVFEVRCLHIPVNDRTPFEGLVQIVENLIKHEHDLSPDRPIYLVGDSFGGSLALAVAARNPQIDLVLILVNPGRRYVSTGDPLKMAAVSIENNLSPPETLQKLSDSLTSMLPLLSELSDIIPRDTLLWKLKLLKAGAAYANSRLHAVQAEVLLLASGKDNLLPSGEEADRLFKALKNCRVRYFKDNGHTLLLEDGVNLLTVIKGANMYRRGRQRDSVTDYLPPTLSEFRQTFDVDHRLFHLALSPVMMSTLKDGKIVRGLAGVPDKGPVLFVGYHALMGIELSPLYEEFLREKRTVVRGMAHPFLFGKKFESSRQETSRFDTVSMYGGLPVTPINMYRLFQRNQFVLLYPGGVREALHRKGEEYKLFWPDQPEFVRMAARFGVTIIPFGCVGEDDVLELVLDYNDQKNIPGLREWIQSINKEAERVRDSVKGEDGNQDMYLPALLPKVPGRFYYLFGQPIEMKGMGNLVRDRKSANEVYLRIKSQVEEIMSYLKRKREEDPYRSLPQRALYQATWGASAQVPTFEP

SEQ ID NO: 77203 - protein, 89 aa, Zea mays
  Coding DNA Sequence Number=SeqID_33828
MAMIMMTGVVALAERSVVRGFPTLEASSRETGQTIGKPIRRPMIRFSVCENPVDIYPPQNSHRNRDVRVPSHNVKRLSCKPDIWRAIRD

SEQ ID NO: 77204 - protein, 203 aa, Zea mays
  Coding DNA Sequence Number=SeqID_33829
  Subcellular localization annotation: CTP_CleavageSite=67; ConfidenceScore=5.12e-01
MEVATTARATTPTFLLTRSRKDGLLDPSLATLLAGVTSTTRSTPCYVGHLTDVLGPSSIAVWSTNIVAGSTRTTGRRPSLVRRPENSLQGAEDAARRALSHYCSVLGGVADGLNLKYYPRRPSSSTRGVIVSPVGEDNPRLSSTVNLAAVLNTELDHALDELSRARAEIALLRAERAERRHLDDGSPAPVGTQHPYRSPRRGR

SEQ ID NO: 77205 - protein, 190 aa, Zea mays
  Coding DNA Sequence Number=SeqID_33830
  Subcellular localization annotation: CTP_CleavageSite=34; ConfidenceScore=5.52e-01
MARSPGPVRSALRRAAVLGRARPRPAPPRVGPASAAPAGPPPSRARPASPPASLPPCRLAPASPLSPGLAPASPPRPVPGSAAPRRARPRRALPRLGRPPPCPARPRRPRPGVVAGRVLARPCSLAPRIWGVVRFAVVPSMGLGVCGSLCQETFRFTGGNETDGFGYVYGAGEDEAVEGDFQEFQDYDEF

SEQ ID NO: 77206 - protein, 98 aa, Zea mays
  Coding DNA Sequence Number=SeqID_33831
  Gene Ontology: Mol. function=carboxyl- or carbamoyltransferase activity; Cellular component=ornithine carbamoyltransferase complex; Biological process=amino acid metabolic process
  Homolog annotation: Hit_ID=Q8SA97; Match level="QueryCoverage=100%, HitCoverage=23%, E-value=6e-16, Identity=47%"; Hit description =Ornithine carbamoyltransferase
MALPVDVAGLRPRLGDVEAPPKPRSSLSSMAEAEPEPLGRARRRSLGRGQGGVRALGLGEADPSPSPGSGGAEFAVFRDLARVRALGRAERSSSSSGT

SEQ ID NO: 77207 - protein, 81 aa, Zea mays
  Coding DNA Sequence Number=SeqID_33832
  Gene Ontology: Mol. function=potassium ion transmembrane transporter activity; Cellular component=integral to membrane; Biological process=potassium ion transport
  Homolog annotation: Hit_ID=Q942X8; Match level="QueryCoverage=50%, HitCoverage=5%, E-value=1e-11, Identity=90%"; Hit description =Probable potassium transporter 2
MRVVLLLIVLCGASMVIGDGILTPAISVLSSMSRLQVRATGLKHIGHTLFYRLNISYLVLQAMTMWGNNIRMEFVRDAKIL

SEQ ID NO: 77208 - protein, 157 aa, Zea mays
  Coding DNA Sequence Number=SeqID_33833
MALGPSGAAINQQVAPALTPAQIAASLADLSHAVRDMQITMKAMLTGHLPFPNPQAAHPPQPPHSILTAQPPSAALPLPTQPPPPLPPLDRQPISYQYDMPIDPRPSSTAPPTTSPIHMIRFPPSPSPIPSWAQGAPTVSPPVYSEAEASRSFGTQM

SEQ ID NO: 77209 - protein, 116 aa, Zea mays
  Coding DNA Sequence Number=SeqID_33834
MDDVGEERHRLLGPDAVQRSDLDPLGEFVDGDQQVRVAPGRLLQGADEVQTPHSKGPGDGYRLQSLSGQEFLTFGDGDASLEDARGAAVVELLLIAQQDERLGASRYPPSLGSVEG

SEQ ID NO: 77210 - protein, 244 aa, Zea mays
  Coding DNA Sequence Number=SeqID_33835
  Subcellular localization annotation: CTP_CleavageSite=70; ConfidenceScore=5.07e-01
MQPGCTPPPAVTQDGDLRLDGGGKRAGLRPLPLPQPQGFSSLGLGRGVCTVPGSRTRVASEPLAAPAFATAAGRGSSAGEIAKAGHGPTSNSTAFCPSLPHEFGHGRGPPGSSIRPEVSAAAVRPPGAEVVVVAAAGAGDGAPFVGLLLLRRPTPIEWGCSYLRRGNWSSVCNGTLNANSPVDYLNRFTKHESPRVKVTSESGDPWTASLSEARSDLAEGVVDAEGATAPFQHQDPSLQDQSVL

SEQ ID NO: 77211 - protein, 244 aa, Zea mays
  Coding DNA Sequence Number=SeqID_33836
MSLTHVDPHHRSSHLIIMVWMYAWIYERGGDTKNPNVTGGDTLADEVQVDLHVLRALMLHGIGREVDCADVIAVDEGGALEWTVELVEELSQPGGLCHAVSHGAVLGLSTGARDDGLPLGGPGGAKRFIYNYTTSTVRNTIDYSGQEKLFGKTGQARTVRALAADRPHHQDDPRTELMQKSEFALWTVRRKRADRLRPRADRPASGADRPPLLLTVAFSAVDLQARTVRTRRADRPRWAEWSNG

SEQ ID NO: 77212 - protein, 210 aa, Zea mays
  Coding DNA Sequence Number=SeqID_33837
  Pfam annotation: Domain name=DUF241; Domain location=8-205; Score= -65.0; E_value=0.047; Accession=PF03087.5; Description=Arabidopsis protein of unknown function
MKNYSHLYLLPLFSDLSRKTQAPAFFRPVADDMSLGGAVSPGLYLTTGNPDQVRRPHQTLFGLLRPTVALHHERATVALHRELARLAARSVARLPAGAGLDGSGTAEEAEMAAALMDVAAASAAASAAVFSAVASVSAAASSCSNKKAPTAFVAAAFAKKPETPMTADVAQEKHEELERCIDECESGSEVVFRSIVRNRVSLLNIHSPAI

SEQ ID NO: 77213 - protein, 727 aa, Zea mays
  Coding DNA Sequence Number=SeqID_33838
  Gene Ontology: Mol. function=cysteine-type peptidase activity; Biological process=proteolysis
  Homolog annotation: Hit_ID=Q5NKQ2; Match level="QueryCoverage=100%, HitCoverage=100%, E-value=0.0, Identity=86%"; Hit description =Putative uncharacterized protein 9C20.3a
MKSVDRPPANPKHITIESSQEFFSVEIPRPTSIGVPTNTKHSDPCPAPVEKPSVIYEANEQTGSGNDDDDFMTPTKKRNAAGSHMNILRKTCTKRPKVVETPRQKLNVRCNPQDVIITIKILNERQRQAVARKGFSNILDMTLDALGSRSHLRWLMDKLDHKDMTIRPGVGKELKITKETVHLILGLPNAGGGKPLGIDEAVAGNNLRAELGLSKDEFVVASLQDRLRKGNDDDLSIRCFFLILFNRLLFPTSSWGISNHEVLLTEEMDRFHEIDWCHLIFNDLCEAAQKWHTRSTSNVSTTIYGCSVVILPPPNKRGTPRIKFFDKNIIQALTKADKRKPRQSGEPFGHCEFRSFFETCYSAVPSVQFQSEHRDRTNIFDVPRPDPCGHHTIHIQLPLIKDMLSSKIKQLQPRDRPKFIEKFVEYDSEVGKACSIIKSTLTKMVVKQYELADTFAELIDDVLRAESSDPDNVAEAPQTDKPPDISQHMSSEEQIHEGTQNTQDMTMPSQPNTELTGTQFEEIHEKQQQMRRAFEGCPDDLETNITPNAENQGGDIGPSHDTPTFTGPLFDQTPSGHVADGEETHSLHTTHDHSLPRLTELDCARSLRAFLCSSKTDPNSVSSWVFAMTKTIIARPSTKTDLYWMSMLVILLNFEEHERYSKSPQTFDQTVLDAYLDKTLPQLDNFGDYKTENSGDLRSLALHYLTFHSKNKCLPLPPEIQRFKFGR

SEQ ID NO: 77214 - protein, 45 aa, Zea mays
  Coding DNA Sequence Number=SeqID_33839
MANDDHVEDTKYWAHITFGPRPSSLLHGLRANPALMVGTVRVVLI

SEQ ID NO: 77215 - protein, 153 aa, Zea mays
  Coding DNA Sequence Number=SeqID_33840
MVDDMVESIVEAQVASATSERVVENPGGGCLGGGLKIEDRLDNLLNNYEVVKNFAKDLPYTKSTRIDNMNQPTNLKRLTRTHKNTQYNPRFGNHHKGVLLLVEEPTKGRVFSNPNPPQADHKGQGNLFSNMLKERVIQTSWGRPQIWRLPSNL

SEQ ID NO: 77216 - protein, 1021 aa, Zea mays
  Coding DNA Sequence Number=SeqID_33841
  Gene Ontology: Mol. function=molecular_function; Cellular component =membrane; Biological process=auxin mediated signaling pathway
  Homolog annotation: Hit_ID=A2Y8F2; Match level="QueryCoverage=70%, HitCoverage=96%, E-value=0.0, Identity=56%"; Hit description =Putative uncharacterized protein
  Pfam annotation: Domain name=DUF6; Domain location=19-152; Score =61.9; E_value=2.1e-15; Accession=PF00892.11; Description=Integral membrane protein DUF6
  Pfam annotation: Domain name=DUF6; Domain location=198-327; Score =45.7; E_value=1.6e-10; Accession=PF00892.11; Description=Integral membrane protein DUF6
  Pfam annotation: Domain name=DUF6; Domain location=390-536; Score =10.8; E_value=0.017; Accession=PF00892.11; Description=Integral membrane protein DUF6
  Pfam annotation: Domain name=DUF6; Domain location=585-712; Score =36.1; E_value=1.3e-07; Accession=PF00892.11; Description=Integral membrane protein DUF6
  Pfam annotation: Domain name=Sugar_tr; Domain location=138-549; Score= -173.0; E_value=0.032; Accession=PF00083.15; Description=Sugar (and other) transporter
  Pfam annotation: Domain name=TPT; Domain location=576-712; Score= -38.0; E_value=0.098; Accession=PF03151.7; Description=Triose -phosphate Transporter family
  Pfam module annotation: Pfam domain module=DUF6::DUF6::DUF6::DUF6::Sug ar_tr::TPT; Domain location=19-152::198-327::390-536::585-712::138 -549::576-712
MAARIGEWKPVMAMLIFDLISAVTTALIKKALQEGLDRLVLITLRQLVATVFLAPIAYFRERSTRPKLTLEILVYLFFSAAFGAALSQYTFFYGLQYTTATFAITFTNVAPVLTFLIAVLLRVESLSMKNKAGAAKIAGTLTSFAGVMLLTLYKGVSLTHHQAGEASPEDHSLGAAAASPSDRKSWTLGTLALLANCLCFSFWLLLQSRLTKKYPALYSSTAYMFLISSMQGGALTAAIQRRASVWLLTRPIEIVTVLYTGIMGSGVGYVLMTWCVEKRGPVFTSAFIPVIQIMVAMVDFFFLHENLYLGSVLGSILLILGLYILLWGKKRDASSSAAAKEEEDGEKEDEEEEDKEKQLLAVAACIEMWMISAGRMEQWAPTAAMVATNVVIAVMTALIKQALSLGMNRLVLITFRQMVATLFLGPIAYFKERRMRPKFTSEIFVYMFLSGILGPVLLQYTLFVGLDYTTATFAATFGNMLPVVTFLISLAFRLAHTLLTVPSFTRFEALEVKSKSGSAKISGTLISLGGAMMLTFYKGSALTQTTTAATSSPASSGGGHIRQQAGEHGTVRWVLGSVSMLANVVGFALWLLLQRKFTRKYPAVYSATAFMSLFSFVQAGALALSIQRTSLAVWALRGTVEIATVGVVASGIGYLLLTYCVEKRGPVFTAAFSPLAQIFVAGIDLFILHEPLYLGSVLGSVLVILGLYLVLWGKREEAAAAAASAKPVQAELRLCVCLWPGRRRPLRLCLLSPLSSLLSVVLTPHHGAHGEAPAPRRKRPRTISAGAFRVEAPPPHTQRRLGRSRRLRRRRRRRPPRPPPGVPPPRKQGPFVASVRRALTSIPIPSPSSSDSSDDGSSASRRRGHHDAHATTSSSTSVSDAAARPSPPAPAYDVTKSMLRSQYAAQTPKRSQQLEIEVAAEKPRRLITADGGGGGDAKPEAAPASEGFGRGDKGPRFADLGGMEAVIEELMMEVVVPMCHPEIPHRLGVRPVAGLLLHGPPGCGKTTLAHAIANETGVPVL

SEQ ID NO: 77217 - protein, 396 aa, Zea mays
  Coding DNA Sequence Number=SeqID_33842
  Gene Ontology: Mol. function=phospholipase A1 activity; Cellular component=nucleolus; Biological process=lipid metabolic process
  Homolog annotation: Hit_ID=Q6BTJ4; Match level="QueryCoverage=68%, HitCoverage=31%, E-value=4e-13, Identity=29%"; Hit description =Similar to CA1621|CaIFF6 Candida albicans CaIFF6 unknown function
MAAPQTTRPVALTLRRDRRHLWQEKRATLRLRHNDRVKKGTGKGGYPERDPSPRRKRAPSPPTDQRFEGWPLGGVQQPPQSARAPRPLLAGPRRVHSRLRRRARDDPGYVRYITKARATLRSSLETPCSAPSEGNMALFPPSSLRKGDAGANGHTFGSPEAQSSPRSNLGQVTTPTDRIAGAFNTKGSDSGSAPEDDELRFARPQGSDSGSALEDDELRFARSQGSDSGSAPEDDELHFARPQGSDSGSAPEDDELRFTRPQGSDSGSAPEDDELRFARPQGSDSGSAPEDDELRIARPQGSDSGSATEDDELRFARPQGSDSALASADGLHLARPRGSDSTSASEYRLDLDLGGASTSPNPGLGPTTSQEAPSLPYPKLTQATGNKTGVPSGSPQ

SEQ ID NO: 77218 - protein, 214 aa, Zea mays
  Coding DNA Sequence Number=SeqID_33843
LGAKICGAELVATRDCHVTKLGSIGYGAELCYLGAIACGAELRIQTFARQFWHAILVPLCLGDLIPAVDEISFADWWRKALKKPGGVTQRISSSSGQQPASQRTTQLACLLYKSGHCAQAQVKAALATRSCGGVVRLAALLLLALALALLSPCLSRADAVAAPSAPLASAAAAASDSEHGVATARENALAQGGDVEWIQDYGGPSANTRHVPHP

SEQ ID NO: 77219 - protein, 96 aa, Zea mays
  Coding DNA Sequence Number=SeqID_33844
MANPIHLYRGREAGAGIPRLTTIAAKSTQGPPYTDHSPTALAPFGGPGAKNTETHGTVAEDGGLVSKFGKVSLAKNPWPKGYVSTRAARSYTYGSD

SEQ ID NO: 77220 - protein, 380 aa, Zea mays
  Coding DNA Sequence Number=SeqID_33845
  Gene Ontology: Mol. function=protein dimerization activity; Cellular component=nucleus; Biological process=regulation of transcription, DNA-dependent
  Homolog annotation: Hit_ID=A7PVT6; Match level="QueryCoverage=88%, HitCoverage=65%, E-value=1e-109, Identity=61%"; Hit description =Chromosome chr8 scaffold_34, whole genome shotgun sequence
  Pfam annotation: Domain name=bZIP_1; Domain location=38-95; Score =29.3; E_value=1.4e-05; Accession=PF00170.12; Description=bZIP transcription factor
  Pfam annotation: Domain name=bZIP_2; Domain location=38-88; Score =27.7; E_value=4.3e-05; Accession=PF07716.6; Description=Basic region leucine zipper
  Pfam module annotation: Pfam domain module=bZIP_1::bZIP_2; Domain location=38-95::38-88
MEELAGSRRQQEHLHLQHHQPFAAAAEPAAPGMIKDVKPLAKTLRRLAQNREAARKSRLRKKAYIQQLESSRIRLAQLEQELHTARAQGVFFPNSGILADQGVAGKGVPIGGIDGLSSEAAMFDVEYGRWQEEHYRLMYELRAALQQHLPEGELQMYVESCLAHHDEMVGIKEGAIKGDVFHLISGVWRSPAERCFLWLGGFRPSEVIKRLKVAAMMGVRSRSAVGDGSRNVPSMLLSHVEPLTEQQIVGVYGLQQSALETEEALSQGLEALYQSLSDTVVSDALSCPSNVSNYMGQMAVAMNKLSTLEGFVRQLHSDEHHGRMHDAQAENLRQQTLHRLHQVLTTRQMARSLLAVSDYFHRLRTLSSLWVTRPRAPQEQ

SEQ ID NO: 77221 - protein, 217 aa, Zea mays
  Coding DNA Sequence Number=SeqID_33846
  Gene Ontology: Mol. function=hydrolase activity
  Homolog annotation: Hit_ID=Q10SN6; Match level="QueryCoverage=20%, HitCoverage=12%, E-value=3e-15, Identity=88%"; Hit description =Hydrolase, alpha/beta fold family protein, expressed
MVRPILQPILRRLPSTPQATAPAASTPATARVGCPRPRPPPHDHDHGLNRSASSAIYAHDFNLVRLRLRDGRHLAYCESGVPRDQARFAVVFSHGFTGSREDSVSASQVPTDPSTTTTLSTSPSLPHLLPDPYAGLRFTRPPGSWTYGRDLKRVSAGVLGTKTTWQRVPFSLVASQPPPRSDEVASSLALRASPQLGGRAEAAQDRLAAAEGHLKVA

SEQ ID NO: 77222 - protein, 50 aa, Zea mays
  Coding DNA Sequence Number=SeqID_33847
MAAKQIEGSFKTQRERERHSYDWVEVSTVVQGYGDDMLDIPGPEGIETLG

SEQ ID NO: 77223 - protein, 153 aa, Zea mays
  Coding DNA Sequence Number=SeqID_33848
MGQRTLAFTKLLIRDFLCNFLGKHRLLVVYAGPGGQREHAADGRDPNGSAGTGGLTGGTGGQRERAGGADRRDPTGREAGDTGGGRFTAERLGGGIKQLRRGIKRSRRQYAGLEGAGEVLYLKAGSGDSSVAAMARRWPGATVADLRGCTGNS

SEQ ID NO: 77224 - protein, 113 aa, Zea mays
  Coding DNA Sequence Number=SeqID_33849
  Subcellular localization annotation: CTP_CleavageSite=65; ConfidenceScore=5.61e-01
MANGSWLLGVAAPPHGLLQLTSPKGKRRKRPLLRGHSPRTVPVRPAGAATQPIRGPALLAGSLSRCSTSAPPPPTEESRATAQGQAAQERCAGRVESSRRETMREKKSTEKFE

SEQ ID NO: 77225 - protein, 94 aa, Zea mays
  Coding DNA Sequence Number=SeqID_33850
MDESEKGDRVRVMTVPNLACGCWTAELLHYVYRAASVLGTKAKTPPFARGLRRGRWSNGDKTTGEDTLRSIRHRVKTTTRSFHRAASSSMEAHG

SEQ ID NO: 77226 - protein, 738 aa, Zea mays
  Coding DNA Sequence Number=SeqID_33851
  Gene Ontology: Mol. function=transcription regulator activity; Cellular component=nucleus; Biological process=regulation of transcription, DNA-dependent
  Homolog annotation: Hit_ID=A2YWV2; Match level="QueryCoverage=75%, HitCoverage=92%, E-value=1e-161, Identity=54%"; Hit description =Putative uncharacterized protein
  Pfam annotation: Domain name=EIN3; Domain location=149-546; Score =632.8; E_value=3e-187; Accession=PF04873.4; Description=Ethylene insensitive 3
MSSADKTHGSHGAWSVIDEAFMKAPPSDDPACSVQVDAVAYRETIQTWVEDLRAKNGARPLSAAMYRRRRALNHCSVALEFAQRRRVAVGLEDDELCRSVQAAMDTQVVGSCAYCGCNFSVVAVVAVGGLGMACGVCFRLVRVYNPVPLGIQNLTENDVSDEEIEPEDLARRMWKDRVRLRRIKERQHKLALQQAELQKLRPKPISDQAMRKKMSRAHDGILKYMLKLMQVCNARGFVYGIIPDKGKPVSGASDNIRAWWKEKVKFDKNGPAAIEKYESDNLVSATAQSGGTKSQHSLMDLQDATLGSLLSSLMQHCDPPQRKYPLEKGASPPWWPSGKEEWWTALGLPSGQVPPYKKPHDLKKVWKAGVLTGVIKHMSPNFDKIRNHVRKSKCLQDKMTAKESLIWLGVLQREESLVHRIDNGVSEITQRSMPEERIADTNSSSNEYDVYGFEDAPVSTSSKDDEQDLSPVAQSAVEHVPKRGRERAYNKRPNQIVPGKAKEPPKRKRTRHSSTVTEPDAHRVVDAPENSRNLIPDMNRLDQVEIPGTSNQIVTFDHGGTTTEALQHRGDAQVQVHPPGAEVNSFYSAPTANPTPISIYMGDQPIPYQNNDSTRPRSENSFPVDAHTGLNNLPSSYQNLPPKQSLPLPMMDHHVVPMGIRAPTDSIPYGDHILGGGNSTSVPGDMQQLIDFPFYAEQDKFVGSSFEGLPLDYISISSPIPDIDDLLHDDDLMEYLGT

SEQ ID NO: 77227 - protein, 221 aa, Zea mays
  Coding DNA Sequence Number=SeqID_33852
MDERAEERRNLIPIVSSGEGNPEDSRRKREKIELEKRWLEQPKSAQSGCTGLSGGAPDSVRCARLALAKRLLSGLRRRCTTINHRTVRWFTGLSGVPFTGELVALGKPSTTYDYNSPDCPVCTGLSGEPTVDRANSRPRDLRGTRGRANGWKGAPVCPVGTGHVRCANGSQAANGRLRHLRKEIGHRTVSGVHRTVQCASRQKARSAFLDCSQRLLAALGL

SEQ ID NO: 77228 - protein, 188 aa, Zea mays
  Coding DNA Sequence Number=SeqID_33853
MGRRGVWGRERNDGSKLHCSRQETDGARHGGVAAVRLRVRAALGAGRSSGWGVAGRGSGGSAAVVGVSGSLQAALGSMGAGVVAGALQGGRLRGCVRQAGRGSESSRVRGTWARREVQGMDRARGAEAGSWCVQVGAVGRLQARGLEKKQGGGNGLVGPARKRRMGFSPGGGNREQGRARLAPGRQRL

SEQ ID NO: 77229 - protein, 307 aa, Zea mays
  Coding DNA Sequence Number=SeqID_33854
  Subcellular localization annotation: CTP_CleavageSite=91; ConfidenceScore=5.50e-01
MPRSRDTRACPRLRRRDARASAPASSALATLRPPSATRSLPFPQTLSCTSCPRLRSRCSCSPHRRDSRLRIRRQISALPPNPASYPSTSFVASSLPCPPEPRSPSPPLVPARYNRRIRGLLGSPCLAGVPPRRSRSMVGEGRRERAAEEVKLDIRNVLMALESLKKESLKKKKGDKDRAVGPSSRKKHAEAAQQQAPPQKEVFWAPASLTTKSCADVEYDDDDSMRPAAEPTKEEEDIEGAVCSAPCRRAVKNTTPSPSRNMVDARASTGAEDPMVVDVVVTQLMPEEEALQLCTGCVHESCLEGGG

SEQ ID NO: 77230 - protein, 84 aa, Zea mays
  Coding DNA Sequence Number=SeqID_33855
  Subcellular localization annotation: CTP_CleavageSite=36; ConfidenceScore=5.12e-01
MSLPPLAMLPLVSAAEVAPPPNSLPHGFTARDPTVVARVAQDSSVVEEKPPIRFSVNAPHIDVWMLKKLTNMKKGQHAYIDDRR

SEQ ID NO: 77231 - protein, 114 aa, Zea mays
  Coding DNA Sequence Number=SeqID_33856
MPQRCLPWKNLGMSRPRRNVPDSERMRAKERKNRFCKIVNTVNIIDAKIRDRMLRGTAVGARVLGLTVVHGAAVRLRPAHRGGVATDQSKAGASKAGPPRSRRRRGRAELRTST

SEQ ID NO: 77232 - protein, 154 aa, Zea mays
  Coding DNA Sequence Number=SeqID_33857
MPLHARDAQDGRATDPEPTIPERASQPRSRPRPRPKPAASRSAAHDRSPKYRTPSALPRRYELQCTHFLSLIEAPLMAINGIHGRRFSSLLGALSPPLSSINWTTVPTELSPPTAELASLSLSCSPSNAVAAVRGTPPELRPRCTRITSFPARR

SEQ ID NO: 77233 - protein, 190 aa, Zea mays
  Coding DNA Sequence Number=SeqID_33858
MGPTIQKELRYQKSFVIDQGKYDEASFVMMKIEIALSFSPSSKPKRKGTQGHGRAGKEKVVDVPYSTNVDDKTDDTSQGTKRPVGRDAAKAAKNASNANFTQSSSEYTSSMSNLHLERIGDYKEAQGVMAINIDQLITVQEKVAAKKQEIAMQVIEYKKKKWEAAVAEKAALKEERIMNLDLEWYAKGLL

SEQ ID NO: 77234 - protein, 197 aa, Zea mays
  Coding DNA Sequence Number=SeqID_33859
MGLSPIQKCISTLRILAYDSPADAVDEYACQQRAPLVHFEVKGNMYNMVYYLVDGLGGSPKFKKALRKISSMLSRFLKQGSAPSPPAAFAPGFAPAVAIRASGEWISLSCEKIASGEWILLSRYCGLAVPRPLAPVVKHLIQELVPQIIHQSSPIRDFPQIGFRRRRKDLTVASALQISFKYYLEALGKVWHDLDHV

SEQ ID NO: 77235 - protein, 315 aa, Zea mays
  Coding DNA Sequence Number=SeqID_33860
  Homolog annotation: Hit_ID=Q6QP51; Match level="QueryCoverage=54%, HitCoverage=83%, E-value=1e-08, Identity=33%"; Hit description =Putative growth-regulating factor 1
MQAACNRTKGVHPFGFDASSMEAQAHTSCNRRAGYYVRETAPPLAPVPRLLDCGTSATTRGDPAHGPTVPTEHIGHGDRERGYSERDPSPRRKRAPSPLLIRGSKAGPSEGFNSRLRALGLCAHYGSEVRRPAPRKGSTAASGHSGSAPTTDQGFCRLAPEGFDSRLRRRARDDPGVRLTAAKSGLGRHRKLRLARPQGSAPVSASDDELRLAQPQGSDSASAPEDDELRLARPQGSDSTSALKDDELRLARPQGSNSASPPEDDELRLVQPRGSNSALASDDGLRLARPGARTRPRPRKIDSTSTSEEPPPRPT

SEQ ID NO: 77236 - protein, 91 aa, Zea mays
  Coding DNA Sequence Number=SeqID_33861
  Subcellular localization annotation: CTP_CleavageSite=40; ConfidenceScore=5.27e-01
MAVTGKGLLWQVAASINDARRRQRRTRAAGGLAAAGPAVARSLGAPKRPGATQGELTRAWIMDVTTFVFPGLWGVASPSSLSLHPSFATDF

SEQ ID NO: 77237 - protein, 345 aa, Zea mays
  Coding DNA Sequence Number=SeqID_33862
MNLQGHGKLWRHKAETLKAKGRRKLEGEGAPRVGEKQGMAASQGMNPSLKADSPAPASKRREKSPPMHTGYPSYDTGARSHKSYSWRAGLRVRRRRTATQGACYRPAVVRPFIFAATNGQEGEPPHKERATAPRYETIKYGSHGLVPSPKAGSGATVGTLNQGGATWPEKMIYPRVQSVGPDLHEEAPDPCTHSLDPRIRSGTPKLYPVRMRSPLWRRPDADTWLVARDVSQWAEPDVRPLGHAVRRPSHPAGGVPVQFIAKQYARAARWTVVIITYALPGKLPLHANTTQIADVRVQEDCSSSPKYYIHYISGLTCRGSAPLYAPPLSYKRGGMQRYRRTHTDT

SEQ ID NO: 77238 - protein, 178 aa, Zea mays
  Coding DNA Sequence Number=SeqID_33863
MKEQLYVDRVRLTAAKSGLGRHRKLRLARPQGSAPVSASDDELCLARPQGSDSASAPEDDELRLARPQGSDSASAPKDDELRLARPQGSDSASAPEDDELCLVQPRGSDSALASDDGLRLAQPGARTRPRPRKTDSTSTSEEPPPRPTQGSDRPRHRGAIITLPLASSDYGEQDWRPI

SEQ ID NO: 77239 - protein, 57 aa, Zea mays
  Coding DNA Sequence Number=SeqID_33864
MGSSSLRAERESRLVGGNETDGFGYDYGAGCQHCNHCSGEDEAVEGDFQEFQDYDEF

SEQ ID NO: 77240 - protein, 330 aa, Zea mays
  Coding DNA Sequence Number=SeqID_33865
  Gene Ontology: Mol. function=triacylglycerol lipase activity; Biological process=lipid metabolic process
  Homolog annotation: Hit_ID=Q8W0F0; Match level="QueryCoverage=90%, HitCoverage=100%, E-value=1e-121, Identity=71%"; Hit description =Lipase class 3-like
  Pfam annotation: Domain name=Lipase_3; Domain location=87-211; Score=- 8.9; E_value=0.0027; Accession=PF01764.16; Description=Lipase (class 3)
MTSQKDIFDVAGPTYLTYVNWNCPHHRRSVMASLVQGVYVLERDRQCNRQGADARAPAWWRFFRFEPRQPPLHLLDPTAAASAPHYVVAFRGTITKKGSAKRDLELDLQLVRNGLEGRSRFRAAMQAIQDTLAAAAGQHGRVWLAGHSLGSAIATLGAKTLVRAGAPALPTFLFNAPFVSAPVERIGDRRLRQGIRIANSFVTAGVAAVLQRAGGGAHDAAFAAMAAWMPNLFVNPADPISAEYVGYFDHRRKMEAIGAGAVGRLATRNSVKDLLLGIGKGRSGCEPLHLFPSAVLTVNRGPSPDFKTAHGIHQWWRPDLSLECTAHYYT

SEQ ID NO: 77241 - protein, 452 aa, Zea mays
  Coding DNA Sequence Number=SeqID_33866
  Gene Ontology: Mol. function=aspartic-type endopeptidase activity; Cellular component=extracellular region; Biological process =proteolysis
  Homolog annotation: Hit_ID=Q8W0E9; Match level="QueryCoverage=98%, HitCoverage=99%, E-value=1e-148, Identity=61%"; Hit description =Chloroplast nucleoid DNA-binding protein cnd41-like
  Pfam annotation: Domain name=Asp; Domain location=91-447; Score= -101.3; E_value=1.3e-07; Accession=PF00026.14; Description=Eukaryotic aspartyl protease
MASPDALPLRFLLVVLVACTADATQRPTTLHIPVVHRDAVFPPRRGAPPGSFRCRHAAPHTAQLESLHSATAAADLLRSPVMSGVPFDSGEYFAVIGVGDPPTHALVVIDTGSDLIWLQCLPCRRCYRQVTPLYDPRNSKTHRRIPCASPQCRGVLRYPGCDARTGGCVYMVVYGDGSASSGDLATDTLVLPDDTRVHNVTLGCGHDNEGLLASAAGLLGAGRGQLSFPTQLAPAYGHVFSYCLGDRMSRARNSSSYLVFGRTPELPSTAFTPLRTNPRRPSLYYVDMVGFSVGGERVAGFSNASLALNPATGRGGVVVDSGTAISRFTRDAYAAVRDAFVSHAAAAGMRRLRNKFSVFDTCYDVHGNGPGTGVRVPSIVLHFAAAADMALPQANYLIPVVGGDRRTYFCLGLQAADDGLNVLGNVQQQGFGVVFDVERGRIGFTPNGCSGE

SEQ ID NO: 77242 - protein, 97 aa, Zea mays
  Coding DNA Sequence Number=SeqID_33867
MSGAPEDSNSNLPPSGISRGTRAIIHQTVRCTPDSVRCAKEERPQELAGFGNLQRLVRYNSPDMSEGEDLGISAEDQLKLCGLRIKAGPETKGGPHS

SEQ ID NO: 77243 - protein, 99 aa, Zea mays
  Coding DNA Sequence Number=SeqID_33868
  Subcellular localization annotation: CTP_CleavageSite=30; ConfidenceScore=5.70e-01
MAPAPGSAAPAPAPPRPGKPRPVSDLRRAPASPAPSPTTAAPAPPRLGRPRAAWRSLICDHANTWKQDLTFFLQPSCIPQHKMTNRYLSGAVSIDVDTS

SEQ ID NO: 77244 - protein, 74 aa, Zea mays
  Coding DNA Sequence Number=SeqID_33869
MAERQWNYCGAEGSSRGCRYPEGEVISLDERHWPSLIGREIVAGAGLTCKEHRPSKSTFMALIPTHYPNTSIKD

SEQ ID NO: 77245 - protein, 243 aa, Zea mays
  Coding DNA Sequence Number=SeqID_33870
RAEPELYLPRGFVGHPLLRRSRERALTGPAGGPNFDNAGLVDGGRCHPQRVELVGLAPSGPSCRKAAAASCAQEDHPRCRALLGRRSCSGVVLPLHRVGEGKIAAAPTLRPALLQFGHPERGSLSSQSERVAASRPLVKGTPWPLFDEPRPGPKPRVGLAPSEDGWPRPWGDRPSRLLGPDSRRRPWQRLPGCGDGVVLWSGNPRTASPSEARSDLAEGVVDAEGAAAPFQRQDPSLQDQIVL

SEQ ID NO: 77246 - protein, 173 aa, Zea mays
  Coding DNA Sequence Number=SeqID_33871
MGGGCLSTHGGVLAPVRPIGVRTRPSKNAAATAAAYDVLIGVAKVPPRRIGEHPSPPNAGGRSGSPTHTEGDVKVIQQAARLLGLLANNAPVPSGTLCSSSLPQEASPARQGYADLERQGTRRLPRQQTLEDPSTIFFMSLGPHVGAQSFCACPPSTIKGEARDVKRRTQTEL

SEQ ID NO: 77247 - protein, 127 aa, Zea mays
  Coding DNA Sequence Number=SeqID_33872
MTVGGGCLSYGAPDSPVHTGHVRCASARVPDFCVLLARIKCAAVGEFMRPLFLGAPDTVRCTPDSPVNYSGVPLEIPEGGEFELESSGAPDTVRWCTGHCPVYTGQSGAPDQRCLRLSLCSFVESNT

SEQ ID NO: 77248 - protein, 143 aa, Zea mays
  Coding DNA Sequence Number=SeqID_33873
MARDPLRGLYKVPLTLENTLRFLRREHYWVKRKVIKGTTCLRVEIPRIDDREELRPNQYHRIYSQPSAKDLKVDDVSSSQHPAPALQSGAQAHPRRTPLPQTPNPCSSCPNFNLDRTTPRGDGIELARKSLTGACSGDGSSIV

SEQ ID NO: 77249 - protein, 74 aa, Zea mays
  Coding DNA Sequence Number=SeqID_33874
MAFGSGLTDGSGKLGEVAMRRGVDDEPDAILSSMVGGWGALSMCAGMNQKHKDVDGEAPASLKPRQRLQGFGTR

SEQ ID NO: 77250 - protein, 134 aa, Zea mays
  Coding DNA Sequence Number=SeqID_33875
MTVGGGCLSYGAPDSPVHTGHVRCASVRVPDFCALLARIKCAAAEQPFWFPEAGEFVRPLFLGAPDTVRCTPDSPVNYSGVPPEIPEGGEFELESSGAPDTVRCTPDSPVPQTRGAFGCPFAPLLNPILDLFIG

SEQ ID NO: 77251 - protein, 203 aa, Zea mays
  Coding DNA Sequence Number=SeqID_33876
MQSQKNVLLQYQVTHLHNEIRLRTYLVPLLGSPKLCRPPGCSPFCTRHEAAHGCCLLAEVHSVLQGNWELNGAELLSLGNDPPSDLVPHIGNIRGLLLALELLGCSDWLLGQEGEVPGYSVTDTGFLSVGCSGGTAATAEGTTSDTTAGAGVDAGVLEVMMALSIRCWKVGKAEVVSELLLGDGFRVYIGGKVGLPPGLCCSP

SEQ ID NO: 77252 - protein, 165 aa, Zea mays
  Coding DNA Sequence Number=SeqID_33877
MSALPEPVSGDEDKACPRANGGQLSLMRIPTLPSTTGGQIGPRAQIPPHLMPSSPSDPKPPRPSSAICSTTNPAGGHSVDCVARQKGFVYHLGKTSTAPELDSVLNICSKGHPNVIGYRSDDASRKVCGQTLNLGLGSQWENQRIQVSDEVKGHTVNRVQRCLPQ

SEQ ID NO: 77253 - protein, 59 aa, Zea mays
  Coding DNA Sequence Number=SeqID_33878
MGLGVCGSLCQVWVRPLGRSARHCGTGGYEIDGFGYDYGAGEDEAVEGDFQEFQDYDEF

SEQ ID NO: 77254 - protein, 233 aa, Zea mays
  Coding DNA Sequence Number=SeqID_33879
  Gene Ontology: Mol. function=nucleic acid binding
  Homolog annotation: Hit_ID=Q5NKQ1; Match level="QueryCoverage=26%, HitCoverage=7%, E-value=1e-24, Identity=80%"; Hit description =Putative uncharacterized protein 9C20.4a
MGFLVPQDRHRGILHNAATNAKSMEGSLPRIVCTGVQSTVTHGSLAIRGRQREITRAQLADPTRVWPRSVRWNPRMHWGRNAATGGPAESVTTAAARAPVFFALSAMVEDRHWVCDVVGSRRARLRSYAPPIGGNNHPEALPEDPAGLPRIAVGAARHTRVEVEFNALYPQESLKYATAFKIMHDQEGGANDWVVQHTTRSKKIVWGQHQFKVTADEESGKYTCECKHWEHTD

SEQ ID NO: 77255 - protein, 48 aa, Zea mays
  Coding DNA Sequence Number=SeqID_33880
MAEEEAAAAAVDTTIEKGTSDNISPVACSTLISRCFLTKVVLPEYITK

SEQ ID NO: 77256 - protein, 200 aa, Zea mays
  Coding DNA Sequence Number=SeqID_33881
  Homolog annotation: Hit_ID=Q6QP51; Match level="QueryCoverage=24%, HitCoverage=22%, E-value=2e-16, Identity=81%"; Hit description =Putative growth-regulating factor 1
  Subcellular localization annotation: CTP_CleavageSite=28; ConfidenceScore=5.07e-01
MQAACNHTTRMHPFDFDASSMKSQAHMSCNRRAGYYVRKTAPPLTPMLRLLGCGIGAATQGNPAHGPTVPAEHVVHGSVSRGRRRDGQYGQKWADSNGGSRRAKAVVKSSAGSRPLLKQQESPLPRDRERGYSERDPSPRRKRAPSPPTDQRFEGWPLGRVRQPPQSTRAPRPLLVRGSKAGPSEGFDSRLRPLKLRAHY

SEQ ID NO: 77257 - protein, 65 aa, Zea mays
  Coding DNA Sequence Number=SeqID_33882
MEKDALECDICCLPFQSEVLEDEEEAGFSTATISFLLLWGVDFPRGGGRSGERHREVCNVGKLDT

SEQ ID NO: 77258 - protein, 410 aa, Zea mays
  Coding DNA Sequence Number=SeqID_33883
  Gene Ontology: Mol. function=metal ion binding; Cellular component =integral to membrane; Biological process=ubiquitin cycle
  Homolog annotation: Hit_ID=Q5VRD4; Match level="QueryCoverage=95%, HitCoverage=95%, E-value=1e-160, Identity=69%"; Hit description=ATP synthetase alpha chain-like
  Pfam annotation: Domain name=PHD; Domain location=334-378; Score= -4.4; E_value=0.043; Accession=PF00628.20; Description=PHD-finger
  Pfam annotation: Domain name=zf-C3HC4; Domain location=335-375; Score= 35.4; E_value=2e-07; Accession=PF00097.16; Description=Zinc finger, C3HC4 type (RING finger)
  Pfam module annotation: Pfam domain module=PHD::zf-C3HC4; Domain location=334-378::335-375
MAHTGNLSQRDHTIDIPMSDGMTASTSHQDDHSGSDELHRSRGPSNEVSPSPDTSSGTNDVSNSHNASSARIDRGHRQQNPLNSGFWISIELIVNLSQIVAAVVVLSVSRNEHPQAPLFTWLLGYTIGCIAILPHLYWRYLHRNRLDMEQEMPPQRSPGMNISEINSYAVVSSPHASEAVEGANSTGVSRTNLPMASPRFYAMVACFKLVLDCFFAVWFVVGNVWMFGSRSSAHDAPNLYRICLVFLAFGFIGYALPFILCTMICCCLPCIISVLGVHEDLDMNRGATTEAINTLVAYKFQSKRVHDGDVGGDGGGVLAAGTDKERTISAEDAICCICLSKFSNNEDLRELPCAHVFHMECIDKWLQINALCPLCKAEIGGSKATSNPESGSVDPDNNNNRVDNDVESQR

SEQ ID NO: 77259 - protein, 278 aa, Zea mays
  Coding DNA Sequence Number=SeqID_33884
MVTTSSMVGRSKPSCGICPTLNFKDLHHPCCGGGRAEPEPYLPYGPAGHLFLQHSGESALTGLAEGADFNNAGSVGGRRRQLQHAWLAGSAGSGAASGATSHRWGGAWLSVRRRCSPVREDLSGDLPVGLPVVGAEVVAAGEGFSTDETVGATRALTSGSLALIACPRPSSGDAGEGLVAAVSALRSSLLLFSRAERRSLSLLMERSAASHLEFVVPSPLAQSALPRKASLAQLKNPRLLCNELEPEAAVSAWTEAESTREEASSAREHVASLAEEVQ

SEQ ID NO: 77260 - protein, 89 aa, Zea mays
  Coding DNA Sequence Number=SeqID_33885
MATGCSSATSPGSEILERRCWLLAVIHAYSDVRGNLPAPSSDERFRGRELGTKSRPMRHTPLGVGTHARTGVLKERGNSAGLDEDLHVR

SEQ ID NO: 77261 - protein, 111 aa, Zea mays
  Coding DNA Sequence Number=SeqID_33886
MRKKHGSAPKIHTRSGPDSHNEQKTGIQGSITNGTPVPSPQDASSAELGDGFHHQKLEEEVASRPVREVEPRLASLSAPARMVSILEAEGEAGAAARLASPHPGAGGHRLG

SEQ ID NO: 77262 - protein, 123 aa, Zea mays
  Coding DNA Sequence Number=SeqID_33887
MPPVAELLDVHIFCVAGGLYIFIFYLYRRSSRDCSCSSDVSLIKRALSSTQGCHVSLSGRLLRPFYFTLFLVVNILVWRLAAFGRRTLTDVWSRAINKCLLRLSQIERGNVENMGREIVDDIV

SEQ ID NO: 77263 - protein, 254 aa, Zea mays
  Coding DNA Sequence Number=SeqID_33888
MPRLLDCGTGAATRGNPAHGPTVPTEHIGHGSVSRGRRRDGRYGQKWAGSIGDSRRAEAAVKSPAVSRPLLEQQGSPLPWREDGAPVFRPSNGSRNSCPANHPSRRVNFAASRQGRSDRSHFALSTDRPDRKAVACPAPTVVPPARVKLTAAESSLRRHRKLRLARPQVSASGEVSASPDPRARPPPRKMDSALPDPRARPRPRPQKMDSASPDPRARPRPRPRKVVSASPDPRARPQPRPRAESRPRPTPASA

SEQ ID NO: 77264 - protein, 335 aa, Zea mays
  Coding DNA Sequence Number=SeqID_33889
MAKECSDPLRMACDLKIFPYGRNIAAVVSVVMEKDRQDAAQKRRAFVRIGDPFHEAKKARGATKSATPGSSKPLPAAKPAAPGPSKASTGAKAAASGAGKPPSGGPAKGRRLPSPARTDGAAARVGDFDTDICVGGYFVGSDGGQLAVVPPPVATTSLTTVVGAKGATRDSWATFCASGEILSAAAAKDVAGSMSQQLRQPSQQLKHAADFADHVMSGALTAEFAAEVESLRAQHADAVREKSAAESKNRRLSEKVAAMEVKKADLRRQLAEERREANKAIPDAQAAQAEAKLAQAEGSLACQLDEELEARLDALRSCVDKAETSMHAEVERTHA

SEQ ID NO: 77265 - protein, 76 aa, Zea mays
  Coding DNA Sequence Number=SeqID_33890
MRKWEQELEGKASDVSLTEENRKAKEQSLDRRETDLARREMDLTFKEDMLTPQGEMLAEHELKAEEKERKLKDWIR

SEQ ID NO: 77266 - protein, 149 aa, Zea mays
  Coding DNA Sequence Number=SeqID_33891
  Subcellular localization annotation: CTP_CleavageSite=33; ConfidenceScore=5.02e-01
MDAVASVQLPTRFRFLEHISHLPPYLPFTSPPRAATVDHMGVSSMRSPESRLEPATGGLDHRRRRGPVWALLRVPRKSIVAPTGWNWGYGDNNGSAGRGCRRGGASRRGQTSSWLQSSGWGFVHAGDAAAVYKQGVAAACVQVTTLHVP

SEQ ID NO: 77267 - protein, 167 aa, Zea mays
  Coding DNA Sequence Number=SeqID_33892
  Homolog annotation: Hit_ID=A2X2L0; Match level="QueryCoverage=52%, HitCoverage=43%, E-value=4e-35, Identity=82%"; Hit description =Putative uncharacterized protein
  Subcellular localization annotation: CTP_CleavageSite=24; ConfidenceScore=5.21e-01
MAMTTAVTGLAVAATAPIRSFLSSAAASVSLPADLRDLASDLASDPAVSYRSLRAIWCATSPDTRPPLRDLLQGADFVLPSPKPREKSDELKARLEKLRETQERKEYAELVRDVAPPSKDDAPEPFSSYKDQIGFGTTQPPYFQIALCNLPTACFMDYTCSIEVIGI

SEQ ID NO: 77268 - protein, 76 aa, Zea mays
  Coding DNA Sequence Number=SeqID_33893
MIIAQQVVGNQWHELTKGAQIQRNPGAQTHDYTDSVNNMRRSWVNSKKLQGLLCKIDAAKRYRPDLAVGLETVGPD

SEQ ID NO: 77269 - protein, 58 aa, Zea mays
  Coding DNA Sequence Number=SeqID_33894
MPLVQVSPIHTPSRRLSHSPVTEVMTKKPNKLLHMDTVGSTQAKGEVFTHAQDLILQL

SEQ ID NO: 77270 - protein, 124 aa, Zea mays
  Coding DNA Sequence Number=SeqID_33895
MLLIVARWFMLGARETIDNFLQVRAAWRGIIPYFLVWIFMWWVTREFSSMKDAREWSRWLMNDLPFDGVPPRPYISDRGAPTCVYDNDIQLCPQALAFLPQMGNQDMVTGLESGEDDLGLHHDS

SEQ ID NO: 77271 - protein, 96 aa, Zea mays
  Coding DNA Sequence Number=SeqID_33896
  Gene Ontology: Mol. function=DNA topoisomerase (ATP-hydrolyzing) activity; Cellular component=chromosome; Biological process=DNA unwinding during replication
  Homolog annotation: Hit_ID=A3BPR2; Match level="QueryCoverage=46%, HitCoverage=4%, E-value=4e-16, Identity=86%"; Hit description =Putative uncharacterized protein
MEMNKKIKEDLKAVALGTSKVNYFDSRITVAWCKRHEVPIEKVFFHGRIIVDWWCQVFFHGRCRGAPDCLTYLTSNKGRRLSTGGLTSIDHNSSFL

SEQ ID NO: 77272 - protein, 321 aa, Zea mays
  Coding DNA Sequence Number=SeqID_33897
  Gene Ontology: Cellular component=membrane
  Homolog annotation: Hit_ID=A7PWL2; Match level="QueryCoverage=36%, HitCoverage=60%, E-value=2e-23, Identity=47%"; Hit description =Chromosome chr8 scaffold_34, whole genome shotgun sequence
  Pfam annotation: Domain name=TMEM14; Domain location=178-281; Score =3.6; E_value=0.00043; Accession=PF03647.4; Description=Transmembrane proteins 14C
MASRTSPLVFKRVAGIRTIAESGRFKASSFHFPIIKLLPALITIALPLLVLCWPSRVTVHSSSCKCLGFALRLAAECTILITRTQIPITRGYSVRSKILLLGKFIVYASDYTTPADSVATSEQTGGEAEATLETGGEAAATLEQTGGETEEPTIVAPANEYTEQEAAPQQKCAKIHDFCLGIPFGGLLLSMGLIGFLFWRSPASLTFGVAPGLAILALAVLSLKVWRSGKSSLLFILAQAGIAAAVAWKHGQAYTTTRKLLPWGFYVALSLLCHSESQMKAAPCRLRRQKSEILRAQICVGTWNIEAYVNPMNWILKNGWI

SEQ ID NO: 77273 - protein, 65 aa, Zea mays
  Coding DNA Sequence Number=SeqID_33898
MGLHAAISGQGSGRRNRRHAWCEQQDADERGGRWGIAQRGEAGAGAQAGSRFLRSTPNCIIIYTV

SEQ ID NO: 77274 - protein, 127 aa, Zea mays
  Coding DNA Sequence Number=SeqID_33899
  Homolog annotation: Hit_ID=A3C4M6; Match level="QueryCoverage=82%, HitCoverage=17%, E-value=4e-45, Identity=81%"; Hit description =Putative uncharacterized protein
  Pfam annotation: Domain name=Nodulin-like; Domain location=8-125; Score=7.3; E_value=4.4e-11; Accession=PF06813.4; Description=Nodulin- like
MAGTRWGRWLGLVTAVWVQCISGNNYTFSNYSHALKTLMGLTQLQLNGLSVAKDVGKAFGLLAGLAFDRIPTWLLLAVGSLEGLLGYGAQWMVVSGAVAPLPYWQTRSLWVPNTAASSRRLLLCSKN

SEQ ID NO: 77275 - protein, 281 aa, Zea mays
  Coding DNA Sequence Number=SeqID_33900
  Homolog annotation: Hit_ID=A2XLE0; Match level="QueryCoverage=29%, HitCoverage=16%, E-value=1e-16, Identity=65%"; Hit description =Putative uncharacterized protein
  Subcellular localization annotation: CTP_CleavageSite=32; ConfidenceScore=5.57e-01
MVTHPAARPLPPSRFRPRTPSIHTSSSCRSPPASRSREPLYSALAVPLRDGGPQRGTLCCSCILSRADSDATVVRLISLSSGGHLAGRHELAFFFGSVPCPHPTPLRASLCAHVLMYIPMPMGFIGADPYKIHASFASGRDLEIGELARGSNLSMDVTERLALEELFPNPSSMPGSNVPPPRQAVADDGQSTAETVCESSDAERSAARCVTYVGVELRQRSVFEGGRVVAASADDGTSSCGSSTRESAAAAADVAAMAWRPEANGGMKKKLEKESSLDYSC

SEQ ID NO: 77276 - protein, 168 aa, Zea mays
  Coding DNA Sequence Number=SeqID_33901
  Gene Ontology: Mol. function=DNA binding; Cellular component=nucleus; Biological process=regulation of transcription
  Homolog annotation: Hit_ID=Q7EZD3; Match level="QueryCoverage=82%, HitCoverage=19%, E-value=8e-53, Identity=67%"; Hit description=NAC2 protein-like
  Pfam annotation: Domain name=NAM; Domain location=11-142; Score =267.2; E_value=3.4e-77; Accession=PF02365.6; Description=No apical meristem (NAM) protein
MQPPPQLPAALPVGFRFRPTDEELVLHYLKPKIAGRAHADLLLIPDVDLSACEPWELPAKALIRSDDPEWFFFAPLDRKYPGGHRSNRSTAAGYWKATGKDRLIRSRPAGTLIGVKKTLVFHRGRAPRGHRTAWIMHEYRTAEPQLPQGQNVCCSRYPFRFGCYCPQA

SEQ ID NO: 77277 - protein, 87 aa, Zea mays
  Coding DNA Sequence Number=SeqID_33902
  Gene Ontology: Cellular component=integral to membrane; Biological process=negative regulation of apoptosis
  Homolog annotation: Hit_ID=Q93XL2; Match level="QueryCoverage=47%, HitCoverage=16%, E-value=5e-12, Identity=80%"; Hit description=BAX inhibitor 1
MDYIKHALTLFTDFVAVLVRILVIMMKNAQEKSQDEKKRKKRLSFPSQGWHCHSSHMDAVLHAITNILPRLLRAPLPEIASMMQLTM

SEQ ID NO: 77278 - protein, 85 aa, Zea mays
  Coding DNA Sequence Number=SeqID_33903
  Gene Ontology: Mol. function=catalytic activity
  Homolog annotation: Hit_ID=A3B342; Match level="QueryCoverage=81%, HitCoverage=27%, E-value=1e-11, Identity=44%"; Hit description =Putative uncharacterized protein
MYVEEWHIRWCNDQVYYLADEPGVHFIWQPSQGSSVLTMSRAFDDYYIKDGGVISAPEVWHVLSNDKTMQIMTYIEVCMILIIAM

SEQ ID NO: 77279 - protein, 313 aa, Zea mays
  Coding DNA Sequence Number=SeqID_33904
MTVIPAHKNSWPNNVRVVGIGDDHEVTLFDNEQREVELAVAKLLLIVDERRQRERLVLVVFVRGFQPPPRLLLLFPAQPATREPASPSSALLLAACRDSVFSWRATVPGRPSPRPPLSLAAATKSSGPASFPVLLPRRCPNSAPLWRPPRLRPPPPQLTAPTSSAPLWRAPHCHDSGSPCSLAHLPPTSAMPTIAITAADSTLTVDSAVGFPSPSATGATTAAIARAVDLVPSRLGLPGYPTCIGVLSGLPSLTRLPRHPPPGFSTTRPLVADATWASPTPSTDSTLATTIATIQVALAASQEREHAASRALE

SEQ ID NO: 77280 - protein, 58 aa, Zea mays
  Coding DNA Sequence Number=SeqID_33905
MGYHNCQRVPEGITVVPPPPSSQGVDAAMSHGAFLVIRGQHFAMQSGPRLLYGMAAVR

SEQ ID NO: 77281 - protein, 295 aa, Zea mays
  Coding DNA Sequence Number=SeqID_33906
  Gene Ontology: Mol. function=protein dimerization activity; Cellular component=nucleus; Biological process=regulation of transcription, DNA-dependent
  Homolog annotation: Hit_ID=A7PVT6; Match level="QueryCoverage=90%, HitCoverage=58%, E-value=4e-62, Identity=50%"; Hit description =Chromosome chr8 scaffold_34, whole genome shotgun sequence
  Pfam annotation: Domain name=bZIP_1; Domain location=124-181; Score =29.3; E_value=1.4e-05; Accession=PF00170.12; Description=bZIP transcription factor
  Pfam annotation: Domain name=bZIP_2; Domain location=124-174; Score =27.7; E_value=4.3e-05; Accession=PF07716.6; Description=Basic region leucine zipper
  Pfam module annotation: Pfam domain module=bZIP_1::bZIP_2; Domain location=124-181::124-174
SGKEASGAYDHLGELDQALFMYLDHGSSHGGGATQQERRQTLNIFPSQPMHVEPSPKGEISLVLSPAPVGSKQPRSPDHHHHQQAAMEELAGSRRQQEHLHLQHHQPFAAAAEPAAPGMIKDVKPLAKTLRRLAQNREAARKSRLRKKAYIQQLESSRIRLAQLEQELHTARAQGVFFPNSGILADQGVAGKGVPIGGIDGLSSEAAMFDVEYGRWQEEHYRLMYELRAALQQHLPEGELQMYVESCLAHHDEMVGIKEGAIKGDVFHLISGVWAEPRRALLPLGSAASAPPKSS

SEQ ID NO: 77282 - protein, 92 aa, Zea mays
  Coding DNA Sequence Number=SeqID_33907
MKKGESTGTFIAQGKESASRTIGWRGREDPEIPGDDHGGIALLRRGLGSEVNGRADNAGPTNRGSKDAAVEAADETGPQGSERAQLSHEATD

SEQ ID NO: 77283 - protein, 98 aa, Zea mays
  Coding DNA Sequence Number=SeqID_33908
MAAQLISALETRDGIGDSYVRNYGSEQSMQDGNSTLPANAILFFLWKQNKLQQSKQLQQCRLVASRTRPEAARHWALIATRLVWFVHPDGKLPARPFL

SEQ ID NO: 77284 - protein, 151 aa, Zea mays
  Coding DNA Sequence Number=SeqID_33909
  Homolog annotation: Hit_ID=A2Z2K5; Match level="QueryCoverage=82%, HitCoverage=27%, E-value=3e-32, Identity=58%"; Hit description =Putative uncharacterized protein
MAEPGDGSRRRREAEAPVVALECVAGSSKAEEWGGGAGVVQEGDVVEAVRVGRGSGGGGAAAALELEAPFKGGRAGLHKALHAAFKRGDTSVEVRVRGGRQLQACIVPHHASPGAGGGGVRKQYVLRSLHDPNYLLGFVDRPRERVPRLTR

SEQ ID NO: 77285 - protein, 369 aa, Zea mays
  Coding DNA Sequence Number=SeqID_33910
  Gene Ontology: Mol. function=nucleotide binding; Biological process =defense response
  Homolog annotation: Hit_ID=A2Z2K5; Match level="QueryCoverage=87%, HitCoverage=68%, E-value=1e-130, Identity=73%"; Hit description =Putative uncharacterized protein
MTIVWSPSPPQLYLATVSLVLTVATAHLPCIPLELHISPRKMEKKIGTRSTRVASALSKAQLQDGYVAYPWDKKMRDTLHTPNSSCYLSMLVLPKALDSNACHYESFDDTVARANAWFYSSQAAGIPIDFMNVQSEALLTKISGETASASVNSSSLSDLSNVTNATLYGFEDYHGVDIGVVKAARLWYSCVGGELLLEIPLEEGDTRLGFAISRTEEGFIYISSVVEDDKESEAPSTRSGLCDLFNRAKEASKLLIISRVSNEKVLPWMISSSGAVRCFDTISLSQKLSLHRLAVRPIQLHLLAWEKPSAPNPAERAVRSPKLTMPSTLLPHLQQNLVETIEGGVDAEEEYVGNLSFRIDDISFESSWV

SEQ ID NO: 77286 - protein, 586 aa, Zea mays
  Coding DNA Sequence Number=SeqID_33911
  Gene Ontology: Mol. function=protein binding
  Homolog annotation: Hit_ID=A2XIG7; Match level="QueryCoverage=94%, HitCoverage=94%, E-value=1e-162, Identity=55%"; Hit description =Putative uncharacterized protein
MAVVAAGGEEAFAPAAPSTSGAPASRQDVQAAIAKAVELRQLHAALIQRGAPNARAASRSPAVIRLPPLASPARSRAADEEYPVFTPAYDDEEHVAAVAPNHICPDNRSRSENWTGVALDQGGSDDAALSDYDGLQAFSSSNSDVFFPSSNDHRLRNRGTAYKIHPAFMHSAPSADRFLPSAGRVAYTSELNLPPATCGNAFRPATISGTRVPPPSAHSRTKQGGPPQILSWLFPKSRKKAKPPEMTSPTAIERGNMPQLLTEWGALSMESLKKELAEANAHRDAALHEAAEVRSSLGELATKLVSVEAYCSELKKALRQATNSPSVSRRPTKSIEPSRELSMPVSHEVMVEGFLQIASEARLSVKQLCKALIQQVNEESSDGLSDKLNLLLRPYQLALSSGSVSKHCSKAVLYHLEAIMNQVMFQDFENPAFQRNGSPRCLDPAEDSRQSFAAFVALRNLSWNEVLRKGTKYYSEDFSRFCDRKMSVVVATLAWSRPWPEQLLQCFFVAAKCVWLLHLLAFSFGPPLTILRVQDGRAFDELYMEDILHDRQPVQSPCQVKIMVTPGFYVQDRVLKCRVLKTRSAA

SEQ ID NO: 77287 - protein, 66 aa, Zea mays
  Coding DNA Sequence Number=SeqID_33912
MRLMVLVMIMVLVRGILSVWKGYIGLITWVNVKTWLSTSCQHCNHCSGEDEAVEGDFQEFQDYDEF

SEQ ID NO: 77288 - protein, 232 aa, Zea mays
  Coding DNA Sequence Number=SeqID_33913
  Gene Ontology: Mol. function=protein transporter activity; Cellular component=cytoplasmic vesicle; Biological process=intracellular protein transport
  Homolog annotation: Hit_ID=Q5VQ78; Match level="QueryCoverage=86%, HitCoverage=25%, E-value=1e-109, Identity=84%"; Hit description =Coatomer subunit beta'-1
  Pfam annotation: Domain name=NHL; Domain location=1-28; Score=19.2; E_ value=0.016; Accession=PF01436.12; Description=NHL repeat
  Pfam annotation: Domain name=WD40; Domain location=100-139; Score =46.0; E_value=1.3e-10; Accession=PF00400.23; Description=WD domain, G-beta repeat
  Pfam annotation: Domain name=WD40; Domain location=143-197; Score =36.7; E_value=8.3e-08; Accession=PF00400.23; Description=WD domain, G-beta repeat
  Pfam annotation: Domain name=WD40; Domain location=15-53; Score=5.8; E_value=6.1; Accession=PF00400.23; Description=WD domain, G-beta repeat
  Pfam annotation: Domain name=WD40; Domain location=57-95; Score=45.3; E_value=2.2e-10; Accession=PF00400.23; Description=WD domain, G-beta repeat
  Pfam module annotation: Pfam domain module=NHL::WD40::WD40::WD40::WD40 ; Domain location=1-28::100-139::143-197::15-53::57-95
MNHPKGSTVDDKGNIYVADAMNMAIRTVRSAKFISRKQWVVAGADDMFIRVYNYNTMDKVKVFEAHTDYIRCVAVHPTLPYMLSSSNDMLIKLWDWDKGWVCTQIFKGHSHYVMQVTFNPKDINTFASASLDRTTKIWSLGSPDPNFTLDGHQKGVNCVDYFTGGDRPYLITGSDDSTAKLPIIITGSEDGTVRIWHSTTYRLENTLNYGLERVWAVGYMKGSRRSMLVATS

SEQ ID NO: 77289 - protein, 126 aa, Zea mays
  Coding DNA Sequence Number=SeqID_33914
  Homolog annotation: Hit_ID=Q7XI45; Match level="QueryCoverage=69%, HitCoverage=77%, E-value=7e-25, Identity=65%"; Hit description =Putative uncharacterized protein P0524E08.106
MGRDEMLRRSLVALAAAVALTGLATASLRKAAVTYGFGILAIAGVLLPDWEFFDRDYSQWLTPMPASRRTAAAAAADREHDVWKFVPVLVPVDSTQQIESNACRSLYGPEYHRINSSSTIITIDGP

SEQ ID NO: 77290 - protein, 106 aa, Zea mays
  Coding DNA Sequence Number=SeqID_33915
MADLEVGSIWSEEVGRGLPAGRWRSFAAGLPSVSSGRAIGVGEWCIAFAASAAEGTLRRGGTGEDAGQGEEDGAVPNFPVRRGDGGEETVVKDGGEGTAGRRMRGG

SEQ ID NO: 77291 - protein, 83 aa, Zea mays
  Coding DNA Sequence Number=SeqID_33916
MGTNGHLDLDTGGKSVDQKGENSKQKDFVFGERVSPKQKDFVFGKVGLAFVEAFLAQKTYFRKFGLWSLFRGYGFRINDPRFF

SEQ ID NO: 77292 - protein, 186 aa, Zea mays
  Coding DNA Sequence Number=SeqID_33917
  Subcellular localization annotation: CTP_CleavageSite=81; ConfidenceScore=5.25e-01
MAQGSVGEAGKMSRGPVGPAAGQLCRGSGLALRALGRGAWGGAHGSARRATRLGERSCSRARAQAERRSGPPRAGSRRECRAQGRAAAQGPLDATPGGTAERVRRGERGWVREERGEDSPGTAVCRDDSFCAIWIWGDLDLGRETRGYVTAVGIDGDSQRSSMSFARKDILMIPRKGHEIWNRLDE

SEQ ID NO: 77293 - protein, 67 aa, Zea mays
  Coding DNA Sequence Number=SeqID_33918
MSRAVRSHRHALFARGHTWSCALSVCSFTHCDPFPSFEESTVKLGDQGIELFEFYEAEDPEHLFGEG

SEQ ID NO: 77294 - protein, 50 aa, Zea mays
  Coding DNA Sequence Number=SeqID_33919
MGSRHSACSAEAGCRGSFVLLFSRPPAGRGKEEGVKADLQEFQDFDEFED

SEQ ID NO: 77295 - protein, 121 aa, Zea mays
  Coding DNA Sequence Number=SeqID_33920
  Gene Ontology: Mol. function=glycerone kinase activity; Biological process=glycerol metabolic process
  Homolog annotation: Hit_ID=Q10DU4; Match level="QueryCoverage=46%, HitCoverage=8%, E-value=1e-18, Identity=80%"; Hit description=3,4 -dihydroxy-2-butanone kinase, putative, expressed
MDESCTQLLSSDPMINLNITSTVDDLEPLAHRTVRCSHQTVGSATRHARIARPTVGSPDSLLSKQGCILEAVIEASATEIINLMDSLNEWDSKVSDGDYGSTMYRGATAILEDMKKRKFTA

SEQ ID NO: 77296 - protein, 150 aa, Zea mays
  Coding DNA Sequence Number=SeqID_33921
  Homolog annotation: Hit_ID=Q7XHY7; Match level="QueryCoverage=98%, HitCoverage=51%, E-value=2e-28, Identity=50%"; Hit description =Putative uncharacterized protein P0524G08.115
MTTFTFGSHELRLLCLRAASMLVQWMQLSVINSVLALSFAESAVTGVCNAVALQIVVTVSVSRGSPDEQLPTQHPEIVKGCSVIELGSGIGITGILCSRFCKEVVLTDHNDEVLEASSIAVLTSEKLEWGNSDHLSGIIEKRPGGFDLDP

SEQ ID NO: 77297 - protein, 218 aa, Zea mays
  Coding DNA Sequence Number=SeqID_33922
  Subcellular localization annotation: CTP_CleavageSite=38; ConfidenceScore=5.19e-01
MQAGSERKKPNCRARCVQPPNGYKRLSTFAQTNGRKGRATMQAACNRAKDRERGIPRKGSFPVKEPGFRASLLIRGSKAGPSEGFDSRLRSRGPYTHYWSEVRRPAPQKGSTAASGYSGSAPITDQGNDLVTESHRREASSPRTPSPGDRLTGDTMFGAHRGGSGAALANPAPAEPLTASTYQPENLGLDRTPGLRPARMRDDQTSRSITRGIKTSEE

SEQ ID NO: 77298 - protein, 20 aa, Zea mays
  Coding DNA Sequence Number=SeqID_33923
MDCSIREVCVVTKVEYYFGS

SEQ ID NO: 77299 - protein, 238 aa, Zea mays
  Coding DNA Sequence Number=SeqID_33924
  Gene Ontology: Mol. function=transcription factor activity; Cellular component=nucleus; Biological process=regulation of transcription, DNA-dependent
  Homolog annotation: Hit_ID=Q6DKU6; Match level="QueryCoverage=76%, HitCoverage=81%, E-value=1e-46, Identity=57%"; Hit description =Ethylene-responsive factor-like protein 1
  Pfam annotation: Domain name=AP2; Domain location=69-120; Score=67.6; E_value=4.3e-17; Accession=PF00847.11; Description=AP2 domain
  Subcellular localization annotation: CTP_CleavageSite=51; ConfidenceScore=5.15e-01
MAPGVDCRLPTSGLVLKQTARTFMPRTPLTHREISPASVLLCSPGDNTPSRQQAANAPCAKVKPGRCKIQYRGIRQRPWGKWAAKICDPVKGVRVWLGTYPTVEAAARAYDRAARRIRGAKAKVNFHSDTSSCVTVPTTASRSTAAAAAQAPAVLPPPKVEAQTELSDEVKELSEELMAYENYTNFLGIPYMEGGTTAASATTAAASAAAEESQVPAPAGLWSFEDYYYPSSQSLFTE

SEQ ID NO: 77300 - protein, 37 aa, Zea mays
  Coding DNA Sequence Number=SeqID_33925
MADSGSPRKREENEEGDDIVCLDPSFFVDSSYEMTVK

SEQ ID NO: 77301 - protein, 166 aa, Zea mays
  Coding DNA Sequence Number=SeqID_33926
  Homolog annotation: Hit_ID=Q8GRJ4; Match level="QueryCoverage=99%, HitCoverage=97%, E-value=2e-22, Identity=42%"; Hit description =Putative uncharacterized protein P0524G08.117
MDEKEFWRMLDLFPVVRSRDYCVILLSSARPHYHSPFLSAYAAKSGVLIWGRPKSQAAICGVPFEHELMQFFLGGKCRLILEHLSEEPDSDHEFSYCLQEAAKGNDKDSSDAQDLFMQKLKMAAEKKIGTTKAEFFCKAFEETHEKLVYKELNLDAAKKFLSAYES

SEQ ID NO: 77302 - protein, 161 aa, Zea mays
  Coding DNA Sequence Number=SeqID_33927
MGKNNKRKREPTPPSEDFGDSEYSEEEFSSESEGSPAPIPLRESSDDSDDSQGLAAEVWTYIWAVERSGLEGLDESEYSSDEEDSSEEDGGGDGEDDDDDDEGDGGGDGDGGGRGDSKDGDGGSSRGGGGGSNKGSNKHNSEFLNHSSAHLICEVDFLGIR

SEQ ID NO: 77303 - protein, 66 aa, Zea mays
  Coding DNA Sequence Number=SeqID_33928
MAEASFHVFDASWHPGARSEHAHCNLADGEYILVPEQGAAQEVAPDPAPEPAPEDLPATAWKASPG

SEQ ID NO: 77304 - protein, 83 aa, Zea mays
  Coding DNA Sequence Number=SeqID_33929
MAGRGEVAGGNGWLGRVRRGHSRVHLAPFCPLGRQVLKRGSSLYVIMGKRGNPGMDTLSNTWGVTVDLFLDWSIEEGTLHVHL

SEQ ID NO: 77305 - protein, 76 aa, Zea mays
  Coding DNA Sequence Number=SeqID_33930
MAGKKSLATTVRGNVVECQRRRTPPGAPTTTCGPRPGITNAEHAMITIGKQAYRGDDEVDADDVTAPSAAGHEPRS

SEQ ID NO: 77306 - protein, 194 aa, Zea mays
  Coding DNA Sequence Number=SeqID_33931
MAQNHPIPTNGPSRGGAHWQVVVPWSEQGARPTSGPNRTGRISKRCGDQGKSDGDILTKDQDANREVPDEQQLPNSDGESRSNLGFTRAVDFSHMIHRFLQSSTQSAASFSLLRLPVSLGRLTSSGVALLESNIEAAMTWHINIPSHGQDRTAGQDTGARWIRANPAATASENFSKVCYRVARESLTNRAHIGD

SEQ ID NO: 77307 - protein, 274 aa, Zea mays
  Coding DNA Sequence Number=SeqID_33932
MNVNGNLQNGIGIQMGQIKAIEIKETAEKGRNRKSETAEKKRNINHGFVGILCWNSDPVANSPRTELLRRKDPNGHEMEKIQRCTRFFLDGPSRGGAHWQVVVPWSEQGARPTSGPKRTGRVSKRCGDQGKSDGDILTKDQDANREVPDEQQLPNSDGESRSNLGFTRAIDFSHLIHRFLQSSTQSVASFSLLRLPVSLGRLNSSGVALLESNIEAAMTWHINIPSHGQDRTAGQDTGARWIRANPAATASENFSKVCYRVARESLTNRAHIGD

SEQ ID NO: 77308 - protein, 110 aa, Zea mays
  Coding DNA Sequence Number=SeqID_33933
MGVTKGRLDDSQGIAAEVWTYIRSVERAGLEGSDESEVSSDGDNSSDSSKEGSGGDSDDEGDEGDGGDSGDGSDNGGNGGRSEGSGKGGDDDNGKGGSSSSKVSGKAPLA

SEQ ID NO: 77309 - protein, 730 aa, Zea mays
  Coding DNA Sequence Number=SeqID_33934
  Gene Ontology: Mol. function=catalytic activity; Cellular component =cellular_component; Biological process=metabolic process
  Homolog annotation: Hit_ID=A2X0R3; Match level="QueryCoverage=92%, HitCoverage=99%, E-value=0.0, Identity=69%"; Hit description =Putative uncharacterized protein
MWRLKVAEGGGPWLRSTNGFLGRAVWEFDPDLGTLDERSEIEKMRREFTQNRFTRRESSDLLMRMQCAKENGPQQELPHINLQEDEQVTEEIILKSLRRALDKFSSLQASDGHWPGDFSGVMFIMPGLNEDGGWGTLILGSSSMFGTCSNYVTLRLLGEELNGKNNGLAKGRTWILTHGGATLVPQWGKIWLSILGVYDWSGNNPIFPELWLSPQFLPFHPGKFWCLTRMVYLPMAYLYGKKFVGPITSTILAIREEIYDSSYEKIDWSEARRTCAKEDLLCPRTPLQSAVWTSLYMYVEPVLSCWPMNKLRERALRSLMEHIHYEDVNTQYVCICAVNKILNMVCCWVEDPNSDAFKCHLARIPDFLWLSEDGMKAQEALLLLYCVDFTTEVHPVENFRCKVYDGCQSWETAFIIQAFCATDLVNEYGPTIQRAHEFIKHSQVLRNHPGDQSYWHRHTSKGSWTLSSVDNGWAVSDTTAEALKAVLLLSKISNNLVGYPLERGRLYDAVDCLLSFMNPDGTFSTYECKRTSSWIEILNPCESFPNMVVDHPLGTWGVCFTYAAFFSMKGLVTAGRTYGNSMSIRKACQFLLSKQLNSGGWGESHLSNETQVITPSYQIERDPAPLHRAAKELINMQMETGEFPQQEHVGCFNKSLFFNYPNYRNIFPIWALGHKKQGNISELTFLFTFKLLFLKRLIKGEKPWARISPYQGPGYHTCKAQALNISSRIW

SEQ ID NO: 77310 - protein, 261 aa, Zea mays
  Coding DNA Sequence Number=SeqID_33935
RDDHQPCGGEKQAGLRPPPALSFKDVHHPCWGGGRAELGSRLSHGLAARFFLQHSGEKGVHQPCGGGNLWVCGTGRLQVSPAAACPVPRLGWPWRRLQRCLLPFGWNMAVRPPHGRWSRRAQVRHIHGFSRAAGRTRGSYKTSCAVGAAAAFLDGLVLTPSVRTGARTYSRVLRHPPPTGAEVTAVIGVEVVATTEVATTVGAEVVASAGERSELAIPRPYWVVERAGPRYGTRLSDYMGSGPPQETNVHSLVPVPRLSDP

SEQ ID NO: 77311 - protein, 321 aa, Zea mays
  Coding DNA Sequence Number=SeqID_33936
  Subcellular localization annotation: CTP_CleavageSite=42; ConfidenceScore=5.13e-01
MASGKGAESPDRGGGTILLMVALHVLSMQSAISAQALHNSARAWSISVLSMATRLTMLLNLGLPSPTGETITPLVLLVERRGVSVQGPTQQGVKSVMEMTTVGGVTSDVRAIHPSVSYSSESSVLWLELPPSSSSPSGSPPAAGCPMVVQGAPLAEAQGRVASQTPPPIEVRGKNPVVSTPGIGAPAPRAGGGAVSPGGSTVLSHCGAVDAPQGERTGKGSPTYVQCIYDGPSTKDIVGTRVRIELYDQQVNQKQSHTENGTRLHCMGRSKGTTWKGKIIHPRMHHWVRTSTEGHRTPVRTSLELPRRHVGSLGWAPALSE

SEQ ID NO: 77312 - protein, 35 aa, Zea mays
  Coding DNA Sequence Number=SeqID_33937
MKGSATLPQLGGTLQGFAEGVSSCRTFGDEARSQQ

SEQ ID NO: 77313 - protein, 120 aa, Zea mays
  Coding DNA Sequence Number=SeqID_33938
MEWWSVKAFGYGTRLSGHTGSGPPHGTGSRSLEPAPRLLDLPTFVSGALNCKPDCSIQMSSCQYRWELLGPCFVAEGPAGRNTFGKACLYEIPKLPLTKLRYYGVSEDEGSNRLESRMTF

SEQ ID NO: 77314 - protein, 68 aa, Zea mays
  Coding DNA Sequence Number=SeqID_33939
MAKERQPPRGCAPLTAARRRQDWQHHHERELSDGEIARGGGPNADPSREHRRTPSGGPEGGRVTVGAK

SEQ ID NO: 77315 - protein, 398 aa, Zea mays
  Coding DNA Sequence Number=SeqID_33940
MQSACNRAKWAHPFDSNAPSMEAQAHKSCNRHAGCYVRATAPPLAPLPRLLDCRTSTATRGNPAYDPTVPARRIGHGPAGGSNGHVVSQAHVPSWDSEGTLSHGVKTARPCSIPRTARARATAAPRTTRPVALTPRRDRRHLWQEKRTTLRLRHNDRVKKGTGKGDTLKGILLREGNGPRAPLLIRGSKAGPSEGFNSRLRALGLRAHYWSEVRGPAPRKGSTAASGHSGSTPTTDQGGNDLVTESHQREASSPRTPSKGDRVRQITRSSLETPCSAPSKGNMALPPSSLRKGDAGVGSDSTSALEDRLDLDLEGASTSPNPGLRPTTSQEAPSLPYPKLTQAMGNKTGVPSGWPRLQRSYDDHDTTRTGCQNLSGYHDGMALLQKVGRAGKDGTTLA

SEQ ID NO: 77316 - protein, 590 aa, Zea mays
  Coding DNA Sequence Number=SeqID_33941
  Gene Ontology: Mol. function=transporter activity; Cellular component= membrane; Biological process=oligopeptide transport
  Homolog annotation: Hit_ID=A2WKJ2; Match level="QueryCoverage=88%, HitCoverage=91%, E-value=1e-149, Identity=52%"; Hit description =Putative uncharacterized protein
  Pfam annotation: Domain name=MFS_1; Domain location=68-530; Score =26.6; E_value=9.4e-05; Accession=PF07690.7; Description=Major Facilitator Superfamily
  Pfam annotation: Domain name=PTR2; Domain location=130-522; Score =405.3; E_value=8.9e-119; Accession=PF00854.12; Description=POT family
  Pfam module annotation: Pfam domain module=MFS_1::PTR2; Domain location=68-530::130-522
MEMEAVESHGGAGRRTPKRDRGISWACVFILALYMASLALKPSGCGLCTACTRTCIHGGDGGTRPDITPASNCFQFIAYFAVSTNLVNYLKDRLHQGSKAAANGVTNWMGTSAITPLVAAFLADAFLGRYWTIALFLVISVLAYVVLTVSAAAALESAAFYAGLYLLALGGALQPVLSSFGADQFDEEERGRQSSFFNWFYLSINVGSLVGGTVLVWVQSSVSWGLGYGIPALFSALAVAAFLAGTATYRRHQPPAGSPLTRVAQVVVAACRKCGVQVPEDASTLHECEDVGGMSAIQGSRRLAHTDQFRFLDKAASVEPSDDKSRPASAWRLCTVTQVEELKCVLRLLPVWASGIVFAAAYTQMTTTFVLQGDTLDPYVGGFRVPAAVLSVFDTLSVMLWVPLYDRLVVPLARRATGHDRGFTQLARMGVGLVVLTAAMLAAGALEVARRRVIARHDMYDTNTGAGGDGEYLPLSIFWQVPQYVVVGASEVFTFIGQMEFFYDQAPDAMRSLCSGLSMTSFALGNYVSSALVTVVARATARGGRDGWIPDDINRAHLDNFFWLLAMLCAGNFGVYLLIARWYTYKKTVD

SEQ ID NO: 77317 - protein, 27 aa, Zea mays
  Coding DNA Sequence Number=SeqID_33942
MFFLPNLLPLPTVAAASRPTLVDAAVY

SEQ ID NO: 77318 - protein, 317 aa, Zea mays
  Coding DNA Sequence Number=SeqID_33943
  Subcellular localization annotation: CTP_CleavageSite=22; ConfidenceScore=5.10e-01
MQAACNRAKWAHPFDSNAPSMEAQAHKSCNRRAGCYVRATAPPLAPLPRLLDCGTSTATRGNPAYDPTVPARHVGHGSVSRGRRRDGIGKRGYPEKGSFPAKGNGPRAPLLIGGSKAGPSEGFNSRLRALGLHAHYWSEAGPRRVHNRLRRRARDDPGYVRYITKARATLPRRHRKLRLARPRSRTRAQPQKTTNSTSPDPGLGLGLSPGRRRTPPRPTQGSDSGSAPEDDELRLARPQGSESGLAPEDDELRLARPQGSDSALASADGLRLARPRGLDSTSASEDRLDLDLGGASTSPNPGLRPTTSQEGPSLPYP

SEQ ID NO: 77319 - protein, 374 aa, Zea mays
  Coding DNA Sequence Number=SeqID_33944
  Gene Ontology: Mol. function=hydrolase activity; Cellular component =nucleus; Biological process=metabolic process
  Homolog annotation: Hit_ID=A7PLV3; Match level="QueryCoverage=100%, HitCoverage=89%, E-value=1e-138, Identity=67%"; Hit description =Chromosome chr14 scaffold_21, whole genome shotgun sequence
  Pfam annotation: Domain name=Abhydrolase_3; Domain location=99-340; Score=260.9; E_value=2.8e-75; Accession=PF07859.4; Description =alphabeta hydrolase fold
ETTATPNPTFSAAANGVASKDIHIDPNSSLSVRIFLPTPPPPSPHAHLLAHAHPRRASDPTPTTPAPAPANGAPYRGYLPHAVSSPRAAASARRRLPIVVQFHGGGFVTGSNTAAANDAFCRRVAKLCDAIVVAVGYRLAPESRYPAAFDDGVKVLKWIAKQANLAMMTKVGGGVDTFGASTVEPWIAAHGDPARCVLLGASCGANIADYVTRKVVEDGKPFDPVKVVAQVLMYPFFIGSVPTHSEIRLANSYFYDKSTCLLAWRLFLSEKEFNLDHPAANPLAPSRRAPPLKCMPPTLTVIAEHDWMRDRAIAYSEELRKVNVDSPVLDYKDTVHEFATLDVFLKTPQAQACAEDIAIWMKKYISLRGHEFSY

SEQ ID NO: 77320 - protein, 146 aa, Zea mays
  Coding DNA Sequence Number=SeqID_33945
  Gene Ontology: Mol. function=electron carrier activity; Biological process=protein amino acid phosphorylation
  Homolog annotation: Hit_ID=Q5N6W3; Match level="QueryCoverage=70%, HitCoverage=20%, E-value=6e-39, Identity=78%"; Hit description=ABC1 -like
MAFSMQIHTQETSLSVALLDYGQVKEMPEDLRLAYANLVVAMADDDFLRAEESFRELGIRTWAISDNKLEELFQLSLRMFDTRLPPGVTVMSPFADDSSLTKIGVELQNQESKREVFSGDCFGEVGIGAIKEHDIRTFCDESMKRN

SEQ ID NO: 77321 - protein, 112 aa, Zea mays
  Coding DNA Sequence Number=SeqID_33946
MAKSRSEAGELRVRLTAAKSDLGCHRKLRLARPQGSDSASAPEDDELRLARPQGSDSALASADGLRLARPKGSDLTSTSEDRLDLDLGGASASPYPGLGPTTSQEGPSLPYP

SEQ ID NO: 77322 - protein, 134 aa, Zea mays
  Coding DNA Sequence Number=SeqID_33947
MTGDKQRQKLKQKPSSEISNTYIKKVHKKDATPYLIKKKKNGKVIAIKANKQANKGKGAKRIWVPKEIISTMKSTKKVWIPKGNLLPSGLVKIVDPNFPPMSKWFWLFGPKIGIHRMQRELDQGNEDATPQKKT

SEQ ID NO: 77323 - protein, 165 aa, Zea mays
  Coding DNA Sequence Number=SeqID_33948
  Subcellular localization annotation: CTP_CleavageSite=58; ConfidenceScore=5.49e-01
ALDARRQKGPTGQSHARALLTALSLTCGTALSGWPSPSRSRNRPRDNGGLRAGITLVRATESATRPPRLQPRRDPRGTTYKDRPPPLVRDIERKAPRSAAAVDRRRWGVSALEIGSWSVAFTWGSRVCHQFELNAARTRAIARRTAILRRGPLFVAARVAVVSNT

SEQ ID NO: 77324 - protein, 34 aa, Zea mays
  Coding DNA Sequence Number=SeqID_33949
MAMMGSTSHKMYFCQKGFGMIAEKGNRLKDEKAN

SEQ ID NO: 77325 - protein, 103 aa, Zea mays
  Coding DNA Sequence Number=SeqID_33950
MAKRGNALPGPWSSDRLTQPAWARNHMAAHTRDELPELFNVFMGGEVMPMSGVTSSPWAPVPLTVGPRNWCLGVGLADPSWAPSCVPVAVAIRSGGLKMVFGP

SEQ ID NO: 77326 - protein, 264 aa, Zea mays
  Coding DNA Sequence Number=SeqID_33951
MTSHGSSEGGNAQSHTDGLAREGFPHILWEVLQGAGYTTPPQYAVQMFEKHRVPRCRDTIEAIALHGLTTFCGFHPLELSTHPIGLFPTEKEDDPMWKDRVEHAKDIWALYLGQTAHLMVRCMDALYRLQVMRGEAMSHLMALLEATKITLDNREELVVDLSTEMVEKDLQVEQMSNEIQELEELVGTRENTIEVLEDQLINTQQQLAEANQHLDMHHWEIQDMEANEDVDIVGGEEPEPASNLDTAGSGRPPSPESSVASFAH

SEQ ID NO: 77327 - protein, 254 aa, Zea mays
  Coding DNA Sequence Number=SeqID_33952
MAFPCRYGSVVVPLRLGRPGHASKGWHALRRGRNCCRHGPVVETGCLGVGLADFGWALSCVPVAVAIRSGGLKMRRSSVDLLQPNNGGRVQSGARGPPLGDVEAMRARNREMVQWITRSTCSGGVTKSGERDCTVPVGLVLGSSLGKLYGLSRKLSEGSDRVEVGGNGLAMAGALGWLWWVAGRSPELRAGSGRLGVVRKGRQGRCPCMRVGFIATCGHDMGAGTGAAEGARGRACGRALGVFPSACPRRIRGG

SEQ ID NO: 77328 - protein, 254 aa, Zea mays
  Coding DNA Sequence Number=SeqID_33953
  Gene Ontology: Mol. function=ATP-dependent helicase activity; Cellular component=nucleus
  Homolog annotation: Hit_ID=Q650T9; Match level="QueryCoverage=61%, HitCoverage=34%, E-value=2e-29, Identity=73%"; Hit description=DEAD -box ATP-dependent RNA helicase 7
  Pfam annotation: Domain name=KOW; Domain location=205-240; Score =22.3; E_value=0.0019; Accession=PF00467.20; Description=KOW motif
MGKVEDATKVQTLLFSATLPDWVNKLSMRFLKVDRKTVDLVGNEKLKASASVKHLALPCNKAAMAQVIPDIIRCYSQDVLPHRWLFFSNTGVAVMLYEPRYKHSDSRLERESGVKFEHISAPQPTDVTQSTGSEAADAISSVSDSVIPIFRQQVEQLLSSSSLSAADLLAKALAKAVVCYNIPVIVFLHRWGHICSHWCYLQFDVGNVVMVTGGRNTGRVGVIKNWEKHKGIFEENIEWNSNLVVAKVWRLEFI

SEQ ID NO: 77329 - protein, 140 aa, Zea mays
  Coding DNA Sequence Number=SeqID_33954
  Gene Ontology: Mol. function=unfolded protein binding; Cellular component=endoplasmic reticulum; Biological process=protein folding
  Homolog annotation: Hit_ID=A7R0W4; Match level="QueryCoverage=30%, HitCoverage=7%, E-value=1e-11, Identity=71%"; Hit description =Chromosome chr12 scaffold_326, whole genome shotgun sequence
MVFIRVWQLGFEQQGRWPLGIPGGRWALIAAEGPADKGGKGRKVTQTRARLWTFPTISLGFRDGDIAFLSSCVDALLDSACFVAAHAAEAVSYVVATAGSLLEQFEVRLQNGLECVGAYIKYIRPQDARWDAKEFDNETP

SEQ ID NO: 77330 - protein, 71 aa, Zea mays
  Coding DNA Sequence Number=SeqID_33955
MGGCSPRVETQERLSDGADVGRPRVDGGGASAAQGEHRGLKLFPEYLSVRTCSLDNHPGKQYNHEGGMGCP

SEQ ID NO: 77331 - protein, 134 aa, Zea mays
  Coding DNA Sequence Number=SeqID_33956
MQRLSLGSPAGKNSRLSVAADEEAEATDEKAAKAMVRARALNRSIHLVPVLTLLCFLVLFLLSHDPSAALTDSPVLAAATTVTVTARPLEAAVVAGGADATVASSGVYRRLKEDPRQQQQQQPHGRRLGMSRRR

SEQ ID NO: 77332 - protein, 165 aa, Zea mays
  Coding DNA Sequence Number=SeqID_33957
  Subcellular localization annotation: CTP_CleavageSite=51; ConfidenceScore=5.21e-01
MADDELSGQPRPKLHTRPPYARRRTRRTLWWPSTTNMVVPRFLVPQRSSTSHAHASHDGRGEGDRGGQFPRPGYGSVRRRCPTRHGKMGWVHEGIAAPGVYTREDSATAREEGEIRSVERARFPAAISPRSVAVEGAEEKNGVTAPWAPRTSVSTVWHRKQGYMG

SEQ ID NO: 77333 - protein, 168 aa, Zea mays
  Coding DNA Sequence Number=SeqID_33958
MPRMMVEERGDRGSQFPRPGRGSVRRRCPTRHDKMGWVHEGIEAPGVYTREDSTTAREEGEIRSVERAIFSAVSSPRSVAVGGEEEKNGVTAPWAPFTTVSTMSQAPARGSDEAQSNGAHCQGEKRKRYTERGRLDSGPPVSETALVGYARVEEKGSGPNARYAAQFR

SEQ ID NO: 77334 - protein, 111 aa, Zea mays
  Coding DNA Sequence Number=SeqID_33959
MEEVDYEVRGRIVDVWDSTAHPGLPLKAVERSGLEGSDESEISSDEENSSDSSEEESGGDDDDEGDDGDGGDGGDDGDSDGKGDDDGDKGDSGSSKGDGGSSKASGKAPLV

SEQ ID NO: 77335 - protein, 581 aa, Zea mays
  Coding DNA Sequence Number=SeqID_33960
  Gene Ontology: Mol. function=catalytic activity; Cellular component =peroxisome; Biological process=metabolic process
  Homolog annotation: Hit_ID=A7QP48; Match level="QueryCoverage=89%, HitCoverage=97%, E-value=1e-151, Identity=53%"; Hit description =Chromosome chr1 scaffold_136, whole genome shotgun sequence
  Pfam annotation: Domain name=AMP-binding; Domain location=111-503; Score=326.5; E_value=4.9e-95; Accession=PF00501.19; Description=AMP -binding enzyme
  Subcellular localization annotation: CTP_CleavageSite=37; ConfidenceScore=5.14e-01
MPSPSSLHHFSPRLPLASTNGKATPFHFHQFTTNDVQATTNQQELIRMGDAAIAVVHEADEEEQEHIFRSRFPPVDLPDDVTVPEFVLAGAEAYADKVALVEAAPGGRSYTYGEVARDVARFARALRSVGVRKGHVVVVALPNLAVYPVVSLGIMSAGAVFSGVNPRAIAAEIKKQVEDSDAKLVVTNEVAYDKVKDAGVPVIGIGDDMERLPGAISWDELLAAADRTGAPVVALDPVQQSDLCALPYSSGTTGVSKGVMLSHRNLVSNLCSSMFAVGEELGTVVVMDRFDLRTFLGALVTHRVMFAPVVPPVMLAMVKSPVADDFDLSGLALRSIMTAAAPLAPDLLAAFEKKFPGVQVEEAYGLTEHSCITLTHAASGDDARQGPVQVAKKNSVGFILPNLEVKFVDPDTGRSLPKNTPGEICVRSQAVMQGYYRKKEETERTIDAKGWLHTGDVGYIDDDGDVFIVDRIKELIKYKGFQVAPAELEAILLSHPSVQDAAVFGLPDEEAGEVPVSCVVRRCGASESEADIMAYVAGRVASYKKLRLLQFVDVIHKSVSGKILRRQLRDEFVSRTKTAAA

SEQ ID NO: 77336 - protein, 487 aa, Zea mays
  Coding DNA Sequence Number=SeqID_33961
  Homolog annotation: Hit_ID=Q2QXC0; Match level="QueryCoverage=81%, HitCoverage=56%, E-value=2e-33, Identity=28%"; Hit description =Expressed protein
  Pfam annotation: Domain name=DUF1618; Domain location=214-353; Score =35.7; E_value=2.2e-08; Accession=PF07762.5; Description=Protein of unknown function (DUF1618)
MSEKDLTEFSRAGQEAEQEPESEPQRKWVALVSVVVFSKEDDRTQEIVLGTDVLLDLHDPPLASYLVLHPRLAPNSRRPDEPLSAYILAANNGSACILLQVVSGNRLDFFLCDTHSRTVDIVAPVSCHLRTDQDIDIRPHLSIGLVADPYERGHNVIFQLHPTTSLYHQSRLLVYPTARRRWFVLPIPIARQAAHMCNPFSENSALAHDGRLWWVALAYGVFFCDLFTPSCAWRPELRFLPLPADCQMDGYVAFEPRVRTLLHQRRCVRTSEGKLRFVEIRGLSYDDPPRDPANPTVWMWTLQDPEGPDPWTFEYEVPFAEIWDNETYADAGLPPGEVPHVALVDPNDHCVVYFLQGSKLFSLDVRKKQVIACKESLIDRDQVILFQSSRPVVDAWELPPPPPTFSGDDDDLLPEDVLSDREEKRQVNEYVQSWLDQVWLEWTRRDADTTDEGAPPPSDEPPDHSGVQQAGDEPEIQAPGTGSPGAL

SEQ ID NO: 77337 - protein, 79 aa, Zea mays
  Coding DNA Sequence Number=SeqID_33962
MAPKRATSKAAASIDNAAKAALLAEKKGKALADNAPRRPLKMMLSTARDSARITPPPMALCALAVPRMHRKHHHQASLP

SEQ ID NO: 77338 - protein, 145 aa, Zea mays
  Coding DNA Sequence Number=SeqID_33963
MASACGALRKSTSLASKRSLLVWVLAVGGCDVEDLGGPEAVVVEPAPLDGDGNHYWVDAGFARYGRVVSVVRGGNLRRETRNRIIVAVGSVLGPFVLRHCRGLEGGIPDGVWALWLGADWLWVLGLPLGFNFALMELLRPVILLN

SEQ ID NO: 77339 - protein, 98 aa, Zea mays
  Coding DNA Sequence Number=SeqID_33964
MVLEIVVFPYQGETTLRLSKGKGDNKTCKDLQGVKEGEAVNDEVGEALSPNRDGKEEASKGRFKVSGRQGNRYHVGVKVITDKDVGEEVNGYKNEGYK

SEQ ID NO: 77340 - protein, 58 aa, Zea mays
  Coding DNA Sequence Number=SeqID_33965
MGNSQLSNWVERKGRLLKDKFKVRSRDEISKENTPPECKDGVEELASDLEEDDDHRYH

SEQ ID NO: 77341 - protein, 36 aa, Zea mays
  Coding DNA Sequence Number=SeqID_33966
MGSRHSACSAEAGCRGKEEGVEVDLQEFQDVDEFED

SEQ ID NO: 77342 - protein, 180 aa, Zea mays
  Coding DNA Sequence Number=SeqID_33967
MGVGKGRLAPSHILLPLVAYSLLFYSTIGKSKEGRKFVAPLWRQAEARADSSLGGLRRFRVLGGGVLLQVRGSPVHASPPASSDDSDDSQGIVAEVWTYIRAIERAGLEGSNESEVSSDKGDSSDSSEEGSDDDDGGEGDGNDGGDGDGDGSKGDGKGDGKGDGGSGSGKGGSGGGKASG

SEQ ID NO: 77343 - protein, 168 aa, Zea mays
  Coding DNA Sequence Number=SeqID_33968
MASPGLRTPRAIGGCSLGQLIIFYLSLIRRVIYDTPSTVGETHGAPSTPRANADTRTRSGAEKNMIGITTSLRGVRPLELSRQRLRLVAQPGDGRGTTTTTPLPGIDIIIDDRRTRVEYRRSLHASGPFNGPLTSKSPMSTSMSLSRIREAGWPSTPPPPEPLGQPKM

SEQ ID NO: 77344 - protein, 91 aa, Zea mays
  Coding DNA Sequence Number=SeqID_33969
MNQPRQEKNLFSENLADEGTDAEIFGDITKLESGTRRSSCHEMRSRRWERLQKNGSSGKGGIPDDVIVGNLKSGLSRKQDNAKRILFSDET

SEQ ID NO: 77345 - protein, 86 aa, Zea mays
  Coding DNA Sequence Number=SeqID_33970
MTGPKAYSNPAVYSRLSASKEHEIEPSHTTSAKQLTSSDTTTPETIWAASNNPHDRPAHRRTSPTTHLAEILCAHDLIFVSVVNTL

SEQ ID NO: 77346 - protein, 153 aa, Zea mays
  Coding DNA Sequence Number=SeqID_33971
MGKNNKRKREPTPPSEDFGDSEYSEEEFSSESKGSPAPVSPPASSDDSDDSQGIAAEVWTYIRAVERSGLEGSDESEFSSDEEDSDDGEDEDDDDDDGDDDDDGDGDGSNGGGGSGGKGGTRGGSSTGSTRGGSSKGSTRGGGGKGSSSKASG

SEQ ID NO: 77347 - protein, 152 aa, Zea mays
  Coding DNA Sequence Number=SeqID_33972
  Gene Ontology: Mol. function=RNA-directed DNA polymerase activity; Biological process=RNA-dependent DNA replication
  Homolog annotation: Hit_ID=O48967; Match level="QueryCoverage=75%, HitCoverage=25%, E-value=3e-44, Identity=73%"; Hit description =Putative uncharacterized protein
METISTLFALADKCARDAEGRAWHSAPQTGVAQAGGSGAVPRDGKKKKGRDHEKPWSTTLVVIAAVEGRGDHNKRPRPQRGNSGSCPIHPNSRHSAAECREIIDLAKHVSKRREQSPKDGSPPRRRPGKERVDDARWPWLNGTSGISHPRGS

SEQ ID NO: 77348 - protein, 250 aa, Zea mays
  Coding DNA Sequence Number=SeqID_33973
  Gene Ontology: Mol. function=heat shock protein binding; Cellular component=nucleus; Biological process=protein folding
  Homolog annotation: Hit_ID=A2X204; Match level="QueryCoverage=36%, HitCoverage=43%, E-value=1e-33, Identity=63%"; Hit description =Putative uncharacterized protein
  Pfam annotation: Domain name=DnaJ; Domain location=145-203; Score =41.6; E_value=2.8e-09; Accession=PF00226.22; Description=DnaJ domain
  Pfam annotation: Domain name=TCP; Domain location=34-187; Score=9.7; E_value=7.7e-09; Accession=PF03634.4; Description=TCP family transcription factor
  Pfam module annotation: Pfam domain module=DnaJ::TCP; Domain location= 145-203::34-187
MDNMAEVSVVSDNYEQAAAGERELPSNGSPPVVDDAGVQGLRDRRMRLSVGVAREFLALQDRLGFDKASKTLNWLLAQSKPPIDCLVDAADQVAVVTGGRPTLVKGREQGSNSSTCCLTDLRAGVLLPVLLAGRGVDEMQRPNAKILGVGKTTSQQEIKKAYHKLALRLHPDKNPGDEALVGEAANNLQEYFRTMYKKVAEADIEEFEAKYRGSDYEKTDLKDLYTKYKGNMNRNNYLLYHIVKSEIVLQ

SEQ ID NO: 77349 - protein, 134 aa, Zea mays
  Coding DNA Sequence Number=SeqID_33974
MGLGDVDVGHWPQCTTRSRTREILQDLGWPRAIPCGRGSHNSYLSPFGVKHQKGTRTYTSEEGGGGGGASGRGRGSRANTSCGSESVSDQGSAVEAEAGTDSDGGCAAGAARAEEVIDTATTAVVTAGAGGIGG

SEQ ID NO: 77350 - protein, 154 aa, Zea mays
  Coding DNA Sequence Number=SeqID_33975
  Subcellular localization annotation: CTP_CleavageSite=72; ConfidenceScore=5.61e-01
MGAIKVKAQSTQGTRSRLARAQPRAKAADPGGFTSRPRTPSSNGHSFGSPEAQSSQRSNLGQIATPTDRIAGAFNAKGSDSTTTQKTTDSASPDPRARTQPRPRKTVSASPDPGLGLDLDLGRQTRPRPRRSLRLTRPRARTDHVIGGPSLPYP

SEQ ID NO: 77351 - protein, 182 aa, Zea mays
  Coding DNA Sequence Number=SeqID_33976
  Gene Ontology: Mol. function=kinase activity
  Homolog annotation: Hit_ID=A2YJW0; Match level="QueryCoverage=62%, HitCoverage=27%, E-value=9e-32, Identity=60%"; Hit description =Putative uncharacterized protein
  Pfam annotation: Domain name=DUF789; Domain location=1-128; Score= -103.4; E_value=2.4e-08; Accession=PF05623.3; Description=Protein of unknown function (DUF789)
MARRRPGSTVADPCGGTEGGGYPIYRIPTGPTLKDLDACFLTFHCLATPCKDCDPPTLACPGFGGINRGKTAAGKLSLPIFGLAPYKLRASIWTSDKTQERDRVTSLMQEADSWLRTIQVSIVESNHILNEVNTHILPSHNDLTPITTIAGGSVANTIRGLSAGFGISTGDYCLSTIRALVV

SEQ ID NO: 77352 - protein, 220 aa, Zea mays
  Coding DNA Sequence Number=SeqID_33977
MGQRTLAFTKLLIRDFLCNFLRKHRLLVVYVKSEDLTVRIQGRRVKFQKTGGLFKKTRGRRGIGLLRPSDLRSTRRIRSAGGRASARRPERLTGGAGGQRGRGRLTGGASGQRGRGWADRRGQRAERARGVGEVGPGPLDLRWAARIGLGLFKIEPSDLRWTAGMGRLASVPFSSQQRRRRPHPRRRISPETRARGLCGSLGRPEWPGRLGKARGILRRG

SEQ ID NO: 77353 - protein, 231 aa, Zea mays
  Coding DNA Sequence Number=SeqID_33978
  Homolog annotation: Hit_ID=A3A499; Match level="QueryCoverage=77%, HitCoverage=9%, E-value=7e-67, Identity=74%"; Hit description =Putative uncharacterized protein
MTTISVPHSVFSQQVHSIYLGYKILFDALISVYENQVAVSRRMSLFEDCSQLLFELLDASLNATTSPDCSVKMAYVLTNVSLTYMAKLRDERFICPAGTDYDVVTCLDIISSKQLTNAACNSLLFKLVMATLTNESSEILRRRQYALLLSYLQYCSSILDSDVPPSVLWFLLLEEQDGDDEDITLQKVLKEHNELAHANISIIRKEAQAIVDLVEVTDTALLALIENFTPL

SEQ ID NO: 77354 - protein, 342 aa, Zea mays
  Coding DNA Sequence Number=SeqID_33979
  Homolog annotation: Hit_ID=Q2QQ41; Match level="QueryCoverage=46%, HitCoverage=55%, E-value=9e-10, Identity=25%"; Hit description =Putative uncharacterized protein
MVLMEPAVLNRERVALDKKNRMPMLFDDYSDEDFYGVQRKYSIVARVEVKFPIEPRYRDRQHYILSDINGAKIEAIATRYEIVKYFNSLLHEKHVYKMHNVWFGLNPGAFNFRHLNGTMELYFTHQTVVEPYAVPVQMPPFPKHIFLNLDDIAELPNRTLVDIMAIVVHLDTIHRTMWGTFRKIVIMDARWSLHTIKVWGDLLNKNALRWELANENYSIIIGTMFRRFRKQVISFHPWFLQYYFYAHVFSGTVLVIDQMGHNAGRKPFTDISSNIIRGDQNELLGPMVDAKERKRKRDRERYAAMSIEQKNEKNRKHREARQRNKGHNVMPNVSGRDENVQF

SEQ ID NO: 77355 - protein, 748 aa, Zea mays
  Coding DNA Sequence Number=SeqID_33980
  Gene Ontology: Mol. function=helicase activity; Biological process =protein amino acid phosphorylation
  Homolog annotation: Hit_ID=Q1EPC6; Match level="QueryCoverage=36%, HitCoverage=20%, E-value=1e-106, Identity=60%"; Hit description=DNA helicase homolog, putative
  Pfam annotation: Domain name=DUF889; Domain location=31-250; Score =363.1; E_value=4.7e-106; Accession=PF05970.5; Description=Eukaryotic protein of unknown function (DUF889)
  Pfam annotation: Domain name=Peptidase_C48; Domain location=317-495; Score=-19.0; E_value=0.0049; Accession=PF02902.10; Description=Ulp1 protease family, C-terminal catalytic domain
  Pfam module annotation: Pfam domain module=DUF889::Peptidase_C48; Domain location=31-250::317-495
MAKRQSIEVLDNSMCDIMGRPDLPFGGKTIVFGGDFRQVLPVVRKGSRAQIVASSLQSSYLWESMCHLKLVRNMRAKSDPWFAEYLLRVGGGTEEVNNNGDVRLPDEVCVPYTGDDRDLDRLIDDIYPSLNENMSNTSYITSRAILTTRNDWVDMINMRMIDRFQREQMMYHSFDTAVDDPNNYYPSEFLNMLTPNGLPPHVLKLKIGCPIMLLRNIDPANGLCNSTRLVHAGMRVFLPRIPVCPSDDEMFPFHFKRKQFPLYVALSRATTRLNVKGDLALIDWIKEIPCEPRVEVVLIDDAFVERKWMECLFQPDAYLGDEVIDCYINLIKAQEHLKCRSGGRVHIENAFQFNFLKRDGDVETKTDELYPSKDMAQISSAKRRVLLYRDHDMVFIPINIREMHWYLAVINARNMEMQVLDSLGTSSGRNDLIDTDDMSHFRKKLAAILLSSDINKRKGCPLYKYDKEVDAGCSSDVQILDSPTNPKKRKLLCVSKESEVLMEDDDGPITQADLERWFVHDWDKRTPIKIPIDECTNEFLLSGLSTKDMPVTKADLIDVLCDYIMTIQDDTTLEMTWVRSFNPFKIEISVKDLQNVLRVLMPWKFNGCYALFIIDHGKKHVTFIDFTPTQDWCKHMPYKRFAEAIIMASKKYKIAYNKKRSGWADDIFKWEHTIRSGLPMDLKGVNTSYFVLQAMVMWGSGRRMEFNWDAKILRRNFVIDLLSYEENSCRYAIPPNIQQRLISIAKKD

SEQ ID NO: 77356 - protein, 121 aa, Zea mays
  Coding DNA Sequence Number=SeqID_33981
  Homolog annotation: Hit_ID=A2Y9I4; Match level="QueryCoverage=40%, HitCoverage=11%, E-value=3e-07, Identity=57%"; Hit description =Putative uncharacterized protein
MWQQGVQDNVEQMKDKQTATLDDVLASAQVDSCNTDGASTIVASSSRGSYAQHKCKMNKHKLRKLQKRLCRRHESSLLSSSRTLTFGQLGPCLAVCNELHCRCFCLNDNQFADWSPLTSFL

SEQ ID NO: 77357 - protein, 66 aa, Zea mays
  Coding DNA Sequence Number=SeqID_33982
  Gene Ontology: Mol. function=DNA binding; Cellular component=nucleus; Biological process=response to salicylic acid stimulus
  Homolog annotation: Hit_ID=A2ZPF8; Match level="QueryCoverage=78%, HitCoverage=20%, E-value=2e-21, Identity=86%"; Hit description =Putative uncharacterized protein
  Pfam annotation: Domain name=Myb_DNA-binding; Domain location=27-64; Score=26.0; E_value=0.00014; Accession=PF00249.22; Description=Myb -like DNA-binding domain
MERDYSSMGSEMPGKKARKPYTITKPHERWSTEEHARFVDALLMFGRDWKKIEEHVGTKTTVQFCA

SEQ ID NO: 77358 - protein, 233 aa, Zea mays
  Coding DNA Sequence Number=SeqID_33983
  Homolog annotation: Hit_ID=Q8H6I2; Match level="QueryCoverage=100%, HitCoverage=100%, E-value=7e-99, Identity=78%"; Hit description =Putative MURBZC
  Pfam annotation: Domain name=Zea_mays_MuDR; Domain location=47-233; Score=-23.2; E_value=0.00049; Accession=PF05928.2; Description=Zea mays MURB-like protein (MuDR)
MESAAAICAQKLSLAVVAARDTLNASAAASIVAGDYCATFSIGNHVVSTLDVLESAVAAEKSAMHSYKQASAAVDCAKETVANVYYTFFDAMKSVRALAVISQLELRLEVNQKLAQALKYAMSQMSDTAKKLQDTASLCYTDEDVVDGFKLTQVARSMDELAEMLEGTAIDCQVSMMDPTTMLEAGYASEDSAVWEDVFRDREIMNQPVEAETLAEHCAKWGLNYNEIWDRSV

SEQ ID NO: 77359 - protein, 104 aa, Zea mays
  Coding DNA Sequence Number=SeqID_33984
MGERTTIQIVVCCALSTQFRNLCPNLAQLVKGVVQLSVEHGGQVDHAVMTGIALANWRDNQTIELQVKAISYLAKQRAILKKCTSCCILHGFLGSIPLSDSVVL

SEQ ID NO: 77360 - protein, 40 aa, Zea mays
  Coding DNA Sequence Number=SeqID_33985
MEREEELPAQPNREGKGVVAVSSGRWKNVDIGRPFLAFSF

SEQ ID NO: 77361 - protein, 184 aa, Zea mays
  Coding DNA Sequence Number=SeqID_33986
  Homolog annotation: Hit_ID=Q6QP51; Match level="QueryCoverage=45%, HitCoverage=50%, E-value=2e-10, Identity=40%"; Hit description =Putative growth-regulating factor 1
  Subcellular localization annotation: CTP_CleavageSite=88; ConfidenceScore=5.40e-01
MVQWITRSTHSGGVVNSGDRGLASPAKQASIPRSGSFNEVCSVVSGGRTGLGKAGLAGLRRQGLGWPRTRRARANDGEQSSGESLAPRCALAMVTPEVLHSPRSDYYANHQGKANDRSSASPDLRPREKVSASPESGLGLSLGLGRSHNLARPQPWPQEKSLPRPTSASDRTAPQGIHHYPTPS

SEQ ID NO: 77362 - protein, 262 aa, Zea mays
  Coding DNA Sequence Number=SeqID_33987
  Gene Ontology: Mol. function=carboxyl- or carbamoyltransferase activity; Cellular component=ornithine carbamoyltransferase complex; Biological process=amino acid metabolic process
  Homolog annotation: Hit_ID=Q8SA97; Match level="QueryCoverage=30%, HitCoverage=11%, E-value=1e-10, Identity=52%"; Hit description =Ornithine carbamoyltransferase
MGGVAGNDGASCDVVGPSPGVGEVEAPPRSRSSLSSEAEVESEPLGRARRRLSVEARAETEPWGRAMRSSSSSGAEPDSEPWGRAKRSSSSSGLSPSPSPGVGRCRVRRLPGLSLSPSPRVGRCGVRRLPGLSPSPSPSGSAEFPMAPEAGLGCCHPHSVEWHSSRSGAGGAVLLSGRSVERRSDCGHFGSVDWRARVRIRCHATFALNAPAIRSVGVATWTWLLLGEDWASGESKLCADGGYQLRLGVLRVPLIMVPDSSP

SEQ ID NO: 77363 - protein, 83 aa, Zea mays
  Coding DNA Sequence Number=SeqID_33988
  Subcellular localization annotation: CTP_CleavageSite=55; ConfidenceScore=5.17e-01
MQAACNRAKWAHPFDSNAPNMEAQAHTSCNRRTICYVTGGTFGRRSGRRFAFAIMIASKKGPGKGDTPKGILLREGNGPQAPY

SEQ ID NO: 77364 - protein, 46 aa, Zea mays
  Coding DNA Sequence Number=SeqID_33989
MKAAGFPFYACLPPASSPLRAPSRADPSGLGHAATIYSSVQGPPGA

SEQ ID NO: 77365 - protein, 115 aa, Zea mays
  Coding DNA Sequence Number=SeqID_33990
MTLGTSVTWPRLGLRSRGTLGHFRDQKERFCNGIPSEGGIEPSDPIERDRVRQITSSIQISYSLHSIDCNLADGEYMLIPKQGVDREGVQELAPEPATEDVPAAPALEGKPRFYA

SEQ ID NO: 77366 - protein, 454 aa, Zea mays
  Coding DNA Sequence Number=SeqID_33991
MPTLVRGHRQREQQHPRRRFHLPRDLAWPRTATRVEGSPPRRRTPATLSGHRIQGLRKGPGPSRHLDRPLRSLSQLSPEDTSPAHGLGSVTLGLVPLADDLAKLQRDSSAWEATCSWTNEASSRANSASVHADTAASGSGSSQSSRGATHARLSGSASRQASPSARNEEETRYYTQIPRCSGLDSHNEQTPALKVPLQTELRFHSRGYEQPPHRRAYETTNSGWLAADHCSSDNDLRLGRQDSSSDGPRANATAGRPSFTSPCGGREPAIKVKEPEARSAGGIDGVVGGETLSGCHHLSTDDSGHLPTNTTPTSGGRPKAHRQVLTPVLATKTRTGPSQNMSTTLAAYYVLCDPPVQPATVARTEDGMLHPGQAVAVRLPSHGWRTPPPQSYRMVSSPGCWRKKRVAGPRGSRPRLAPRSSPARVMKILEAEGGAEAAARLASPHHRTGGHHHG

SEQ ID NO: 77367 - protein, 62 aa, Zea mays
  Coding DNA Sequence Number=SeqID_33992
DFAQSGAPDCPVVHRTVSGAPGWLGQTGCSRDFDGGELVALGNSSATYGYNSPDCPVCTGLS

SEQ ID NO: 77368 - protein, 338 aa, Zea mays
  Coding DNA Sequence Number=SeqID_33993
MTYGGEPSIKVFAKHYCLHRQKKTVDAEAVKIVGKYSAKTEFTRSIEIQDGNICLNRVFEMRELEYGPYPEDVEEGEEEDSSTIAKVKEVIEGSEDMVGLKRRALPTEGKMRKSVKGSRSPNKMETVPEDFVGLNVEMTEFAEDLAETMGEAMSPMSLVAAHARAATVTWGKYIPNAVGEDYELNRLARSLDIFPYGYNIGGVLSALMDKDRRSKSKKRKGVIRIVDPKGSAKTQTVKAIGAKGGAVETAKAEAARVEETETRAVSTVGAKDVSVYDYLAEGLVSNEPPSLRLVGAGDPRGVALSVVAGTAAATLRMAMEDMLAVAEVAKATGEQLRY

SEQ ID NO: 77369 - protein, 163 aa, Zea mays
  Coding DNA Sequence Number=SeqID_33994
  Homolog annotation: Hit_ID=A2XNU0; Match level="QueryCoverage=30%, HitCoverage=6%, E-value=1e-06, Identity=60%"; Hit description =Putative uncharacterized protein
  Subcellular localization annotation: CTP_CleavageSite=74; ConfidenceScore=5.25e-01
MGKVVQMLDGVMELERPPHPKSSVRFFSTTTTASGDNSSMVSTGHASLAAAPGRDVCRSVSILYLIFYSRALPESQALSSVVFFAECLLSGTRQRRLCRVPHSVKLGTRQSDLYRVLNTRYRTTLGKDNFAECQTLGKGGSRETDVSGRPKADGRQSLPRANG

SEQ ID NO: 77370 - protein, 112 aa, Zea mays
  Coding DNA Sequence Number=SeqID_33995
  Gene Ontology: Mol. function=nucleoside-triphosphatase activity; Cellular component=integral to membrane; Biological process=transport
  Homolog annotation: Hit_ID=A2XQR0; Match level="QueryCoverage=95%, HitCoverage=12%, E-value=2e-17, Identity=46%"; Hit description =Putative uncharacterized protein
MRGNVTPKHLPLLWMLHNGYEVPDDLQKDLENIDTIRELYTVRSISSEQSSEEQSENTDSVHRNLSQSNELLERKTPGVFAQYGYYLGRVAKQRLREATQQAVDYLILCIAD

SEQ ID NO: 77371 - protein, 120 aa, Zea mays
  Coding DNA Sequence Number=SeqID_33996
MALGKEGNLGTGKDIFAECCCQGTRQRYWQRGPLEGSLSSASPPDTRQRSLLCRVPTRALGTGTGGGAHWSSLCRGPLEQTIGKIGLFAECHRRHSAKDPSPSLGAVTIGPLLSAIMLIH

SEQ ID NO: 77372 - protein, 202 aa, Zea mays
  Coding DNA Sequence Number=SeqID_33997
MVFRASFGIQFSQEIHIFPSSLSTLLSSVTLVKTFVECYRGFPECLRHSEKYSHYRKRALCRVPETLDKAPLGKGFAECRTRQRRLGKQYIGKCFFAEYFFSGTRQRGLPSAREHSAKKSGRYGDEVTETASLPSVKDDTRQRLHRLCRVSSRKHSAKNTSLPSAFWDIRQRARQGGSPCQALCRVLSGTRQSLPLYRVPET

SEQ ID NO: 77373 - protein, 153 aa, Zea mays
  Coding DNA Sequence Number=SeqID_33998
MTEDPLTGHMPRHGIHFSKHLCKTESLIFEIPYLDSLITSIPLRVFSLVGLCNCFRISVSPMVCNICVTGETLLGKTYLEKDFFHSYPLYLKNLYERPDRRSAMYRRHIAIPYMKKFMYCIRNCTLTYLKILSGQKPDLLMKLEKLLVENWTF

SEQ ID NO: 77374 - protein, 28 aa, Zea mays
  Coding DNA Sequence Number=SeqID_33999
  Homolog annotation: Hit_ID=A2WP73; Match level="QueryCoverage=100%, HitCoverage=5%, E-value=6e-07, Identity=100%"; Hit description =Putative uncharacterized protein
MASSASTLEIEARDVVKIVLQFCKENSL

SEQ ID NO: 77375 - protein, 61 aa, Zea mays
  Coding DNA Sequence Number=SeqID_34000
MASVLDAVVETTRALTPTLVKKVTEGVTTHTETEAGPSVPAETKLAATEQKVEEESPGLNP

SEQ ID NO: 77376 - protein, 61 aa, Zea mays
  Coding DNA Sequence Number=SeqID_34001
MASGIKLAGAKERGLAGEGERGRYGARKSGLSPCSNPRQIQGFVVSRARVPMPSSGTRQRG

SEQ ID NO: 77377 - protein, 273 aa, Zea mays
  Coding DNA Sequence Number=SeqID_34002
MSDGNGPPKLHAAKPDDHVELLGVESNWNMGDAEEVLHTSYDESVEADHGGGRFNSGALDGGSEEGGLGSQVYNIRDFSERNTTRGGDFARQARVLLGTTTWQRGGHRQDTVPNGLTRSGTCSTSHGDGRQTRAATEAVRRRPAETTSSSSAQVAPAWTEGWSVWRSGCPRRNAARPNRRRGKKRVAALDLYPGRKEKGRRSPPRPTPGLGLTLDLGRWSPPRLTPGLGLNLDFGLRGNKTGVPSRLAPVTSNDGSPRLKRSSDGHDIAYTGL

SEQ ID NO: 77378 - protein, 161 aa, Zea mays
  Coding DNA Sequence Number=SeqID_34003
MQVACNRTTGTHPFDFDASSMEAQAHTSCNRRAGYYVRETAPPLAPMSCLLDCRTSAATRGNPAHGPTVPIEHIGHGASDTFGRRSGRRFTSAMMTASKKGPGKGIFRKGSFSAKEAGPEPSYRSGVRRLAPRKGLTVAPEPSGFKLITDQGFEGWPLERV

SEQ ID NO: 77379 - protein, 114 aa, Zea mays
  Coding DNA Sequence Number=SeqID_34004
  Subcellular localization annotation: CTP_CleavageSite=54; ConfidenceScore=5.28e-01
MTTVPIDSPFASRPHCLGIQCSTDPGCRRVVTALVPTIASMGDPVSGRMRYKVRARLQSEFTTSKVYDLLELNKVNFAYWLGTGVCFSVSKFGDQKVNGFLWTKLPNFRAEGVL

SEQ ID NO: 77380 - protein, 300 aa, Zea mays
  Coding DNA Sequence Number=SeqID_34005
  Gene Ontology: Cellular component=cytoplasm; Biological process =embryonic development ending in birth or egg hatching
  Homolog annotation: Hit_ID=A2WP73; Match level="QueryCoverage=72%, HitCoverage=40%, E-value=1e-106, Identity=92%"; Hit description =Putative uncharacterized protein
IRRLPQNPKMASSASTLEIEARDVVKIVLQFCKENSLQQTFQTLQNECQVSLNTVDSIDTFIADINAGRWDAVLPQVAQLKLPRKKLEDLYEQIVLEMAELRELDTARAILRQTQVMGVMKQEQPERYLRLEHLLVRTYFDPNEAYQESTKEKRRALIAQAVASEVSVVPPSRLMALIGQALKWQQHQGLLPPGTQFDLFRGTAAMKQDEEETYPTSLSHQIKGGGDAENPNVVGSHTLADEVQVDLHMLGVLVLHDIGGEEASTIPLVTARYSASTLERETTGCRLAAQETRLAPRNTT

SEQ ID NO: 77381 - protein, 47 aa, Zea mays
  Coding DNA Sequence Number=SeqID_34006
MSGRRVPWVQSSRAGDRRRRFGKPCSSTGTGHGPGGGTGWRPMRRSV

SEQ ID NO: 77382 - protein, 247 aa, Zea mays
  Coding DNA Sequence Number=SeqID_34007
  Gene Ontology: Mol. function=protein binding; Cellular component =cytoplasm; Biological process=embryonic development ending in birth or egg hatching
  Homolog annotation: Hit_ID=A2WP73; Match level="QueryCoverage=73%, HitCoverage=37%, E-value=9e-95, Identity=84%"; Hit description =Putative uncharacterized protein
  Pfam annotation: Domain name=WD40; Domain location=208-246; Score =22.3; E_value=0.0018; Accession=PF00400.23; Description=WD domain, G- beta repeat
  Pfam annotation: Domain name=WD40; Domain location=73-111; Score =40.9; E_value=4.6e-09; Accession=PF00400.23; Description=WD domain, G-beta repeat
  Pfam module annotation: Pfam domain module=WD40::WD40; Domain location=208-246::73-111
MAIQTQYPQHLLHSERRAIEHHLIPHLPYTPGPKSYKRVKSFPYFFAQWNPNLLPQIKEVNHIRLRVHGLKSGKMLKEFRGHSSYVNYAIFTTDGSRVITASSDCTVKVWDTKTTDCLHTFKPPPPLRGGDASVNSVHLFPKNTDHIVVCNKTSSIFIMTLQGQVVKSFSSGKREGGDFVAASVSPKGEWIYCVGEDMNMYCFSYQSGKLEHLMKVHEKDVIGITHHPHRNLVATIAEDCMMKIWKP

SEQ ID NO: 77383 - protein, 134 aa, Zea mays
  Coding DNA Sequence Number=SeqID_34008
MAAPVAEAFFGGMTKVDACGRWSKRVHRRKIEMITSYKCTFGLKEDKRPSEAEGPQQMFLKMKEDEAKNKIEEEENDRWRPNDESTSSQGSSFISTSHMCFVANGSDSESESEDEDEHESDSEDENDLQKFFAQ

SEQ ID NO: 77384 - protein, 147 aa, Zea mays
  Coding DNA Sequence Number=SeqID_34009
MNKKHWHSKCHYERNSGSPSAGTNDPTPWGRPAEQQKTDERLAAARSNHDDNHPRPGQRSGLGSSFGAGVTTGGLSPEDENQPFRPGDGDPGPLAPYLSRHGWRKSPWDSRTPFSPRRGGKKKAADPCGGSPPTRLIFHLGLDDENP

SEQ ID NO: 77385 - protein, 26 aa, Zea mays
  Coding DNA Sequence Number=SeqID_34010
MRLHTLRDDVVLYSQRCLLLIKGSGN

SEQ ID NO: 77386 - protein, 124 aa, Zea mays
  Coding DNA Sequence Number=SeqID_34011
MDKDPLDMVETAVQVIEAHVNIIHSLVTDGVVETTLPESVYTLKTTLFQIGDVCDKLEKCALSIKKYATTKRQAVVEHQERQLEHDIDATLEVDSLPSPEAISQREILEKHFGIEYDSDQSWGC

SEQ ID NO: 77387 - protein, 339 aa, Zea mays
  Coding DNA Sequence Number=SeqID_34012
MGSARVVFVSLWEERNLVEVGTFQPSLGFKDFHQAARLHPLTNGRAESELYLPYGPAGHLLLQHSGERALTGLAEGADFDNVGPIGRKRRQLQHAWFAGSGTASSATSHRWAECGYLPAVRAAVAPRAPGDRPKRRTLLGRRSCSWVVLPLFRHDASARRSVLTRPGGLEWGSAGGQVATVVSAEVVAAGEGFSADEIVGAIYAPGLRLFGFDSLSLPLERGHGRGPCRSSVCPEVITAVVWPPGAEVVVAAAGVGGGEPPGSCHPESLGLVSLATRGFSCSVKENPRPLCDELVPEAAVRGADIFVRGGDPLTVSPFETGPDSVEGGVDAEGAAAPPY

SEQ ID NO: 77388 - protein, 314 aa, Zea mays
  Coding DNA Sequence Number=SeqID_34013
MATTQEVDPFLKATHPTRVLRRRGLSLHQRAQRSSPYDTGAGSHASCKLARTEEAKPPRAERVTAQRLQALLHLHLTQRVKGRTTMQAACNCTTEMHPFDLNAPSMEAQAHTSWTGKGDTPKGILLCEGSGPQALLLIRGSKAGPSEGFDSRLRALGLRAHYWSEVRRLAPRKGSIAASGHSGSAPTTDQGFEGWPPEGFDSRLRTRRAGMTLGQSSAHSRDTVSPRPSPASGKNNRPRWIHVLPEGLLKQRAHLRLARGPARAGFAEKQPWPDRLANRPYRRSIQCKDRLTPYPDARSSVDKAEVTTVTSPLH

SEQ ID NO: 77389 - protein, 137 aa, Zea mays
  Coding DNA Sequence Number=SeqID_34014
MRSSSSSGAEPESEPWGRAMRSSSSSGAEPESEPWGRAKRSGAVLLSGRSVERRSDYGHFGSVDWRARVRIKVSGHLCIKCPCDTVGSRGDLAKVASWRRLGLGRAEGVSFAGGGPRARRKSSGVGYPCPRLGSGEA

SEQ ID NO: 77390 - protein, 126 aa, Zea mays
  Coding DNA Sequence Number=SeqID_34015
  Subcellular localization annotation: CTP_CleavageSite=48; ConfidenceScore=5.22e-01
MAPAKPRRLISSLPLPRRSTAPGAVFLLQPNAQNAMNTTASDFELAIRALTTAQEYGSRPTDMRDPPGGEYEHELGWLGCAEQGRWAAWGNFSPGEVMGVKLGWISMAIRIGWIHKDKIESFEMKL

SEQ ID NO: 77391 - protein, 286 aa, Zea mays
  Coding DNA Sequence Number=SeqID_34016
MYPLRRGRSEPKIERGGDSSEVEAESEPWGRARWRPSSEVEAETEPWGRARRRPSSEVEVESEPWGRARRRPSSEVEAEFEPWGRARRSFLWRLRLDSAAVSRTLAGGTAVRAVQAILALNAPAIRSVGETIWPRLLLREACPSWASGESKGHWELAATELLSLGNNSPSGLVPHNGNICGLLLALQLLGCSGWLLEQEGEVPSCSSGIAAAVEGSVSSTAAAVEGSVSSTTAGADANARVGAGAGANNEQPMIPECVAEDLPEQQPGEDVSNMEDFEEFQDYDKF

SEQ ID NO: 77392 - protein, 99 aa, Zea mays
  Coding DNA Sequence Number=SeqID_34017
MKKSEKDINEARVQAKQAEEVAERERRIVELSPPQELFDPLADPETKEAIDIINVTESIVDEVVNKLLNEVAKKVLKENKYLFVKTFLDDQCNFAVSRL

SEQ ID NO: 77393 - protein, 172 aa, Zea mays
  Coding DNA Sequence Number=SeqID_34018
  Gene Ontology: Mol. function=acyltransferase activity; Biological process=metabolic process
  Homolog annotation: Hit_ID=A9L9N1; Match level="QueryCoverage=46%, HitCoverage=16%, E-value=1e-15, Identity=58%"; Hit description =Putative very long chain fatty acid condensing enzyme CUT1;1
MGIDGGCCLDAEGDNSPASSLGRRRMASAQCEINDGCLDAEGDNSPASSLGRRWRGDGAEQSRAAEQSGRKQSGADDWRKGNDAHLKIAQAAHLVAAVRFGPPEELAGRLREARPAHLFLAAFVPAAAATVYLMLRPRAVYLVDYAYFRTASNCRVPFSTFLEHAKQVPEEG

SEQ ID NO: 77394 - protein, 107 aa, Zea mays
  Coding DNA Sequence Number=SeqID_34019
MEDSTKASSEGSIIATEEGTIEAAEEGTTEAAEEGTTEEGTTEPTEEGTTEEVTTEPTKEGMTEEVALVALVVVVTDHLQKLYLVPIVALVADPLQKLDLLHSCNFS

SEQ ID NO: 77395 - protein, 63 aa, Zea mays
  Coding DNA Sequence Number=SeqID_34020
MARVARTLLAKDRLKGVHTLESLFFGRGIALCHFLIVLSAGGLGLLISLSNPSILLIEDGHLS

SEQ ID NO: 77396 - protein, 41 aa, Zea mays
  Coding DNA Sequence Number=SeqID_34021
MVAANVNMGTYSWLSGKLKWFAQEVDLHVDDIYMLKIIAYA

SEQ ID NO: 77397 - protein, 110 aa, Zea mays
  Coding DNA Sequence Number=SeqID_34022
MAQAFHRAPSGTAWTSPLTPQMHTRSQNDTHSERRGDCDHRQTNADITVAGNLPMQGIGGVRDDNVDRGVARDQSAGWRGLSAMTMTYGREVDAEQSKREDDIQRPEREL

SEQ ID NO: 77398 - protein, 342 aa, Zea mays
  Coding DNA Sequence Number=SeqID_34023
MGLCLRMANSKKTGDERWEKMMKRLDRLGGRLEAMMVGQHRFLELADRVAAVARKAEEHKQVESQHEGLLKQLARGGEDLEESNRNDAFGEEEARRPDSSSEATAVDKNDRSMEGFLLASASNVFEEFPSQVVWDEDDSSDATIESTTVLVKSCNDPKVDEVVIVMQKQFTKPNEGIVKEQEPFNVERSTYSSVMEDSPILGVFEKKYGASVADCEDLVEFSPVREMIGEDISVTDDLEVTINEKAIKEDGFVTTGEADPTSKVIFLMAAGEDEECESRLKGWVNRRILKIVNFEHELHKGLGLEISNNEIRVRKRVLLAMSCSINPDNFGSKLKNIASKRT

SEQ ID NO: 77399 - protein, 114 aa, Zea mays
  Coding DNA Sequence Number=SeqID_34024
MARAEGSPPQGRTPAPRTSPRGQALRSLSQLSPEDLSPAHGLGSVTPGLVPLADDLAKLQLPLLHLLGLGSHMLPSQRSLFSSRLRLCPSRYRCRRLQLVAEQPMVLKPSKRGF

SEQ ID NO: 77400 - protein, 32 aa, Zea mays
  Coding DNA Sequence Number=SeqID_34025
MAIYLNQDTNTKKINLIKERIRVTVKEGNRQG

SEQ ID NO: 77401 - protein, 303 aa, Zea mays
  Coding DNA Sequence Number=SeqID_34026
MRKKRSFIHEYPNVQASTATKNKHIYLGYEQPPHRRACGTTNSGWLAGDRYSSSDNDLRLRRLDSRSDGLRANAAAKRPSPAKDENQPLKPKSRRSGVQVALTASSAEVIACARGSLTYGDHHPSTDDSSHLPTNTAPAYRGRPKAHRQVLAPVLAAGTRMGPSQNTNAALVAYDVFCDPPVQPAAQEGPGRGRPACGATDTCAVDGRPRSAPAVGGGTGSSARAAQARGPDTRKLPAPRTTNDLLPRSLREGAGRCLRGGRPRLGAPPSPARMMNILEAEGGAEAAVRLASPHHEAGGHHPG

SEQ ID NO: 77402 - protein, 114 aa, Zea mays
  Coding DNA Sequence Number=SeqID_34027
MAASRVLIPGLSPIFVEDRLTERAGEFCGTVPTVGVDRGKPEEGIRTSPATRGRNPDQDGEEGRDITDDGGEFVGKKRRRAEVVRVPLVGDRAQKLETGMARGLKDWSEGPTWK

SEQ ID NO: 77403 - protein, 102 aa, Zea mays
  Coding DNA Sequence Number=SeqID_34028
MAQRAPCGSVGHGESRGGLRAAAYGGAQATNSEQGHDDELRRQAEHDADMEREESVRKSKLREGKREGGSAGFIEGIGERRGQAGWKKRWPVFMTAINGRRE

SEQ ID NO: 77404 - protein, 157 aa, Zea mays
  Coding DNA Sequence Number=SeqID_34029
MWHREREIHHLSRALAMGDGGSPARARTREGPCAMAGAEGLAWSSSARGEKGCPRPWKKKAQGAWNDCAGEGRCPWEGAAAWRNGARRPWSFCPCARTGNREKRLLCKGGRPGGEEGRRAHRLRTPWPWLLAKQGETGGGLGVHGRSVGKGRKKTTG

SEQ ID NO: 77405 - protein, 62 aa, Zea mays
  Coding DNA Sequence Number=SeqID_34030
MGSRHSACSAEAECRGSFVLSFSHPPAGRGGDKDDGYDYGNGKEEGVEANLQEFQDFDEFED

SEQ ID NO: 77406 - protein, 116 aa, Zea mays
  Coding DNA Sequence Number=SeqID_34031
MDARGEPSLPVTEGRARRRLLLRPRPGSGEDAIPPRPRQSSSLGVGRGGDLLPRPGLRSGEAELPVVPEAELGGCARAHPPGVAPEASEEWFDSSEFLMLFVMPRSAWLFPHAAGP

SEQ ID NO: 77407 - protein, 125 aa, Zea mays
  Coding DNA Sequence Number=SeqID_34032
  Subcellular localization annotation: CTP_CleavageSite=30; ConfidenceScore=5.58e-01
MWSALMNSGRFSSNNIPSRPSSPHSGRPAAVDTASSPRCLWLQRNRVVFHGDPPAISKVQRNFLDEMACWVLAGAKHLGSLGLAEALSVIGSILQILKAIEMVSAMHNIDRSIGLFRSAHAAVGI

SEQ ID NO: 77408 - protein, 200 aa, Zea mays
  Coding DNA Sequence Number=SeqID_34033
MGKKGGDHGASWDREPSAMGQLCASCSKRSGEMAARGVELAAIGEPREREIHHLSRALAMGDGGSPARARTREGPCAMAGAEGLAWSSSARGEKGCPRPWKKKAQGAWNDCAGEGRCPLEGAAAWRNGARRPWSFCPCARTGNREKRLLCKGGRPGGEEGHRAHRLRTPWSWLLAKQGETGGGLGVHGRSVGKGRKKTAG

SEQ ID NO: 77409 - protein, 109 aa, Zea mays
  Coding DNA Sequence Number=SeqID_34034
MGVEADDDGSIVKASLQRCEPSGDAAYGELRALLARLHDPATRRDARLILTALHRHQQHSSSRAGVSAGRGEAGVPAVRGGARRGHQQAGVGARRAAVPGGCNERERER

SEQ ID NO: 77410 - protein, 422 aa, Zea mays
  Coding DNA Sequence Number=SeqID_34035
  Gene Ontology: Mol. function=L-glutamine transmembrane transporter activity; Cellular component=integral to membrane; Biological process=amino acid transport
  Homolog annotation: Hit_ID=A2YFB7; Match level="QueryCoverage=100%, HitCoverage=91%, E-value=0.0, Identity=77%"; Hit description =Putative uncharacterized protein
  Pfam annotation: Domain name=Aa_trans; Domain location=41-416; Score =104.9; E_value=2.4e-28; Accession=PF01490.9; Description =Transmembrane amino acid transporter protein
  Pfam annotation: Domain name=Spore_permease; Domain location=44-356; Score=-173.0; E_value=0.067; Accession=PF03845.4; Description=Spore germination protein
  Pfam annotation: Domain name=Trp_Tyr_perm; Domain location=41-407; Score=-206.8; E_value=4.6e-05; Accession=PF03222.4; Description =Tryptophantyrosine permease family
  Pfam module annotation: Pfam domain module=Aa_trans::Spore _permease::Trp_Tyr_perm; Domain location=41-416::44-356::41-407
MGIGDGSSNGNQQPVHKEIRDETTPLLPVKVEEDEGFHEFNGASFSGAVFNLSTTIVGAGIMALPASIKMLGIIPGILLIILVALLTEASIDMLVRCSHQGKITSYGWLMGEVFGQWGRIALQASVIINNVGVLIVYMIIIALLVFAPLVSFKRLDSLRYTSALSVALAVVFVVITAGIAIIKLFNGTVAMPKLFPELDGLNSIWNLFTAVPVLVTAYICHYNVHSIDNELEDRTQIKPIVRTSLFLCSSVYIATSFFAYLLFGEGTLDDVLANFDANLGIPFSSVFDDIVRVSYAAHVMLVFPIVFFALRLNLDGLLFPTSRHISRDNKRFAIITVSLLAVIYLAAILIPSIWDAFQFTGATAAVLIGFIFPAMVILRDSYGIASKRDKILAVTMIVLAVLSNSVALYSDAMNIFRKKEVA

SEQ ID NO: 77411 - protein, 132 aa, Zea mays
  Coding DNA Sequence Number=SeqID_34036
MVYGGATRKRGRRREIAARSADLCPPEMVAHKRYNKANPQSGIPRPQQLRGTRSTAAVQTRSLRRGSSNGFHRNTSASGREDSWGRNGSRERPFIPRGPSSEREGGRPRSWPWRRYLCHPLRERGEDTGAQV

SEQ ID NO: 77412 - protein, 62 aa, Zea mays
  Coding DNA Sequence Number=SeqID_34037
MEAVGGDDLTARSRDPEGHNEWLADQLAPSVCDRRRNARERAAARARSIGEHHRMHSSKTSA

SEQ ID NO: 77413 - protein, 172 aa, Zea mays
  Coding DNA Sequence Number=SeqID_34038
MAGGTSKAAVAARFRLGSVRKQGGGPRWPDLYGRGVERHASNGGAPGSSGHACHRRRVSSGVDAPGPQNSENAPARINPTQGSHPSAAGRSRMGKRSWAVRFGSREGSEEFEGLRGIWRFAKFGCISWNTSYWIKSIAIAKWVSEYFCNTLKFNFVKIRKNSPKILNQNTFP

SEQ ID NO: 77414 - protein, 110 aa, Zea mays
  Coding DNA Sequence Number=SeqID_34039
MAGGTSKAAVAAWFWLGSVRKQGGGPRWPDLYGRRVERHESNGGVPSFSGREIAHGEEKLGRAAQMGRRETEHEGGKKQAKGKPTAFVLPCAQVGRKERVQVYNGGVAVC

SEQ ID NO: 77415 - protein, 106 aa, Zea mays
  Coding DNA Sequence Number=SeqID_34040
  Gene Ontology: Mol. function=kinase activity; Cellular component =ornithine carbamoyltransferase complex; Biological process=amino acid metabolic process
  Homolog annotation: Hit_ID=Q6QP54; Match level="QueryCoverage=70%, HitCoverage=26%, E-value=2e-14, Identity=55%"; Hit description =Putative kinase
MAPCDVVGPSPRSGEAETPPRSRLNSSSEVEAESDPWGRARQSPSSSRAEAQSEPWGRARRSPSFEVKVEFEPWVGRGRNRLPRSRLCPSPRVGRGGASYGARGWT

SEQ ID NO: 77416 - protein, 46 aa, Zea mays
  Coding DNA Sequence Number=SeqID_34041
MAMMGSTSKKMYLCQVKNQQTFVASIQRWYQKKRTKTKAAGGKVLH

SEQ ID NO: 77417 - protein, 143 aa, Zea mays
  Coding DNA Sequence Number=SeqID_34042
  Subcellular localization annotation: CTP_CleavageSite=24; ConfidenceScore=5.56e-01
MGAIKVKAQSTQRTRSRLARAQPRAKAADPGGFTSRPRAPSSNGHTFGSPEAQSSQRSNLGQIATPTDPLASEDGFRLARPRARTQPRPRTTDSASPDPRARTQPRLRKTMDSASTDPRGRTQPRPRKTDSTSTSEEPPPRPT

SEQ ID NO: 77418 - protein, 117 aa, Zea mays
  Coding DNA Sequence Number=SeqID_34043
MHISYALHSLDCNLADEEYVLIPEQGTVQEEDQEQAFEAAIEDLPVAPAIEGKPRFCGYKCGHCTAAAGVSGALYAKAVCFRIWLMVKKQQTFVASVQRWYQKKRTKTKAAGGKVLR

SEQ ID NO: 77419 - protein, 109 aa, Zea mays
  Coding DNA Sequence Number=SeqID_34044
MDSTAGARLGCRSGLGSGPGSFAMLGVTPPWPCLGEAALQAAGILHQCTTTTHHRGQDLRSLFRLVLSHIDGQNPELGVLRRAFCCGPLGLRRWRVPGRKKAPGTSDPM

SEQ ID NO: 77420 - protein, 123 aa, Zea mays
  Coding DNA Sequence Number=SeqID_34045
  Homolog annotation: Hit_ID=A3BRR5; Match level="QueryCoverage=74%, HitCoverage=16%, E-value=9e-41, Identity=89%"; Hit description =Putative uncharacterized protein
MSIYMISEYLVQCHIWWYTNMLVHLELLYYPYAKHEGVPNPFANQIQLTSLEKVLKTESNGYDINQRKNVIMRGVLSVTVISAEELPPMDIGGKADPFVVLYLKKGETKKKTRVFIFPNLRVL

SEQ ID NO: 77421 - protein, 133 aa, Zea mays
  Coding DNA Sequence Number=SeqID_34046
MDEASLASTSAQGADTTTIGDEERSNSKFVCQVIGSAHGPSGRVIGRAQAVILRRQATLNSAKRPYSQKAPAPEKAGCSSATKQAENILIPMTGSVLAWIVSSAKTSQPSIVTCQTCNSENKPYCCLCTTGLD

SEQ ID NO: 77422 - protein, 189 aa, Zea mays
  Coding DNA Sequence Number=SeqID_34047
  Gene Ontology: Mol. function=transcription regulator activity; Cellular component=nucleus; Biological process=transcription
  Homolog annotation: Hit_ID=A3BMP9; Match level="QueryCoverage=85%, HitCoverage=61%, E-value=5e-46, Identity=57%"; Hit description =Putative uncharacterized protein
MDEGDLFATPSTTIRLSEENMDGDGSIMTNDSRDCGQRYPMMNQEPARRPPPMGQRYDPEPCWRQSRPQELSNGQTKEQFVAEMLARPSSVESGPGRPQARPRQQHQDTPAAQARPQPAASEKPAAQLDANSVRAKLELAKNAKLEATKRKLQEGYQESDNGMRAAAAAMGIGYPSFIVLVVHALCCAA

SEQ ID NO: 77423 - protein, 164 aa, Zea mays
  Coding DNA Sequence Number=SeqID_34048
MGRGKPGCDLGPALSLEGVRHPRWGGERGELGLYVPRGPAGHLFFQLLVVANTLQLCGGDVLQPCRGRRTVAGQLGCNILPSSLHSRQGRQRGPTGALGGGPLFGFNSWFASLEREREREPSGGRIHPGTMAATVEVAGGSPGVRRPAGSRLFVPTGTEPEFRL

SEQ ID NO: 77424 - protein, 132 aa, Zea mays
  Coding DNA Sequence Number=SeqID_34049
  Gene Ontology: Mol. function=protein serine/threonine kinase activity; Biological process=protein amino acid phosphorylation
  Homolog annotation: Hit_ID=A5C016; Match level="QueryCoverage=33%, HitCoverage=6%, E-value=1e-15, Identity=90%"; Hit description =Putative uncharacterized protein
MGGGGFIQLPITWFNDLLDSNSSKEGIAWAGNRTWVTILATASGKSVFAILPCCSCSWLMEMDCSIREALSYRLKVGQKRGRLLADLEEDEQPKKKVRLGSPATQWILLYNARRPMKLSLYGSSRSRTELLS

SEQ ID NO: 77425 - protein, 284 aa, Zea mays
  Coding DNA Sequence Number=SeqID_34050
  Gene Ontology: Mol. function=transcription factor activity; Cellular component=nucleus; Biological process=regulation of transcription, DNA-dependent
  Homolog annotation: Hit_ID=Q6DKU6; Match level="QueryCoverage=86%, HitCoverage=93%, E-value=2e-56, Identity=52%"; Hit description =Ethylene-responsive factor-like protein 1
  Pfam annotation: Domain name=AP2; Domain location=115-166; Score =67.6; E_value=4.3e-17; Accession=PF00847.11; Description=AP2 domain
  Subcellular localization annotation: CTP_CleavageSite=21; ConfidenceScore=5.36e-01
MMRSHSLTSTPSSLFSSRNPYAAAQSSSTTSRHGAGCRLPTADFWPGFEADGEDIHASHSSDPQRDKPCFRLALLSRRQHAIQAASCKRSMVSRRAADCSHAAPCAKVKPGRCKIQYRGIRQRPWGKWAAKICDPVKGVRVWLGTYPTVEAAARAYDRAARRIRGAKAKVNFHSDTSSCVTVPTTASRSTAAAAAQAPAVLPPPKVEAQTELSDEVKELSEELMAYENYTNFLGIPYMEGGTTAASATTAAASAAAEESQVPAPAGLWSFEDYYYPSSQSLFTE

SEQ ID NO: 77426 - protein, 198 aa, Zea mays
  Coding DNA Sequence Number=SeqID_34051
  Pfam annotation: Domain name=MAP7; Domain location=6-156; Score= -79.4; E_value=0.053; Accession=PF05672.2; Description=MAP7 (E-MAP -115) family
MAPKRASSKAAPSVDEAAKAALLAEKKGKALADNTHQEACEDDALSKRQRNDQPTPKGTLRTYSSGEQPQEPPPGFAPLEGEDATEDGEVIGISAEEQLQLRALRIKNQNLQKQKEILEAKHQRVSVQAKVRQMIRDEEQRAQELEQEIALMQREGQHDLQHDPPLQQRALVGDLFIPQRGPFIPHAAAFQGINYLDE

SEQ ID NO: 77427 - protein, 110 aa, Zea mays
  Coding DNA Sequence Number=SeqID_34052
  Homolog annotation: Hit_ID=Q8L706; Match level="QueryCoverage=54%, HitCoverage=10%, E-value=2e-18, Identity=75%"; Hit description=Ca2+ -dependent lipid-binding protein, putative
MAFLFGAFLGLVVGVAVVMAFARFENSRAEQRRELLKWLNQELTKIWPFVNEAASELIKTSVEPIFEQYKSFILASLHFSKLTLGTVAPQFTEQPNIKTVYVYAGLDYAT

SEQ ID NO: 77428 - protein, 483 aa, Zea mays
  Coding DNA Sequence Number=SeqID_34053
  Gene Ontology: Mol. function=calcium ion binding; Cellular component =integral to membrane; Biological process=calcium-mediated signaling
  Homolog annotation: Hit_ID=A3BRR5; Match level="QueryCoverage=44%, HitCoverage=62%, E-value=1e-101, Identity=71%"; Hit description =Putative uncharacterized protein
  Pfam annotation: Domain name=C2; Domain location=365-449; Score =105.1; E_value=2.1e-28; Accession=PF00168.21; Description=C2 domain
  Pfam annotation: Domain name=IQ; Domain location=115-135; Score=27.0; E_value=7.2e-05; Accession=PF00612.18; Description=IQ calmodulin -binding motif
  Pfam annotation: Domain name=IQ; Domain location=73-93; Score=20.1; E_ value=0.0082; Accession=PF00612.18; Description=IQ calmodulin-binding motif
  Pfam module annotation: Pfam domain module=C2::IQ::IQ; Domain location=365-449::115-135::73-93
  Subcellular localization annotation: CTP_CleavageSite=19; ConfidenceScore=5.23e-01
MDRRSMTPGISSRLSSPPPAAHPSPPPAAAPFAAATPSHPPSPTLDAFTRLEEKWDQFVVMFHRYKEKTEKELQAAVRLQEAARGFLARRQVQSLRGEKHLAVASRATPWPSSHEQAVVRLQAAVRGFLVRRAVRKLHLLISSSLHQLAACAPNHQVSSILFESPAEVKIWVCNPPARPKRVVSFIRATALVLDRPNIRTGWFLLHLSSNVKSAVQLFPWDPGGQEDIATVQIYILVPQLFCIFVLNNKAYSNTLELRLKGSIVFVVIQVKNIGFTGVLRLIFKPLVSEFPCFGAVCCSLREKSKVEFTLKVIGGEMTAIPGISDAIEGTIRDTIEDTLTWPNRIIVPIVPGDYSDLELKPTGVLEVKLVEARDLKNKDLVGKSDPFALIYIRPLHDKTKKSKTINNDLNPIWNEHYEFVVEDISTQHLTVKIYDDEGLQSSEIIGCARVDLADIQPGKVKDLWLDLVKDLEIQRDKKPRGQV

SEQ ID NO: 77429 - protein, 154 aa, Zea mays
  Coding DNA Sequence Number=SeqID_34054
MNKDRNLQNRVGIQMSQIQIVKVKETAKEGRNGKSKAADKNRDVNNALVSILCRDSNPTTNTPRAKLLRRKNSDIDKVEKIRLGDNRHMITCERQLAVEIDRRNGRSSRILVLPLGCHRNLIGGLSGSEIKGKQRMFGGKKARLGLRTQRHAAM

SEQ ID NO: 77430 - protein, 129 aa, Zea mays
  Coding DNA Sequence Number=SeqID_34055
MGKSKKGRSSSHHSGDKRKREPTPPSEDFGDSEYSEEEFSSESKESPGITAEVWTYIWAVERSRIEGSDESEVSSGEENSSDSSEEESGGDGDDDGDDDDGGDGDGDGDCGKGDGKSGSSKASGKAPLA

SEQ ID NO: 77431 - protein, 62 aa, Zea mays
  Coding DNA Sequence Number=SeqID_34056
MAEFPLCLMHGALVQQQQSDLCNPDSRIRVVDGLNLVHKYKASDLQPQSGNILSTSSNHSAF

SEQ ID NO: 77432 - protein, 61 aa, Zea mays
  Coding DNA Sequence Number=SeqID_34057
MWEYTHIVEDMQRVVEHLRDMTKAPIKDRSQQQCSHLDFHELECDLWCHSSEYQSYPTRSQ

SEQ ID NO: 77433 - protein, 58 aa, Zea mays
  Coding DNA Sequence Number=SeqID_34058
MPAGNVLRAGADRRMVGEQLFAHARKPRSRAWEKKKDRYRPQWKAAARTEKKLCRYVK

SEQ ID NO: 77434 - protein, 563 aa, Zea mays
  Coding DNA Sequence Number=SeqID_34059
  Pfam annotation: Domain name=MAP7; Domain location=222-377; Score= -69.2; E_value=0.014; Accession=PF05672.2; Description=MAP7 (E-MAP -115) family
  Pfam annotation: Domain name=TolA; Domain location=160-434; Score= -153.0; E_value=0.074; Accession=PF06519.2; Description=TolA protein
  Pfam module annotation: Pfam domain module=MAP7::TolA; Domain location=222-377::160-434
MSSSSSSTATTPTVEASSEDLSGTVAAAELRPGDTVEFGVSRMSLVRVQDMQRLGYFGGGVGRVPGAEEVPEPEGELVVFEAFFIAGLHLPAHRFVSEVLQKFEVQPAAPKSSKVPESAKAASAGGTKSAPDRAAKVRELPSPGKRVADFGTNISVDDYLVGSGEGQLVVVPPAVATTTSTVVLGVKGSAFSAGGEISAVTAVMDEAGTVSRRLREASQQLSQAANFADRVASGALTADVSAEVERLRAQHANAVREKSAADSKCRKLAEKVAALEGERTDLRRQLVEERREANQAIAKAQAAQAEAKLARVEGSLASQRAEEWEVRFNALQARMERAKASTRTEVERTRKQLVDSYRELGARTADFEVPDPDREAGLRFLEWLQDELLVLPTIMEGFMSFASLVTCEGAMNALSLEGCSHYEGFNRSDEDFGHEIFKVEDPVVKDSVGALFDRMWGPHGREVVRERSNRARDQMARAEDVEDFGPLNSAQPEAEANPVVAEAEVDPAPPPETGEGSLAAPASTVSGGGSLPATVPMVEDPPKVATELAAEDPMAAAGSSQVA

SEQ ID NO: 77435 - protein, 97 aa, Zea mays
  Coding DNA Sequence Number=SeqID_34060
  Homolog annotation: Hit_ID=Q94EV4; Match level="QueryCoverage=41%, HitCoverage=15%, E-value=3e-07, Identity=62%"; Hit description=RIRE2 orf3
MTIPESSEFVAEPAWAPDNPDALAHRPTIAVHVRVEFEVTHPSLGLHSGQLSPRFASMAEKLSVLPPCDPWPISLVTDEDLEALVDVGLLRPRSYGP

SEQ ID NO: 77436 - protein, 155 aa, Zea mays
  Coding DNA Sequence Number=SeqID_34061
MEARRALRYRVHVRRSKRPRNLKPGVKKKTCKLKVDRLEKRYESNIDLKQAKMGKTMKKVKYRKCHSELYLMRNRKARRRTGKRKTLPKIEVKWRKNGGKTLNVLLLALLEKETINQIYYCAQSGGTPDSLVHPQIGKAVSSNGSKAPWDYKRDP

SEQ ID NO: 77437 - protein, 589 aa, Zea mays
  Coding DNA Sequence Number=SeqID_34062
  Gene Ontology: Mol. function=heat shock protein binding; Cellular component=chloroplast thylakoid membrane; Biological process =response to heat
  Homolog annotation: Hit_ID=Q948S9; Match level="QueryCoverage=40%, HitCoverage=61%, E-value=1e-113, Identity=78%"; Hit description=DNAJ homologue
  Pfam annotation: Domain name=DnaJ_C; Domain location=469-577; Score =105.6; E_value=1.5e-28; Accession=PF01556.9; Description=DnaJ C terminal region
  Pfam annotation: Domain name=DnaJ_CXXCXGXG; Domain location=389-472; Score=81.5; E_value=2.7e-21; Accession=PF00684.10; Description=DnaJ central domain (4 repeats)
  Pfam module annotation: Pfam domain module=DnaJ_C::DnaJ_CXXCXGXG; Domain location=469-577::389-472
MDYMVFEVAELDGAAMICHTNSKNERQLGARFCHYEVRPRLPLPPTRPRRPIPHVAHRRLLPTHPAAASAPSPTEGDTARYLPPRPVHAQSSASSASSALPLALSSTSRNDPSAVASRGRGRSRPTRALDPSAVASRGRGGAVRLAPSTPPSSAVASHGRGRRRTWPASPTGVRCSCTGTISGRSGGRPHPAPTPSRSGAVPSSEKAKIQPPSSLRVIQMMRPDSPPNPWERSGAEGAYGPAPFKSPSGGSTSDVVEASGVYDLFKSSRKLILQMQRSFPPFGSKRDDSLSCPGFYRCLNSVDWMNGPVRPNFLDFQGVDFEATFGVRRAYSVRDIQDYSNPFDLFESLFEGFGEMGGMGGGRAARNRPMQGDDESYNLVLNFKEAVFGVEKEIEITRLEGCNTCDGSGAKPGTKATTCKTCGAQGQVVSSTRTLLGIFQQVSTCNTCGATGEFSTPCNTCGGDGRVRRTKRISLKVPAGVDSGSRLRRDGTNILYTCKVSYIDAILGTTVKIPTVDGTVDLKIPSGTQPGTALVMSKKGVPLLGKSIAHGDQLVRVQVEIPKRLSSDEKKLFEELANLNKAQTTNSRR

SEQ ID NO: 77438 - protein, 42 aa, Zea mays
  Coding DNA Sequence Number=SeqID_34063
MELEPTTSRLGQRSTHLGAIAYGAELCYLGAIGYDAEQRVQK

SEQ ID NO: 77439 - protein, 187 aa, Zea mays
  Coding DNA Sequence Number=SeqID_34064
  Gene Ontology: Cellular component=intracellular; Biological process =intracellular protein transport
  Homolog annotation: Hit_ID=Q5N7Y5; Match level="QueryCoverage=18%, HitCoverage=4%, E-value=7e-11, Identity=91%"; Hit description=Target of myb1-like
  Subcellular localization annotation: CTP_CleavageSite=66; ConfidenceScore=5.07e-01
MASSLPREHRRPDFASQIRWFQQNISIHARHRAPTSPSLSPIRCSPQAHSPSVRPTGAQQAASGPLCARVAQLPNFRCTKPEGGGGGWGKRNEKKGRDRGAGQTCVVRVVSGTGKRHPARCRSQSGYSSGRPACGASLRPFPPPSMAGSMVDRATSDTLISPDWAKNMEICDICNCDPGYVPLLPPL

SEQ ID NO: 77440 - protein, 542 aa, Zea mays
  Coding DNA Sequence Number=SeqID_34065
  Gene Ontology: Mol. function=triacylglycerol lipase activity; Cellular component=protein serine/threonine phosphatase complex; Biological process=lipid metabolic process
  Homolog annotation: Hit_ID=A3ABY9; Match level="QueryCoverage=26%, HitCoverage=24%, E-value=4e-47, Identity=69%"; Hit description =Putative uncharacterized protein
  Pfam annotation: Domain name=Lipase_3; Domain location=290-413; Score= 5.2; E_value=0.00021; Accession=PF01764.16; Description=Lipase (class 3)
MKDAKPIKTPMGTNEHLDLDAGAIFEIFGSHASLGLWYPKGSTFDLIGYSDSDYVGCKVSLFTLGALLKEGLSDRRFEAGSGCCRSSKMGGEQPKHRPRMASPPHSVEVRTPGDSPRPTAALLSPSVAAPQPSTASRLLLLLTAAVAAATTFVLLRPPITVVTAASATARPLSKLSKPVVLLTPCHPRRFKGFTLLSKEGQGLALPRDPLPHRAAFLPRSRTPPVRDPRCSPWKAGDLLDPQISCLLVKKVKRMRVTGYTMEDVLMQEPKAGILKPAFTILLDRDKKSILLLIRGTHSIRDTLTTATGAVVPFHHTIVQEGGVSDLVLGYALRALSGTSIADVPRLQNKGLNYFIAIFFVFDARVVGHSLGGGTAALLTYVLREQKEFASTTCLAFAPDGRFCMPRSTPPPPHPTHARQNRRHDRLSEVSRIEEVEEPLKPALTFASPSERRIRAGGVGLVLAKYLHREVLKGEAYAAGDLGVVVHIAYFRMDEMMRGQRGWRELQALGDKINQFSGIIEGLIWSPKASDSNDRHDDWAFEE

SEQ ID NO: 77441 - protein, 204 aa, Zea mays
  Coding DNA Sequence Number=SeqID_34066
MEVGARLGGPIHGARAGELGGLAASTAARRRLGAGRRACRAGKKEKGEWEKGRELTTVTNGDSGEASLDVGEDGGMRARWPVDRLPRRASMQHRRGWPRAGVRMGVASWLARGRAARRQGLGHGSPRAGAGRRAGLPRHRGQEPGEEAGQRKKESVLRGETANPLNRSVDMHLVKMSPTLILTDLEELEVAKWIGARGKNSEKR

SEQ ID NO: 77442 - protein, 342 aa, Zea mays
  Coding DNA Sequence Number=SeqID_34067
  Homolog annotation: Hit_ID=Q6QP51; Match level="QueryCoverage=41%, HitCoverage=84%, E-value=3e-17, Identity=38%"; Hit description =Putative growth-regulating factor 1
MTKILEAEGGAEAAARLASPHQTAHWQTSSLAPLSVTGEIPTDNLQEIGGRKGGLPGDRHPTAAQLCAPSAPSTSGGPAQRKQARMSCNRRAGYDVREVTPPLAPMLRLLDYGTGTATRGSPAQDPTVPVKGDGHGPVSRGVGTTVGMVKSGPAVTAAADKRRQRDRERGRCGKDPSRRRKRAPSPPTDQGFKGWPLERVSTAAPERSGSVPTTDQGFVGWPLERVRQPPRAHRVRDDSGAARSAPTAVLATPGTTDNKSRSTTEFSLGRNRKLRLARPHAPASGGGLRLARPQAPTSGGGLRLARPSDSASTPVSGGIASSPDPQPRPQEKSPPRPTLGSD

SEQ ID NO: 77443 - protein, 310 aa, Zea mays
  Coding DNA Sequence Number=SeqID_34068
MEVHCQTSFCQNEDGFPKLLRACTVRLEIRSQPEYDGREFIEHSTEKCVVTVYIGSSPHHVEWSVTAAGHRFKDTYQVVARKALRALCQIYEEVADTPLRFFLPFQRDQDAKKRNRQLHVDLTIAQARATALESREVIVVEALKQAKDEHVQKLIEAYLVTHNQHRAQQIQESTPSNPVQPMRAEDPHILEGHLVSIRGEKKAWELPEGAIVLERIPVFPQAMNKQEHPKSSQDSPPELFEPLTMKKIPAPSLEVKEEAASTPPAPPPFEELQEPVPLEEEFNPILPSQSPPEEVINISSLLTHPGDVSD

SEQ ID NO: 77444 - protein, 192 aa, Zea mays
  Coding DNA Sequence Number=SeqID_34069
MAPPVDVAGLRPRLGDVEIVVFWDLARVRALRRARRRSSSSGAEPKSEPWVGRGGDRRLLGPSPKSEPWVGRGGVRHLLGLSPSLSPGSGGVRRLPGLGPSPSPWSGEAELPMVPPAGPDCLSVLLCPVALQSVWRMRRCPSVRPGLGRAENMFAAEGGPRARRKSSGLHADGGYQLRIRSLEGTPNYGPRQ

SEQ ID NO: 77445 - protein, 497 aa, Zea mays
  Coding DNA Sequence Number=SeqID_34070
MARVCLGLGGRRKHTLQDNPILQARTLTAEGSSSTLGIDDTFGEGQPSLGRRRGPRISTLEDDVITMPGPSPLGSSPGIRPERAARPVTPGPRPVTFRGRQSGPSRRLGRSPWGLGQLPSKDVSPTRGLGWSIPASVPLTDDPARLRPTRPRQPQRTKTPALKVPLQTELRFRPRGYGQPPTTRRKDGGSPPSGGLEGGKTRCIREREDMAALQRGHPPFKDGSPYSRPQPSRAESSPTHSKVLPYGAGAGSHTSCKPTQGRRSRTAARGAYDRPAVTSDPPLLPRPTGERGPGKGDTPKRILPREGTRLRAPLLIRGSKAGPPEGFNSRLRSCGPYTHYWSEVQRPAPRKGSTTALGYSGSAPNTDQGFKGWPPKESHQREASSPWTPSPGDRVWQITRSSSETPCSAPIEGNMALSPLLLVERRRRGVCKKAESTPDRPLALCRGSGAALANPAPAEPLTASTYQPENLGPDRTPGLRPVRMRERPDQPKHYVRQ

SEQ ID NO: 77446 - protein, 72 aa, Zea mays
  Coding DNA Sequence Number=SeqID_34071
MGIREGQPSRLGREHPPRMNGAAQPWERLLGVGSNHISWAHRNPTNPADPGGYGFGTKEMEPPDFSSSNFKF

SEQ ID NO: 77447 - protein, 152 aa, Zea mays
  Coding DNA Sequence Number=SeqID_34072
  Gene Ontology: Mol. function=protein transporter activity; Cellular component=COPI vesicle coat; Biological process=retrograde vesicle -mediated transport, Golgi to ER
  Homolog annotation: Hit_ID=Q9MAX6; Match level="QueryCoverage=52%, HitCoverage=30%, E-value=6e-23, Identity=70%"; Hit description =Coatomer subunit epsilon-1
MDKNSKNKDKQLKSHPPKNAESEILREHIKKEREAAKAGKRPYYLKKCEFLNPNTSFLSSLSVYLLIKWLLSVPQPDGDQRDHACLSVFVQLVISEIDSSVATSLQAMKLLALYLTGDKDGAISSLKEWLSDSAIGSNPVLRLIAGIIFMHE

SEQ ID NO: 77448 - protein, 147 aa, Zea mays
  Coding DNA Sequence Number=SeqID_34073
MGKGHKRKREPTPPSEDFGDSEYSEEEFSSESEGSPAPVSPPASSDDSDDSQGIAAEVWTYIRAIERSGLEGSDESEFSSDEEDSDGGEDEDDDDDDDGDDDDGGDGDGDGGYGGGGSGGKGSTRGGSSTGSTRGDGGKGSSSKASG

SEQ ID NO: 77449 - protein, 26 aa, Zea mays
  Coding DNA Sequence Number=SeqID_34074
MAMMGSTSDKMYLCQPYLDSLKPAYP

SEQ ID NO: 77450 - protein, 283 aa, Zea mays
  Coding DNA Sequence Number=SeqID_34075
MAERYQLPRSCVPTTTRRKDCAHPPFGGSEGGKTRCIREREDMVAFQGGHPPFKGDSPYLRPQPSWAESSPTRSKVLPYGAGAGSHASCKLAQGRRSQTAARGACNRPAVTSVPPISPRPAGERASIQAGGMQPRQVGALLRLPTRPRVMQATAPPLAPLPRLLDCGTSTATRGDPAHDPAAPAWRDGTGKGDTLKRILLREGTRLRASLLIRGSKAGPSEGFNSRLRARGLHTHYWSEVRTPAPRKGSTAASGHSGSAPTTGQGFEGWPSKGSQPPQTQSEG

SEQ ID NO: 77451 - protein, 107 aa, Zea mays
  Coding DNA Sequence Number=SeqID_34076
MGGSGAATWPEKVIYSKASTVIYSTDLQAGPRPPRVQAGPLEWDPDPPVWGPYRPQWGPKTLLKAQAGSRADTCPDLLWCAPNLSAYTLAPRSGGDPMLPRGILRAA

SEQ ID NO: 77452 - protein, 319 aa, Zea mays
  Coding DNA Sequence Number=SeqID_34077
MAPLVDVAGLRPRLGDVEAPSRSRSSLSSEAEVESEPLGRARRRPSAEARAESEPWGRAKRSSSSSGAEPESEPWVGRSGVHRLQGLSPSPSPGVGRIGIRRLQGLSPSPSPGSGRSGVRRLPGLSPSPSPGSGGAEFPMVPEAGPDCLSASLCRVAQQSERRRRRCPSVRPATFALNAPAIWSVGMATWPGLLLSEDWASGEPELCADGGYQLRIRSLEAGFNDKIMSSRMRTLPKNLIRPLPVQDLEGEGKPFVSQVHGRRVLKRSNSSSGPSFAVPEALYEVVPPWPPSLRLGHCCRYYSLHVWGLADDEARQEVQ

SEQ ID NO: 77453 - protein, 163 aa, Zea mays
  Coding DNA Sequence Number=SeqID_34078
MTSSHFLSSLDHAWQHNVLYSHDALDVDQDQDAHQLLAHLVERSSARMDKAVRRGPGRSLERLNAGHEPLEILAGGAGIEEEAKGECEGRDQGGSLTAGQGAEEAGATHGGRRGRGRSGGRRGWWVFGVAVDKARSARCATVRGARDMRGFAADDGAKGHQNR

SEQ ID NO: 77454 - protein, 434 aa, Zea mays
  Coding DNA Sequence Number=SeqID_34079
  Gene Ontology: Cellular component=integral to membrane; Biological process=response to nematode
  Homolog annotation: Hit_ID=A2WL37; Match level="QueryCoverage=74%, HitCoverage=86%, E-value=1e-125, Identity=73%"; Hit description =Putative uncharacterized protein
  Pfam annotation: Domain name=ABC-3; Domain location=6-193; Score= -176.0; E_value=0.075; Accession=PF00950.8; Description=ABC 3 transport family
  Pfam annotation: Domain name=DUF6; Domain location=150-278; Score =12.3; E_value=0.014; Accession=PF00892.11; Description=Integral membrane protein DUF6
  Pfam annotation: Domain name=Nuc_sug_transp; Domain location=89-254; Score=-174.2; E_value=0.052; Accession=PF04142.6; Description =Nucleotide-sugar transporter
  Pfam annotation: Domain name=TPT; Domain location=137-278; Score =145.0; E_value=2.2e-40; Accession=PF03151.7; Description=Triose -phosphate Transporter family
  Pfam annotation: Domain name=UAA; Domain location=12-284; Score= -150.2; E_value=0.0069; Accession=PF08449.2; Description=UAA transporter family
  Pfam module annotation: Pfam domain module=ABC-3::DUF6::Nuc_sug _transp::TPT::UAA; Domain location=6-193::150-278::89-254::137 -278::12-284
  Subcellular localization annotation: CTP_CleavageSite=74; ConfidenceScore=5.30e-01
MGVGGEKFQLGTVGALSLSVVSSVSIVICNKALMSSLGFNFATTLTSWHLLVTFCSLHVALWMKFFEHKPFDSRTVMGFGVLNGISIGLLNLSLGFNSVGFYQMTKLAIIPCTVILETLFFRKKFSRSIQMSLSVLLLGVGVATVTDLQLNAMTNTIQKKFKVSSTQLLYQSCPYQSLTLFLIGPFLDGFLTNQNVFAFNYTSQVVFFIVLSCLISVSVNFSTFLVIGKTSPVTYQVLGHLKTCLVLTFGYVLLHDPFSWRNILGILIAVVGMVLYSYFCTVETQHKNTEVSPQQVKESEAAPLISDSLSKVENGGGVVDDEPLKRHDLLLVKGSVSWEDLTFKIARYTLKLDGRYCMIVSGHVPHRLTVTSNWYMACLYPKIDFFFFVSERSDRSLDLCNYVLWEATICNCFSHEPGKHMASMTSPRFIGVPE

SEQ ID NO: 77455 - protein, 424 aa, Zea mays
  Coding DNA Sequence Number=SeqID_34080
MVSNCATHVSWTEFRPLAYAVRSMPRGSIGSLPERGARVYADRSGAHQSRSGHVSAPDPAWALSKVLGPHCGRSGSHSRGPAYTRGGLGPAWRSGLYITIVALEYITFFGHVATPEPPMWWGQMMLLAQSSHPRLGRVTAWPQAQLLYHVTKDSRVGTASSYCSKGYPSSRVPTVAPGPTSGEDASLQQASAGSGGGDPPPAATAETAPPGSHAPAGGPTAAAPTSSGVAAAEEVPIVPTATAASTTVMPSSTPSAATEEVPTAPTPAIEGDAGGASNSIPLSTSEEMEVVFGWRLWSSAEPEAAPVPLPRVLSHAHQALHETEAAILREWEVLEAEHQRLSDWHTQLEERTKAVSRQFASKWSELKRDRKNYKRDLQKVYARELEASWREKKLARREEAVSQREALVTELRAKLSALDKILEE

SEQ ID NO: 77456 - protein, 86 aa, Zea mays
  Coding DNA Sequence Number=SeqID_34081
  Homolog annotation: Hit_ID=A3BLB3; Match level="QueryCoverage=77%, HitCoverage=5%, E-value=4e-07, Identity=49%"; Hit description =Putative uncharacterized protein
MAASGSGGNEPSGRPWTATSTWTPGPAGGAVADAVSFETSDDDAEASPAGVVLCHPSADSDRDMTPCPCEVTDIACPFSVQGVMVS

SEQ ID NO: 77457 - protein, 114 aa, Zea mays
  Coding DNA Sequence Number=SeqID_34082
  Subcellular localization annotation: CTP_CleavageSite=25; ConfidenceScore=5.41e-01
MQVAVRPLAPSAVGGGGAFSAGLVRSVREWRGRTHRRVISFSSAGQGGEEAARRETPEETRKRLEELDALLEGLVEPKMRPPTPPPPPVLVEMEKLPDVSSLMPTTDAEYKSVA

SEQ ID NO: 77458 - protein, 450 aa, Zea mays
  Coding DNA Sequence Number=SeqID_34083
  Gene Ontology: Mol. function=magnesium ion binding; Cellular component=chloroplast; Biological process=metabolic process
  Homolog annotation: Hit_ID=A4KAG7; Match level="QueryCoverage=99%, HitCoverage=57%, E-value=1e-131, Identity=53%"; Hit description=Iso -kaurene synthase
  Pfam annotation: Domain name=Terpene_synth; Domain location=1-105; Score=-47.2; E_value=3.6e-05; Accession=PF01397.12; Description =Terpene synthase, N-terminal domain
  Pfam annotation: Domain name=Terpene_synth_C; Domain location=123 -391; Score=245.1; E_value=1.6e-70; Accession=PF03936.7; Description =Terpene synthase family, metal binding domain
  Pfam module annotation: Pfam domain module=Terpene_synth::Terpene _synth_C; Domain location=1-105::123-391
MAFRLLRMHGYDVSSDGLAQFSSESSFRDSVHGQANDTEALLELYKASQIQITEDELVLVDIRSWSAKLLKEQLGSDKVQQVLKFPFYTTLDRLEHRRHIEQFKAGGFHMLKSAYRFCKEDEELVSLAVQGFHSSQALYQQELQFLTRWAKEARLHDLEFARIMPMNTFFPNAALMYAPELSEARILCTKNCMLATAVDDLFDVGGSREEMENLVRLIDMWDEHEEVGFCSERVEILFRAIYDTSKELAAKAMAVQNRSVINHVAELWADLVRAMMTEAEWSMRGHVPSSMEEYMQVAETSFALGPIVLMPLYLIGPELPEAVVRCPEYKQLFHHMNVCGRLLNDLQSYEREAKQGKINSVLLVAPRHGGSIEAAKSEVRRAIEASRRELLRMLVAEADATVPRPFRQEFWNMCKMVHLFYMEDDCYSSPKELVHAANMVVFDPLRVREL

SEQ ID NO: 77459 - protein, 101 aa, Zea mays
  Coding DNA Sequence Number=SeqID_34084
  Gene Ontology: Mol. function=UTP:glucose-1-phosphate uridylyltransfera se activity; Cellular component=cytoplasm; Biological process =metabolic process
  Homolog annotation: Hit_ID=Q43772; Match level="QueryCoverage=100%, HitCoverage=21%, E-value=4e-22, Identity=57%"; Hit description=UTP- -glucose-1-phosphate uridylyltransferase
MATTAVSVDEKLDKLRAECVFPRSENEKSGFISLVSRYLSGEAEQIEWSKIQTPTDEVVVPYDTVASPPEDLEETKKLLDKLVVLKLNGGLGTTMGCTGPK

SEQ ID NO: 77460 - protein, 51 aa, Zea mays
  Coding DNA Sequence Number=SeqID_34085
  Homolog annotation: Hit_ID=Q6H494; Match level="QueryCoverage=100%, HitCoverage=33%, E-value=1e-15, Identity=70%"; Hit description =Putative uncharacterized protein B1040D06.24
DPWLSSNSCNMDAHRLAALSSPIEVSNQELMSSPSLEFTLGRPDWQGTDHD

SEQ ID NO: 77461 - protein, 125 aa, Zea mays
  Coding DNA Sequence Number=SeqID_34086
MSRAFDNYYIEDCGVILAPEENSAARPAPAAVPTTRAKLTTIKFSLGRNRKLRLARPQGSALASGGNLRLARPQGSGSASASGRVASSPDPGLGPSLSLGGVAASPDLRLGSTVPQGMHHYPTPS

SEQ ID NO: 77462 - protein, 205 aa, Zea mays
  Coding DNA Sequence Number=SeqID_34087
MAQVLRSVGARRRGGRRRRGCGRARLVMGGAAAMQPRAPLGATGEVEAENNTIYLVPTTVPTTRVRLPTVSHDLSRVQPRDQQGAPPRPTSGLGLSLGLGRRSPPRLTPGLGLSLGLGRRSPPYPTAGLGLSLGLRRRSPPRPTPGLGLSLSLGRRSPPRPTSASTSGGVTTSPDLGLGLRRSHRLARPRPRTDYATGDASLPYL

SEQ ID NO: 77463 - protein, 173 aa, Zea mays
  Coding DNA Sequence Number=SeqID_34088
MASSSDAVSRTTRESLTLATTMRPPLLNDGPRSAAALDRVQAAASRELIVHSDTSDHVGLLLEVELTVAKLLLIIDERCQRECLLLMVFVRGFKLYPLHTSRVSRLDMVCKTLRHLRGECLEIHYESFTKFYSLQKIRYGFCEKASSEKPSQNDRPENFHISVAPHTTVVPFG

SEQ ID NO: 77464 - protein, 1704 aa, Zea mays
  Coding DNA Sequence Number=SeqID_34089
  Gene Ontology: Mol. function=ATP binding; Biological process=protein folding
  Homolog annotation: Hit_ID=A2ZEN9; Match level="QueryCoverage=98%, HitCoverage=99%, E-value=0.0, Identity=67%"; Hit description =Putative uncharacterized protein
MSSSAAETPREHVESIRRKRYYIGRGEQNPLAEDLHQATNYLSQELYSKDVHFLMELVQNAEDNEYPSEVAPSLEFLITSKDITGCGASSTLLIFNNERGFSATNIESICRVGKSTKKGNRHRGYIGEKGIGFKSVFLISSQPHIFSNGYQIKFNEKPCAECNIGYIVPEWVESTPSLSDIETLYGCSKVLPTTTIILPLKSEKIDAVKTQLSSMHPEMLLFLTKITKLSVRENSDLNHTTVSEISITSEKNYQARKNMHAESYTLHLSAEETGKEEAECGYYMWRQKFPVKPENRVDKRAEIDEWVITLAFPHGQRLTRGKQLLPSIYAFLPTEMVTSFPFIIQADFLLASSREAILFDSPWNKGILECVPKAFMDAFVTLVKSDAPSMSRPSMFNFLPVDSSQIPLLEPVRSGIKDKVLAEDIVPCESYASQKIFCKPSEVARLKPTFWTILAKAWGLGVDLKNLSTHGTYILSSHFDKSIYDSVLNFLDVKNVNHEWYAKCIEGSNLVKEVDEQLYLEILYFVAVNWQNFSGTNMMSIPLLKYVDRGGVLSFWSISRASQCNDRLCIASENKYISWLISWNREFLSSNRFFLPPSTQTALEGCSEKMKSWLQKHARVEVVSIYSYGSVVVNSLGSDQRAVIAFAHFLYHSFKKDHIGDYYLSELCSSMPVIDSYGYVVKERNSIIVPAKGSKWVGLMGTNPWRDHGYIELSAEYKSAGHFAGNYTSEDQLLEFLKTNLQASDVPFILPPDARFSTVSSSLTVDNVFLLLEWIKNLRSRGVRLPDLFLTCVKEGNWLKTSAGYKSPNISFLSSSNWGSLLQTAPSCVDIPMVDQEYYQNRLHMYKEELKAIGVRFEFQEASAYIGTRLMSIAAGNSLTRENVYTLLRLIRFLREKFLSPSDLIESVKEGRWMKSTLGYRRPADCIIYDSDWEVASCISNQPFLDVSFYGAAILEYKVELELLGVIVGFKDNYQLVIDNFKFSSCDITSQATVLILKCIRYVASCDDFIRKLKDLKWLKTIVGFHAPNMSFLVDPEWECLLKVFNGVPIIDYGFYGSVISSYKEELRKTGLITRFEEASKAITEIFKQRVLNSSLKKADVLALLGSYRQLAMHSPLPVELFNSMRTEKWLYTSLGFRSPSDAILFDDAWVSLSPIANLPFIDDGDSCHGLGMEIHGYKDELKKLGVTVDLKEGARFVITGISIPNDPSKLSKATILSLLGCIKSYFTFAAGPLKGFKENMCKKKLLKTSMGYQCPNDCILFDPKQSSVCMEDGPFIDESFYGSEIASFKDALTRIGVTVDIKLGKDLVARHLRSHNKTVTISRIYLYLMTSKWVPASKNSNWIWIPNEMDGGEWVASGSCVLHDRNNLFGLQFHVLDKYYDKKLHDFFLYTLDVRDGPGSEDYCKLWARWEKSVKEIAVSDCSAFWKFIATNWSQNTQKLLSGCAKVPVCTDGKIILTKKEDVFIPDDLLLTDLFSKLTQHSFFIWYPASILPSMSRARLNHIYDTIGVQRISKAATRNDSFTIDGRHFRTIDPSKVVKAGLLQIVLSFLADPALDIAAEERHRMVSCLLNVTVQESDEPITLGYSVRLSSGEVVDVKSSRMVRWEREDSKLYVQSGDGEPSYKEKIEFATYFAEEISQGLLFEMEDQIPSLAELIKFGSLLDFQDAAVGFLLKSKNLQMFPEDEHFLKSSMLGLFPDSYCPF

SEQ ID NO: 77465 - protein, 81 aa, Zea mays
  Coding DNA Sequence Number=SeqID_34090
  Subcellular localization annotation: CTP_CleavageSite=51; ConfidenceScore=5.26e-01
MGPALRPCTSALHTSALSLRVAADGSLLSDSSPPRHANSCNRITQTHHQPRMKAVRPAALVRVDWWRRVCEHNSRVIKGDE

SEQ ID NO: 77466 - protein, 171 aa, Zea mays
  Coding DNA Sequence Number=SeqID_34091
  Homolog annotation: Hit_ID=Q6J9V9; Match level="QueryCoverage=22%, HitCoverage=13%, E-value=6e-10, Identity=76%"; Hit description =Putative uncharacterized protein
MAEAWATLPRYPRTFPRPVGTTRNGIPPEGGIEPSDPVEKGSGPANHLQENSVARPAPAAVPTTRAKPTTIKFSLRRNRKLRLARPQGSASALASGGNLRLARPQGSASASASGGNLRLARPQGLASASGRVASSPDPGPRSQPRPRRSRRLARPQARINRATRDTPLPYS

SEQ ID NO: 77467 - protein, 600 aa, Zea mays
  Coding DNA Sequence Number=SeqID_34092
  Gene Ontology: Mol. function=oxidoreductase activity, acting on CH-OH group of donors; Cellular component=vacuole; Biological process =alcohol metabolic process
  Homolog annotation: Hit_ID=A7QKE2; Match level="QueryCoverage=92%, HitCoverage=97%, E-value=0.0, Identity=64%"; Hit description =Chromosome chr2 scaffold_112, whole genome shotgun sequence
  Pfam annotation: Domain name=DAO; Domain location=41-478; Score= -53.7; E_value=0.036; Accession=PF01266.15; Description=FAD dependent oxidoreductase
  Pfam annotation: Domain name=GMC_oxred_C; Domain location=429-583; Score=95.3; E_value=1.9e-25; Accession=PF05199.4; Description=GMC oxidoreductase
  Pfam annotation: Domain name=GMC_oxred_N; Domain location=40-341; Score=62.9; E_value=1.1e-15; Accession=PF00732.10; Description=GMC oxidoreductase
  Pfam module annotation: Pfam domain module=DAO::GMC_oxred_C::GMC _oxred_N; Domain location=41-478::429-583::40-341
MSTLLATSFFFVLLCSSLQVRGVNYTFVKDAALAPSVSYYDYIIVGGGTAGCPLAATLSERFRVLLLERGASPYDDDRIGDMARFADTLSDTSPGSPAQRFVSEDGVINSRPRVLGGGSCINAGFYTRASDDYVRGVGWDLGAAGAAYRWVEDVVAFQPELGPWQAALQGGLLEAGVAPDNGFTFDHFDGTKVGGSIFDADGRRHTAADLLRYARAEGLDVLLRARVAKILFFNVRAELTGGYFASAPGRRSGRRTAARGVVFHDSEGRMHKAFLSAGRRNEIILSAGAMGSPQLLMLSGVGPADHLRSFGIPLVRDHPAVGQGMSDNPMNAIYVPSPSPVEVSLIQVVGITQVGSYIEGASGSNWGVRHSASGSGPDGVHRPRNFGMFSPQTGQLATVPPKQRTPEAIAHAAESMRQLDDSAFRGGFILEKVLGPLSTGHLELRNRDPDDNPLVTFNYFSHPEDLRRCVAGLSVIERVIHSQAFKNFTYPDFSMETLLNMSTGFPVNLLPRHDNDSTSLEMFCKDTVMTIWHYHGGCQVGRVVDAEYRVLGIDALRVIDGSTFNASPGTNPQATVMMLGRLHILSELYHVVCYYVDYYE

SEQ ID NO: 77468 - protein, 395 aa, Zea mays
  Coding DNA Sequence Number=SeqID_34093
  Gene Ontology: Mol. function=transferase activity; Cellular component= mitochondrial outer membrane; Biological process=glycolysis
  Homolog annotation: Hit_ID=Q2KNB4; Match level="QueryCoverage=69%, HitCoverage=54%, E-value=1e-131, Identity=86%"; Hit description =Hexokinase-3
  Pfam annotation: Domain name=Hexokinase_2; Domain location=17-270; Score=214.5; E_value=2.5e-61; Accession=PF03727.7; Description =Hexokinase
VNDTVGTLALGHYHDEDTVAAVIIGAGTNACYIERTDAIIKCQGLLTNSGGMVVNMEWGSFWSSHLPRTPYDISLDDETQNRNDQGFEKMVSGIYLGEIARLVLHRMALESDFFGDAADNLCTPFTLSTPLLAAIRKDDSPDLSEVRKILQEHLKIPDTPLKTRRLVVKVCDIVTRRAARLAAAGIVGILKKLGRDGSGVASSGRTGGQMRRTVVAIEGGLYEGYPVFREYLDEALVEILGEEVARTVALRVTVDGSGAGAALLAAVHSSNRQQVHREYQAVMGWADRGQGSFSNKKPDMRTAHTITEVRSWATSHKGRKRAPFEKRDGFFQKAPRLQPHVGSSDSARVSRRSAGTVHDFRLYSYDKDYTDCATNDAREEDSTFGMASWFILEEG

SEQ ID NO: 77469 - protein, 49 aa, Zea mays
  Coding DNA Sequence Number=SeqID_34094
MSKVFTLDAVAKHNSKEDCWLIIGGKTPYFGNCLHLCACDVIFYPDVSL

SEQ ID NO: 77470 - protein, 145 aa, Zea mays
  Coding DNA Sequence Number=SeqID_34095
  Gene Ontology: Mol. function=phosphotransferase activity, phosphate group as acceptor; Cellular component=chloroplast; Biological process=nucleobase, nucleoside, nucleotide and nucleic acid metabolic process
  Homolog annotation: Hit_ID=A3AYH7; Match level="QueryCoverage=100%, HitCoverage=62%, E-value=7e-38, Identity=60%"; Hit description =Putative uncharacterized protein
  Pfam annotation: Domain name=ADK; Domain location=55-145; Score=18.8; E_value=2.5e-09; Accession=PF00406.13; Description=Adenylate kinase
  Subcellular localization annotation: CTP_CleavageSite=34; ConfidenceScore=5.07e-01
MAGVSRAIRACAATSQRTLVAASAVALPKEARVKAATVGRRGRGPEDGRRVQWAFLGCPGVGKGTYASRLSQLLGVPHIATGDLVRDALASPGPFSKKLAEIVNQGKLVSDEIIINLLSRRLEEGEEKGELGFILDGFPRTMRQA

SEQ ID NO: 77471 - protein, 378 aa, Zea mays
  Coding DNA Sequence Number=SeqID_34096
  Homolog annotation: Hit_ID=A2X810; Match level="QueryCoverage=74%, HitCoverage=99%, E-value=9e-48, Identity=44%"; Hit description =Putative uncharacterized protein
TNLKHSNRSVCLTIYTNECVLASTVAATALALLHHHPQGQHRTAVSHNDRCISGAGRLMPEKPPPLRRRPTAAGSWVRSLHCKSMAADDVAARVAAAPKKLLPRAGCGGSSGDTLNHVVVSSKPSRPKPKPKPKPSPEPKTTNKPKPVPVPPSPPPGPLGPVPALTELPAGHSSRQVVEIIFLSSWSSPPPGAPTSSSSTFPGAVVEMLFRVHNPARAVARFEDYRAAVRARAGGASRSAADGNEMMRFTPAPPYGSSAAAAAAAGEDGPRVRTFDGSGGAHASARGPATGRRAMFLCRVIAGRVAEGAGAHAAAAAGKEHFDSVRVGRGGELVVFDRRAVLPCFLIIYKLRSSCAIADTVRVQSVREFKARTEAAHV

SEQ ID NO: 77472 - protein, 66 aa, Zea mays
  Coding DNA Sequence Number=SeqID_34097
PAVTRREGPCRRVGPARWRHSLSNEIRWLPGVTPNLLVVVLKHHVTNVEWRSGTVHIVHGQDGGQQ

SEQ ID NO: 77473 - protein, 143 aa, Zea mays
  Coding DNA Sequence Number=SeqID_34098
  Gene Ontology: Mol. function=protein serine/threonine kinase activity; Biological process=protein amino acid phosphorylation
  Homolog annotation: Hit_ID=A7NZI0; Match level="QueryCoverage=44%, HitCoverage=15%, E-value=7e-25, Identity=78%"; Hit description =Chromosome chr6 scaffold_3, whole genome shotgun sequence
MDLMGLNRSLLQSFTQVNALERFKDDDDMLWRSPGTPVFTAPECCQGSAYHGRASDTWAVGVTLYCMVSGHYPFLGDTLQETYDKIQEIASHCVLRLSILGSLGMRGQSLNSSVDVGLAAGRGMMSGKKFNNKASSDGLIGLA

SEQ ID NO: 77474 - protein, 164 aa, Zea mays
  Coding DNA Sequence Number=SeqID_34099
  Homolog annotation: Hit_ID=A2YY32; Match level="QueryCoverage=66%, HitCoverage=32%, E-value=9e-27, Identity=58%"; Hit description =Putative uncharacterized protein
  Subcellular localization annotation: CTP_CleavageSite=29; ConfidenceScore=5.32e-01
MAPPAALHHRTPLLLPRRTVALGATATARAARAASLAVRAQPDTTAAAVSTTAPEPTPEFKPPPGFKAPEPKRFEVKSGQLGSVLGASLAIPLRLGTGVFVLGYSPSLVSASEIPSDQYALEFGAWKVKEESKIGQCKRPEKPIEIYEFEGYSLSCFFLLFISC

SEQ ID NO: 77475 - protein, 205 aa, Zea mays
  Coding DNA Sequence Number=SeqID_34100
  Gene Ontology: Mol. function=DNA binding; Cellular component=nucleus; Biological process=regulation of transcription, DNA-dependent
  Homolog annotation: Hit_ID=A7PEW6; Match level="QueryCoverage=69%, HitCoverage=15%, E-value=6e-28, Identity=48%"; Hit description =Chromosome chr11 scaffold_13, whole genome shotgun sequence
MSLFIGKFCMELLVACQALCNKFRPGALNFLVLLRLVFFGTLGIKTEINPILTPRAAGPEGSFIGAQGSNQAGNNLTLKGWPLTGLEQLRSGILQQKSFIHNQQQLQQQIQMLTPQQQQQLMLHAQQNMSSPTSSDVDNRRLRMMLNRNAVLGRDGQTNSGSDIIPNIGSPSQSGGDIDMLIKWQAFLLVDLGERASSVMVKASE

SEQ ID NO: 77476 - protein, 215 aa, Zea mays
  Coding DNA Sequence Number=SeqID_34101
  Gene Ontology: Mol. function=oxidoreductase activity; Cellular component=cytoplasm; Biological process=metabolic process
  Homolog annotation: Hit_ID=Q6ZG50; Match level="QueryCoverage=92%, HitCoverage=75%, E-value=7e-89, Identity=85%"; Hit description=Short- chain dehydrogenase/reductase family protein-like
  Pfam annotation: Domain name=KR; Domain location=15-211; Score=-72.3; E_value=0.0038; Accession=PF08659.1; Description=KR domain
  Pfam annotation: Domain name=adh_short; Domain location=15-197; Score= 78.9; E_value=1.7e-20; Accession=PF00106.16; Description=short chain dehydrogenase
  Pfam module annotation: Pfam domain module=KR::adh_short; Domain location=15-211::15-197
  Subcellular localization annotation: CTP_CleavageSite=53; ConfidenceScore=5.13e-01
MLSLRSVSGSNSSRGIAAVVGVGPRLGSAVARKFASEGYTIAILSRDLGTCVRVVAEKLSQLAEEIAQAAKAQVFALRVDCADARSVREAFEGVLSLGPVEVLVYNACEPPAANEDARPAPFLAVTPDAFHRALAVSAGGAFHCAQQVIPGMVERGRGTIIFTGSSASVTGFAGYSDLSSGKFALRGLSQSLAREFQPAGVHIAHVIIDGVIGER

SEQ ID NO: 77477 - protein, 110 aa, Zea mays
  Coding DNA Sequence Number=SeqID_34102
MTRVVLCGTLAPTPEDLAPPPCLSLRQQPEREGGGKNRLHRRDSGIPLRRSHSSLLRITSLESVESGTSGVRGYRRQWHRHGGNLCATALGLAGEGDKSLTVCLILNGYD

SEQ ID NO: 77478 - protein, 89 aa, Zea mays
  Coding DNA Sequence Number=SeqID_34103
MAKARDETEREPQAPPPAMMAKQGEEEKEAAPERKPAGERSMAYQIFAGLYVCAYVFCWRTGELIFLNAQDALDRLRRHVRDKLFNRKR

SEQ ID NO: 77479 - protein, 143 aa, Zea mays
  Coding DNA Sequence Number=SeqID_34104
  Homolog annotation: Hit_ID=Q6ZG50; Match level="QueryCoverage=18%, HitCoverage=10%, E-value=1e-07, Identity=92%"; Hit description=Short- chain dehydrogenase/reductase family protein-like
MLPRARVPDFCSGARAAPAAAAACTPPLLGQEGRVVPPPGSVAPHVRRLPAACCRALIRCGAPGRRIHDKLGRERRASFVLAFHASQLHSRSSTSLTRSSRAGGDTAGAGADPDAVAQSYWHVHAQDKSAWTQEMDIRSPSFM

SEQ ID NO: 77480 - protein, 145 aa, Zea mays
  Coding DNA Sequence Number=SeqID_34105
MASTRDSVAKRPLMLSPMPRTTQTSWPAESSIDVVHRSPLLVPSWAAAGDIAGVDSTNSGRVFPVARSLRLEDWDCGCAGRAEPPPVPRGKLQWLRKESIRKVPDFPYRREPVCDRKSICEHTMVLEPSRHMETPSHLNFRRRMA

SEQ ID NO: 77481 - protein, 73 aa, Zea mays
  Coding DNA Sequence Number=SeqID_34106
MAFVIHLRYAYALESAVKKTERGAAACVPLTKAPKPPAIFHGRPSNGNGNGNGNGWRCVRARVFPGRIGGKVT

SEQ ID NO: 77482 - protein, 493 aa, Zea mays
  Coding DNA Sequence Number=SeqID_34107
  Homolog annotation: Hit_ID=A3A818; Match level="QueryCoverage=94%, HitCoverage=68%, E-value=1e-112, Identity=50%"; Hit description =Putative uncharacterized protein
MAADVGLRFNGWSYSDLPYNDHNAQDSSVQEMVLNHGSVSFGRFAAESLSWERRSVFEHNRRQEELSKLTAPGLVAQKKAFFEEYYKRARHLKAQGVLHQAGAAVEENDSSQADELPAAMSEDPVATAPSSSFEPSTDVESKCQDAHEHGYLTFNPLFSQTASLPNIQEESSSSGQKHGFSCETIERKVLAPRRVASNDNDQSNIAGSRIVLPIVSLQSEYLKADPEKSEASKNVPIINRSKKVSKDLATSVISIPRVDLRRNSENGPSRDLEDPFHKRVEMKLRALSDRMDADRTTASSRSSSYQPPERAMTSARSAYQDRLAISSRSSVSQNTSKALAPSKLAAQASHKFLKGVQRLDAMPRGIFVNKGSSASLVASCNSSATGKLSAKILVAPSSSQVGAKTSRTAQVTPKRAAGPTSVNNVSHNKRSSSENLPRAAKAPKISKVMNAVSKAEAVQKSKSSSNLVEEEIYRQSAPQTAMKKTERRSRRAR

SEQ ID NO: 77483 - protein, 70 aa, Zea mays
  Coding DNA Sequence Number=SeqID_34108
MGFAIPLHPTAASVAYGLLTCRALQQEQAIPPAHDIGSNMTCEDGDQTAWTRRGHISAATSHVRCRLRPF

SEQ ID NO: 77484 - protein, 145 aa, Zea mays
  Coding DNA Sequence Number=SeqID_34109
  Gene Ontology: Mol. function=phosphotransferase activity, phosphate group as acceptor; Cellular component=chloroplast; Biological process=nucleobase, nucleoside, nucleotide and nucleic acid metabolic process
  Homolog annotation: Hit_ID=A3AYH7; Match level="QueryCoverage=100%, HitCoverage=62%, E-value=3e-37, Identity=60%"; Hit description =Putative uncharacterized protein
  Pfam annotation: Domain name=ADK; Domain location=55-145; Score=18.8; E_value=2.5e-09; Accession=PF00406.13; Description=Adenylate kinase
MAGISRAIRACAATSQRTLAAASAVTLPKEAGVKPATVGRRGRGPEDGRRVQWAFLGCPGVGKGTYASRLSQLLGVPHIATGDLVRDALASPGPFSKKLAEIVNQGKLVSDEIIINLLSRRLEEGEEKGELGFILDGFPRTMRQA

SEQ ID NO: 77485 - protein, 334 aa, Zea mays
  Coding DNA Sequence Number=SeqID_34110
  Gene Ontology: Mol. function=triacylglycerol lipase activity; Cellular component=chloroplast stroma; Biological process=lipid metabolic process
  Homolog annotation: Hit_ID=Q8RZ40; Match level="QueryCoverage=60%, HitCoverage=46%, E-value=1e-58, Identity=59%"; Hit description =Lipase-like
  Pfam annotation: Domain name=Lipase_3; Domain location=161-244; Score= -11.2; E_value=0.0041; Accession=PF01764.16; Description=Lipase (class 3)
MHRSFLLVCALVATALSTDTTVAAAQSQSQSQSQRSWAELSGRDNWDGLLDPLDGDLRRAVIRYGELAQATSDAFIGDPASPYAGASRYAPGAFLRRAQAPDPDAYNVTRFLYATSSARVPGQFITRPAPPGAWSAESNWMGYVAVATDAGVARLGRRDIVVAWRGTKRAVEWANDLDITLVPAAGVVGPGPGWSQPAVHRGFLSVPRVGDDQFKKAFDSTPGARLLRVRNAPDVVPTVLPNAFYKDVGVELLLDTRKSPHLKRPGPGPAAWHNLECYLHGVDRDVALVNKEVDALSDDYPVPAAWWVEGNKGMTRDASGRWVLQDHEEGNLAM

SEQ ID NO: 77486 - protein, 286 aa, Zea mays
  Coding DNA Sequence Number=SeqID_34111
  Gene Ontology: Mol. function=magnesium ion binding; Cellular component=chloroplast; Biological process=metabolic process
  Homolog annotation: Hit_ID=Q673F9; Match level="QueryCoverage=52%, HitCoverage=16%, E-value=9e-31, Identity=47%"; Hit description=Ent -kaurene synthase-like protein 1
  Subcellular localization annotation: CTP_CleavageSite=64; ConfidenceScore=5.78e-01
MASLSFASSHASLFCCQQSSSAIILRPAGALLRLSRRQPSSHTISTTDQLFPRRSRMPRNVDTHAAAERNSPSTMSSLEAVDELETNGDSAVVVVREQQQQQHLLMGATDDGLPPSPYDTAWVAMVPAPGNPLVPRFPQCVDWILQNQRSDGSWGPDGGSGDHPSSPLGKDALMSTLACVLALKTWDAGEEHVRKGLSFVGNNSPSCVMTGDERDAPVGFSVIFPGMLARAIDMGLDIPMMTQANVDAFIRLRDTELNRMRNEIKQAKFAAHEENLNFVTHDMDLK

SEQ ID NO: 77487 - protein, 106 aa, Zea mays
  Coding DNA Sequence Number=SeqID_34112
MEWSTAALGVRPLCLFQGDVAGVDSTNGGRVFPVARSLRLEDWDCGCAGRAEPPPVPRGKLRWLRKESIRKVPDFPYRREPVCDRKSIREHTMVLEPSRHMETPSR

SEQ ID NO: 77488 - protein, 27 aa, Zea mays
  Coding DNA Sequence Number=SeqID_34113
MDDLTQCQDERCSPFNNTNVVFIPGKP

SEQ ID NO: 77489 - protein, 134 aa, Zea mays
  Coding DNA Sequence Number=SeqID_34114
  Gene Ontology: Mol. function=DNA binding
  Homolog annotation: Hit_ID=Q10LH5; Match level="QueryCoverage=32%, HitCoverage=7%, E-value=7e-16, Identity=93%"; Hit description =Nucleolar protein NOP5, putative, expressed
  Pfam annotation: Domain name=NOP5NT; Domain location=89-134; Score =31.1; E_value=7.5e-07; Accession=PF08156.4; Description=NOP5NT (NUC127) domain
MVFSNFSGTTVETDSTQAPISQVLYTFHSVHHSMPKLEYSSSKMDMEKEIRKQVDGAIAKAKLDEASRALLMKVLEDATQDVVQRQAKMLVLFETPAGFALFKVLDEGKLDKVEDLWKEFTTSDSARKIADEII

SEQ ID NO: 77490 - protein, 168 aa, Zea mays
  Coding DNA Sequence Number=SeqID_34115
  Gene Ontology: Mol. function=structural molecule activity; Cellular component=protein complex; Biological process=microtubule-based movement
  Homolog annotation: Hit_ID=Q9YI87; Match level="QueryCoverage=22%, HitCoverage=20%, E-value=5e-14, Identity=97%"; Hit description=Beta -tubulin
MDSVRSGPFGQIFRPDNFVFQSGAGNNWAKGHYTEGAGNNRNRTRHPRPSTTYLHPLSASDVGAPTGNRQVSLWGSSTKEITRDTLLQKVSEENQLHKHLCRAAAAALSIQEIEGSQGFMFKFHSNKKCNSRLIVQGRLVIFTNDCYVFALCPFAGPQFQMNLKDEEY

SEQ ID NO: 77491 - protein, 218 aa, Zea mays
  Coding DNA Sequence Number=SeqID_34116
MRTARVPATERDLHHLLHRALHHRTDGVARWRNRRSEGEPWPSEETMLVGAGHGRRRQGAGCGIQGRQAPLGFRAQRGGGDGGSSEAWEQSLREVQSEGEGAPDGGGGGGGSERLPACVGELRTGGGRGSFARTGKGQTGGDAHTTADGRRTQNNDVGWTVEIEDRQNGRTLGTLSIVMFGRGIPGALDLVSHIEARDKLETKRQTNKAFWTLLLASC

SEQ ID NO: 77492 - protein, 412 aa, Zea mays
  Coding DNA Sequence Number=SeqID_34117
  Gene Ontology: Mol. function=catalytic activity; Cellular component =cytosol; Biological process=polyamine biosynthetic process
  Homolog annotation: Hit_ID=Q7XJ04; Match level="QueryCoverage=100%, HitCoverage=98%, E-value=1e-124, Identity=59%"; Hit description =Putative ornithine decarboxylase
  Pfam annotation: Domain name=Orn_Arg_deC_N; Domain location=57-294; Score=240.3; E_value=4.4e-69; Accession=PF02784.7; Description =Pyridoxal-dependent decarboxylase, pyridoxal binding domain
  Pfam annotation: Domain name=Orn_DAP_Arg_deC; Domain location=297 -407; Score=129.8; E_value=7.6e-36; Accession=PF00278.13; Description= Pyridoxal-dependent decarboxylase, C-terminal sheet domain
  Pfam module annotation: Pfam domain module=Orn_Arg_deC_N::Orn_DAP_Arg_ deC; Domain location=57-294::297-407
MQTVLSAPGVKDKKLVSFTRNDDATNDKDAVTGLIRSIVGGATPSSPAQRTAFHVFHINTVVDLFSAWRRGLPDVRPYYAVKCNPEPALLGALAALGAGFDCASRAEMEAVLALGVPPGRIVYANPCKPEPHLEYAAGAGVSLATYDTEDEVAKVARCHPGCQLLLRLKAPDGGVSGGDLMNKYGAHAHEVAPLLRAAQRAGVGVAGVSFHVGSPVSRVDVYRGAIQAARAAFDQAVALGMPPMRVLDVGGGFTAGAAFDEAAAVIRDALDRSFRDLRPCVEVVAEPGRYFATTAFTLAARVIGRRARGAAREYWIDDGVYGSLNNVLMDHKAPRPRPLASCPRPGEETYASTVFGPTCDSQDKVVTGYQLPEMSVGDWLVFDDMGAYSTSAGSRFNGFDSSEIKIYVAYSS

SEQ ID NO: 77493 - protein, 333 aa, Zea mays
  Coding DNA Sequence Number=SeqID_34118
  Homolog annotation: Hit_ID=Q10MM4; Match level="QueryCoverage=57%, HitCoverage=59%, E-value=3e-29, Identity=43%"; Hit description =Expressed protein
  Subcellular localization annotation: CTP_CleavageSite=36; ConfidenceScore=5.01e-01
MRLGVPFIAPRQLGAVESTSGRLSLPSVVGRTGQSVAGEKPESGLFGRGSLAHRTLSGAPPDTVRTRLYPHPACGAASRSLVNRPLLLDLSRIARRSSSSANRPPDELFHNDHIRPLTLPPLPDLDPGSDDDEDCVGGHAPTRGRDLTPQSASVHRRARSMSPLHSASPRLKLINALVVPAPDLGPGPDATGTHGEAAPPVTASSRSSSSSSTSSSGTSSARGSRRWVFIRDMLLHRSKSEPGSGAHAHDAPGAPVASKPERAWSFSSPSWVTRRAQQQAWGGHRASCDNGGAGVKKGPWTPEEDIVLVSYIQQHGPGNLLLCSLDHVSAEGM

SEQ ID NO: 77494 - protein, 136 aa, Zea mays
  Coding DNA Sequence Number=SeqID_34119
MGKSKKGGGSSHHSGDKRKREPTPPSEDFGNSEYSEEEFSSESEGSPAPASPPVWTYIRAVERAVLEGSDESEYSSDEENSSDPSEEGSDGDSGDGDDDGGNGDGDGDSGKGGDGSGKGGSGDGGDDSKGSSKASG

SEQ ID NO: 77495 - protein, 90 aa, Zea mays
  Coding DNA Sequence Number=SeqID_34120
MASYNDQAEALSLMKLVHASEVSILYCRTLNFIGCTEEVSLVLILPYALELTGVPMGVVLRETASAAWRVFRRFELHIEFLRLFGGRGRR

SEQ ID NO: 77496 - protein, 150 aa, Zea mays
  Coding DNA Sequence Number=SeqID_34121
MELGVAATQTEPTQGHEGAATAMETEGGRIPTIGVSSAQARPPSTMASRKERRSDAGRSRARHGEEEGALASWRIAGRPGSVLARGPGRRRPVLEMEPATTLMEEQRPCTMAEGAWSREHAGANTGGALRAMGKKASREPDTMDGRAQSC

SEQ ID NO: 77497 - protein, 97 aa, Zea mays
  Coding DNA Sequence Number=SeqID_34122
  Homolog annotation: Hit_ID=Q8SA86; Match level="QueryCoverage=53%, HitCoverage=6%, E-value=1e-08, Identity=55%"; Hit description =Putative retrotransposon protein
MRRSGLVPSEDTPAAEATQADVEEAGSEDEYSCGMPSKPSHLDFGKSTISEAREWNRLVRVSAEFINYTIRLKPEEMVFMRILDVTTLLIAKLRSFQ

SEQ ID NO: 77498 - protein, 51 aa, Zea mays
  Coding DNA Sequence Number=SeqID_34123
MAMMDSTSEKMYLCQVRKRQIFVASAPRWFLRKRSKSEAAGGLGPPYGTFV

SEQ ID NO: 77499 - protein, 87 aa, Zea mays
  Coding DNA Sequence Number=SeqID_34124
MKKERANRCSRQYCASSGLPQNIEKTATRPSRRRHACPFHWQVARPYCRMRYTHHDSRVTEEAATIYQYCMDYEHYGARSPPRRYRH

SEQ ID NO: 77500 - protein, 182 aa, Zea mays
  Coding DNA Sequence Number=SeqID_34125
RRGYADRANTGARGSCDGHGDRGAALGSGASWASPVPTGVSAGQNKKTPGELGFEGNRGGHIPTIGASSAQARPPSTMALRKERRSDAGRSRARHGEEEGAMASWRIAGHPRLVLTRGPSRRRPVLEMEPATTLMEEQRPCAMAEGVWSKELIGANVGGALCAMGKKASRESNAMDGRAQSC

SEQ ID NO: 77501 - protein, 164 aa, Zea mays
  Coding DNA Sequence Number=SeqID_34126
MGKSKKGSGSSPHSGDKHKREPTPPSKDFGDSEYSEEEFSSESEGSLAPVSPPASSDDSDDSQGIAAEVWTYIRAVERSGLEGSDESEYSSDEEDSSGSSEEDSDSDGGDGGDDGGDGDGGGDSGRGGDGGSKGGNGSGSKGSSKGSNKGQWLDATGFLDVSID

SEQ ID NO: 77502 - protein, 47 aa, Zea mays
  Coding DNA Sequence Number=SeqID_34127
MPPPDLALPPPMLSPPPPPQFPVGFKKPPALVAAPGDVSGQDNASTS

SEQ ID NO: 77503 - protein, 77 aa, Zea mays
  Coding DNA Sequence Number=SeqID_34128
  Subcellular localization annotation: CTP_CleavageSite=46; ConfidenceScore=5.48e-01
MKAFHSAASSSSEAHVAEGTSVLNTRRWAFRRNRKLRLARPQGLAPASASEGGLRLARPQGSASTSTPEDGLRLTRP

SEQ ID NO: 77504 - protein, 101 aa, Zea mays
  Coding DNA Sequence Number=SeqID_34129
VQHKCLSVKRWTKYKSRIKEKTNWKCLGSGSQDSAQSGAPDCPVVHRTVSGKLVALGNSSATYGYNSPDCLVCTGLSGEPTVGRANGRPRDLRGTRGRANG

SEQ ID NO: 77505 - protein, 379 aa, Zea mays
  Coding DNA Sequence Number=SeqID_34130
  Homolog annotation: Hit_ID=A2XD85; Match level="QueryCoverage=85%, HitCoverage=57%, E-value=1e-110, Identity=65%"; Hit description =Putative uncharacterized protein
  Pfam annotation: Domain name=DUF936; Domain location=24-379; Score =111.2; E_value=3.2e-30; Accession=PF06075.3; Description=Plant protein of unknown function (DUF936)
MPVSWLVRREGIGKVGVVCVSVFMATELEPRALQEGSGGKRISWLQDNGISYSRNTIKELWPDHGFFIKVSDSSHSTYVSLSKEDNELILSNKLQLGQFIYVEKVQSSIPVPVLVGVRPVPGRNPCIGNPKDLMQMSTPSGVMEALDHQRTTSKSADLSESEKENLQRKVVIKEQKTVVASRYMLGVSSNNGKITNLNSSIDSEKSNGGSTISESNKKSVALKVRQEAKPQERSNNTSPSNAKLVSTKQEISKDTRKNIGTSPSPNGSAVVKKQMPKESKKEVATERRSPPKLHRSSPTPARTSPTKLSPAAKQNGNSGPVSSVSTVKKRVSETISWDSLPTSLINSGKAVVRRKNIALIVAAEAQREAAAAAYLVKGL

SEQ ID NO: 77506 - protein, 16 aa, Zea mays
  Coding DNA Sequence Number=SeqID_34131
MNPSPWPAQLRSNREF

SEQ ID NO: 77507 - protein, 163 aa, Zea mays
  Coding DNA Sequence Number=SeqID_34132
MEDRLVLLWKDNRIIEIDMKESPEAITINPDITNTECRILEAHILKKGGDGILGPTAHPGLPLKVLFRSRTVFSTVVQWFMPDARETVDKGLQVRAALKCVIPYVLARVLLRDGLQESSLAPKVQRIRFVLQRSAFRFVGLRNSLGVPKVHPMGVAPELRVDF

SEQ ID NO: 77508 - protein, 85 aa, Zea mays
  Coding DNA Sequence Number=SeqID_34133
  Gene Ontology: Mol. function=serine carboxypeptidase activity; Cellular component=extracellular region; Biological process =proteolysis
  Homolog annotation: Hit_ID=P55748; Match level="QueryCoverage=98%, HitCoverage=20%, E-value=9e-38, Identity=84%"; Hit description =Serine carboxypeptidase II-2 precursor (EC 3.4.16.6) (CP-MII.2) [Contains: Serine ...
  Homolog annotation: Hit description=carboxypeptidase II-2 chain A; Serine carboxypeptidase II-2 chain B]
MVGNALTDDFHDHYGIFQFMWTTGLISDQTYKLLNVFCDYESFAHSSSQCDKIMDIASTEAGNIDSYSIFTSFASSKNKVMKRLH

SEQ ID NO: 77509 - protein, 231 aa, Zea mays
  Coding DNA Sequence Number=SeqID_34134
  Homolog annotation: Hit_ID=A2XD85; Match level="QueryCoverage=89%, HitCoverage=34%, E-value=2e-63, Identity=65%"; Hit description =Putative uncharacterized protein
  Pfam annotation: Domain name=DUF936; Domain location=1-230; Score= -206.9; E_value=9.6e-06; Accession=PF06075.3; Description=Plant protein of unknown function (DUF936)
MGRTHTHPRARDAEETTQEPRLQLIFSEIRESSEVDPQAAITKFFELHRLIVQQSAVWKAYTPEPSKESRPEKEKPSRKASASHHHQNKAGTRDTAKNPEGAQGSEKTEWAREDGFKEICRSWIVLRKESRSWFLSFLEDALESGFMSEGQTTKNTRERVRGQPKPKGGDGRIAVLLSQLKETSNWLDQLLQDEADTSADGLAETVDQLKQKVYKCLLGTVETAASALGGR

SEQ ID NO: 77510 - protein, 193 aa, Zea mays
  Coding DNA Sequence Number=SeqID_34135
  Gene Ontology: Mol. function=acyltransferase activity
  Homolog annotation: Hit_ID=A3AXV0; Match level="QueryCoverage=33%, HitCoverage=16%, E-value=5e-16, Identity=61%"; Hit description =Putative uncharacterized protein
MVEDPLGWWPGWEFFRLAGDPAVRPERLMNMSGSPAFRAYEVADFGWGRPRRTKPIRMNHDGQLAPDAAWPLGAMICAFSMLYNWMLADPSFLFKVGTEVRRCLLGLGGTNIHVSPSESEAHVGEESNGKRCRSTKRGGTEDNPRMVERSRGKTTQRSPPSCPRTTSMSGQGVASKAWRGDGLPQPRGEGTFP

SEQ ID NO: 77511 - protein, 587 aa, Zea mays
  Coding DNA Sequence Number=SeqID_34136
  Gene Ontology: Mol. function=flavin-containing monooxygenase activity; Cellular component=intrinsic to endoplasmic reticulum membrane; Biological process=electron transport
  Homolog annotation: Hit_ID=A2XD86; Match level="QueryCoverage=97%, HitCoverage=96%, E-value=0.0, Identity=72%"; Hit description =Putative uncharacterized protein
  Pfam annotation: Domain name=DAO; Domain location=20-393; Score= -57.6; E_value=0.064; Accession=PF01266.15; Description=FAD dependent oxidoreductase
  Pfam annotation: Domain name=FMO-like; Domain location=20-579; Score=- 371.5; E_value=8.1e-08; Accession=PF00743.10; Description=Flavin -binding monooxygenase-like
  Pfam module annotation: Pfam domain module=DAO::FMO-like; Domain location=20-393::20-579
MAAAQQQSRSTRQAVPASSRVAIIGGGISGLAAAKQLAAHDPVVFEATPSIGGVWKHCVYRSTRLQTPRPDYEFSDYSWRNRDDPTFPTHGEIVEYLEGYADTFGLWRYIMLGAKVVDVKFLGGAAAGFTERWSGTGEALQGKPMWEVGVATAGSHTVQYYQFEFVVVCAGKYGDVPRMPVSFPEGKGPEVFRGQVMHSLDYCKLSEEETVELMRGKKVVVVGYKKSAIDLALECAQANQATCVGNELGGRRRPNRRAIPEKVTLVMIRRTLHLRPTPTSTAGEGGEACTMLVRTLHWVVPSYSIWGLPFFLFYSTRLAQFLYERPNQGILRSMLCRLMTPLRAGVSKFIESYLAWKLPLDKYGLRPDHPFVEDYASCQMAILPDGFFDMADRDMIRFKRASGGWCFSRNGVLLDDGTEVEADLVFLATGFEGKDKVRAVLPDPFRGLVVDRSGMMPLYRYARPSVLEIGIAHCSGTIHPLIPNMAFVGYVESVSNLHTSELRCRWLAGLLGGRFALPSVEDMVRHVEGEAEAMRRTTRFYRRHCISTYSIHDSDAMCADLGSRVLRKGNWLAELFAPYNNQDYKED

SEQ ID NO: 77512 - protein, 59 aa, Zea mays
  Coding DNA Sequence Number=SeqID_34137
MGKSLDREERGLGRPFYREREEHHAEKYCRCSQVLADPTGSRWRPCRDIVGDAVLDALG

SEQ ID NO: 77513 - protein, 154 aa, Zea mays
  Coding DNA Sequence Number=SeqID_34138
MPKLSCAQLRLYANLRILCTSSDCGSDPSPKGLDSGSAPEDDELRLARPRARTRARPRKTMNSASPDPGRGLGLGPERRRTLPHPTQGSDSGSAPKDDELRLARPQGSDSTSASADGLRLARPKGSDSTSKDRLDLDLEGASASPYPGLGPTTS

SEQ ID NO: 77514 - protein, 67 aa, Zea mays
  Coding DNA Sequence Number=SeqID_34139
MAARCTAAFPRSLHPLPTPMALHLSYSASEFTTGMAAQGPWYLCAKTRGFQVWADVEELGLKQGKCF

SEQ ID NO: 77515 - protein, 167 aa, Zea mays
  Coding DNA Sequence Number=SeqID_34140
  Gene Ontology: Mol. function=oxidoreductase activity; Biological process=ethylene biosynthetic process
  Homolog annotation: Hit_ID=Q10A95; Match level="QueryCoverage=71%, HitCoverage=38%, E-value=6e-26, Identity=48%"; Hit description =Oxidoreductase, 2OG-Fe oxygenase family protein, expressed
MSTAEEAAAGGGDDYDRLSELKAFDDSKAGVKGLVDAGVTTIPAIFRGHLLSSSSSSSSTSLSIIPVIDLSAADAVAREEVVAQMLASVRRFNEEPHEVKRPYYTRDARRKVRSNSNFDLFQSPAANWRDTVFCEAALSEALGLGPGQYLFGEDRLAVPCSAASFED

SEQ ID NO: 77516 - protein, 119 aa, Zea mays
  Coding DNA Sequence Number=SeqID_34141
  Subcellular localization annotation: CTP_CleavageSite=72; ConfidenceScore=5.16e-01
MRGGSLAAPGWDVSLADDVTAAPARLPPSLLPAHFRPYRPSRQAGAAGSPRVAALVPQPKRRGGGASGGAVACMQHPARRLRDAWAWASVLARWESEKHVHLARLHAACMAAHSFHPLA

SEQ ID NO: 77517 - protein, 402 aa, Zea mays
  Coding DNA Sequence Number=SeqID_34142
  Homolog annotation: Hit_ID=Q6QP51; Match level="QueryCoverage=48%, HitCoverage=85%, E-value=8e-21, Identity=39%"; Hit description =Putative growth-regulating factor 1
MEKTIDDKGLQIVHRDGGERPWVAWRNDGYPVGHRQAKGVAAERTRLRKPKQEASSRIKNHHRTLFRGRRHLWQAKRATFHLRHDDRVKKGTGKGDILKGILLREGSGPRALLLIRGSKASPRKGSTAAPEHSGFRLITDQRFEGWPLGRVQQPPQSTRAPRPLLIRGSKAGPSKGSTASPEHAEREMTLGTSDTWPRPELRSREVDGCNSGQGSVYSRDAISPRLSPASGGNNSPGRIHASPESLLKQRALSRLARSPARAGFGVKQPWPNCLTNRPYRRRIQCKDRLAPYPDTRTSVDRVEPQAPKEAPPRPTLGLGLRRSLCLGLGRWTPPRPTLGLGLDLDLGRWTPPRPTPGPSLNLDLGRNRVLARPQPRSQEESPPRPTSGSDRPRRRGTSLPYP

SEQ ID NO: 77518 - protein, 281 aa, Zea mays
  Coding DNA Sequence Number=SeqID_34143
  Subcellular localization annotation: CTP_CleavageSite=2; ConfidenceScore=5.47e-01
MSSSSLMRRVFPSSKPPDGGYPPSFRLLVGGTQLRGSWYLSAIVRLQGFSSCGSVASPRWWSPKTVTASSWVGRSKPGCDLGPTLSFKDVHHPRWGGGRAEPALYLPRGFAGHPFPRCSRERALTGPAGGPDFDNAGLGRRRASSPPACRARRLGSRRPLLSEGGCRAVCTGGPPKMPRAARAAFVFWGGPAFAPGWRPHAEVDAPLAREGLSGDLPGSRWALPSVPRRRRLEKSPSPTGSPPPSVPLAPSSSHLSSPLERRCGRGQDCSSAHPEACAAAA

SEQ ID NO: 77519 - protein, 62 aa, Zea mays
  Coding DNA Sequence Number=SeqID_34144
MARSDFFDPLSLWFWRFGMMQDFGHYKSYPLYRNLILEICKERVYTHIVSTHMHKQKSQHDA

SEQ ID NO: 77520 - protein, 427 aa, Zea mays
  Coding DNA Sequence Number=SeqID_34145
  Subcellular localization annotation: CTP_CleavageSite=18; ConfidenceScore=5.11e-01
MKLWKETSRSSKTTTSSRCGLAATPNRLPVKATVIYVSFPHFDLLCTFGSGQMGRPEALKKKHGPGTARHEIIYCQAGTGPLYRAGVWAEMARLRHTARKSVIPFLPSRLAERPLRRPVAGQSSHLERLHHRLREEQERRRQEQQSSSFSLHQEIESVRSCSPVLPLEAPPAPPLGAPASGVAAGGDPDDRGGDDSSSHDTDFSANPEPEGWVARPITRDAARGCHFHDALDTLLRRAFNRYTWSVEYRCVVYQHSRGVYPDRWEATCLVRCPENSFQGAEACSEHYSISERDSAEAAMQDAARRALSHYCLVFGGAADGLDLKYYPRRPSGSTGGVIVSPVGEGNPRLSSTVNLAAVLNTELDHALDELSRARAEIALLRAERAERRHLDGGSPAPVGTQHPYRSPQRGHQSYGNPDCKTKITLEP

SEQ ID NO: 77521 - protein, 85 aa, Zea mays
  Coding DNA Sequence Number=SeqID_34146
MRGTQLLPGHPCGNGEGRLWGGVVLYPELGSDRLAPSWHMGKICSKFVAMKLEWISTEAALGSPLRSAIRLPYQKGPTAIWVHAI

SEQ ID NO: 77522 - protein, 126 aa, Zea mays
  Coding DNA Sequence Number=SeqID_34147
MDSGATADPAASCPATVPRQRSRPLAYARKAEEDIPPEEMLTADEANWLTTMRRPTSRCRHNGHSELRHLWPPPVEGRSTRQMPDLVLAHAQAVSLANSLEGERCVELSSYPVILAAMVRGGYGEE

SEQ ID NO: 77523 - protein, 145 aa, Zea mays
  Coding DNA Sequence Number=SeqID_34148
  Pfam annotation: Domain name=GRP; Domain location=48-133; Score= -30.4; E_value=0.1; Accession=PF07172.2; Description=Glycine rich protein family
MGKDKKGQGSPPRSGDIWKREPSPSLEDFGDSEYSEEFSSESEGSLGIAAKVWTYIRSIERAGLEGSDESEVSSDEENSSNSSKEGSGGDGDDEGDGGGDGGDNGGNGGGSDGGGKGGGDGNGKGDNNSKGGSSSSKASGKAPLA

SEQ ID NO: 77524 - protein, 193 aa, Zea mays
  Coding DNA Sequence Number=SeqID_34149
MEPKLASGLSELRLGQQQAGGRLHRRTMLQVVRSPSGMRGSRRGEWGGEKQDCDVGGFAGEMGVGGWRAQGGRWPLGCADRARRRAGHTARGVTQVLLRLVFVDVGDLEVWGPLNGPKTWSERRYPTCVFLSTTIGPVPGRGVADVLSRPSPGCATSRSRCRPNSSGLTSCWDAIIPIVLLSALYLILMSLFA

SEQ ID NO: 77525 - protein, 246 aa, Zea mays
  Coding DNA Sequence Number=SeqID_34150
MARCSDEGMSDIGSSSRRKPNADELCNADERRSLGAVLKQGRESGERKEWRGGWRRMKHCPASPGLRTTWVGRRFWEGGADSGPMRSDDVGQRPRMRATRQGARGHGRDVQGRGGGWASACGRDALGCVAGQARHGERARQRAGRWASARSGGARFERGAAGLRAQMAWWAARGEAGAMKRIPAPAPCSFSEPSKYILHTSAVSWLSGPLGYSSNGFFVVENIPYWKPGDYYDFVVVKVVTELACS

SEQ ID NO: 77526 - protein, 70 aa, Zea mays
  Coding DNA Sequence Number=SeqID_34151
  Subcellular localization annotation: CTP_CleavageSite=43; ConfidenceScore=5.48e-01
MVRDAVSLSLIHQPSGAQHPRAAGHSTPASTGSLGVSAVGRIEVEMAMSTRNPNTRRVLPDMKILSYVII

SEQ ID NO: 77527 - protein, 109 aa, Zea mays
  Coding DNA Sequence Number=SeqID_34152
MDTGDLFYRGSALEGLVPVEESTKDGVDHCAQIAVAPLVHRTVRWCTRHCPVNYSGAAPGKPEGEEFELKHPESEQAPDGAPNSEQDLSGGQVYVMSRGVNGDLIQINL

SEQ ID NO: 77528 - protein, 310 aa, Zea mays
  Coding DNA Sequence Number=SeqID_34153
  Homolog annotation: Hit_ID=A2XIP1; Match level="QueryCoverage=87%, HitCoverage=30%, E-value=5e-23, Identity=28%"; Hit description =Putative uncharacterized protein
MASKVVRSGNTHKRTRWRHDFRAKLGCDCDRAPAQLESGWGHHLVMDIPLRFMALEMEITKRTSSDHVSHCAKGSDRQIRPAGGYRKNYSANQGSGSQNRPYHDDSYLPTKFLDDHFPEIDAAKHQSYLCDFQSSNFHDCFDSSQKFRNAYNDKVVKRKFIKQDFLGNTYNGACVGKYDRNSCRKRNAYHFGGEKTRKNDTNKDRSKRLRCPLEQDQRQQVECNEMRNDSREGNVEMTRLVCQDGAKRNFNQKKNATAPASSDSTKCDGKNILSPKCSKTIASSHTPNLSEGSNDMDPKSDNYVDGCTER

SEQ ID NO: 77529 - protein, 215 aa, Zea mays
  Coding DNA Sequence Number=SeqID_34154
MGLLEHPLEAVAFRLYSLPVPEASAATGAAAAWTCLAAAVLAAAAGVWRLCLSPSPPPSAAVAAAANASGPDRSHVAEASPETSRRAPEPAAAAAATPKERYTAYYRDVGCCCCGGESDDEEGDAEERGDGDVFLSDDDGPTTDPFGWEWEVVRSLQPPLSLAAETTGRRYRRSPTTGLGGSVVQLWDQGAVRGLTPAARPRPRARVVVGTVSAF

SEQ ID NO: 77530 - protein, 310 aa, Zea mays
  Coding DNA Sequence Number=SeqID_34155
METHTYTNSSIPMGINHFDPSSKRIYAERRSSICISHESSRLDPLAIPASNGSDSFNASSHSYCPPFKYPTAPSSPPLHSSLHSPNPAQSRQASWSNQSNRELRVREAGETEEKRTGTARRRDRRRMGLLEHPLEAVAFRLYSLPVPEASAATGAAAAWTCLAAAVLAAAAGVWRLCLSLSPPPPPSAAVAAAAANASEPDRSHVAEASPEPAAAAAATPKERYTAYYRDVGCCCCGGESDDEEDDAEERGDGDVFLSDDDGPTTDPFGWEWEVVWSLQPPLSPVAETTGGRYRRSPTTGLGGSVVQLWD

SEQ ID NO: 77531 - protein, 69 aa, Zea mays
  Coding DNA Sequence Number=SeqID_34156
  Homolog annotation: Hit_ID=Q10LU2; Match level="QueryCoverage=40%, HitCoverage=6%, E-value=3e-07, Identity=86%"; Hit description=Lung seven transmembrane receptor family protein, expressed
MRRATLSVALGLSLIALLAARGADASIHEYAGGGFAPRANSFHGGSEGLYASDLSSNSSSFISAFDHLA

SEQ ID NO: 77532 - protein, 106 aa, Zea mays
  Coding DNA Sequence Number=SeqID_34157
  Homolog annotation: Hit_ID=Q10SC2; Match level="QueryCoverage=40%, HitCoverage=4%, E-value=1e-09, Identity=67%"; Hit description=FHA domain containing protein, expressed
MGEAETGTTAAAAVSMIKTGGSTIRIETNSMNAIGGSCFIQLFLLMLDCETLYINVFILIPLQRIARRVAAQLISGMHCKIYRDTVLGELNRHEPVPVFLKDTSLS

SEQ ID NO: 77533 - protein, 467 aa, Zea mays
  Coding DNA Sequence Number=SeqID_34158
  Gene Ontology: Mol. function=transferase activity; Cellular component= chloroplast; Biological process=biosynthetic process
  Homolog annotation: Hit_ID=Q69YA2; Match level="QueryCoverage=89%, HitCoverage=86%, E-value=0.0, Identity=89%"; Hit description =Putative 3-oxoacyl-[acyl-carrier-protein] synthase I, chloroplast
  Pfam annotation: Domain name=Ketoacyl-synt_C; Domain location=318 -432; Score=161.0; E_value=3.1e-45; Accession=PF02801.13; Description= Beta-ketoacyl synthase, C-terminal do
  Pfam annotation: Domain name=ketoacyl-synt; Domain location=47-310; Score=258.5; E_value=1.4e-74; Accession=PF00109.17; Description=Beta- ketoacyl synthase, N-terminal domain
  Pfam module annotation: Pfam domain module=Ketoacyl-synt_C::ketoacyl -synt; Domain location=318-432::47-310
  Subcellular localization annotation: CTP_CleavageSite=30; ConfidenceScore=5.52e-01
MQSLLVPTAASAPVAAPRARRNLPMRLSVRASATAAAAPRRETDPKKRVVITGMGLVSVFGNDVDAYYDRLLAGESGIGPIDRFDASKFPTRFAGQIRGFSSEGYIDGKNDRRLDDCLRYCIVSGKKALEAAGIAHGSKPMEKANDLYILDGSFICQRIDKTRAGVLVGTGMGGLTVFSDGVQNLIEKGYRKITPFFIPYAITNMGSALLGMDIGFMGPNYSISTACATSNYCFYAAANHIRRGEADIMIAGGTEAAIIPIGVGGFVACRALSQRNDDPKTASRPWDKDRDGFVMGEGAGVLVMESLEHAIKRDAPIIAEYLGGAVNCDAYHMTDPRSDGLGVSSCIKQSLEDAGVAPEEVNYINAHATSTLAGDLAEVNAIKQVFKDPSGIKINATKSMIGHCLGAAGGLEAIATVKAITTGWVHPSINQFNPEEAVEFDTVPNVKKQHEVNVGEVMSDLSRQRYK

SEQ ID NO: 77534 - protein, 105 aa, Zea mays
  Coding DNA Sequence Number=SeqID_34159
MTHACEYQTLFPRFGHCFQQLQTGHTTTRHSFSLARKLRLARAQPWPTFLAVAHKCHQLPANPARGNSDYCTPTTVLTTPSMIVCPCPDSASGEVFVSPEHGLIQ

SEQ ID NO: 77535 - protein, 209 aa, Zea mays
  Coding DNA Sequence Number=SeqID_34160
  Gene Ontology: Mol. function=2 iron, 2 sulfur cluster binding; Cellular component=mitochondrial matrix; Biological process=electron transport
  Homolog annotation: Hit_ID=Q7XIU2; Match level="QueryCoverage=100%, HitCoverage=100%, E-value=1e-70, Identity=67%"; Hit description =Putative ferredoxin
  Pfam annotation: Domain name=Fer2; Domain location=98-183; Score =71.6; E_value=2.6e-18; Accession=PF00111.18; Description=2Fe-2S iron- sulfur cluster binding domain
MFPRISRLGARLLRESRAETRAGWLSVSLSVGDRCYFYLAGNLLNSQRIFFQDHVNRHSIPVVTPAVLSMRNALLSTATSGDQDESSQAKDKISVTFVNKDGSEKTICVPVGMSMLEAAHENDIELEGACEGSLACSTCHVIVMDVKYYNKLEDPADEENDMLDLAFGLTETSRLGCQVIAKPELDGMRLALPVATRNFAVDGYVPKPH

SEQ ID NO: 77536 - protein, 85 aa, Zea mays
  Coding DNA Sequence Number=SeqID_34161
MGEEKKGCVVVTGGSSAIEMSSGRAAARASCSELAHREQMRLAGGRKLVGFSWELSAGLLLAVEQGRKGAVPGKGSMGKGAMGGS

SEQ ID NO: 77537 - protein, 61 aa, Zea mays
  Coding DNA Sequence Number=SeqID_34162
MALFSQSQLCLGAPDCPVVHRTVSGFWELRAQEGLGLVLLLPNGDNCINAWVILLVTNILG

SEQ ID NO: 77538 - protein, 186 aa, Zea mays
  Coding DNA Sequence Number=SeqID_34163
  Subcellular localization annotation: CTP_CleavageSite=95; ConfidenceScore=5.11e-01
MQLVDDLKNDGLIQWMFAKRVPPSKHYLSVKFKASPGLCMSGTIIRGTLKTPNSQLAQPQKTTNSASPDPRARTPPWPLPNDLRLARPRGSDSTSAMEDRLDLGFGGASTSPDLGRRPATSTGSAIITLPEPTRAAENKTGGHQQGLNRSDSCPSARLRCSSDGHDITPAGCQDLSGCHIGMYLGH

SEQ ID NO: 77539 - protein, 172 aa, Zea mays
  Coding DNA Sequence Number=SeqID_34164
MGEEEKGCAAVKGGSLAMEMWSGRAAARASCSELTRGEQMRLVGGRKPVGFPWEVSAGLLLAVEQGRKGVVPGKGSRGKGAMGGSWKNSRRHPWGELLLASKEQGRALLSRAKRSRGVGMDALRTHRKTEGRRGMSWISNPWGRWAQGGGVAARRRPEVEEGARAHGAAPPR

SEQ ID NO: 77540 - protein, 71 aa, Zea mays
  Coding DNA Sequence Number=SeqID_34165
MPRNMVNRLPSSCDLRRGLPFWLWWVQVRSLHDGSRGSLEDMVAGVTWSSILPPGWTVEWDPASAEEEHEE

SEQ ID NO: 77541 - protein, 96 aa, Zea mays
  Coding DNA Sequence Number=SeqID_34166
  Subcellular localization annotation: CTP_CleavageSite=56; ConfidenceScore=5.15e-01
MAGMAHRSYSGPPEVFSPPFSPLCPWIHGPFPAIEFAVAFSPSLPNSGDPRVTLARASLNSGDLTAAERSGSARSRLFPPGLVPSIRFRSHDSDHG

SEQ ID NO: 77542 - protein, 264 aa, Zea mays
  Coding DNA Sequence Number=SeqID_34167
  Homolog annotation: Hit_ID=Q2QLZ2; Match level="QueryCoverage=90%, HitCoverage=63%, E-value=2e-26, Identity=34%"; Hit description =Expressed protein
MARTSFLQKLEHRVEASAADLQHIESIALDTVSFEELLGHCGEALKVYARHADALQSHLASFGYEPPGNLTLSVPQPRPAAFVSFRWDETHNTPRSMWMWKMEMSGRLGTLEIDASACRVQCSGRMLHLQMPWIQLEALVLGNDALVRMPTESLKDLGFSDACLATLSSEGAHYGESPKKLYKNAESTDDGEKIMNEAEIMTPLNERNGQGNSFEGVIRASKEDYEQLPPYMKSLASWEVVAKLHIVLFVVAFLIISGPAVHDS

SEQ ID NO: 77543 - protein, 66 aa, Zea mays
  Coding DNA Sequence Number=SeqID_34168
MDVLMIRNHGEDQQGLGKGLGVEEEQQGRLQQEGDQVRLGCSSISGISLRGKVIRMSRVITNGAVV

SEQ ID NO: 77544 - protein, 128 aa, Zea mays
  Coding DNA Sequence Number=SeqID_34169
MDVDPAAEAEEHALEDYNEHLDEMALFVHNVDAAVNIDAVEPQPTPTMAGTVTGSSSPAATGSGSTVRDTRSRKRLPTSRVWSDFDEVTGVDDKGKKPVGGHCTARQRKRAGLARLLFVPDQDGPVPG

SEQ ID NO: 77545 - protein, 338 aa, Zea mays
  Coding DNA Sequence Number=SeqID_34170
  Homolog annotation: Hit_ID=A2YGC2; Match level="QueryCoverage=41%, HitCoverage=62%, E-value=4e-08, Identity=28%"; Hit description =Putative uncharacterized protein
MRLMVLVMTMVLMARLRHTARKSVIPFLPSRLAERPLRRPVAGQSGHLERLHHRLHEEQERRRQEQQGSSFSLQQEIESAPLAPPLGAPASRVAARGDPDDGGGDDSSSHDTDYSANQEPEGWVARPITRDAARGCHFHDALDTLLRRALNRRTWSIEYRCVVYQHSRGVYPDRWEATCLVRRPENSLQGAEVCSEHYSISERDSAEASMQDAARRALSHYCSVLGGVADGLNLKYYPHRPSGSTGGVIVSPVGEDNPRLSSTVNLAAVLNTELDHALDELSRARAEIALLRAERAERHHLDDGSPAPVGTQHPYRSPRRGHQSYGNPDCKTKINLEP

SEQ ID NO: 77546 - protein, 55 aa, Zea mays
  Coding DNA Sequence Number=SeqID_34171
MGRLEPRAEWESRLVGKVCNLCRVLETGCPYCTQCSGGDVGNMEDFEEFQDYDEF

SEQ ID NO: 77547 - protein, 75 aa, Zea mays
  Coding DNA Sequence Number=SeqID_34172
  Subcellular localization annotation: CTP_CleavageSite=47; ConfidenceScore=5.06e-01
MGGSEELAAAVAPSTTIIQGMSMTRRASLRHQEPGRNRIWFSVRFVRRVIGRPYSGNGTAVPPRLTGSRNLEESG

SEQ ID NO: 77548 - protein, 37 aa, Zea mays
  Coding DNA Sequence Number=SeqID_34173
MGGTKTGFSARVSRASLRENGEEGPDREAPRIPKCQN

SEQ ID NO: 77549 - protein, 111 aa, Zea mays
  Coding DNA Sequence Number=SeqID_34174
  Subcellular localization annotation: CTP_CleavageSite=42; ConfidenceScore=5.55e-01
MKGETLLEKGNSSGKTSGKSLTTRMFVPTNFPSTKNMAGLVEAVTVISTSNISPLELASSGCQWGQPDEWEVSVETPVECTELGVVLLLDELVYPRAACSEGEHCCYPAPR

SEQ ID NO: 77550 - protein, 179 aa, Zea mays
  Coding DNA Sequence Number=SeqID_34175
MVQLTPVSNCVGAGAILGEIKAWEGCSPRVRTLGRLENGGVRWSLGSTAVGLWLPKKRSGERGLGKPERGRENQRVPRVADGKAELTEATDGARARRRAQDGRQSTVGGGRPLWSRVQSEREGERVRLRAQVSGGRWASRAWGSKGVGRAEVAGDHTVVGVSTTGDHGREVGGELTGNF

SEQ ID NO: 77551 - protein, 104 aa, Zea mays
  Coding DNA Sequence Number=SeqID_34176
MDTITMLPVAPYFYKHQINTCLSYKRDNHRNKEGEARGFDELEMDAELACVTLGRRRGHAAGAHDGRPPTIAATAMGALHGRSELSDWAEGKSELGRAVRREEG

SEQ ID NO: 77552 - protein, 770 aa, Zea mays
  Coding DNA Sequence Number=SeqID_34177
  Gene Ontology: Mol. function=ubiquitin-protein ligase activity; Cellular component=ubiquitin ligase complex; Biological process =protein ubiquitination
  Homolog annotation: Hit_ID=Q2QU07; Match level="QueryCoverage=97%, HitCoverage=96%, E-value=0.0, Identity=77%"; Hit description =Armadillo/beta-catenin repeat family protein, putative, expressed
  Pfam annotation: Domain name=Arm; Domain location=134-174; Score =20.6; E_value=0.0057; Accession=PF00514.14; Description =Armadillobeta-catenin-like repeat
  Pfam annotation: Domain name=Arm; Domain location=176-216; Score=5.9; E_value=2; Accession=PF00514.14; Description=Armadillobeta-catenin -like repeat
  Pfam annotation: Domain name=Arm; Domain location=261-301; Score =16.1; E_value=0.099; Accession=PF00514.14; Description=Armadillobeta- catenin-like repeat
  Pfam annotation: Domain name=Arm; Domain location=302-341; Score=6.4; E_value=1.7; Accession=PF00514.14; Description=Armadillobeta-catenin -like repeat
  Pfam annotation: Domain name=Arm; Domain location=342-387; Score=3.8; E_value=3.6; Accession=PF00514.14; Description=Armadillobeta-catenin -like repeat
  Pfam annotation: Domain name=Arm; Domain location=441-482; Score=1.3; E_value=7.5; Accession=PF00514.14; Description=Armadillobeta-catenin -like repeat
  Pfam annotation: Domain name=Arm; Domain location=556-597; Score=3.8; E_value=3.6; Accession=PF00514.14; Description=Armadillobeta-catenin -like repeat
  Pfam annotation: Domain name=Arm; Domain location=639-679; Score =14.6; E_value=0.15; Accession=PF00514.14; Description=Armadillobeta -catenin-like repeat
  Pfam annotation: Domain name=Arm; Domain location=684-725; Score =14.7; E_value=0.15; Accession=PF00514.14; Description=Armadillobeta -catenin-like repeat
  Pfam annotation: Domain name=HEAT; Domain location=145-176; Score =5.0; E_value=4.9; Accession=PF02985.13; Description=HEAT repeat
  Pfam annotation: Domain name=HEAT; Domain location=267-303; Score =0.9; E_value=20; Accession=PF02985.13; Description=HEAT repeat
  Pfam annotation: Domain name=HEAT; Domain location=307-343; Score =1.6; E_value=15; Accession=PF02985.13; Description=HEAT repeat
  Pfam annotation: Domain name=HEAT; Domain location=453-484; Score =3.8; E_value=7.3; Accession=PF02985.13; Description=HEAT repeat
  Pfam annotation: Domain name=HEAT; Domain location=650-681; Score =11.1; E_value=0.59; Accession=PF02985.13; Description=HEAT repeat
  Pfam annotation: Domain name=HEAT; Domain location=695-727; Score =5.4; E_value=4.2; Accession=PF02985.13; Description=HEAT repeat
  Pfam annotation: Domain name=U-box; Domain location=23-102; Score =38.8; E_value=2e-08; Accession=PF04564.6; Description=U-box domain
  Pfam module annotation: Pfam domain module=Arm::Arm::Arm::Arm::Arm::Ar m::Arm::Arm::Arm::HEAT::HEAT::HEAT::HEAT::HEAT::HEAT::U-box; Domain location=134-174::176-216::261-301::302-341::342-387::441-482::556 -597::639-679::...
  Pfam module annotation: Domain location=684-725::145-176::267 -303::307-343::453-484::650-681::695-727::23-102
MADVQECHYDSTSQATDSLHVEPIYESFLCPLTKQVMRDPVSIDSGVTFERDAILKYFNECLSSRRRLVCPVTKMELSNTELNPSIALRNTIDEWMNRNEVAKLDVARKSLTSDSTESDMVQALQYVDEICQRSRSSRQVVRRDGLIIMIADLLKKSSTKVRQMALETLRSIAKDDNDNKVEIAAGDNIRTIVKFLNHGQTQEKERAVSLLFELSENKALSERIGSVSGAILILVGLSSSKVENSLIVDRAEKTLENLESCEKNVRQMAENGRLQPLLRLLLEGSPDIQLSMAAYLGELVLSNDVKVLVAQKAGSTLVNIMKKGNREAREAALKALNQISSYDASAKILIEAGILPPLITDLFTVGSNQLPMRLKEVSATILANVVASGARFESIPLDHNRQTLVSEDIVHNLLHLISNTGPAIECKLLQVLVGLTDSSTSVQNIVDAIKGSGAIVSLIQFVEAPQREVRMNSIKLLNNISPYMGQELADAFRGNFSQLRSLVKVIVDNNDGAFATIIPKVLRIRQGEIRGGRFVNPFLEGLVRIVSRITFVLDDDPDIIVVACDYNLTSLFTDLLQMNGLDIVQIVSANALEKLSQQSKHLTKILPAPSPGLCFSIFPCLSQKTVATGVCRVHCGICSARESFCLLEGKSVEKLVACLDNNNEKVVEAALSALSTLLEDGVDIDQGVMVLCDAEGINPILDVLCENRNEALRQRAVWAVERILRMDEIAYEISGNQNVGTALVEAFRHGDSIKTVLQLNRWQPETEYND

SEQ ID NO: 77553 - protein, 256 aa, Zea mays
  Coding DNA Sequence Number=SeqID_34178
  Gene Ontology: Mol. function=ubiquitin protein ligase binding; Cellular component=cullin-RING ubiquitin ligase complex; Biological process=ubiquitin-dependent protein catabolic process
  Homolog annotation: Hit_ID=A2Y0F4; Match level="QueryCoverage=29%, HitCoverage=11%, E-value=8e-27, Identity=77%"; Hit description =Putative uncharacterized protein
  Pfam annotation: Domain name=Cullin; Domain location=101-254; Score= -72.4; E_value=0.0011; Accession=PF00888.13; Description=Cullin family
MAASAFSFVGMDSILHPHDSLPRLLLKIIPATTPEENRRRNPQPSLTNDGWECWSSFSCLVGFPLLVILAVSVNEVEALYRLFKKIGSTFIGDGLINKIRLDEVAISHMDIVSPPVVVERSCLAPSPTRLPTSRLARRSAAPGEAAEIVTILHPARYGESHKALKCVDVFKEFYQTRTKHMKLTWMGTCNISVKFDAKPIELIVMTYQATLLLLFNGSDRLRYSEIATQLNLSDDVLMRRKKVLKMLTKTGGRSGA

SEQ ID NO: 77554 - protein, 254 aa, Zea mays
  Coding DNA Sequence Number=SeqID_34179
  Homolog annotation: Hit_ID=A2Z391; Match level="QueryCoverage=47%, HitCoverage=64%, E-value=8e-19, Identity=47%"; Hit description =Putative uncharacterized protein
  Subcellular localization annotation: CTP_CleavageSite=19; ConfidenceScore=5.13e-01
MDAFSSLLRSSPPRSSLSRCIAVDGARREQGLQRSGRRTRLGERGHRRDSGESAKTGRARRSRGEISGGGGRAEPWHAAALPLTPRVRLWLGTFNTADEAARALRGENTRTNFTDRTRHGGPAGAARATLSKNLQHVMAQAAATGRATACAGVGDQFALDAVFWHPVTTQQQVKHAVEPSFVVPRRTEAPPLSLVPAGGGEVWRVDDVDTADESLCAAEERSFKVSSSVIVPPSFSTSSSKWPIIASLTIKKLM

SEQ ID NO: 77555 - protein, 86 aa, Zea mays
  Coding DNA Sequence Number=SeqID_34180
  Homolog annotation: Hit_ID=Q7XBD4; Match level="QueryCoverage=98%, HitCoverage=7%, E-value=9e-09, Identity=43%"; Hit description =Cinful1 polyprotein
MAHEIIKKSEKDTHDAREATKAAEKAVELERRIAAELSPLPEPFVSLADPEAKESAEIISMAEAIMDEVVTQLLTEAADKVLKEEE

SEQ ID NO: 77556 - protein, 171 aa, Zea mays
  Coding DNA Sequence Number=SeqID_34181
  Gene Ontology: Mol. function=cysteine-type peptidase activity; Biological process=proteolysis
  Homolog annotation: Hit_ID=Q5NKP7; Match level="QueryCoverage=99%, HitCoverage=40%, E-value=6e-29, Identity=66%"; Hit description =Putative uncharacterized protein 9C20.3c
MQKGFSNILDMTVDALCSRSHHRWLMDKLDHKDMTIRPSPGKELKITKDTMHFILGVPNHGGGKPLGIDEAVAANHLHAAAAPQNKLGTPRIKYFDKNTIKALTKAEKRKTRHGVEPFDYCDVGKACLAIKDTLSKIVEKQYDLVDNFIELIDKVLCAESDNLENETDVPQ

SEQ ID NO: 77557 - protein, 355 aa, Zea mays
  Coding DNA Sequence Number=SeqID_34182
  Subcellular localization annotation: CTP_CleavageSite=28; ConfidenceScore=5.16e-01
MSSHSPLCIAPFHLPSPRMGSARVVFVLLSLEEHNFTEVGNPVASPRRWSPKTVTTSLMVGRSKPGCGLCPALSFKDLHHPCWGGGRAEPELYLPHGFVGHLLLQHSGEKALTSLAEGADFDNAGPIGRKRRQLQRARFAGSAGSGAASGATSHRWAECGYLPAVRAVVAPRAPGDYPRRRALLGRRSCSWAVLPLLRYDASTRRSVLARLGGPEWGSVGGQMAAVVGAEVVAAEEVLVADEIAATICAPGLRLFGFDSLSSPLEWGCGRGPYCSSVCPKVIATAIWPPEAEVVVAAAGVGGGEPPGILSSRRPSNVGGCSYLQGWNRSSVCNGTLSVGVCSLRLSGPEHLCIWA

SEQ ID NO: 77558 - protein, 197 aa, Zea mays
  Coding DNA Sequence Number=SeqID_34183
MQAACNCTKAAHLFNFDASSMEAQAHTSCNRRAGYYVRETALPLAPVPRLVDCGTGAATRGNPAHGPTVPTEHIDHGRHLWQAKRATLHLRHNDRVKKGTGKGDTPKGILLREGSGPRALLLIRGSKANPSEGFDSRLRALGLRAHYWSEVRRLAPRKGSTAASGHSGSAPTTGQRFEGWPSEGFDSRLMSLGLRAH

SEQ ID NO: 77559 - protein, 104 aa, Zea mays
  Coding DNA Sequence Number=SeqID_34184
MDEYIRADNDFRQRREKAVTPQVLLRVFTQGYTTSATLLVGAGLKAFIVTKLGNQDPKSHRRPPPPALVARIAPTTSDADPHTDVTAVTSPTSLTTPPELYCRR

SEQ ID NO: 77560 - protein, 58 aa, Zea mays
  Coding DNA Sequence Number=SeqID_34185
MQYNGSSSLISCEKQTIRIEFLILARLWCWIRGYLLSNSLLRHEDVFSVSEVGIYRMQ

SEQ ID NO: 77561 - protein, 300 aa, Zea mays
  Coding DNA Sequence Number=SeqID_34186
  Subcellular localization annotation: CTP_CleavageSite=68; ConfidenceScore=5.44e-01
MSSRSLMHRVSPPSKPPDGGYPPSSRLIVGGTQLRGSWYLSAIVRLQGFSSCSPAAPLHRRSPKMVTSSLMVGESEPGCGLCPSLSLKDFHHQGWGGDCSVPGFRTRVASEPLAAPASATAAGRGSSAGEIAKAGHGPTSNSTAFCPSLPHEFGRERGPPSSSTRPEVSAAAVRPPGAEVIVVAAAGAGDGAPFVGLLLLRRPSPLEWGCSCQRRGNQSSVCSGTSNANSPVDYLNHFTKHESPRVKVTSEHEQRRSWLENENLVGRSLAGLSVSGTDAGVDQPRPRVGLAPLGDGRPRP

SEQ ID NO: 77562 - protein, 195 aa, Zea mays
  Coding DNA Sequence Number=SeqID_34187
  Homolog annotation: Hit_ID=Q94D75; Match level="QueryCoverage=97%, HitCoverage=34%, E-value=4e-24, Identity=41%"; Hit description =Putative uncharacterized protein B1153F04.11
MAPRGGVVGSGAMLGLDMHLAQQRMHQAAAFQHQQDSHNGGFQLQQPSPVAVRQQQPPPSSFMPYSTNTSSSRVVVSAAAVGHDDEMVGNGGGGKGGVVVQQQQQQQLASAGCPWTRMKWTDAMVRLLIRVVYSVGDDGEGVATAGGAGGAAKAGPGHAAAAQQQKKGKWKSVSHAMMDKGFVVSPQQCEDNESS

SEQ ID NO: 77563 - protein, 108 aa, Zea mays
  Coding DNA Sequence Number=SeqID_34188
MDKSCTQLLSSDPMINLNTTLFFFLYSFPVCEESPQLGVSRPYNKDQSDNTRPTVEVLEPLAHRTLSGAHRTVRCPHQTVGLATRHARIAQPTVGTVDRWLTGQSGEL

SEQ ID NO: 77564 - protein, 92 aa, Zea mays
  Coding DNA Sequence Number=SeqID_34189
MKHKTAALKLTQRFLSKDLKWERQEIGVRDQLNCPSGLVQPVLTREFRRENPSSTARRQVQLLKKLNSAEVKFSWKAQLQLKKFSCFSARTL

SEQ ID NO: 77565 - protein, 135 aa, Zea mays
  Coding DNA Sequence Number=SeqID_34190
MYTSTTRRHKAGATALREAVGAGGDTRGGDRRRRRNLGTTTVIEEPVGVMGDSAIIHRTVQCTPDSVRCAKGGRPQELASFGKRQRKSESPMLAHRTANSTCPVCIGHPGGPTSQKLQRSESNGSDDVARGTGLS

SEQ ID NO: 77566 - protein, 203 aa, Zea mays
  Coding DNA Sequence Number=SeqID_34191
  Gene Ontology: Mol. function=DNA binding; Biological process =regulation of transcription
  Homolog annotation: Hit_ID=Q94D75; Match level="QueryCoverage=66%, HitCoverage=25%, E-value=1e-37, Identity=62%"; Hit description =Putative uncharacterized protein B1153F04.11
MSDNGDEDEDEEEEDGPVYRSRRPRSRQHSGGRGKRGRGMDGAASEDLEDEADGGGGRRSRTAAAPDPSAILRQLKSELAAATAAAMDPQQARSWVRRRAVEVEEQQIVLESHAYYLERQRLKWERFRASKERDMERSRLQNDRLRIESRRLLLMLRHKDVDLDMAEANSSSVDHHTGASPLAAHQQQPIGSSPSPSTAGHPN

SEQ ID NO: 77567 - protein, 64 aa, Zea mays
  Coding DNA Sequence Number=SeqID_34192
MADRGAELHRARDFVARAELGGRQQENRRIPTTVLEEASATWDPHTHMSITGRLKLGLGVDGYY

SEQ ID NO: 77568 - protein, 134 aa, Zea mays
  Coding DNA Sequence Number=SeqID_34193
MDPPRVLLRGVALLLLLCPTPMFSSARAPHLTCHGAWRSPSPHPQPPKLVRVPAETTVGVTGIPHRRSARVADPPRTVDELATPSIAGENLLSVFAITSSRFSTGQLWVWGVRASDCVSAGDAPPCFFAAPSLW

SEQ ID NO: 77569 - protein, 132 aa, Zea mays
  Coding DNA Sequence Number=SeqID_34194
MRRWSKKGGHDLVLYTRRVRPGADRGAELHRARDFVARAELGGRQQENRRIPATVLEEASATWDPHKGPNNFERHYKSYPLNRNLALEICYKKGYKGIDIYADVIVDIDPQPITLNQRSKSDKYHKNKHPSI

SEQ ID NO: 77570 - protein, 337 aa, Zea mays
  Coding DNA Sequence Number=SeqID_34195
  Gene Ontology: Cellular component=cellulose and pectin-containing cell wall
  Homolog annotation: Hit_ID=Q153F8; Match level="QueryCoverage=83%, HitCoverage=83%, E-value=5e-80, Identity=49%"; Hit description =Pectin acetylesterase
  Pfam annotation: Domain name=PAE; Domain location=41-323; Score =295.4; E_value=1.1e-85; Accession=PF03283.4; Description =Pectinacetylesterase
MADRPSLPALIIAIAVLAGSYCRVASSASPAVEDELRGGGGAGGPTTMRRRAASVMVPITILKSAVSDGADFYNWNRVKVRYCDGGSFAGEAFDKVHAHMYPECILQVCRHFYFAVFDTGIYFRGQRIWNAVIRHLLSIGMANADQVLLAGCSSGGLAVILHCDQLRAFFPSGSTVVKCISDGGLYLDACVPCFFPQNIIDGVKTPLFLLNAAYDFIQIVLSLAPDRADPSGAWRACKSNRTACSASQMSFLQDFRDQMVASVKGFSGSRSNGVFLSSCFAHCQSEQLGTWNTKPGGSPTIQNKGISKSVGDWYFDRAEVKAVDCRYPCDNTCHHII

SEQ ID NO: 77571 - protein, 91 aa, Zea mays
  Coding DNA Sequence Number=SeqID_34196
MEMISGYKYTFDLKEVPQATTRIGPMWVLRVRVHENERTIHHEPWQGSPENLTEGALYGIVEDLCTFIIERDHSRRREISRCFRNISFARV

SEQ ID NO: 77572 - protein, 722 aa, Zea mays
  Coding DNA Sequence Number=SeqID_34197
  Gene Ontology: Mol. function=helicase activity; Cellular component =chromatin; Biological process=viral genome replication
  Homolog annotation: Hit_ID=Q2R0Z1; Match level="QueryCoverage=100%, HitCoverage=33%, E-value=0.0, Identity=52%"; Hit description=AT hook motif-containing protein, putative
  Pfam annotation: Domain name=DUF889; Domain location=380-636; Score =364.7; E_value=1.6e-106; Accession=PF05970.5; Description=Eukaryotic protein of unknown function (DUF889)
MLTEWFACNSSNSNARDLTYCEFPSKWRWDEKTRSWRPRLARESKIGRLYYVHPSAGERYYLRMLLLTVKGACSYESLRTFNNTVYPSFKEACQARGLLGDDNEWLQAFEEAATWATAPQLRQLFATMLLYCQISNEHSFFEKIWKLMADDIGYNIQRALSCPKFQMTDNELRDELLERLTILFNKSGGNIHEFNLPQKVHGTQQQEFNRLIEEETSYDRENLHNESQSLFSQLNADQLSAFNTIVECVLSGRPGLYFVSGYGGTEKTFLWNAIVLYLRSQGKIVLTVASSGVASLLLPAGRTAHSRFKIPCDLDSNSTCNIKKGTMLADLIKRTSLVIWDEAFMAHRMTFEALDRSFRDILSSESSNSENMPFGGKVIVLGGDARQILPVIEGGTRSQVVGAAITNSYLWHSITVLYLTQNMRLSSTALSIDAKKEVESFSKWILAIGEGKVPAKARENETEKCWIKLPPEILLMPIKDNLSCIVQTAYPNIETMYNNVEYLKERAILAPTNEVVDVVNNYMVSTLPGDTKEYLSCDSIAKGPNMHASYDMLYPIEFLNSINGNNFPSHSLILKKGTPIMLLRNINQSQGLCNGTRLIITTLGDLVIEAEIMTGKHKGNNVVIHRISLTLKNPRNVFVLERRQYPIKVCYAMTINKSQGHSLSEVVVYLKNPVFTHGQLYVAFSRVTSKKGLKVLIEDEDGNPSDETKNIVYNEIFSRFIQ

SEQ ID NO: 77573 - protein, 63 aa, Zea mays
  Coding DNA Sequence Number=SeqID_34198
MGIGFVYGKQPKRKPRDLIRAAAEWRQVLHVKRTPPWYRIRTGVQCYDRLNLVKKKTSSSSPL

SEQ ID NO: 77574 - protein, 190 aa, Zea mays
  Coding DNA Sequence Number=SeqID_34199
MTLEPTPMDKNYKAGLIGVVTPRYMATHECCQNSVDDLDGGIPQDEAPSVGIRIVDMRWGDSIYGVVGASQGDVEVSIGATSKPRSPTQCSTQVKVLGLDAAGGKLLSVPMLRMDLRASGWHRNSLAPTPETSSGSGTHCCRLADSRAHRPIGDWPYGDTAGVISGWRTARLARGRGRGHGEMVWTPTLK

SEQ ID NO: 77575 - protein, 80 aa, Zea mays
  Coding DNA Sequence Number=SeqID_34200
MSPAWTSKQHRGYPGVFSQPIIFLHHMYNFVGPFWQGRMWYKKRMEEGGWAEEPSVQWCAFPNAADIAFISRNGNSTLQT

SEQ ID NO: 77576 - protein, 100 aa, Zea mays
  Coding DNA Sequence Number=SeqID_34201
MAVQLTPALPRRHGEARFFTDFRARHGCPSARAQATADPPGRAESDGREPAENILNLRASVPRPGCVCGSPHLLAGYRVRVGAPTSVHATWKTSQNQERI

SEQ ID NO: 77577 - protein, 65 aa, Zea mays
  Coding DNA Sequence Number=SeqID_34202
MAGNAQRLFGVGGIESVAARDGNGYPKLETRWVFTALGFWIMISLIITILIDYEKNKYIGDETRG

SEQ ID NO: 77578 - protein, 263 aa, Zea mays
  Coding DNA Sequence Number=SeqID_34203
  Subcellular localization annotation: CTP_CleavageSite=60; ConfidenceScore=5.86e-01
MSSSSLKRRVFPSSKPPDGGLATPHHRRSPKMVTSSSTVGKTGQAAASTPPSASRIFVIQAKMEDEASRGAASTTKSRLFDYLNRFTKHELPRVKVTSEPTPKSVSRGLGSGWRPWKPVDRGPRGNRLSRLLGPDSRRSPWTAAPPEAGSGFAEDVVDAEGATAPFGVKTRACRIRSSCSVCFLRPPRPEEHALAALAKLRLFSSCSEHLDSVGNRDVCVSESCFSRKGRVRYPYPRGVGIPRLGRPCRLRVFSPVHEALSPT

SEQ ID NO: 77579 - protein, 241 aa, Zea mays
  Coding DNA Sequence Number=SeqID_34204
  Gene Ontology: Mol. function=protein binding
  Homolog annotation: Hit_ID=A2WXK8; Match level="QueryCoverage=65%, HitCoverage=57%, E-value=4e-48, Identity=62%"; Hit description =Putative uncharacterized protein
  Pfam annotation: Domain name=DUF506; Domain location=15-189; Score =116.4; E_value=8.8e-32; Accession=PF04720.3; Description=Protein of unknown function (DUF506)
MDYERPPPAIAMHHQNPYHVLEVEIEVHERAMKHLREIGEERRTRSLLKRRLMMRLRKDGYDASLCRSSWVATAEHPGGDYEYIDVVVAGEHGGGAASSSSTSSSSSRIVVDIDFSSQFQLARPAPWYAQLWARLPPVFVGPRARLRKAVSLLCEAAQRSLRESGLHVPPWRRSGYMQAKWLPGGTSEVVAAAAQRSVAIARGAGGGTRRPGAGAGAGGLSMALLSSSGAEANGCQGQAGS

SEQ ID NO: 77580 - protein, 498 aa, Zea mays
  Coding DNA Sequence Number=SeqID_34205
MPFHGGRVVRSPAFALNLQNRDPTAFVREAEDAAVRLVGRYVPRTEGQRSWYIRGSNDRLNRVFELNQLPYDGYPGQDDVDRRGKKPAVETGDDPAPAAAPSSKKRKLGTAMGGLGVSDGFARELMRTCAAPGERMSSPELRESLARMLRVTGGCWPRNVPIPRAAGEDFFTSRMVREWRVFPYGRNIAAVVSAVMDKDRQGAAQKRQAAVRLVEARPKRQRGAAKAVAPGGGRPPLAANGVEEVAKAARALPLSGKRVADFATDISVEDYIGGSGEGQLAMVLPAAATTTVAAVPKAKGEALSAGGEVTALAVVMDEAGATSRRLKEVTEALSQVADFASRTASGALTAVVAAEVERLRTQRADAVREKSAADSKCRKLADKVATLEGEKAALRRQLAGERRETNEALAKAQAAQTEANLARAEGNLARERAEQLQERLTALESRVERAEAASRVEAERTRQLLVDTYRGLGAGTGDFEVPDREPGLRCLEWVQEEL

SEQ ID NO: 77581 - protein, 281 aa, Zea mays
  Coding DNA Sequence Number=SeqID_34206
MNALSREGCRHFEVFDQVEEDFKQDIFKVEDPVVKESAGAIFDRLWGPHGREVVRERAETARAQAARGERVDDFGALNSMLSDPEPTPAEAVPGFALELTLETGGDASGAPASAAAGEGLPPEVAEGAPDASAAAAPSAEDPAAVAAEITAEATAEPTAEAPATSGPSQVQDFGPAHTTATTKFLAASTAEDGNECGGSASEFFDCADSGSSVEWTEESSEEDLDYFAALDVAAAEASSHVTDAGDVPGEGELRSLFAGEELRIMLFNYREMGIIPKVEPM

SEQ ID NO: 77582 - protein, 444 aa, Zea mays
  Coding DNA Sequence Number=SeqID_34207
  Gene Ontology: Mol. function=helicase activity; Biological process =RNA-dependent DNA replication
  Homolog annotation: Hit_ID=Q5NA16; Match level="QueryCoverage=80%, HitCoverage=77%, E-value=4e-41, Identity=28%"; Hit description =Helicase-like protein
MGASGSNGNAYIVNLYYRCISQYTFWMTAMVVKTLTELSLQDKDVTVQVEVNRRWEFRGIGDDGPVLHVDMILTDATGNAIYAELPAKLLEQKGSLLQSNKVYYIRRFRVANAKSQYKVIDAPLMIYFTVYSIIEVCRDPPSTFPLYVYNLIPYEAIDANGPKSKDFHVSEINPIQLSGKSSIYRNVFIKNLSNDIIKVTLWGNQALKFSYEAIYDQKIQHAVVVLFVGCLPKEYKGSVYLSGGAACHWYFNPSINEAQPYYQRIHNENVTIKLPPLTNEQAAFVNPPETQHKDLKELLESEPLTLPEEGFKCTVTITRLLDDHPWWYKACNTCPNKPSMRSSVSSCPTCGSTDAILRKRTPNQVSHSFTWKRPILAINQIEHSNASVNSNKTSIENKTDNFTLYGIVQPIYIQFSRGSIVHGNKMMGLVFLILVTKRTNFCLT

SEQ ID NO: 77583 - protein, 62 aa, Zea mays
  Coding DNA Sequence Number=SeqID_34208
MQLIRAIGFQAKTIDVVGHKGGEAVVWCGKPRAMDLSRAHDGAGGGARSGEAGEVVKVKDRG

SEQ ID NO: 77584 - protein, 150 aa, Zea mays
  Coding DNA Sequence Number=SeqID_34209
  Gene Ontology: Mol. function=threonine endopeptidase activity; Cellular component=proteasome core complex; Biological process =ubiquitin-dependent protein catabolic process
  Homolog annotation: Hit_ID=A2YXU2; Match level="QueryCoverage=36%, HitCoverage=22%, E-value=3e-18, Identity=85%"; Hit description =Proteasome subunit alpha type-7-A
MFLRTFGGRRPPTPALYQTDPSGTISAWKANATGRNSNSMREFLEKNYKDLRQETIKLAIHALLEFIGHVSTCFRYAYPWWKEKVIDSDLKRKDGLCPLTPKETALVLGALDIDRENSLTYDEDKGAWFLEKELTVNVYARNRLKVHQYP

SEQ ID NO: 77585 - protein, 133 aa, Zea mays
  Coding DNA Sequence Number=SeqID_34210
MKIVSPCDLTPFSLFQSILPKINIVSPSCAICNMMYDAYAMQNDVMMLCYVDDICSERYTHIPTQYFCISADSSLPFGVEHIGSLLAVGLVAAVVEVEVVARKLEVDLPKQQKLQGGYLRILGCKAHGTKQYA

SEQ ID NO: 77586 - protein, 270 aa, Zea mays
  Coding DNA Sequence Number=SeqID_34211
MNALSREGCRHFEVFDQADEDFERDIYKVEDPVVKESAGAIYDRMWGPHGVRVVRERAETARAQTARGERVDDFGALNSALPDPEPTSAEAVSGVALEPTPETAEDAPDAPASAAAGEDLLPKVAEGAPDAPAAATPSAEDPAAVAAETTAEATAEAPATSGPSQVQDFGPAHATATTKFLAASTVEGGNECGGSASEFFDFADSRSSVEWTEESSEEDLDYFAALDVAAAEASPHAADAQDVPGPSTGCRRRRAVAKRRVSGEEGARLR

SEQ ID NO: 77587 - protein, 42 aa, Zea mays
  Coding DNA Sequence Number=SeqID_34212
MQESLAGPPSQQNPPEGLPTLTTPLLPLPLSGLWFARIKTED

SEQ ID NO: 77588 - protein, 101 aa, Zea mays
  Coding DNA Sequence Number=SeqID_34213
MARDGSNIRKDAPLLEESLSVVSLSESLKDRADVGLLIEDLLTGHMPHHGLKNPGGELTYARVKCYICRVIGDHQLGINRFRSPLLLGHEDLVTALHVAFQ

SEQ ID NO: 77589 - protein, 41 aa, Zea mays
  Coding DNA Sequence Number=SeqID_34214
MATEGSDLVSAAREHQSLRESTGIGSPEFVLVLFVIVDLGQ

SEQ ID NO: 77590 - protein, 225 aa, Zea mays
  Coding DNA Sequence Number=SeqID_34215
MTSFAMPKPKRTKVVTHRQKSYFLERAAILPTLGVSKTEAIEAAEDTFSASKPKLQSSPMVQGLSRIASTSVATPKKGRRMANVLDVVLTPSKMATPAPTRISKDKARELEKAKDVSTAPDCAKAGPSKSRPIEQPKGYPSFLAARSRGDGHDYIGEGYEWKPFPIKATVTVHQRDVVLPRLAVMITRTTVRGGADIDGNSGKEFPVLQGLIQTAMLWRYFPWAW

SEQ ID NO: 77591 - protein, 118 aa, Zea mays
  Coding DNA Sequence Number=SeqID_34216
MVAASLEKLHCGEAGSGDKEKEVAGRDDAEVMSPQLSDEPLREKAQRIQVMLTGGMSERLPDRGKKLLTTLDAIHREQDRRQARGDGARAPLGSLTSGNWNAVIVQYSDGLGNEACER

SEQ ID NO: 77592 - protein, 103 aa, Zea mays
  Coding DNA Sequence Number=SeqID_34217
MSTSWRLIPGTRQAGQSREPTPRCIDGSVTLARSRVYTGRQHGRADTTRRVRVCQGHELEGRCSLERNLAERRTTTDKAKLDDEVEQGMASASARWGLPKTRK

SEQ ID NO: 77593 - protein, 191 aa, Zea mays
  Coding DNA Sequence Number=SeqID_34218
MARTKTTQRKATGPHCVPRHQLAPRHEGSSSGRNDPIGDLEARVERLMSELRHGSRERARDSRRIAELSAEVNRLQQEIVEQDTVIDWAVNSRAFAWDSEANVLARVAELSASLENLQAYCNTLHEEVHMLYDRLHPSVPPEVAAIGAGPSGATNGGPDGELDLFGAPPSMNLADERSPEAVSGAAKDEDN

SEQ ID NO: 77594 - protein, 87 aa, Zea mays
  Coding DNA Sequence Number=SeqID_34219
MGITKELFGCGTLPMVGSLMIERALKLRQELSCASLFPSPNHKQVPGFYKITPEFLINSGRGPKNMENHPGKQFYHNGGMGRPWLTN

SEQ ID NO: 77595 - protein, 41 aa, Zea mays
  Coding DNA Sequence Number=SeqID_34220
DDEDDGYDYAYSNGCPRCNYCSGEDEVVEEDFQEFQEYDEF

SEQ ID NO: 77596 - protein, 52 aa, Zea mays
  Coding DNA Sequence Number=SeqID_34221
MHQINVVANFHILPVWEVPQSKINAEWLERDMVSTGVAKVAVHHKRFLEPPV

SEQ ID NO: 77597 - protein, 724 aa, Zea mays
  Coding DNA Sequence Number=SeqID_34222
MPSSSSSADATPPAAASSEETLSNVMVEELRAGDSVEFGVSRMTSARIEDMQRLGYFGGGVARAPGTEEVPEPEGELVVFEAFFVAGLLLPAHRVFELNQLPYDSYPGQDEADRRGKKPAVETGGDPALVTAASSKKRKLGTAMGRLGVSDSFARELMRTCAAPGERMSSPELRESSARMLRVTGGCWPKDIPIPCAAEEDCFTSRMVHRWRVFPYGRNIGHVVWAMMDKDRQGAARKRQATVRVHEARPKKQRGTAKAEASGGGKPPLPAKVGASAPGKAPEVTVGAGGPKLTKVAPSVSGVAEAAKAARTLPPPGKRVADFGTEINVEDYLGGSDEGPLALVVPGAAIATAAPAPKAGGETLGAGGEVSALALVRDEAGVATRRLKGATEALSRATEALSQVADFTSRTVSGALTAALSAEVERLRTQHADAVREKSASDSKCRKLAEKVAALEKEKADLRRQLAGERREANEAIAKEQAAQAEARLARAEGNIAKELAGELQRRLTALESRAEGAEAAMRAEAERTRTQLMTAYRELGVRTGDFEVPEREAGLRCLEWVQEELQELPTVLAGLMSFTSLVTCEAAMNALSREGCRHFEALDQADEDFGRDIFEVEDPVAERGERVDDFGALNSALPDPETTPAEAATGVAPGPTPETAEDAPGTPASAAAGEDLPPKVAEGAPDAPAAAVPSAEDPAEVGAEAAAEALAEAPAAAGPSQVA

SEQ ID NO: 77598 - protein, 67 aa, Zea mays
  Coding DNA Sequence Number=SeqID_34223
MTNQIIIGRADEASSHEYAPQNLIAHTPVQVYLCGRRFKRPALPLSVCSQKVEREWAKCNASERLFV

SEQ ID NO: 77599 - protein, 63 aa, Zea mays
  Coding DNA Sequence Number=SeqID_34224
  Subcellular localization annotation: CTP_CleavageSite=49; ConfidenceScore=5.24e-01
MSRHAATRCVPSQASPVQLHNQQQASPPLQHRSATGYKCGHCTTAVGVSGALYAKAVLFRMIG

SEQ ID NO: 77600 - protein, 86 aa, Zea mays
  Coding DNA Sequence Number=SeqID_34225
MAKRPKVVRVDKERSLHSKSRTPPSKRKGVDAPDSKGEKPLKVDKKDIGSTSASSLGATQMLEGDTHNSLMVEPQNYPVLWMAGFD

SEQ ID NO: 77601 - protein, 85 aa, Zea mays
  Coding DNA Sequence Number=SeqID_34226
MAELKANEEENTPKENASGAEDNAKEDDNDLRSTNPSYIDFGKSTIKPTNLVVMPLCNMALSSASHAAHVGFNIVVEHIDTRDLV

SEQ ID NO: 77602 - protein, 70 aa, Zea mays
  Coding DNA Sequence Number=SeqID_34227
MPITQYEKERALKVIRNNKMLISLGIAGLTSLTRSGQTDAMTNKWIRGKSMGMQLEGISQGLNTDSTGHR

SEQ ID NO: 77603 - protein, 178 aa, Zea mays
  Coding DNA Sequence Number=SeqID_34228
MEKEKGKGNRVGRARDSFSPGGGPAHAPPLATLLAPPRAPARPPVAPCAASCVPLPGPPAAPPARPRRGPAAPQPRRGPCMAPARPCLAPRRRPMLGPGAASRSHPRAPPLGPGCGPLPGGAHAAPGAAPRSRPRAPPLGPGGGPLPGGAHPAPARLRGPSAARMALGAASRTPGTRT

SEQ ID NO: 77604 - protein, 238 aa, Zea mays
  Coding DNA Sequence Number=SeqID_34229
  Gene Ontology: Mol. function=glycerophosphodiester phosphodiesterase activity; Biological process=glycerol metabolic process
  Homolog annotation: Hit_ID=A7Q7U8; Match level="QueryCoverage=77%, HitCoverage=65%, E-value=2e-40, Identity=40%"; Hit description =Chromosome chr18 scaffold_61, whole genome shotgun sequence
MNPEFIAKALNYHFCGSPESFMIVPFFDLIFSSQVASVSVQHLFCKIGVFALDVIIFHIHGDAAFARWPFDSRSTARWIRILKIKALRTRFQLSKRVQNEEVPMAEEALAMISQSFRQVVLDVKVGPPSFEKGLAEDILSLVGYVVMVDKFTNRRTELVRIEGAKVAGIYHPLIHEKVMKVMRRHDRRVFAWTVDDSSSMKKMLYEHVDAIVTSNPSLLQQLMQETRAECMEDGFALP

SEQ ID NO: 77605 - protein, 103 aa, Zea mays
  Coding DNA Sequence Number=SeqID_34230
MTIKTIKAPTNKVHGKLESEMKYHVENRAKLFINNIHQTIGSRFGELLPGQITDWSTQFWLISPLKDAKILRSNFMIYLLSYEDNSCRYAILCKHTIETYRYH

SEQ ID NO: 77606 - protein, 198 aa, Zea mays
  Coding DNA Sequence Number=SeqID_34231
  Gene Ontology: Mol. function=lipoic acid binding; Cellular component =glycine cleavage complex; Biological process=glycine catabolic process
  Homolog annotation: Hit_ID=O82179; Match level="QueryCoverage=49%, HitCoverage=62%, E-value=8e-38, Identity=78%"; Hit description =Glycine decarboxylase complex H-protein
  Pfam annotation: Domain name=GCV_H; Domain location=54-149; Score =128.5; E_value=1.9e-35; Accession=PF01597.10; Description=Glycine cleavage H-protein
MAPRPRPPGSMRVFIACCPKPCHHTPCQPRAPRTTNPPHTPVVLGWDLMVPACQDHSSDAVYVELPEVGVSVSQGKNFGAVESVKATSDINLPVSGEVVEVNGKLSEEPGLVNASPYEKGWIIKVKLSDSGELSSLMDGDKYSKFCKEEDAGIPHLKWFGVEGQYNVMVIDLLGPSLKDLFNYCSRKFSLKTVLMLAD

SEQ ID NO: 77607 - protein, 87 aa, Zea mays
  Coding DNA Sequence Number=SeqID_34232
MAPSSVVVPRTHRELSALANDHEVPLFTMDSVVQPCDILAPGMGCPGPRLNRINSVIIPTRCIFFFGSLSRKNLQVKRAWLGAIWDG

SEQ ID NO: 77608 - protein, 677 aa, Zea mays
  Coding DNA Sequence Number=SeqID_34233
  Homolog annotation: Hit_ID=Q53WK8; Match level="QueryCoverage=86%, HitCoverage=90%, E-value=6e-44, Identity=35%"; Hit description =Putative uncharacterized protein OSJNBa0052K01.14
  Pfam annotation: Domain name=DUF295; Domain location=582-626; Score =27.2; E_value=6.2e-05; Accession=PF03478.9; Description=Protein of unknown function (DUF295)
  Pfam annotation: Domain name=F-box; Domain location=263-311; Score =7.8; E_value=3.3; Accession=PF00646.24; Description=F-box domain
  Pfam annotation: Domain name=F-box; Domain location=55-103; Score =9.4; E_value=2.2; Accession=PF00646.24; Description=F-box domain
  Pfam module annotation: Pfam domain module=DUF295::F-box::F-box; Domain location=582-626::263-311::55-103
MAPPWALWRHHARGVRGESCALVLCGSSIRRWVVHPGAFFLHHPPNAFFLHHPTSMADELHDNLMDLILVRVPCKVDRASISLVCRAWRDTVARLGGQAPPPLPWLLLPSRFRNDPTFRAACVLSGCSVHPQHNLLTTIPPGARFVGSYDGAWNFLYFGETRRHRLFNARTRQVRKLPLGVHSAKNQDLGTGIGSLPSVMALALSKEARFAECHTKHSAKYLTWGPLWRILCRVLSGRHSAKHPGAFFVHHPPNAFFLHHRTSMAHELHDNLMDLILVRVPCKVDRASISLVCRAWRDKVARLGGQAPPPLPWLLLPSRFRNDPTFRAACVLSGCSVHPQHNLLTTMPPGARFVGSYDGAWNFLYFGETRRHRLFNARTRQVRKLPLGIYVNRDGHQTICIMVILAATLSSSPDDSMCVGAAIIARDQGPHEVLQPYNRWIALWRMGWEMAVELDMVDMGMYLAEDVVYHCRARAFYFLLIHGVSYEILVCTPNASPEYPRKLHISFETHHFLPLALEERISPLHSVIARYLVVSRGELLMVVRIKAVADQQTCEFKVFRAKRRPQMPDYHHYPVAQYPWEWIDLDTLDGRILFVGYGCSRSYQADAYPGFKPGIYFLDDGMFYEVPYFGGANTRPYPCTDNGMWSEGRIQRFIFIGYRVVLDFDLFEIVLIDITIF

SEQ ID NO: 77609 - protein, 37 aa, Zea mays
  Coding DNA Sequence Number=SeqID_34234
HYGTGGYEIDGFGYDYGAGEDEVVEGDFQEFQDYDEF

SEQ ID NO: 77610 - protein, 204 aa, Zea mays
  Coding DNA Sequence Number=SeqID_34235
  Homolog annotation: Hit_ID=A2WKS4; Match level="QueryCoverage=50%, HitCoverage=8%, E-value=5e-08, Identity=38%"; Hit description =Putative uncharacterized protein
  Pfam annotation: Domain name=LRR_1; Domain location=102-124; Score =1.1; E_value=1.9e+02; Accession=PF00560.24; Description=Leucine Rich Repeat
  Pfam annotation: Domain name=LRR_1; Domain location=126-148; Score =14.8; E_value=0.32; Accession=PF00560.24; Description=Leucine Rich Repeat
  Pfam annotation: Domain name=LRR_1; Domain location=150-172; Score =8.3; E_value=9; Accession=PF00560.24; Description=Leucine Rich Repeat
  Pfam annotation: Domain name=LRR_1; Domain location=175-197; Score =1.6; E_value=1.5e+02; Accession=PF00560.24; Description=Leucine Rich Repeat
  Pfam module annotation: Pfam domain module=LRR_1::LRR_1::LRR_1::LRR _1; Domain location=102-124::126-148::150-172::175-197
  Subcellular localization annotation: CTP_CleavageSite=88; ConfidenceScore=5.37e-01
MQAIACQFFPSQVAGVAISGSSWIRNHMGCCFHSHSNFVLAFTAFYLMAQVSSPASSASHCLRLPRFVSGSRHRWKACGGVAEPALLRAHRRAVSAFGNLTFLQMLNLSYDWFRGEVPATIGCLAHLQVLDLSYNAFSGTLSSNLSSCVSLLVLSLNSNHIHGRIPVELGNRLSNLRGLLVANNILAVAILGSLDNLCSSSTLI

SEQ ID NO: 77611 - protein, 530 aa, Zea mays
  Coding DNA Sequence Number=SeqID_34236
  Gene Ontology: Mol. function=aspartic-type endopeptidase activity; Biological process=DNA integration
  Homolog annotation: Hit_ID=O24438; Match level="QueryCoverage=11%, HitCoverage=4%, E-value=6e-09, Identity=60%"; Hit description =Retrofit
MECSKQPTISRSSTEAEYKAVANATAEIIWIQSVLGELGIPQSRARARISAFNRLGSPSRNLAPVRCNKMFSAGGFSRRSLTLSLLATFIAVEFVDVPNFKIQILTGLGLATFNGVPFGAGGLLGRWARLPFAVTSIRHVDPEPFLPSSFSASVVLHREVMAREYLVDHRRLAVRDIQRSHLEPVVPEDGQQLPLALFGLGQPLPAAGWDLNFPPEDNVQVQPADNIQGDWDQWIVNDPPAQQPQQDLQPDEQQVSNQHLGLSSDSSSGPILGVPVQNGQILEGQDVVGPVLHFNAPDLPALGDVPMNGLQEVDGPPNQGDLHVPGDILIPDAQPEEQINNGPNNVANYFAPAGNPDFSVQVPKKWSPFFLSNLLHEDSFSWSKSFWSLDIPSALLDPESEIHSFAIPKKCPDGKFLESVLSEESTGKVSDPTYSVSSPSKPTIVESDLRRSKRLREARAGFRQGSCQKKNCLMCQHKFEGPPSLSARVIRNLGGKFCDLSEVDLSDKALKKKKNPTGYVGPNKPGQKRQ

SEQ ID NO: 77612 - protein, 123 aa, Zea mays
  Coding DNA Sequence Number=SeqID_34237
MANRRWKLEVEPLSTVVDWSRAADVGRAAWACDEPVECGRAQAGGEEVARSWIRVGRTSRRVLAVRLLSSSPRVPMTSHRAQPPPGSSIRQDRASSTAMDCWGVTAAKLCRRGLRGEGFGGGA

SEQ ID NO: 77613 - protein, 57 aa, Zea mays
  Coding DNA Sequence Number=SeqID_34238
MERRAPCTVEERCAAVVDLQCRRLLSRHKNAEAEPLPSCFTRERREVNYNYKDSGSH

SEQ ID NO: 77614 - protein, 37 aa, Zea mays
  Coding DNA Sequence Number=SeqID_34239
MESGCHGRRGAANQGERVSHPDFGAPRPGHEHNHQGL

SEQ ID NO: 77615 - protein, 135 aa, Zea mays
  Coding DNA Sequence Number=SeqID_34240
MVGGSSGAGRRFLPLLLSLSTRRRLTSSMAAQELAAGFYGLEASPGRCQESDRSGLLRIWRRSQNRPRSQQPSSVARVRCGSDVEKKTLECEPQMSALPSGPRPTATQNASRSEDRLAKRARATVGDQLRRRAAE

SEQ ID NO: 77616 - protein, 662 aa, Zea mays
  Coding DNA Sequence Number=SeqID_34241
  Gene Ontology: Mol. function=metal ion binding
  Homolog annotation: Hit_ID=Q53KE9; Match level="QueryCoverage=96%, HitCoverage=95%, E-value=0.0, Identity=58%"; Hit description=PHD -finger, putative
  Pfam annotation: Domain name=PHD; Domain location=573-621; Score =46.8; E_value=7.7e-11; Accession=PF00628.20; Description=PHD-finger
MAVINGRSKRVRVTAVPRPLELRSFPAAGEGPRPLVLLSFPAAGEGLPPRGAFRDCVRSFLAGSAVPADGAWQVAFGVGNGVVVVMEVVEEDVAKTGIERIYCDHCTVADANRCPTCKYVISSDDPEDWDYRQLDNPRHLLHGIVHDNGFGHLVRINGREGGSSLLTGIQLMGFWDWLCRYLRVRKVSLMDVSKKYETDYRILHAITTGHSWYGQWGFKLNKGSFGITSEEYLKAMDNLSLTPLSHFFPHSRYPRNQLQDTISFYRSLSKQPLTTIRELFLYVLGLATSKSSNMHYGSMHKEHSHTHVQDTWPDEEIKRATEIAIKVLRAVEKTRWVTMRILKAAMYHSIGSPQLVDYCLKTLGTRTIDGMMVAVRCNSDTNTLEYRLMDEPIVLPNVSMPTQDHLRRDIKFLHDALLHPHTMHPYKPENCYEHGKRSAMVLLDCKQFTKHYDLEQEFLPQNPSMLHLWCQVEVLDQVGDPPCIPPELLTLPQTATVSDLKVEATRTFRGIYLMLHSFVADRLVDCGTASESTQLKLLFGANGTVRVQGRCASGERRVGIYRMERGVDKWTVRCSCGAKDDDGERMLSCDSCHVWQHTRCVGISDFDQVPKKYVCNSCKLLNKRKSRGHGPVYNIGPSKRFKIGAGGFSSRWGIFLRPPADM

SEQ ID NO: 77617 - protein, 163 aa, Zea mays
  Coding DNA Sequence Number=SeqID_34242
  Gene Ontology: Mol. function=cation transmembrane transporter activity; Cellular component=integral to membrane; Biological process=potassium ion transport
  Homolog annotation: Hit_ID=A2Q1H4; Match level="QueryCoverage=19%, HitCoverage=9%, E-value=9e-08, Identity=81%"; Hit description=TrkA-N
MAMTPWLAAGGQFLASKFEQHDVRSLLPMESELSYVFEKKCSLCYSALHMLKVTRILFASIQKLDMLKPYEPWADGMWPARKPDAPEVPEAPRATDRRTRMRELAGGLPFMLHICGAARSPRNLAPIGILLTRCLLVLEEHCTGAETIAGAQLQMSFGSKMHH

SEQ ID NO: 77618 - protein, 311 aa, Zea mays
  Coding DNA Sequence Number=SeqID_34243
  Gene Ontology: Mol. function=nucleoside-triphosphatase activity; Biological process=double fertilization forming a zygote and endosperm
  Homolog annotation: Hit_ID=Q945C8; Match level="QueryCoverage=75%, HitCoverage=29%, E-value=1e-100, Identity=78%"; Hit description =Origin recognition complex subunit 1
  Pfam annotation: Domain name=PHD; Domain location=195-242; Score =45.4; E_value=2.1e-10; Accession=PF00628.20; Description=PHD-finger
  Pfam annotation: Domain name=zf-C3HC4; Domain location=196-239; Score= 1.6; E_value=0.059; Accession=PF00097.16; Description=Zinc finger, C3HC4 type (RING finger)
  Pfam module annotation: Pfam domain module=PHD::zf-C3HC4; Domain location=195-242::196-239
MAKLHCQWESEGRNPNSSTFQIHIPPLCLSPVTPRRLRRDPEMDVAATPSRSKSKPRSSLVNPVAAPAESRMDLCTPSKPTPRRNSKSTASPAPMSPSTPYTVRRSRRLLETPTKAALEVQVKATLTPTSKGKRAAPSPKTPAQHEPKRQKRHPRKRAYYRKVVYDGGEFEVGDDVYVKRREAAESDAEDPEEEECRVCFRTGGGVMVECDACLGGFHLRCVRPPLRRVPEGDWACPYCEAERAGKVVERPRPPEGKRIVRTAKEKLLSSDLWAARIERFACVMYGRTYRRRCDARRAADRAAKAGATISG

SEQ ID NO: 77619 - protein, 448 aa, Zea mays
  Coding DNA Sequence Number=SeqID_34244
  Gene Ontology: Mol. function=racemase and epimerase activity, acting on carbohydrates and derivatives; Cellular component=integral to membrane; Biological process=carbohydrate metabolic process
  Homolog annotation: Hit_ID=Q304Y2; Match level="QueryCoverage=72%, HitCoverage=73%, E-value=1e-167, Identity=87%"; Hit description=UDP -glucuronic acid 4-epimerase
  Pfam annotation: Domain name=3Beta_HSD; Domain location=120-400; Score=-110.4; E_value=0.0023; Accession=PF01073.10; Description=3 -beta hydroxysteroid dehydrogenaseisomerase family
  Pfam annotation: Domain name=Epimerase; Domain location=120-369; Score=159.5; E_value=8.8e-45; Accession=PF01370.12; Description=NAD dependent epimerasedehydratase family
  Pfam annotation: Domain name=NAD_binding_4; Domain location=120-340; Score=-97.5; E_value=0.019; Accession=PF07993.3; Description=Male sterility protein
  Pfam annotation: Domain name=RmlD_sub_bind; Domain location=152-439; Score=-172.3; E_value=0.011; Accession=PF04321.8; Description=RmlD substrate binding domain
  Pfam annotation: Domain name=adh_short; Domain location=121-280; Score=-56.7; E_value=0.067; Accession=PF00106.16; Description=short chain dehydrogenase
  Pfam module annotation: Pfam domain module=3Beta_HSD::Epimerase::NAD _binding_4::RmlD_sub_bind::adh_short; Domain location=120-400::120 -369::120-340::152-439::121-280
MARDHGVECGSRIAREEDVGCRRPGEKVKVERVGNEPAPAPLLRVHGDHVPVGALPGGHDGHVPERALLRRQHLPALLSRRPGAGCTGSARSGRRRRRGGGRRLGRPRGCPCSSRAPRAFVGAHCSLALRKRGDGVVGINSFNSYYDPSLKKARRALLGSHGVFVVEGDINDGRLLAKLFDVVPFTHVLHLAAQAGVRYAMENPASYVHSNVAGLVSLLEACKDADPQPAVVWASSSSVYGLNDRVPFSEAHRTDHPASLYAATKKAGEEIAHTYNHIYGLSVTGLRFFTVYGPWGRPDMAYFSFTRNILQGKPITVYRGRDHVDLARDFTYIDDIVLGCLASLDTAGRSTGTGGKKRGPAPYRIFNLGNTSPVTVPTMVSILERYLRVKAKKSVVEMPGNGDVPYTHANISLAREQLGYKPTTSLEVGLKKFVRWYLNYYGYKYTTG

SEQ ID NO: 77620 - protein, 100 aa, Zea mays
  Coding DNA Sequence Number=SeqID_34245
MAPKRANSKAAPSVDEAAKAALLAKKKGKAHADTAHQEAYEDDALNKRQRNDQPTPEGTLRTCSSGGQPQPPPSFAPLEGEDATEDGEVIGVSAEEQLQL

SEQ ID NO: 77621 - protein, 223 aa, Zea mays
  Coding DNA Sequence Number=SeqID_34246
  Gene Ontology: Mol. function=ATPase activity, coupled to transmembrane movement of substances; Cellular component=integral to membrane; Biological process=transport
  Homolog annotation: Hit_ID=Q8RVT7; Match level="QueryCoverage=76%, HitCoverage=62%, E-value=3e-55, Identity=47%"; Hit description =Multidrug resistance protein 1 homolog
MPSGVQDRRTALFVWCQVHSDIKVSPTLDLKDDSKSETWRIKMLYDGDCALCMREGIRSGVVGGLGYDFSFLMLFFTYGLCFYVGAQFVRQGKTTFLDVFKGFFALVLAAIGVPQASALASDATKARDSAISIFGVLDRESKIDSSSGDGMTLENVSGNIDFSNVSFKYPLRPDVQIFSNFTLCIPGKVQLVIDPSVPITGLNSATKTTRVLRHLVDLIGNHK

SEQ ID NO: 77622 - protein, 49 aa, Zea mays
  Coding DNA Sequence Number=SeqID_34247
MDVGPYIVLEPIRVVPHPVLEGKSNVNHVRARINLPHIWVNILISSVIC

SEQ ID NO: 77623 - protein, 67 aa, Zea mays
  Coding DNA Sequence Number=SeqID_34248
MESPGLRYWTTQARSAATVVLCYRVGGGGDDGSWILQKYVLGFGDPCGHYQRVLVPCVLGSHALGRF

SEQ ID NO: 77624 - protein, 103 aa, Zea mays
  Coding DNA Sequence Number=SeqID_34249
  Homolog annotation: Hit_ID=Q6K200; Match level="QueryCoverage=56%, HitCoverage=11%, E-value=3e-07, Identity=48%"; Hit description =Putative met-10+ protein
  Subcellular localization annotation: CTP_CleavageSite=19; ConfidenceScore=5.04e-01
MHKLQGKDSYDMNNMSQCSATHELRTPTTLHPSLLVRTTRSPFESNPACWSGGDEPDCQDANKTKGQNKKRVRGLGPLPSKPWEHFDHIEQLDRFIFYQNFSL

SEQ ID NO: 77625 - protein, 105 aa, Zea mays
  Coding DNA Sequence Number=SeqID_34250
MYKGCTQPLLSDPMIHLNTMVLFFRVVFPFVRNLHKLEPLTLSKLITTKAQEKDLTGDKKATAVGDGSAATLKIIRDVALKGCSGTARLISGHRTIAVALTVRFL

SEQ ID NO: 77626 - protein, 61 aa, Zea mays
  Coding DNA Sequence Number=SeqID_34251
MGGMFSKVKLDGGSIMAMMGSTSENMYLCQVKKRQTFVASVQRWYPKKKTKTKVAGGKALR

SEQ ID NO: 77627 - protein, 80 aa, Zea mays
  Coding DNA Sequence Number=SeqID_34252
MARVACTLRGKRLDGGSTLASISANRVIDKSYLDSLKASTSLRVFLLCRVKKRQTFVASVQRWYPKKKTKTKAAGGKALH

SEQ ID NO: 77628 - protein, 120 aa, Zea mays
  Coding DNA Sequence Number=SeqID_34253
MAHWSGSSDAHARITLTGWWGIAVRCVSFTMPQGLDSAAHARGIRHGAQIVRLSRYLVPLAARRKASGWDPPVESIISLFFSRCLVAALELVVAVAANPASPSFLRYKPLIACDRAPTFL

SEQ ID NO: 77629 - protein, 152 aa, Zea mays
  Coding DNA Sequence Number=SeqID_34254
  Gene Ontology: Mol. function=5-formyltetrahydrofolate transporter activity; Cellular component=membrane
  Homolog annotation: Hit_ID=Q5SMV1; Match level="QueryCoverage=81%, HitCoverage=23%, E-value=8e-53, Identity=78%"; Hit description =Integral membrane transporter-like protein
EDPGLPIKVAEGRRPCTRQPPQKSTMTWFQMLARELHWSFVFDMEATYGISPGPRGGISHVASDYYWKDVQRVQPSVAQVYQGVTSIPWKVKPLWGLLTDVLPVAGYRRRPYFILAGFIGVIAMLILALHSKLHALFALLALMTGSARRGDS

SEQ ID NO: 77630 - protein, 412 aa, Zea mays
  Coding DNA Sequence Number=SeqID_34255
  Subcellular localization annotation: CTP_CleavageSite=31; ConfidenceScore=5.06e-01
MALPVDVAPESEPWGRAKRSFVVFRVLARVRALGSGGAEFAVFRVLARVRALGSGGAEFAVFRVLARVRALGSGGAEFAVFRVLARVRALGSGEAEFAVFRVLARVRALGSGGAEFAVFRVLARVRALGSGGAEFAVFRVLARVRALGSGGAEFAVAPLAALSFCQTGQWSGGVTAVTSALPGARVRMKLYADGGYQLRIRRLEAPEPLHRARGQSGTDPTFYIRPYVAFPQGGGGECAMLPSMGTEHGVSGELQAAEPTPKSISRGLGSGWRPWKPVDRGPRGNRSSRLLGPDSRRSPWTASPPEAGSDFAEDVVDAEGATAPFSVKTRACRIRSSRSVCFLRPPRPEKHTLAALAKLRLFSSCFEHLDSVGNRDKVMSEVSVSRRRRSPSARSALAAYVYSVVSRIRFPK

SEQ ID NO: 77631 - protein, 133 aa, Zea mays
  Coding DNA Sequence Number=SeqID_34256
MPNHPKAGDGDKLSPAELIPGMVEPYPDSMALLVALTEVNTGKEYVPRITGAGELSTGRGSSAPDSHSGEEFTSIRDTRLDSGARTDFTSAGETHTTTRRGRNTSADGFHWRRNCRDSTPPHGSTAMRLGYGA

SEQ ID NO: 77632 - protein, 186 aa, Zea mays
  Coding DNA Sequence Number=SeqID_34257
MDHRLSSSSPRPIIPKAGDGDKLSPAELIPGMVEPYPDSMALLVALTEVNTGKESVPGITGADELSTGRGSSAPDSHSGEEFTSIRDSRLDSGARTDFTSAGETHTTTRRGRNTGADGFHWQRDCRDSTPPRFHGNEAGLRGIEETDPSSTSYSLGESVPGARNVPHDRRRELRVPLIRARVQRRG

SEQ ID NO: 77633 - protein, 194 aa, Zea mays
  Coding DNA Sequence Number=SeqID_34258
MREAREPGARSCPSVGVVVCETFRNGNWTRGYGYPRVSYPVDMGHGYEFEISSVDPIGSGIRNTSGRIRALKQQRGQRRTQTAALLRSARSDTLSAGCGLRASGRPVAGQCHSGVRGRGLRLCGSRGQRARGSGARRLAARMMERRWSERRLNLLHLLDLFAAFTGPRPGAAARQPRSQIRHCGYPLDTRNINS

SEQ ID NO: 77634 - protein, 132 aa, Zea mays
  Coding DNA Sequence Number=SeqID_34259
  Gene Ontology: Mol. function=nucleic acid binding; Cellular component= cytoplasm; Biological process=multicellular organismal development
  Homolog annotation: Hit_ID=Q10CA6; Match level="QueryCoverage=67%, HitCoverage=9%, E-value=1e-30, Identity=66%"; Hit description=Piwi domain containing protein, expressed
MPPRGRRPGAGGRLGSRAHGAPPAGPGAGLQGSRQHPRHRHWNGKIKRVYETDIGIVSQCCLPKHASRPNKQYLENVALKINVKVVASMDWPEITKYRGLVSAQPHQEIIEDLFTISKDPQMGYNVNGGMIR

SEQ ID NO: 77635 - protein, 125 aa, Zea mays
  Coding DNA Sequence Number=SeqID_34260
  Gene Ontology: Mol. function=amino-acid N-acetyltransferase activity; Cellular component=cytoplasm; Biological process=amino acid biosynthetic process
  Homolog annotation: Hit_ID=Q8H5K9; Match level="QueryCoverage=52%, HitCoverage=11%, E-value=6e-27, Identity=84%"; Hit description=Amino acid acetyltransferase(N-acetylglutamate synthase)-like protein
MGRFGRHEAAVAGRYCEESKSSRFWDSFWGKKLDPTELNEFQEISVEFQTQPGNKAKYVGQYRITDEDARKAAMDVGGRIRLTIEAKLSPGPPMLNLRRHGVIGRWHGLVDSIASGNFLGALSNY

SEQ ID NO: 77636 - protein, 183 aa, Zea mays
  Coding DNA Sequence Number=SeqID_34261
  Gene Ontology: Mol. function=catalytic activity; Cellular component =mitochondrion; Biological process=metabolic process
  Homolog annotation: Hit_ID=Q9AYM1; Match level="QueryCoverage=54%, HitCoverage=57%, E-value=5e-30, Identity=66%"; Hit description =Putative enoyl-CoA-hydratase
  Pfam annotation: Domain name=ECH; Domain location=1-140; Score=-61.0; E_value=0.022; Accession=PF00378.11; Description=Enoyl-CoA hydrataseisomerase family
MIKGLLRCFTDYVKDDGVKLLIMKGNGSAFCAGGDIVAGVQSIYNESWKRGADMFRDIYSLIYIIAIYIKPQVSLLTGIVMGGGAGVSLHGRFRVVTENTGTDRAVKLGGDPGKEVCAGGERVRLQSKRKSPKKMGEVIQNHQIVFITRKTEYRRGPEITMNQVKSLLILRRRSGEWETSMPA

SEQ ID NO: 77637 - protein, 67 aa, Zea mays
  Coding DNA Sequence Number=SeqID_34262
MERTQKNDEEREEALAERWPSAPAARRNSLGSRDGEDTGGDVVASGDVQGQELMGGSQHMMGIGLKI

SEQ ID NO: 77638 - protein, 154 aa, Zea mays
  Coding DNA Sequence Number=SeqID_34263
  Gene Ontology: Mol. function=protein kinase activity; Biological process=protein amino acid phosphorylation
  Homolog annotation: Hit_ID=Q8IEA3; Match level="QueryCoverage=70%, HitCoverage=4%, E-value=4e-13, Identity=37%"; Hit description =Putative uncharacterized protein MAL13P1.114
MSKNTKDIRFIPRFGHTTKVSYFLVEAPTKSWVSFNPNPPFADHKAEVQFNSTEVKFNLAKVKFNSAEEKLNSAEVKFNSTEERLNSAEEKLNSAEVKFNSVEEKLNSAEVKFNSFEEKFNSAEVKFNSAKVKFNFSERKFSCFSMGRLSISQT

SEQ ID NO: 77639 - protein, 493 aa, Zea mays
  Coding DNA Sequence Number=SeqID_34264
  Gene Ontology: Mol. function=structural constituent of cell wall; Cellular component=nucleus; Biological process=cellulose and pectin -containing cell wall organization and biogenesis
  Homolog annotation: Hit_ID=Q41707; Match level="QueryCoverage=75%, HitCoverage=82%, E-value=2e-14, Identity=23%"; Hit description =Extensin class 1 protein precursor
  Subcellular localization annotation: CTP_CleavageSite=71; ConfidenceScore=5.64e-01
MSDFHSSRLTGYPKTSSLAQGSGAGPLSASPTRYFDSSRARSSPASPTRYFDSSRAGSSPASPTRYFDSSRAGSLSASPTRYFDSLGAGLSPASPTHYFDSSRARSSPASLTCYFDSSRAGSSPASPTRYFDSSRAGLSPASPAHYIDSSEAGLSPASPTRYFDSSEAGLSPASPTRYFDSSRAGLLSASPTRYFDSSRAGSSPASPTRYFNSSRAGSLSASPTRYFDSSRASSGAGSSPASPTRYFDSSRAGSLSASPTRYIDSSGAGLSPASPTRYFDSSGAGLFSASPTRYIDSSGAGLSPASPTRYFDSSGAGSSPALPSHYFDSSRARLLLASSTHYFTGSKAGTSPASPTRCFTGLGARPSPPSPTRYFGDSRAGSSPASPIRCFVDSGRPRHRLISSGLRYDAPRRPLCQLGCCFPPHQDHLKEKQNLDLQADCFSSQLEARGLVGDGYPLGPNETYYLHGPTDRLGPEANGLNKLSARNKDSIVI

SEQ ID NO: 77640 - protein, 103 aa, Zea mays
  Coding DNA Sequence Number=SeqID_34265
MEKKNPQVSRQYNQAMSQISALACDKLLQLLSQRCTGFDGDAPSAPSLTWRGARGREHAHARSSHSGDAIFMKIRCHITTGIRLFVECSALRKDPYSAKSYPR

SEQ ID NO: 77641 - protein, 103 aa, Zea mays
  Coding DNA Sequence Number=SeqID_34266
MRTRLKLMKKKMSLLKMTAMIKGEMQTIKIRRMKNQGRHTQESIKQSNEITLSTPSLATFIRGVEEALQDSDWVMAMQEELNNFTRNEEPSGSSATSKTSMVW

SEQ ID NO: 77642 - protein, 120 aa, Zea mays
  Coding DNA Sequence Number=SeqID_34267
  Subcellular localization annotation: CTP_CleavageSite=54; ConfidenceScore=5.19e-01
MAKSVHDQSWVSVEKFLGDRRFSTSAGAANVFAWSPRPSSHSTAVTGFSLALPGADSGKEADLASGPHRVSDRAPGERVGQRGCKWDPQASACVSVRRSYWAARESLRGGPKAGFGPARV

SEQ ID NO: 77643 - protein, 298 aa, Zea mays
  Coding DNA Sequence Number=SeqID_34268
  Gene Ontology: Mol. function=kinase activity; Cellular component =ornithine carbamoyltransferase complex; Biological process=amino acid metabolic process
  Homolog annotation: Hit_ID=Q6QP54; Match level="QueryCoverage=31%, HitCoverage=29%, E-value=2e-20, Identity=62%"; Hit description =Putative kinase
MAPPVDVVGPRPRLGDVEAPPRSRSSLSSVAVVESEPLGRARWRPSAEARAESEPWGRAKRSLSSSGAEPKSEPWVGAEPESEPWVGRSGVRRLPGLCPSPSPGSGEAELPMVPEVGPDCLSVDWRTRVRIKVSGHLCIKCSCDLVGWRGDLVRVASWRRQGLGRALYVDGGYQLRIRRLEGQTVCQSDCQTDLQTGQVDQDQFNRLGQADRQSASQTGGLQVRLQKQVLTPVEPPLRPVQPPGGQTGSQSASQEVRPIRPRLNLPWTLVEPAWTLVEVEVQLELRKLNSAEVQLSCG

SEQ ID NO: 77644 - protein, 284 aa, Zea mays
  Coding DNA Sequence Number=SeqID_34269
MAERYQLPQSCVPPTTRQKDGGYPPSGGLEGGKTRRIREHEDMVAFKGGHPPFKGNSPYLRPQPSRAESSPTRSKVLPCGAGAGSHTSCKPAQSRRSQTAMRGAHNRPAVTSDPPLLPRPTGERGGQPCRRHATAPSGRTSPTPNTPGMGAQAHASCNRRAECFVHATAPPLAPPPRLLDCGTNAVTRGTGKGGYPEKDPSREGTRLRASLLIRGSKAGPPEGFDSRLRSCGPYTHYWSEVRRPAPRKGSTAASGYSGSAPITDQGFEGWPPKGSQPPQTPSKG

SEQ ID NO: 77645 - protein, 126 aa, Zea mays
  Coding DNA Sequence Number=SeqID_34270
MNTKGKGMVVNDKEKESLFNEPRDDKLKGKCALGPFLSILVKKSSWEKRWLEQPKTAQSGCTGLSGGAPDSVPVRQAGSSKVAALGTSTAVYDYNSPDCPVVHRTVRWAFHRRTHRSREFIVGVRL

SEQ ID NO: 77646 - protein, 537 aa, Zea mays
  Coding DNA Sequence Number=SeqID_34271
  Homolog annotation: Hit_ID=Q6JAD6; Match level="QueryCoverage=100%, HitCoverage=78%, E-value=1e-129, Identity=58%"; Hit description =Putative uncharacterized protein
MPCTKNVSALGGGDDEDPPRAFRQVKGKTVYLEQQEGRKKRRLDRVARAALAAAAAVAEQTERGDQLRISSDQIAYRVRRLASRPRSSAPTTPATAATPPPTSPALVTPAPSTTSAIPTTSTTLASTAPPPAPLSAPPIPPACFRERDETEVRPLAADPRLFDLQHATAAWVRRFRHVPVESWLPAQRDPAVADLFNTRIHESFFRAQLSAQIALRAHQLLDLPAFLLAAGADSEVHLLYLLGLLTLLTTSGRYVEEWVRVFYASVWIDPDHQWMSLCYGTSDPSRRPHGGVAPGTAHVAALLRPPFSDGSRHYPADFTTASKYEDQLMRRTLLTRMGYREAATNIQLRLLGALISHSEFDVVDFLICEIEDTVLDGLRAWRQLPYAHNLCHIFAQLIWPRQFQGTLEASPLLFGSYRPIPEDPVPAPDPVIDTQAEDSAYHQFETQGATVPDDDDFGIPPPPPCSHDHEARSSSAIPATPPTVDPALAAILQTLTQQQALMASEQARLVAEQARQAAVQQQMFERMLSLFQTIQDR

SEQ ID NO: 77647 - protein, 285 aa, Zea mays
  Coding DNA Sequence Number=SeqID_34272
  Homolog annotation: Hit_ID=Q10PY3; Match level="QueryCoverage=15%, HitCoverage=13%, E-value=2e-12, Identity=75%"; Hit description =Expressed protein
MRDPRPTAMRADYASTGSSLPIVILSSNRDPGHIEFRPNRSPIDSARAEAWDVTFKKVLAITVPFSQQIMAGECKLVGSASCCDYREILWKIMEQVKAESDQWTEMQDMLEQESGKEEIKKHILVCCVKRSLSTVLSKRSPFQEIGNISLPRHRRLRPTTMRDPRPTAMRADYASTRSSLPIVILSSNRDPGHIEFRPNRSPIDSARAEAWDVTFKKVLAITVPFSQQIMAGECKLVGSTSCCDYREILWKIMEQESSKEEIKKHILVCCVKRSLSSVLSKRSPF

SEQ ID NO: 77648 - protein, 40 aa, Zea mays
  Coding DNA Sequence Number=SeqID_34273
MEAVRTSESVVEYVAQEEAEEKKEALNPNSWSSTSKCHHV

SEQ ID NO: 77649 - protein, 100 aa, Zea mays
  Coding DNA Sequence Number=SeqID_34274
  Gene Ontology: Mol. function=oxidoreductase activity, acting on paired donors, with incorporation or reduction of molecular oxygen; Cellular component=chloroplast; Biological process=carotenoid biosynthetic process
  Homolog annotation: Hit_ID=Q8LJ81; Match level="QueryCoverage=69%, HitCoverage=12%, E-value=8e-24, Identity=78%"; Hit description =Putative lycopene epsilon-cyclase
MTRNYAGCISQWLNHEEQETCLAAKDVMSFDLLKKSLMYLLNAMGVRIRKVYDEEWSYISVGWSLPNTDQKNLAFGATTSMVHPATSTDESSSFYTPVST

SEQ ID NO: 77650 - protein, 126 aa, Zea mays
  Coding DNA Sequence Number=SeqID_34275
MAVGRGSRMVVGRRRLHAWRRVEGGSENGWQMRCQRFNTNQEKVQDRVQKERSKTNRRLPWSGAPDCPVCHRTVSGTPGRSTMNCSASSFWKSHSAIIHRTVWCATGLFGVPYGATATAPTVVCKK

SEQ ID NO: 77651 - protein, 342 aa, Zea mays
  Coding DNA Sequence Number=SeqID_34276
MALLDPRERFQPEVALNLVRNPLGWGVLAFAGRTYVGVSPLGDLAAEEFVFFVSKLPSGRPSLPTSAECPWRRRSFPLLPPAFGGEDDYQPRDGGQRAEPRLHPSRPNSFGVGREPCYSSIFLALMASVPPLMLPHAAKQGAVVRPPHGRRSRRAQVRRTRSVPYAAGHAALTPLGGPYKTSYAVEVVAAFLDEVVASAGEPLGASYPRDPTGVEVLRHPSQSGGACRPTVRNQAERLHGSEPPQETSFRVRDQAKRPHRLQTTPWNGLVLFRADQQVGLMRVDLTGLAYTDAPVVRKRYSFSHSKIVTPGSAYSRHLEGHFCMDLSEAWTRGVSRRVSGGR

SEQ ID NO: 77652 - protein, 359 aa, Zea mays
  Coding DNA Sequence Number=SeqID_34277
  Homolog annotation: Hit_ID=A2Y775; Match level="QueryCoverage=46%, HitCoverage=63%, E-value=2e-32, Identity=47%"; Hit description =Putative uncharacterized protein
  Pfam annotation: Domain name=DUF1639; Domain location=317-359; Score =62.4; E_value=1.5e-15; Accession=PF07797.5; Description=Protein of unknown function (DUF1639)
  Subcellular localization annotation: CTP_CleavageSite=46; ConfidenceScore=5.49e-01
MACLAGNALDLVGRFWVSQGSSVLSFLPSLSLATRCSRACGLEGVQASTASLFCRRDRPPARAAPNPPRHQRQHTAPPAINARGSPTLLPTAAAINAVLPTRIHVFSPPPPQWKLSRRSFPGSPPPPRAPPNRKARSAASRHRLVLVPPGYCVVKSISSSSSSPFLARTTRRANGVIAAAAMAPASSSRAARDPLLFARFDLPAVWGCRKPLDFCREARDTDNAPVASEPDATATPTEGVKDSDGTRSPTRATAMVQQAPVAGEVAQEAPRKQWNLRERTPWQDYSNRADDLRARQARKLGSADAGGNRRLSLSVKLTRQEIDADFAKITGSKAPRRPMKRSKTVQRKIETLCPGSSLV

SEQ ID NO: 77653 - protein, 380 aa, Zea mays
  Coding DNA Sequence Number=SeqID_34278
  Subcellular localization annotation: CTP_CleavageSite=21; ConfidenceScore=5.22e-01
MTVAGGQEQQSRRQPSSRPIRGQRENPLSRREDNTPVFRPRTARACATATLQTTRPVALTPRRDTQRLWQEERATLRLRHDNRVKKRLRAPLLIRGSKAGPPEGFDSRLRSRGPYTHYWSEVRRPAPRKGSTAASGYSGSAPITDQGGNDLVTESHQREASSPRTLSPGDRVWQITRSSSETPCSTPIEGNMALSPLLLAERRRRGRLGGCSRKPGSGRTVDSVNIPAQELGTRPYTWAIASSHEGMTRPAEALREAVRPRRSETTPPRPRGLHPAGALARTHRNKTQSRKAGPLAKKCDESLQASANTPFEARGLLSGTIIRGTLKAPNSQLPRGCFGLGTGLSGGAPDSVRWCTGQCPVRQAASAEEAALGFFSGDFG

SEQ ID NO: 77654 - protein, 418 aa, Zea mays
  Coding DNA Sequence Number=SeqID_34279
  Subcellular localization annotation: CTP_CleavageSite=78; ConfidenceScore=5.52e-01
MSSRSLMHRVFPPSKPPDGGYPQSFRLVVGGTQLRGSWYLSAIVRLQGFSSVSPAAPLRRRSPETVTTSPWVGRSKPGCDLGPTLSFKDVHHPRWGGGRAEPELYLPRGFVGRPLLRRSRERALTGPVGGSEFDNAGLVDGGRRQPQHVGLVSLAPGAPLPEGGCRAVRTGGPPKISRAARAAFVFWGGPAFAPVEAAREVPVADGITATIRASGLQLFVLVLAPRASAWARARLQQHSPVGCLNCFTKRESPRVKVTSEESLGSVSLVVRGFSCLVKGTPRPLFDEPRPGVAVSAWTEAELARKEDLVGRSLAGSYVSGTDAGVDLPRPRAGLMSSGDSWLRPRGDQPSLLLGPDSRRRPWRRWPGRGDDVVLQSGDPRTASPSEARSDLAEGVVDAEGAAAPFNCPDPSLQDRIIL

SEQ ID NO: 77655 - protein, 180 aa, Zea mays
  Coding DNA Sequence Number=SeqID_34280
  Homolog annotation: Hit_ID=A2ZTW0; Match level="QueryCoverage=78%, HitCoverage=30%, E-value=6e-36, Identity=45%"; Hit description =Putative uncharacterized protein
MDILLHLRLFLLKGYQIVGYLQFHTLTLELGILEKKIGAIKLMLKNSGFTWDDNKKMIQCERSQYEAHCKKHPEARGLYDVAFPYFDALSTIYGNDIATGEGAEGIDEAVGNLEQELATGYASSSVKRRRTSGKEKSGSSDPLLDMLNEVQGDLKGVAMNVGKMTAVMEREAELQEKIKG

SEQ ID NO: 77656 - protein, 616 aa, Zea mays
  Coding DNA Sequence Number=SeqID_34281
LGGRKKHTLQDNPILQARILTARGSSSTLGVDNTFGEVRPSLGRRRGPKISTLKDDIIATPGPSPPGSSPGIRPEQTARPVTPGPRPAVLRGRQPDPRPRLVNSGVGPANGRPDQAPAGKRQQRPPLRVAELQQRGPQGGCCCNLALARADTRGARTSTKNQRPEARMVAVIPSATGTSRAASTSAPTKGAVSPLADPHSDPPGQVGHRPPRGGAVPVQRQDRPRTRTPPWQRATSWAVLPCTRRGNRHSAGGGTGNQADEPDALGLTTPAVDQPRVVEVRPARRASERPLPRTPQERLTHEPAREVELRLSPTSTPARMMNILEAEGGTKIAARLASPHPGAGGHRLGRSGRRFAFAIMTASEKGPGKGDTPKRILPHEGTWLRASLLIRGSKAGPSEGFNSRLRARGLHTHYWSEVRRPAPRKGSTAASGYSGSAPTTDQGENDLVTESHQREASSPRTPSPGDRVRQITRSSPGTPCSAPTEGNMRLEGCSHKPGSDHTVDSVNIPARELGTRPARTRAKPQKTANSAPPDPGLGLGLSPRRRRTPLCPIQGSDLGSAPEDDELRSARPPGLGLRPGLSRRSPPRPTQGLGLNLDHGKTNSTSARRELTHHPT

SEQ ID NO: 77657 - protein, 127 aa, Zea mays
  Coding DNA Sequence Number=SeqID_34282
  Gene Ontology: Mol. function=transferase activity, transferring nitrogenous groups; Biological process=biosynthetic process
  Homolog annotation: Hit_ID=A2ZEQ2; Match level="QueryCoverage=42%, HitCoverage=10%, E-value=8e-21, Identity=90%"; Hit description =Putative uncharacterized protein
MMNEVQINKKTNTGVVCSLGSYFPTNFSNLAGHVDSERMYNELVSNTIYEGGPFDSKASSIKLLRRTSNTTRCLNLGSYNYLGFAAADEYCTPRVIESLKKYSASTCSVRVDGSRIHYQHAYMFTTF

SEQ ID NO: 77658 - protein, 120 aa, Zea mays
  Coding DNA Sequence Number=SeqID_34283
MNAVVTSHLPVCLYSAAGKKVNRQDFYTRQTAAYTRCAVDHRGQIVTLQGGTTTRSETESFLDNELREGVFRTFGFLKPKRLFSETESFLDNEKRSSTAKGLLLGSCFVAEGPAGRNSFG

SEQ ID NO: 77659 - protein, 70 aa, Zea mays
  Coding DNA Sequence Number=SeqID_34284
MVKKLMKITRGGNGEQSCRVLPKRPYSPFWRCSITKDDGSRGLLYHSPMPANDWNEVVYRTTRLDIVVAT

SEQ ID NO: 77660 - protein, 207 aa, Zea mays
  Coding DNA Sequence Number=SeqID_34285
  Gene Ontology: Mol. function=cysteine-type peptidase activity; Biological process=proteolysis
  Homolog annotation: Hit_ID=Q109R5; Match level="QueryCoverage=54%, HitCoverage=11%, E-value=7e-11, Identity=33%"; Hit description=Ulp1 protease family, C-terminal catalytic domain containing protein
MAAILLSSDLNKRSGCLLYKNEKEVDSGSPSDVEILENPTYSNKRKLLHVLDDSEVVYEDEEDPITQADLQRMTWVRSFNPFKIVISVKDLQNILTINQDMILRCFDMVVRLLANKESRMPKEEIINNRKHYMDMRFWRKVGFGKLPKYHQDPTTEWLAKTLDSWPSMNYYITRCRYDAKILQRNFVIDLLSYEDNSCRYAIPANIQ

SEQ ID NO: 77661 - protein, 25 aa, Zea mays
  Coding DNA Sequence Number=SeqID_34286
MARRRSRKNKKTQENSTRKECAKCF

SEQ ID NO: 77662 - protein, 581 aa, Zea mays
  Coding DNA Sequence Number=SeqID_34287
  Gene Ontology: Mol. function=transferase activity
  Homolog annotation: Hit_ID=Q60ES7; Match level="QueryCoverage=97%, HitCoverage=94%, E-value=1e-126, Identity=77%"; Hit description =Putative uncharacterized protein OJ1764_D01.5
  Pfam annotation: Domain name=DUF563; Domain location=127-437; Score =243.8; E_value=3.7e-70; Accession=PF04577.5; Description=Protein of unknown function (DUF563)
  Subcellular localization annotation: CTP_CleavageSite=64; ConfidenceScore=5.52e-01
MQLPQHHKPSAHSCCPSWIRRSPPSPPPPPHKKLGGGRSRYACRLVPLLVLTVYSVVTVLRIPSASLVVSTADSERVDRREDLEALKTHLPSNQNSLEAREETRSVASLPCSAFISGEAGHGEEGVLCCDRSHYRSDVCYLRGDVRTDPSTSSVLLYNAARGSGPEKVRPYTRKFEDSVMSSIDEVTIVPVPGGHNASASALRRRCDVRHPRGVPAVVLSTGGYTGNVYHEFSDGLIPLFVTAQRFGGEVVLVVLEYHYWWLGRYGAVLEQLTNYKVVDFRSDRRVHCFDEMIVGLRIHGELVVDPKLMPNATDHGRDREVAVTEDHCAGQEEGKAGVAAFAKASVQKKRARASRISRRYSTGATAGRRRHRRRRHPCQCRFPWRRRPGPGPGACPRPAAKPKLLIFIRKQNRVLLNLPHVVTACRRAGFAPHVMNLRRQTPLAAIHAALASADAMVAVHGAAVTHFLFMRPGSVLLQIVPVGLDWAADAFYGKPAQQLGLEYLEYKVAPEESSLAAEYGLDSTVLRNPWVISSRGWWEMKKVYMDRQNVTVNIKRFGELLRTARTHLKNTTACAAAAALR

SEQ ID NO: 77663 - protein, 127 aa, Zea mays
  Coding DNA Sequence Number=SeqID_34288
MGKKRKREPTPPSEDFGDSEYSEEEFSSESEGSPAPIPLRESSDDSDNSQGLAAEVWTYIRAVERSGLAGSDESEYSSDEQDSSEEDDGGGGDDDDNDDEGGGGDDDGDGGGGSSRGGSRGGNMTSG

SEQ ID NO: 77664 - protein, 100 aa, Zea mays
  Coding DNA Sequence Number=SeqID_34289
MTKENAEHRAHMEDKEKQGVLMTCAKLPPLCLQLIRVVPTGQKSKPYGVLRSHTTGLVWLRAGHGPEPETAWSKSTRLYLYLGKGWFPNDAIAITRMREQ

SEQ ID NO: 77665 - protein, 427 aa, Zea mays
  Coding DNA Sequence Number=SeqID_34290
MGSARIAFVLLSLEERNFAEVGSLAASPRRWSPKTVTTSSMVGISKLGCSLCPALSFKDLHHPGWGGGRAEPELYLPHGFVGHLLPQHSGKRALTDLAEGADSDNAGLVGRERRQLQRVGLTGSAGPGSAPGAPSRRTSGHRAARTGGLPKTSRAARAAFVFLGCPAFAPVRRFCAEVGARSSGRIRVGICRWADGCHRRCRGGGGWRSEDLIAAASALRSSLLLFGHPERRSLSLLPEREAASHLGNPQPLCDELEPEAAVLARTEAEMARKEASSAGAWPGRPLAGPTPESGCRGHKPGSCPRGDNWLRLRSGRWSRLLGPGSRRRPRRRWPRRGANRILRGGDPPTVLPFEVGSDSAEGGVDAEGAAAPPLIIVCPSESYFSQKVMSEKVMSEVSISRRRRSPSARSALPAYVYSVIFRIPLSK

SEQ ID NO: 77666 - protein, 279 aa, Zea mays
  Coding DNA Sequence Number=SeqID_34291
MKSKLLRQGMWLGNDDVGRTPFFVGWSASKMRHLAEARQWIKVLEVSLVKIRSCLEWGASWLGNNGVPQSSFSCAGAPILLVPRRSCGLVVSLPREDNIVESGGRELEIGPHLVPVEQVAEAFGVVGGAAAVAAEVEAEGSSSSEGTTHATQYKQRKARLQGLGWGTAERHPNPNRQSLGVRGLLAGAGSTDADWASGMPAGPLPRWPLGERSASADPGRLDGMAPRWTGARRAADGARRVAWRRTGGWAVADGDGARRAEDGDGRTGRGARRAGEVAN

SEQ ID NO: 77667 - protein, 158 aa, Zea mays
  Coding DNA Sequence Number=SeqID_34292
MPALPPPPSAGKVTGHTRMLLFRHEGKTSSIPPPAGGLTAAIVIVAQRRKEYHGVAAVEGHELQTPETKHRPRLKRLLETTHLELDGKLFVNTQQAPTWRANCRHFDPGGPLDRRVNCRRVSQPRWVGARWSTKGGETARGETRGLRVALCPGRVRLQ

SEQ ID NO: 77668 - protein, 253 aa, Zea mays
  Coding DNA Sequence Number=SeqID_34293
MQAACNHTKGAHPFDSDASSVEAQAHTSCNRRTGYYVREAAPPLAPVLRLLDCGTGAATRGNPAHGPTVPTEHIDHGDRERGYSERDPSPRRKRAPSPLLIRGSKAGPSEGFDSCLRALELQALLLIRGSKVGPSEGFDSRLRTLGLRAHHWSEVRRLAPRMGSIAASGHSGSAPITDQGFVGWPPKGSTAASEHAERGMTLGSGVALTNPAPAKPLTTSTYQPENLEPDYAPGLRPVRMREQPDRPKYHETR

SEQ ID NO: 77669 - protein, 193 aa, Zea mays
  Coding DNA Sequence Number=SeqID_34294
  Homolog annotation: Hit_ID=O24348; Match level="QueryCoverage=24%, HitCoverage=9%, E-value=4e-07, Identity=63%"; Hit description =Plastid RNA polymerase sigma factor
  Subcellular localization annotation: CTP_CleavageSite=44; ConfidenceScore=5.31e-01
MAVVALLLSPRSVSFPPHPSLAPGFTKRPPPYLLSGHGAGARFRAVGDGPGAGLPPEQATIYHPARGVILTVEGLARQQRMSGRHRVTRRKSVTISPELMQRRNRMYLCGIVPQQGPPHAQVGTGKPWEPVGRCVKPDNDFTCFLHALLPVAKRSCTAIIFTDRKPRLPCTTQKQPGNVSSILILKGDLRDNK

SEQ ID NO: 77670 - protein, 54 aa, Zea mays
  Coding DNA Sequence Number=SeqID_34295
MTNYDNSGKPKSPAAGVDRDGISTGDTARCMAIAMPRVLRQVKLVDSIALLRRS

SEQ ID NO: 77671 - protein, 164 aa, Zea mays
  Coding DNA Sequence Number=SeqID_34296
MKRELYTASQIRRERSLLQQTPKIPEKRNLQLSERRSPRQPRHSTPTFFSSGEWSHLPSLTTSRLRLGKNHLSGNPVDEEIGAETSEDITKPENGIRSSLSRETRSRRWEKLRKNASSENEGTPDGAIVDELRNKPSKTRGNAGKIHSSSQPEPRLRPSHEHVV

SEQ ID NO: 77672 - protein, 112 aa, Zea mays
  Coding DNA Sequence Number=SeqID_34297
MAHGPWKEGRSRPGFADRVYTSTRHEQEPLLHCVSGFLRVVAFKQSSETYCYPFPCTRRAAAVKKRKWRKAEKRLKRMSDVTVVITQRPSVCCVLKGLFGIGQVDTAMVLIL

SEQ ID NO: 77673 - protein, 140 aa, Zea mays
  Coding DNA Sequence Number=SeqID_34298
MGKNNKRKRKPTPPSEDFGDSEYSEEEFSSESEGSPAPVSPPASSDDSDDSQGIAAEVWTYIRAVERSGLEGSDESEYSSDEEDSDDSGEDEDDDSDDDDDGDGDSGGSGRGSNSGGGNGGSSRGSGGGGSSKGSNKASG

SEQ ID NO: 77674 - protein, 77 aa, Zea mays
  Coding DNA Sequence Number=SeqID_34299
MYKDSRRSRVDSSIIKIMDVVMWILQEGADGDDGHEPSGLLPEDDTSEATLVEVAPAAAGMERGIAISRVWRRLWLA

SEQ ID NO: 77675 - protein, 200 aa, Zea mays
  Coding DNA Sequence Number=SeqID_34300
  Homolog annotation: Hit_ID=A2YCT1; Match level="QueryCoverage=69%, HitCoverage=10%, E-value=5e-16, Identity=39%"; Hit description =Putative uncharacterized protein
MKLIYDLLNEGMAGRVQDFITLRIGSLWLDVPLGPLHASDSAGSLRTTAASPAMIGLEQEVNSKPHDGFIPVVSKAAKRRARRMAARSRVSVSQEHPNKVHKVASSSSGPPGFSKPKVNKSVGHKTEARFRQTTLGEWPVCIKKMPPTKFVQPRASSTSTPKETTPTLTPPNMLGVRSFKLAPSILGAPPTKTVTITKSN

SEQ ID NO: 77676 - protein, 95 aa, Zea mays
  Coding DNA Sequence Number=SeqID_34301
  Gene Ontology: Mol. function=nucleic acid binding; Biological process= DNA integration
  Homolog annotation: Hit_ID=Q8W0X3; Match level="QueryCoverage=56%, HitCoverage=5%, E-value=4e-09, Identity=50%"; Hit description =Putative gag protein
MANQARYIDGVANGSLPHYNEPQPIVLKAMNNVEALPDKVALKNDNDDLNARIEKLTVASSSLEHYSICNRCKDVDIDSCVANVALIADLNARIE

SEQ ID NO: 77677 - protein, 164 aa, Zea mays
  Coding DNA Sequence Number=SeqID_34302
MASPESMVELRRRQGLGHGQGPWGAGKGLGGFGALQRTQPWARHRCRDTGGWRSAARGLGGGATQLRRAIAHTQGQGRRNQGQGEVGYLKRGLSDLRTREIEGEGANRGASWVADVEAKLTGATDTTGTQQRPRNKHETTAYDGGASLVCARCEASVGALRVRE

SEQ ID NO: 77678 - protein, 63 aa, Zea mays
  Coding DNA Sequence Number=SeqID_34303
  Gene Ontology: Mol. function=protein binding; Cellular component =signal recognition particle, endoplasmic reticulum targeting; Biological process=SRP-dependent cotranslational protein targeting to membrane
  Homolog annotation: Hit_ID=O04438; Match level="QueryCoverage=77%, HitCoverage=47%, E-value=8e-21, Identity=95%"; Hit description =Signal recognition particle 9 kDa protein
  Pfam annotation: Domain name=SRP9; Domain location=2-63; Score=79.4; E_value=1.2e-20; Accession=PF05486.3; Description=Signal recognition particle 9 kDa protein (SRP9)
MVYVDSWDEFVERSVQLFRGDPNATRYVMKYRHCEGKLVLKVTDDREVLPCPSCIYSEQIRLA

SEQ ID NO: 77679 - protein, 121 aa, Zea mays
  Coding DNA Sequence Number=SeqID_34304
MDGSAAGNERDRLAAGRELGQRRPSGQELQPISDDRVEDQGEERRGAPSDKTTEELQRRERRASGEEVQRRSVLRNEAVRWTTVTATARGHINGLDRHGYQADVPCLSRGCGTRASRPQPD

SEQ ID NO: 77680 - protein, 102 aa, Zea mays
  Coding DNA Sequence Number=SeqID_34305
MVSAPPQLNLPPQELPLGPSLLWSEQPARRKDKETYGGNEATTPSGGTTMPHDDKGPPLPGLWQGHNTAFPQASQNVAATVALLDKLPKAETPSEWKTHQEI

SEQ ID NO: 77681 - protein, 478 aa, Zea mays
  Coding DNA Sequence Number=SeqID_34306
  Gene Ontology: Mol. function=sequence-specific DNA binding; Cellular component=microtubule associated complex; Biological process =microtubule-based movement
  Homolog annotation: Hit_ID=A2XSH7; Match level="QueryCoverage=92%, HitCoverage=75%, E-value=1e-88, Identity=41%"; Hit description =Putative uncharacterized protein
  Pfam annotation: Domain name=HHH; Domain location=389-418; Score =16.4; E_value=0.027; Accession=PF00633.14; Description=Helix-hairpin- helix motif
  Pfam annotation: Domain name=Kinesin; Domain location=3-161; Score= -138.5; E_value=4.3e-06; Accession=PF00225.14; Description=Kinesin motor domain
  Pfam module annotation: Pfam domain module=HHH::Kinesin; Domain location=389-418::3-161
MERIFDYAKPIRATVSVSSYHVLQDSHVFDLLDPKNNEVLVREDADGRTHLKGLSMNGKESSVSKMHFLELADHINDKQKSHGERFVQQNSKKSLYAVMDVVQALNSHQSFIPYRKSKITHILQDSLSKTGGALLIACLDEVSCQDAISTLSLASRSSQVVNEQRSETSTHSAKKTVNLVSASINLKHSGAKSILRESTTKIDILLTRNFFIPTTNSSKEDKKTFVTTAVRKHESDMQENHNGTKNIVVSSEMQVVPCSMKEIVSSDMKEEDHSSPGFLAENLFADLGFTCSSNAADKTTEENPATVLQSSPKISDQLRKISNSLKLLNSMAPSIVKQKTDIVRPQSFDLVEAEPKTPEVNLKLWHAQDAQESLKARSTGIKKSLAKECLLFLNSANKEQLKSLKGIGEKRANYILELREESPLKEIDDLKSIIGMSKREVDRQDDVKVDFGLGDERVRVVLISSHLGKEEKIAVESR

SEQ ID NO: 77682 - protein, 153 aa, Zea mays
  Coding DNA Sequence Number=SeqID_34307
MSGAPATSPRSLGSDRWSSVFWARLDVWWHTGHVTVGAKYSLLCWFTGQSGVHRTCPMNYSGANSQGWRVPEPLFLGAPDTVRCTLDSPVNYSGAPLDFPEGEEFSVKSPGAPDTVRWHTGQSGAPDQGTLRLSPALFVEPNSWSFYWLSVNL

SEQ ID NO: 77683 - protein, 81 aa, Zea mays
  Coding DNA Sequence Number=SeqID_34308
  Homolog annotation: Hit_ID=Q6I613; Match level="QueryCoverage=83%, HitCoverage=14%, E-value=5e-10, Identity=53%"; Hit description =Putative uncharacterized protein OJ1214_E03.6
MAASAPAAAAARESDLEAVGEPMSPAGRLFRETHFNCYIVAVIGLGAAVDVAAARAGLEVTLVRHPRFSSVQWCKKSSRGS

SEQ ID NO: 77684 - protein, 214 aa, Zea mays
  Coding DNA Sequence Number=SeqID_34309
MRKKHGSVPKLHTCLGLDSHNEQKHWHSKCHYKRNSGSVPAGMNNLEPAGRRTPGDPPATSAAAAMVPGWTQPPEGSHSRSRSRDANQLLKPKSGPLPSTPAGGASGRRSRRRFAFAIITVPKKGPGKGDTPKRILPREGTRLRASLLIRGSKAGPPEGFDSRLRSCGPYTHYWSEVRRPAPRKGSTAASGYSGSAPITDQGFEGWPPKGSQPP

SEQ ID NO: 77685 - protein, 18 aa, Zea mays
  Coding DNA Sequence Number=SeqID_34310
MEDADGSLFLAYGSDAYD

SEQ ID NO: 77686 - protein, 231 aa, Zea mays
  Coding DNA Sequence Number=SeqID_34311
  Homolog annotation: Hit_ID=A2Y7A7; Match level="QueryCoverage=98%, HitCoverage=58%, E-value=1e-51, Identity=48%"; Hit description =Putative uncharacterized protein
  Subcellular localization annotation: CTP_CleavageSite=49; ConfidenceScore=5.50e-01
MVLEVGTAVGIRTTSTWAAGPAARRRSRGQVVSFALAPASSRRVRHRCRAMQQHEEEQERPPTVRAVTIPFADLRVIFPGVECCRLGREGMIANLPEEVKKQLEDPDSRYNFGWSHGKEKLESGKLDTFKGSFYANPVLDVPTTDDVLVSRYPSYCRPNIWPNDNLPELEIAFKDLGKLMMEVGLMLAHHCDRYVMRQGVGSYDGDSLEQTIARSRCHKGRLLYYFPRQFR

SEQ ID NO: 77687 - protein, 1055 aa, Zea mays
  Coding DNA Sequence Number=SeqID_34312
  Gene Ontology: Mol. function=nucleotide binding; Cellular component =cytoskeleton; Biological process=cell division
  Homolog annotation: Hit_ID=Q6I614; Match level="QueryCoverage=50%, HitCoverage=92%, E-value=0.0, Identity=87%"; Hit description =Putative dynamin
  Pfam annotation: Domain name=Dynamin_M; Domain location=776-1055; Score=332.4; E_value=8.3e-97; Accession=PF01031.11; Description =Dynamin central region
  Pfam annotation: Domain name=Dynamin_N; Domain location=597-767; Score=270.8; E_value=2.8e-78; Accession=PF00350.14; Description =Dynamin family
  Pfam annotation: Domain name=MMR_HSR1; Domain location=571-768; Score= -11.5; E_value=0.012; Accession=PF01926.14; Description=GTPase of unknown function
  Pfam module annotation: Pfam domain module=Dynamin_M::Dynamin_N::MMR _HSR1; Domain location=776-1055::597-767::571-768
MERCSSTMASSEDSNSGSRSGARSAGGGAGGRASACLWPAAPTLGEGGGAVHDDGELGRGGGENCRDGTSASSPFPPDTTLPLPLLGSDALGSRRRTPWHQRPRCLEQCREEEREKRQERSRHEADDRSGEGSSEDEREREQGEGGEAEGPAVEKEEKQKDRRSYEQSGSCKPPTACQYSGGMPVGAQDEDSYRWNAPDILCYRCDSCRAGVMEQVRQDWHKIFVLDVAVLAALVCICSCGCCAFRNARHSRSQYPYGDRSGSITSASSPFPPDTTLHLPLLGSDALRSRRRTLRSSLHLIPFPCSPSHDVRRCEDRPWHQRPRCLEQCREEEREKRQERSRHEADDRSGEGSSEDEREREQEKEEKQKDRRSGGMPVGAQDEDSYRWNAPDILCYRCDSCRAGVMEQVRQDWHKIFVLDVAVLAALVCICSCGCCAFRNARHSRSQYPYGVNQTSKINPRWDYWPQLETNDRRLDAAGRSASPRSPASLLPAPRLDLDSPAASRDPARSRPPCAAAMDNLITLVNKLQRACTALGDHGEESALPTLWDSLPAIAVVGGQVPFFPSRARFFALVLIGSGAVAPASWVWISRVAGGTARSSGKSSVLESVVGKDFLPRGSGIVTRRPLVLQLHRIDGDREYAEFMHLPRKRFTDFAAVRKEIADETDRETGRSKQISTVPIHLSIFSPHVVNLTLIDLPGLTKVAVDGQPESIVHDIENMVRSYIEKPNCIILAVSPANQDLATSDAIKISREVDPKGERTFGVLTKIDLMDKGTDAVDILEGRSYRLQTPWVGVVNRSQQDINKNVDMIAARRREREYFASTPEYKHMASRMGSEYLGKMLSKHLEQVIKSRIPGIQSLITKTIAELETELNRLGKPIANDAGGKLYTIMEICRMFDGIYKEHLDGVRPGGEKVYHVFDNQFPVAIKRLQFDKQLSMENVRKLITEADGYQPHLIAPEQGYRRLIESCLISIRGPAEAAVDAVHAILKDLVRKAINETHELKQFPTLRVEVGNAAFESLDRMRDESKKNTLKLVDMECSYLTVDFFRKLPQDVEK

SEQ ID NO: 77688 - protein, 32 aa, Zea mays
  Coding DNA Sequence Number=SeqID_34313
MATGAEYSRKRYFVLEDAALRCFKSAPSSKGE

SEQ ID NO: 77689 - protein, 89 aa, Zea mays
  Coding DNA Sequence Number=SeqID_34314
MATGTEYSRKRYFVLEDAALRCFKSAPSSKGEYLMVKPRNNLRTVQYGQQLQQGEKDRHQVLKDFSKLLDDQVTSPSTAAAMLGLWMRE

SEQ ID NO: 77690 - protein, 49 aa, Zea mays
  Coding DNA Sequence Number=SeqID_34315
MAERARSAAAWLCIAENTFQRKTISNSLPISITISKLYYVNSVLYNVKR

SEQ ID NO: 77691 - protein, 72 aa, Zea mays
  Coding DNA Sequence Number=SeqID_34316
MAHSAAEGTPRRGGTGEDAGQGEEDGAVPNFPVRQDGRGEDGGDARRGTLKAPNSQLVTPISIKLQRPDGCD

SEQ ID NO: 77692 - protein, 57 aa, Zea mays
  Coding DNA Sequence Number=SeqID_34317
  Gene Ontology: Mol. function=RNA-directed DNA polymerase activity; Biological process=RNA-dependent DNA replication
  Homolog annotation: Hit_ID=Q7XBD9; Match level="QueryCoverage=64%, HitCoverage=2%, E-value=1e-08, Identity=81%"; Hit description =Putative gag-pol
MSQWSGGKSQQNDTRSTQKKEAVQPTDLIFGGPRLTFENIAEAEATRLEDIDVLEEE

SEQ ID NO: 77693 - protein, 54 aa, Zea mays
  Coding DNA Sequence Number=SeqID_34318
MGRPRHGPSSSDAWDEGEAGEGIERRVASSPSPQHSATVYRVWKFLHSGSCVSV

SEQ ID NO: 77694 - protein, 103 aa, Zea mays
  Coding DNA Sequence Number=SeqID_34319
MAGGNLERQGQPKGTNEALAYQDVAGGSTGGGAKAIQAMEPDTRQLTAPAAGWLRVAEVRLLRKAGEHPSPPNAGGRSGSPAHAEGRTPTRLAFRPSEDDEHP

SEQ ID NO: 77695 - protein, 313 aa, Zea mays
  Coding DNA Sequence Number=SeqID_34320
MTTGGRLQPGYMMKILEVERWQKSVNPHKVALLQQQQEEDKIGSATAQEMKSENSPAVRPLEGAALTWIPPANTGAPHAEARKAEGRDECKRSETWLFPCSCPKRHGQGLPRCAPGFPSYDMGARSHASYKLARSAKKVNRRTGSVQPPCGYLPSHLRRNQRSRRRTAIRGACNRLVVIRPSTFTATSRQGGEPPHKERATAPRLCAPLASTDGPTSGMGGPGPHVIHPVRWFLCAEKSHHHSRQYRASSRPLQKAEEINFQNQCSDSRHPAHGPTKALSAEVTGQSAAGIGVEVGVTMGGPAVTASTGTQEQ

SEQ ID NO: 77696 - protein, 114 aa, Zea mays
  Coding DNA Sequence Number=SeqID_34321
MNTVGHRIPSHHHRWLDIARRRHGTVSLLPFEARPRPRAPPHIRPFSWTKLTPALILVITLSTCSLSTSLRVEHCECENRASGAGWRVAGEVSVVGADTTVAGHIRIGEITASH

SEQ ID NO: 77697 - protein, 128 aa, Zea mays
  Coding DNA Sequence Number=SeqID_34322
MAASMRAPLQRGPRPHPPTGGDNEAIKAKELEARWQVVLVVSPAEATTSATGLTSGGNHLSTDDSGQLCTGGLPATTAASPRAERSSPLSSYGGEDKTIQERGRHLRGGLFSKNPEPKGYDAISAVRL

SEQ ID NO: 77698 - protein, 120 aa, Zea mays
  Coding DNA Sequence Number=SeqID_34323
MWPDRPTLYSDCPASYADGLNGLSRVCTLLLALLEQEMFFSRQGFPCRRDDIAGGNFRAIFESAIEGPISTGLYEIVLSGVAKSMLTPFSDANHSTRTVAVLSAQGPKGPRPGAGLRFPA

SEQ ID NO: 77699 - protein, 109 aa, Zea mays
  Coding DNA Sequence Number=SeqID_34324
  Gene Ontology: Mol. function=nucleotide binding; Cellular component =Golgi apparatus; Biological process=small GTPase mediated signal transduction
  Homolog annotation: Hit_ID=Q5WMU2; Match level="QueryCoverage=78%, HitCoverage=40%, E-value=5e-31, Identity=81%"; Hit description =Putative uncharacterized protein OJ1116_F05.1
  Pfam annotation: Domain name=Ras; Domain location=1-63; Score=-94.4; E_value=0.031; Accession=PF00071.13; Description=Ras family
MASKDIVMAIAANKSDLVRLKNIDTQDAASYAESIATNLFVTSAKTGTGIDDVFSDIAKRLLEKRKNSADALSPPQPKKGILIVDDEPEKEPPPKGLFGITLQKPSCYL

SEQ ID NO: 77700 - protein, 81 aa, Zea mays
  Coding DNA Sequence Number=SeqID_34325
MAPCTWVRLSQLPEEPNPIVARWLWVRMNASSMFRHFLFVRFFTDFESSLGVLTKDRHVASIHAGVRVAVPRACLAYCSSY

SEQ ID NO: 77701 - protein, 166 aa, Zea mays
  Coding DNA Sequence Number=SeqID_34326
  Gene Ontology: Mol. function=amino acid binding; Biological process =metabolic process
  Homolog annotation: Hit_ID=A3ATA6; Match level="QueryCoverage=25%, HitCoverage=10%, E-value=4e-10, Identity=79%"; Hit description =Putative uncharacterized protein
MALSGMRGLLVFISDIRNCHNKEQEHLRVESGHHTSPIPSRRSPRKTIARHCVQRTNHLQKCPIACCRYGRKTTIIEGKEEQVELEVFNFTGVGGVALSMYNTDEVQVSPVSCFTISNPICAWASDDATVIKVDIVNSHDTLLAVVQVIADLNLIIWKAYFSSDGS

SEQ ID NO: 77702 - protein, 136 aa, Zea mays
  Coding DNA Sequence Number=SeqID_34327
MESWGSVVAPSMESWGWIGMVRRGRVDCGSEESGSTWWDSGSCLPWRAGARLSGCPRRSGLRSTSIGRKTLTTTRGWRTSRRRSSSPTTPRPHPLPRPAVPVAVGAGHEILTQAPRRAPAGALIIRPPRSVALHSS

SEQ ID NO: 77703 - protein, 58 aa, Zea mays
  Coding DNA Sequence Number=SeqID_34328
  Homolog annotation: Hit_ID=Q6DXS0; Match level="QueryCoverage=91%, HitCoverage=6%, E-value=5e-07, Identity=45%"; Hit description =Putative pentatricopeptide repeat protein
MGTLEAGDNRNHPDWNKIAEFLDDVARRMRQEGHDPKKKYALMGADDAVHDEALCGHN

SEQ ID NO: 77704 - protein, 119 aa, Zea mays
  Coding DNA Sequence Number=SeqID_34329
MSQSFGNPRSHSPGFRWRNTAGSSVIRDGGMWLESWLYSGIVTESALREVLMMLIAGGETVHGVDQADALRYPAGEVVVNLNLLEPEKIGQGTCSNQPLNQLPPLHQRQCRMVDLQDIV

SEQ ID NO: 77705 - protein, 259 aa, Zea mays
  Coding DNA Sequence Number=SeqID_34330
  Gene Ontology: Mol. function=protein serine/threonine kinase activity; Biological process=protein amino acid phosphorylation
  Homolog annotation: Hit_ID=A2XUJ2; Match level="QueryCoverage=23%, HitCoverage=6%, E-value=1e-12, Identity=65%"; Hit description =Putative uncharacterized protein
  Subcellular localization annotation: CTP_CleavageSite=27; ConfidenceScore=5.45e-01
VQIDNNFSGGIPQSISLVHTMYRFSTSLNELNGSLPNNLCISPAMSIINTSRNALSVTIPLYNQLSSHMPPSLITELPAVFLQRNPGLPDDNPPRCLLPGEDLLSSFPLLSLSQTLALDLAPLRSRTATLRLRSRPRAHCYRVGSSWGHHRSSGPLSRLQEGEGLVLPLPLLHPAPMSAGQGFLLVGSGPRIRWCWRPYACAVRASHRHRSVRRDVWTRDLEDLTHETHTHLMWIAAAKPYRNNPITKRLLGFFSDSFP

SEQ ID NO: 77706 - protein, 330 aa, Zea mays
  Coding DNA Sequence Number=SeqID_34331
MAALGRLSRLLSSTVHRSGGLVRVFSMLVEVVDVFDLYLPRDAHCYYIFGKHGPLKLSSTKVISIPEYFKEVYLLDRSHRNRLIEDIDDDFPFLIHDRVCKLLRSGLLSSYFSKTYGLSIPDTDFIKENLSVLPELDLLVFRSLNMSHSESEIDNCYKSFVKLFKALVGMYADYRVIYGPAFFPKLLISIMYCEVHRLLREQCPARGQGAAANAIMVTIEEKIFDFMKSCSTNALLISYSGAHGERAKKHIVVSEDGGDETLTSEVSDDTKDFKASNVSLKVRNFMGNKELSVEAKRTTAEGNVEIVPGDELTATLLDVVNTIQRTTGYY

SEQ ID NO: 77707 - protein, 260 aa, Zea mays
  Coding DNA Sequence Number=SeqID_34332
MVTIEEKIFDLIKSCSTNALLISYSGAHGERAKKHIVGSEDGSDETLIYEVSDDTKDLKASNVPLKVRNFMGNKELSDETKSTTAEGNVEIVPGDELTTTLLDAVNTIQRTTGYGFLSCYKRKICTFQTLALDLAPLRSRIMTLRLRSRPRAHCYGVRSSWGHQGRRTLRRGYRRVMGRARASTSSAPSGTDGGRSGLPAGGVGDPDSAGAFMSLRSGPRIRWCWRPDACAVRASHRRRSVRRDVWTRDLGRPHAWDTHI

SEQ ID NO: 77708 - protein, 130 aa, Zea mays
  Coding DNA Sequence Number=SeqID_34333
MAALGRLSRLLSSTVHRSGGLVRAFSMLAEVVDVADVSDLYLPRDAHCYYIFGKHELLKLSSTRVISITEYFKEVSLLDRAPRNRLVEDIDDNLPFLIHDRVRKLLRSRLLPLYFSKTCGLSIPDTDFIE

SEQ ID NO: 77709 - protein, 111 aa, Zea mays
  Coding DNA Sequence Number=SeqID_34334
MGWSPERAMYQLIDRRKGRRALRRGYRRVMGRARASTSSAPSDTDGGRSGSDSAGAFMSLGSGPRSGGVGGQMRARCAPAIGTGRCAATCGRVISEDLTHETHASDVDRDS

SEQ ID NO: 77710 - protein, 190 aa, Zea mays
  Coding DNA Sequence Number=SeqID_34335
MAARRAGRAVLSSLARSLGLRKPKGQAGSRAKNHHRTLSGVYKDQGEDSSNVPPGPDAGFKNAKRNGRSSNGSRTRNGSPANYSPRRINSAIGQVALLAGATGDAFAFAEITAPKKGPGKGDTPKGILPREGTRLRASLLIRGSKAGPPKGSTAASDRVGPTPTTGQRFEGRPPEGFHGRLRLLGLRAHY

SEQ ID NO: 77711 - protein, 227 aa, Zea mays
  Coding DNA Sequence Number=SeqID_34336
MDEEEDDTATIVVASASTVRRGADGSPVLGLGLRWWGAVVLSIPHWWSISIPGCLRRGPRATSTGSGSRGSEWRGGGDDVGGGAVEAKGGGEAERGRVGGGGAEFGGCVRPMGPTCRRRIDRTGPTVQRQNGRWQNMSEAERQTTIAYLISSRDYMEKLATPATFYFTNYVRVERVSLAVCVLERSLSTNIGSRVSPLSVYVRGIKEAITIEVVAPSIRKRVKKILD

SEQ ID NO: 77712 - protein, 197 aa, Zea mays
  Coding DNA Sequence Number=SeqID_34337
  Homolog annotation: Hit_ID=Q6JAD0; Match level="QueryCoverage=49%, HitCoverage=59%, E-value=3e-34, Identity=81%"; Hit description =Putative uncharacterized protein
MALGDGAEVANFVLPDELLAALPRDPYEQLDLARRITTLAVSGRVSGLERKVVRLRSEVTGKDRENAELRERVMLLDTALQETNARLGAALEDNVGRAVAVPGAGPAQSVRIWHMRPLGFLNLAIPLWCRLSSARSETRWRRRPRSWRETCPAPIPIAPKTDIRCHPNPNPRRRRSPIQQVALQSPSCFGEESSSGL

SEQ ID NO: 77713 - protein, 150 aa, Zea mays
  Coding DNA Sequence Number=SeqID_34338
MDWRKTGHIRLSELTTDKRGRDSRRKRAIGSDRIVTPSPRQWRLRGRGHADTDGARDRGTGRSKRGYLGSDGCGAPKKVASAVRSIHCPEIMMSSSDDRTTSMSFLKPLTECITKYRREVCKILEAACDYFLKSEANSHDSDEIVMASSP

SEQ ID NO: 77714 - protein, 167 aa, Zea mays
  Coding DNA Sequence Number=SeqID_34339
  Subcellular localization annotation: CTP_CleavageSite=32; ConfidenceScore=5.40e-01
MNLHRIRTRPQAQPERRVVSPRPPLPSTRFPRGARPSPAVAVHKTTTMERAGAPPARRPDVYRSFAAPPRRHGRPSNPRPPTCGVRMPTGVAFARAPCLPRRTWCRSRGARSGDRRRETSLAMSPAASAAETAVVVVVASVPSQQQSSHRAAAPSVPSSYAVWEKER

SEQ ID NO: 77715 - protein, 188 aa, Zea mays
  Coding DNA Sequence Number=SeqID_34340
  Homolog annotation: Hit_ID=A2YXE2; Match level="QueryCoverage=15%, HitCoverage=6%, E-value=8e-08, Identity=90%"; Hit description =Putative uncharacterized protein
MGFATVGALLVSAPASGPSDSGGAPRYVLMCINFVQLCEPKILPCTSTQDVKFIQFQLTVNVAALIINVVAAVSSGNVPLNAVQKYADVIIPRGGDNRVAVDLIVQHIRTKLGNGAWSWTFAIYRKAGYYPNRYKKIPVNYSKAEAPSCQLKPTNTFSKEMVPFFDLDCIQSDYRNKVSLEFSLQFDK

SEQ ID NO: 77716 - protein, 344 aa, Zea mays
  Coding DNA Sequence Number=SeqID_34341
  Homolog annotation: Hit_ID=Q6J9V9; Match level="QueryCoverage=18%, HitCoverage=33%, E-value=7e-07, Identity=44%"; Hit description =Putative uncharacterized protein
MEAQAHASCNRRAECFVHATAPPLAPLPCLLDCGTNTATRGDPAHDPAAPAWRDGQCGQKWAGSNGSGRRAGAAATSRSGRRFAFAIMTASKKGPGKGDTPKRILPREGTRLRASLLIRGSKAGPSEGFDRRLRSRGPYTHYWSEVRRPVPRKGSTAASGYSGSAPTTDQGFEGWPPKAHRRHHVRRPSRATWRFPPSSLRKGDAGAARTRAKPRKTANSAPPDPGLGLGLSPRRRRTPFRPTQGSDSGSAPEDDELRLARPQGSDYAPASADGLHLARPRDSDSTSATEDRLDLGFGGASTSPNLGRRPATSTGGAIITLPRADSGHGGQDRRPIWLAPPDRQ

SEQ ID NO: 77717 - protein, 17 aa, Zea mays
  Coding DNA Sequence Number=SeqID_34342
MENGGGGCGAEGILSVN

SEQ ID NO: 77718 - protein, 33 aa, Zea mays
  Coding DNA Sequence Number=SeqID_34343
MEPGGGTAVGAVESLLTSSCFRILFLPNVGVTA

SEQ ID NO: 77719 - protein, 219 aa, Zea mays
  Coding DNA Sequence Number=SeqID_34344
  Subcellular localization annotation: CTP_CleavageSite=96; ConfidenceScore=5.57e-01
MSSRSLMHRVFPPSKPPDGGYPPSFRLVVGRMQLRGSWHLSAIVRLQGFSSGSPAVPPPPRRRSPKTVTTSPWVGRSKPGCDLGPTLSFKDVHHPRWGGGRAEPELYLPRGFVGQPLLRRSRERALTGPAGGSDFDNVGLVDGGRRQPQRVELVGLAPGAPPGGGCRAVCTGGPPKMSRAARAAFVFWGGLAFAPVWRLRAEVGAPLVREDLSGDLPEG

SEQ ID NO: 77720 - protein, 174 aa, Zea mays
  Coding DNA Sequence Number=SeqID_34345
MAYRRRERSREGRGWLREVLAVTARESENGAETYPVYVHRRLGEVRRPWTGFSGEAKSDSLLEELHRGMHVHGLFRGSGVDGKGSAGRSKVAGDQAAAGTPFAGQTPVISGSGEVERAQRSTVDVYGGFIGAGNGAGSALARCRAHGGARGRALASSERVEHVALCFCSCSILC

SEQ ID NO: 77721 - protein, 83 aa, Zea mays
  Coding DNA Sequence Number=SeqID_34346
MGTYTGRRWGAGACGSHGEQQVTGLGIPAGVEPRVQGMEATIAGEERRWGGRRRKKTTQVPWLQRARDQGAAAMGRNGEWART

SEQ ID NO: 77722 - protein, 112 aa, Zea mays
  Coding DNA Sequence Number=SeqID_34347
MAYRRARYTCGGGRPKSGEGDPGLPVKFYRVQGLGKLHGLMVKLTEGLARLGRGWRELATAVEARKAWRAVARRARGKFPVISGLGKTCEHAGRDGRGSGLLYRHGVVHRRP

SEQ ID NO: 77723 - protein, 150 aa, Zea mays
  Coding DNA Sequence Number=SeqID_34348
  Subcellular localization annotation: CTP_CleavageSite=5; ConfidenceScore=5.27e-01
MTHRRSSMPECHAHAQGHDFSRPTTRPTSASLMPLKFLPPYVSMLQRFTPAPLWEMQPPTQWCEESSWRNAMSMTTTVAPFWWAAGMTYIGYSNACTALARDCPWSPSSPRSHPARRSISPSPSGRTTSMRSPGSDLLPPFYFDNAHPLI

SEQ ID NO: 77724 - protein, 91 aa, Zea mays
  Coding DNA Sequence Number=SeqID_34349
METISSASPVAGPGLGSTGWYGSGVPYYIAVEEDANAFVEARGQNPRSTSVLGSFVPRDASAKEGPPVGEKACARRLRVAGAWEREAGPRY

SEQ ID NO: 77725 - protein, 58 aa, Zea mays
  Coding DNA Sequence Number=SeqID_34350
MTYEPLGLWRTHDLLSLGLAQAIYRTRNTMSHAKTQATEAKGQHDTKEVSSDSSQASQ

SEQ ID NO: 77726 - protein, 348 aa, Zea mays
  Coding DNA Sequence Number=SeqID_34351
  Subcellular localization annotation: CTP_CleavageSite=72; ConfidenceScore=5.09e-01
MADTLGSRPFAHPRSSVHARARSPPVKLFKYSDPAEVHREARDRPRPDFRSSARRAWTKLSGPDSSPPTSISACARGPADSDHPRRRPAHRRDPRDLPYVLDHLTGATSPPMNSPTPASGGDTRFSSDFLSHDGFPSILWEVLNSAGYPTPPLYTVKLYEEHRVPCCRVRLTLEAHPLQPGWRSLNSKTIGFRADDTTEVVAMKTLTTLCGYHPLEMVMHPLGLFPAEKKDDPMWCNRVSHVKDVWAMYPDLVGRVERLSQRITTLEQHVKIRDNTIDVLENQLHDVQRELEEANDHLDMHHLEMEANEVESEGEEAPDELGPAPGANGTTSTMPPSPASSVASTAQG

SEQ ID NO: 77727 - protein, 80 aa, Zea mays
  Coding DNA Sequence Number=SeqID_34352
MAGGIELAGAKGKWLAGEGTSARWTSGAGAAVAVAEAPHLAERLAPVEHAFLLCACSLTSAECNHTSELILQILQHKKRV

SEQ ID NO: 77728 - protein, 501 aa, Zea mays
  Coding DNA Sequence Number=SeqID_34353
  Homolog annotation: Hit_ID=Q6YPE9; Match level="QueryCoverage=93%, HitCoverage=90%, E-value=2e-24, Identity=33%"; Hit description =Putative uncharacterized protein B1203H11.17
  Pfam annotation: Domain name=DUF247; Domain location=33-499; Score= -39.1; E_value=2.7e-08; Accession=PF03140.6; Description=Plant protein of unknown function
MNKEVRDAVYKFEADFEFSKMETMIHRFPAGAGLGDGLRTRYPHMVAPRFVAIGPYHHGEKRLAKMEGVKSAAAYYVCLRAELAPEMARQAVLAVADEARGKYYDYEHDDGSSDGGGGEEGGKACFAAMMFRDACFLLLYMDAYTRSYGDTEDDVVNKSMRRFLFANRESINSDIMLLENQLPWLVVQALLGAFPGDEVKTDMRRAVGTFVAAMGNSFRISEPCKLVRYEWDDERDPPAHLLALLRRHKTEKPPEAGDDGTHGNGNGNHNAETMRHPLITPPPPAATAAAGRRKDDDGDEENPRPRPQAAAKAPVSVSATSPADLEQIGIKLTPSWTASFSDMGLEKGRLFVSRLTLAPLSLSDARAACLVNMAALEVCCASRFGDRAGAAAVCSYLALLAFLMAGPEDVRRLRALGLLHGPRGDGDTLAFFSAAAEHLPSYGKRFALLMAEVQEYKRTRRVRTALYRWVHNHLATVVKVVSIIAMLVGLYQGLIFLTRNS

SEQ ID NO: 77729 - protein, 801 aa, Zea mays
  Coding DNA Sequence Number=SeqID_34354
  Gene Ontology: Mol. function=nucleotide binding; Cellular component =nucleus; Biological process=defense response
  Homolog annotation: Hit_ID=Q8H6U6; Match level="QueryCoverage=96%, HitCoverage=58%, E-value=1e-101, Identity=33%"; Hit description =Putative rp3 protein
  Pfam annotation: Domain name=LRR_1; Domain location=137-158; Score =6.2; E_value=22; Accession=PF00560.24; Description=Leucine Rich Repeat
  Pfam annotation: Domain name=LRR_1; Domain location=160-181; Score =7.0; E_value=16; Accession=PF00560.24; Description=Leucine Rich Repeat
  Pfam annotation: Domain name=LRR_1; Domain location=183-205; Score =7.7; E_value=11; Accession=PF00560.24; Description=Leucine Rich Repeat
  Pfam annotation: Domain name=LRR_1; Domain location=207-229; Score =3.4; E_value=73; Accession=PF00560.24; Description=Leucine Rich Repeat
  Pfam annotation: Domain name=LRR_1; Domain location=231-252; Score =12.0; E_value=1.8; Accession=PF00560.24; Description=Leucine Rich Repeat
  Pfam annotation: Domain name=LRR_1; Domain location=254-276; Score =9.0; E_value=6.6; Accession=PF00560.24; Description=Leucine Rich Repeat
  Pfam annotation: Domain name=LRR_1; Domain location=278-300; Score =9.6; E_value=5; Accession=PF00560.24; Description=Leucine Rich Repeat
  Pfam annotation: Domain name=LRR_1; Domain location=503-526; Score =3.0; E_value=86; Accession=PF00560.24; Description=Leucine Rich Repeat
  Pfam annotation: Domain name=LRR_1; Domain location=576-601; Score =8.6; E_value=7.8; Accession=PF00560.24; Description=Leucine Rich Repeat
  Pfam annotation: Domain name=LRR_1; Domain location=656-678; Score =5.6; E_value=29; Accession=PF00560.24; Description=Leucine Rich Repeat
  Pfam annotation: Domain name=LRR_1; Domain location=704-726; Score =4.7; E_value=42; Accession=PF00560.24; Description=Leucine Rich Repeat
  Pfam annotation: Domain name=LRR_1; Domain location=728-750; Score =4.6; E_value=43; Accession=PF00560.24; Description=Leucine Rich Repeat
  Pfam annotation: Domain name=LRR_1; Domain location=752-773; Score =11.3; E_value=2.5; Accession=PF00560.24; Description=Leucine Rich Repeat
  Pfam annotation: Domain name=LRR_1; Domain location=775-798; Score =7.6; E_value=12; Accession=PF00560.24; Description=Leucine Rich Repeat
  Pfam module annotation: Pfam domain module=LRR_1::LRR_1::LRR_1::LRR _1::LRR_1::LRR_1::LRR_1::LRR_1::LRR_1::LRR_1::LRR_1::LRR_1::LRR _1::LRR_1; Domain location=137-158::160-181::183-205::207-229::231 -252::254-276::278-300::...
  Pfam module annotation: Domain location=503-526::576-601::656 -678::704-726::728-750::752-773::775-798
MTRNGYKSGRPLETDVEENYYGRVTCKMHDLVHDLAHSILKDEILVTRFPERWERGTGTRNTEGTSLTESYRYFSLTKQSRIVPSKRPFGKARAIYVSNSDDTIFGSTMQNARHLRSITMESMFVATIPNAIFQAKHLKYLEISRLRCEVLPEAISNFWTLQALHLASSDLLDLPESFGKLTRLRTLNLSKSEKFKRLPDSIGDCQMMSTIDLCGCNSLTVLPDTIGRIERLRVLRLSYTKIERLPSNIITLRNLECLDLCTCQELVELPEGIGNLDRLQVLNLKGCKSLGGMPVGVGRLSRLQKLGLFVVGDSEKFAGISELANVPRISEELSIRGIPHGMDPDDAQMACLQQKTSLQSLDLEWMAHKACEVDLEWMAHEAGEANMDLERMAHDAGEVDLDLERMALEAGEVDLDSEWMPLEAGEVDTELEQAVLDGLEPPSQIKELKINGYSGSQHACWMQNQVSGRRGPQELVHFPFLRVVKLSDFPNLKHLDGLVELPCLEDLELRAMPCLESMSGGPFPSLSRLELDTLPSLGEVWLVAETTILPSGEGAGHNVHDTGTPGSGRQVRVGGRLSYLFIQDCPRLRLRPHMPSSLESLHLSESSEQLLQLPADQCLGSSSSYSNFSHLKKLGLWGMTGLGSGRRWELLQHMTALESLEINSSLVLRELPEGLRSLTCLQSLIVFACSDLLVLPEWIGELASLQQLCIWTCDVLSSLPQSLGQLTSLQMLSIEACYELHRLPERIGELCSLRKLRIRDCPRLACLPQMSGLTSLQELLISDCPGLTSLTAGDDERPRFP

SEQ ID NO: 77730 - protein, 240 aa, Zea mays
  Coding DNA Sequence Number=SeqID_34355
  Subcellular localization annotation: CTP_CleavageSite=33; ConfidenceScore=5.05e-01
MASSSAAYTSMFQLQALLDGVQCNLFIKIKFASCPAKKQRQAAALRPCGSAPRRDQAANSLQPAAGWDKTTGQPDKQISGAPERVAGAWSDGAWRIRGSERLEAWRLERRQERPAAERAVVRDAGCAAVRNVVTNPNLKLCGTPAVRLCGSAERRTLISILLVGQPKDDDTMHPVQTTVPTTGVRLTTVSHRLSRDRPRAQQEVPPRPTPASASEGIVATPDPGLGLNLSLGRRSSPRPT

SEQ ID NO: 77731 - protein, 37 aa, Zea mays
  Coding DNA Sequence Number=SeqID_34356
MAWERPQGPVGTRHTHTEQKQVKARRPSASMQYTAKT

SEQ ID NO: 77732 - protein, 157 aa, Zea mays
  Coding DNA Sequence Number=SeqID_34357
  Homolog annotation: Hit_ID=Q6QP51; Match level="QueryCoverage=41%, HitCoverage=28%, E-value=9e-20, Identity=75%"; Hit description =Putative growth-regulating factor 1
  Subcellular localization annotation: CTP_CleavageSite=56; ConfidenceScore=5.48e-01
MDTPRVGRPVALTLWHDTRHPWQASRRRFASVMMTASKRVRQPPQNTWAPSPLLIRGSKAGPSEGFDSRPRACRVRDDPRYIRYMAEARATILRDHLQGRTQRVVHMDNNTIHPVPTTVPTTGASVPASASGGIVTTPDPGLGLSLGLGRRSSPRPT

SEQ ID NO: 77733 - protein, 452 aa, Zea mays
  Coding DNA Sequence Number=SeqID_34358
  Gene Ontology: Mol. function=hydrolase activity; Cellular component =integral to membrane; Biological process=mRNA transport
  Homolog annotation: Hit_ID=Q2QYE1; Match level="QueryCoverage=92%, HitCoverage=93%, E-value=1e-151, Identity=61%"; Hit description =GDA1/CD39 family protein, expressed
  Pfam annotation: Domain name=GDA1_CD39; Domain location=54-452; Score= 393.6; E_value=3e-115; Accession=PF01150.8; Description=GDA1CD39 (nucleoside phosphatase) family
  Subcellular localization annotation: CTP_CleavageSite=43; ConfidenceScore=5.29e-01
MAHFVVGIAAALLLLQQLMASSSSYPSSAVLADSVLGRKAGIVVDEASSATESSPPGARTGRYAVIFDAGSTGTRVHVFRFDRKLELLEIGDDGIEVFAKVKPGLSSYAGHPQEAANSMLPLLDKAKSAVPKQLTKRTPLRLGVRNLIHTKSKFQYKPEWINVIEGSQEGSYLWVALNYLLDKLGGDYSQTVAVLDMGGGSVQMAYAVSANAAASAPAPTHGEDPYVTREYLKGKDYNIYTHSYLHYGAFASRAEILKAKDGPFSSCMLRGFIGQYTYNEEQYDATAAPEGAVYGKCREEIGRALNLNAPCEMKNCTFNGIWNGGGGAGQGSIYVASSFYFVASEVGIVDGNAPSGNTTPGAFGASAEKACQMSVEEAKIEYPNVNDVDVPYLCMDLAYQYTLLVDGFGVERTKEITVVDKVKHGEYYVEAAWPLGSAIEAVSSTKEWRQDK

SEQ ID NO: 77734 - protein, 149 aa, Zea mays
  Coding DNA Sequence Number=SeqID_34359
MADAMPLMAFITGRGNGEEKRTQSNTINDEDERTARVSVPGSYVALGAGLRGQVGLRCGCAGWGRERWGSRASGRARRGRRTGRASSASGASRWGGFDRPWRLGVQQRGREEERGKRWRLRLHQGRAAASTGKEKGREKREARVGPTHE

SEQ ID NO: 77735 - protein, 1706 aa, Zea mays
  Coding DNA Sequence Number=SeqID_34360
  Gene Ontology: Mol. function=phosphatidylinositol phosphate kinase activity; Cellular component=mitochondrion; Biological process =phosphatidylinositol metabolic process
  Homolog annotation: Hit_ID=Q6ZJN4; Match level="QueryCoverage=92%, HitCoverage=99%, E-value=0.0, Identity=63%"; Hit description =Phosphatidylinositol 3,5-kinase-like
  Pfam annotation: Domain name=Cpn60_TCP1; Domain location=138-652; Score=-238.1; E_value=0.00076; Accession=PF00118.15; Description=TCP- 1cpn60 chaperonin family
  Pfam annotation: Domain name=PIP5K; Domain location=1332-1563; Score =178.5; E_value=1.7e-50; Accession=PF01504.9; Description =Phosphatidylinositol-4-phosphate 5-Kinase
  Pfam annotation: Domain name=SpoVG; Domain location=1329-1408; Score=- 29.6; E_value=0.049; Accession=PF04026.3; Description=SpoVG
  Pfam module annotation: Pfam domain module=Cpn60_TCP1::PIP5K::SpoVG; Domain location=138-652::1332-1563::1329-1408
MSGQRHHHATSVKHIDMYGGLHPNRFPFAQHSRENAPEDNGYHRTPHGADHLEQSQAADTDNKHINHLSTDDNVPSSASGHKHGAISRHPSTSSVDDRSIKSGDDSDGAESTSGRSSNTEISFMNNDTIWIPPQAADKEDEAQSFATSIAYDDDDDDYSDGIKWGQSSFPSPGKQHDADTSNHREEREKAMLEAMNGQLKVLVSRFLASAGIPSSNEEGSDSWLDIVTSLSWEAALLIKPDGSMGKEMDPGSYIKVKCVASGTRRQSEVIKGLVFKKNTAHKHMPTNCHNPRLLLLKGVLGHSDIGLSSFSSMDQEKDLLERAIGKMMEICSPNVVLVEKTVSRNIQELLLKEGVTLILDMKLNRLQRIARCTGSPIISFSEVLDKPKLKQCDYFHIEKFIEEHNNASEGGKMPSKTLMFLEGFPRPLGCTILLKGANSEELKKVKQVMHFTVFAAYHLILETSFFEDQRVFLNDKSTPKEISVTATEGASPTAYDVAALSGAIPSFPSHGDPPALRLFHATSNSYADVNKPLTYPENGDAFSSVSSSSANDLEQGTSIRPNNAERLTSLVQGPLRKLFTDMLRHQNIYLPVTSLQEANDISKEVRAESSQETVINGFHRPEIEESVVSIENGDSINDAQKQEIAQAIMPRGSSANDKDAESSVMGDNGAHSTSIIIKEKYVDDDQADDALDSHSILILMSSQCPEKQVICEQSHLTRIKYYGSFDVSLGRYLQDILQNQKLSCSSCGEPPESHMYSYTHRNGNLTVLVKHLVPQHHLPGESEGKVWMWTRCSRCDHEHGVSKPTPRVLISAEARNLSFGKFLELSFSSHSAARRLGSKVAMFRYSSVEIYTTCKPQPTLQFVNPIRQDWFEGQRRNVHAKGMALFSGVARFLQNLKNEHPDAITLAIHCGLAFPVKDFTELEELLIKEKAQFESSVDKATDQNGVPTSSVHELLNINWYYQDLLLELYIWDRRLHQLFYCKSVKLESVSNYKNLADTVDGICGDKFGVDKKIDEFTYDETTAALGVASTTEPASNKLDHQSGDAAASLLDESQEAGHSEIPCNGGSKAEKSSIAHGQIKVDGTTKTGNDPCFEISNDKKVQVNLTVADPISMEQERCSTLQQFKYPYWDDRERWIWNSISESQLAYRNDIQIGYLEKFELINNYLPHYLPPLFEQHDDADSPHFAVGPGGNILCIMEDEISSIIARALAISDERRHLIDLKFENGMDYSKGEHAKAMEKSYSFLSENSFTSSPWSSTDSEASLSSLSSFSSFSSDDFSGYDSSSLLSSMHPEMTVNGKITLKGKYSVTVVYDNQFFALRKKCCPSELAYITSLSRCKKWNAQGGKSKAYFAKTTDDRFIIKQIKKTEFDSFIKFAPDYFRHVYHSLDTGSQTCLAKILGIYQVKQIRHGKEVKIDLMVMENLLFGHNISRIYDLKGVTFSRRVTDSNDHDTVYLDQNYVEDMGFSPIYIGGRTKHLLQRAIWNDTSFLTSVNVMDYSLLVGVDKEKHELVFGIIDYLRQYTWDKQLETWVKTSLVVPKNVSPTVISPKEYKKRFRKFMAKYFLSVPDTWSSDNSSNPCKSFGQSNHKLAEVHNGDSLLQHPNEAEGCTWTIYEQPNKPLRGRRPLCPFKEEVGFGELMKLSFSHQRQGPNPKYGIWIALLLTIIPLASGPARQINQFGIATFACSASLHPIEVQRMILAQMTSTE

SEQ ID NO: 77736 - protein, 152 aa, Zea mays
  Coding DNA Sequence Number=SeqID_34361
MNVWLQYQITLLQYGSRLETYLLSCRGFPELLQPPSDSVSHGCSVAGSACLLQAGAHSALLGHWGLTAVGLPSSGIASPNGLALHNGNMLCFHPELVLLDCSHWLLGWEDEVPADSASRTDLLLTDCSGDSAAGAEGTAFETAAVEVGIGSI

SEQ ID NO: 77737 - protein, 558 aa, Zea mays
  Coding DNA Sequence Number=SeqID_34362
  Gene Ontology: Mol. function=metal ion binding; Cellular component =nucleus; Biological process=regulation of transcription, DNA -dependent
  Homolog annotation: Hit_ID=A2YQE4; Match level="QueryCoverage=84%, HitCoverage=44%, E-value=1e-122, Identity=46%"; Hit description =Putative uncharacterized protein
  Pfam annotation: Domain name=C1_1; Domain location=298-345; Score= -0.8; E_value=0.034; Accession=PF00130.13; Description=Phorbol estersdiacylglycerol binding
  Pfam annotation: Domain name=PHD; Domain location=307-355; Score =38.6; E_value=2.3e-08; Accession=PF00628.20; Description=PHD-finger
  Pfam annotation: Domain name=PHD; Domain location=419-475; Score =17.3; E_value=0.00012; Accession=PF00628.20; Description=PHD-finger
  Pfam annotation: Domain name=PHD; Domain location=476-521; Score =49.2; E_value=1.4e-11; Accession=PF00628.20; Description=PHD-finger
  Pfam module annotation: Pfam domain module=C1_1::PHD::PHD::PHD; Domain location=298-345::307-355::419-475::476-521
  Subcellular localization annotation: CTP_CleavageSite=61; ConfidenceScore=5.05e-01
MASDGAPRGRRPKRPASGGLVQPDVLTYKRRRRGTGANAGHSAVTSGPDPDPVKNQMSAVVHATNSQQGGRQTLDRHWRSWRDTLEGVLRSTAVNQSAGGIQNCIRDALRYNGWHPTEHGNLVDDRGTDEEDATGALHSEESSGALVKLEDGTVASLEANKAMCHDTLFDILISEKFAMLCDLLAATFHGSKPDDVIGLQIIDAKMRNGDYAQNPALFDHDIKQIWKKFEHVGQEMAGLASSLLLISQASNQKQASDISEIDVAEHKIEETSLVGVTRKALRKFTPPCDSGYSTIPRRTGTSGSDGICKDCGRKADSKGRIICDRCEAAYHVSCLKLAIDEEAPAKWYCPTCVEPDVPLKSNNHGRAHEGCDVCEWLEVEKPEEPAEEPELAVKTQESSVSSIVEDSEPDLSITALANLCKLCGTCEDENKKFVVCGHGYCSFKFYHALCLKESQIASEKQRNLKCWYCPSCLCRRCFKNKDDEKIVLCDGCDEAYHTYCMDPPRSSVPRGKWFCTPCSAWRSANGMQRYEKSILQSVKRVPDAKGPKVQAAAAAPGK

SEQ ID NO: 77738 - protein, 152 aa, Zea mays
  Coding DNA Sequence Number=SeqID_34363
  Subcellular localization annotation: CTP_CleavageSite=47; ConfidenceScore=5.04e-01
MSLPSAVAKALGKGTGKGAHWRVLCRVPVHQTLGKETSFAECLLGLSAQRLAVGSTRPVFAECRRWHSVKDPSPSLGAVTVTFLCRVPNGTRQSLCRVPDKKYSAKKLLPITHGKEADSGSASPGCQHCNHCSGEDEAVKRDFQEFQDYDEF

SEQ ID NO: 77739 - protein, 88 aa, Zea mays
  Coding DNA Sequence Number=SeqID_34364
  Subcellular localization annotation: CTP_CleavageSite=40; ConfidenceScore=5.53e-01
MSLISWSNSSSWSVGLVAFLFWLRASWRERVSWFGSSGCSAAAPVAEAFFGGMTKVSACRRWPKRVHRRFNELRTKVKNSTITKVESS

SEQ ID NO: 77740 - protein, 174 aa, Zea mays
  Coding DNA Sequence Number=SeqID_34365
  Homolog annotation: Hit_ID=Q6I5Z9; Match level="QueryCoverage=85%, HitCoverage=42%, E-value=2e-33, Identity=46%"; Hit description =Putative uncharacterized protein OJ1214_E03.20
GELMQLQLFLFLYWSELKGKVTTGLALVLSPYGGTPVASDIFREGLIPEKDTRRIMELMGLGARLTHVKTKDCITKHKLPVGELFKGLHRCVGSHGGHGLTALHLRLHYGERSTGLVTRRDAEVPGLVVVRPERRLDHAWMVYPTLKMCSDEADASEMVWVSQRTVNTDKFVVV

SEQ ID NO: 77741 - protein, 161 aa, Zea mays
  Coding DNA Sequence Number=SeqID_34366
MGKSKKGGSSSHHSGDKRKREPTPPSEDFDDSEYSEEEFSSESEGSPVHASPPASSDDSDDSQGIAAEVWTYIRAVERAGLKGSDESEYSSDSSEEGGGGDGGDGNDDRGDGDGGGDGGEGDDKGGDGGDKGGSGDGSDGSKGSSRGSNKGSSKGSNKASG

SEQ ID NO: 77742 - protein, 47 aa, Zea mays
  Coding DNA Sequence Number=SeqID_34367
MGKPVPSLLMLLLCRVTALVPTIAGMGDHVSSRVRRAICGQVHSGWV

SEQ ID NO: 77743 - protein, 28 aa, Zea mays
  Coding DNA Sequence Number=SeqID_34368
MGDHVSGRVRRAICGQVNSGCGSCGLKD

SEQ ID NO: 77744 - protein, 25 aa, Zea mays
  Coding DNA Sequence Number=SeqID_34369
MAPSHGLGGVASAQFSPGNYLRYKN

SEQ ID NO: 77745 - protein, 55 aa, Zea mays
  Coding DNA Sequence Number=SeqID_34370
  Subcellular localization annotation: CTP_CleavageSite=30; ConfidenceScore=5.16e-01
MAPSHGLGGAASAQFSPGNYLSSEDTSHLKSKSVPGISSPRQVVPLITSFYPAMF

SEQ ID NO: 77746 - protein, 101 aa, Zea mays
  Coding DNA Sequence Number=SeqID_34371
MSKKWSNQDLGTSTSRVIDDNPIKGLTSVLSVEQVINAKLTGFNTKTTDQAKDGGKKSFEVPSARDKVKETRNPKPGVKKKTCKVKDDRVKKSYGASRITT

SEQ ID NO: 77747 - protein, 673 aa, Zea mays
  Coding DNA Sequence Number=SeqID_34372
MPSHGGKLVRSPVFALDLQSRDLVAFVREVEDGAVRIVGRYVPRTEGQRSWDIRGSNDHLNRVFELNRLPYGGYPGQDDVDRRGKKPVVESGDDPAPAATPSSKKRKLGTAMGGLGVSDGFARELMGTCAAPGERMSSPELRESSARMLRVTGARPKRQRGAAKATAPGGSQPPLAAKSAVPASSRAPEAAADAGGTKSAKAAPTSGRVPEATKAARGLPPGKRVADFATDISVEDYLVGSDEGQLIVVSPAAATTVAAVVPKAKGGALSAGGEMPTLSAVRDEAGAVARRLGEMKEALNQVADFAGRAASGALTAVVSAKGEKTDLRCQLAEERREANEALAKAQAAQAEANLARVEGGLARERAEQLEERLRALQSRVERAEAATRTEAERTRKQLMDSYHELGARTAEFEVPDREPGLRCLEWVQEELQALPTIVEGFMSYASLVTYEGAMNALSREGCRHYEVFDQADEDFERDIYKVEDSVVKESAGALYDRMWGPHGREVVRERAKTARGQVQDFGPAHATATTNFLAASTVDDGNKSDGSISKFSDFGDSGSSVEWTEESSDGDLDYFAALDVAAAEASPCAADVEDVPGPSTGRRRRRAVAKRRVSGADGGRLRVNRAGRQELLSLPAAVGTGEGELRSLFAGEELRMMLFNYREMGIIPKVEPM

SEQ ID NO: 77748 - protein, 266 aa, Zea mays
  Coding DNA Sequence Number=SeqID_34373
  Homolog annotation: Hit_ID=O48967; Match level="QueryCoverage=46%, HitCoverage=23%, E-value=3e-09, Identity=34%"; Hit description =Putative uncharacterized protein
MEESSQTQLCEIQTPNHPSSPVGQAKLTRKELKARGACFYCKNEERIIREYPKKRLDRLEKKAAKKDPNNNPEDQPVIRSGPLTTRSQDSRTKNTQALTKARRGSGANTCPDHTAYASAPRSGGDPMLLRGRLLVTRYARAVAYTVLILTRTLPGMLPLHANATQTADIRAHGDCTAAYNCVDIPDSVEGCSGGIVCGQGVAAPPSKLHGLTGVMKQWHDDVDQLLGMAHSGLTRSRSRSSRRKHEATTSVRSPSVRGAQTDDLRA

SEQ ID NO: 77749 - protein, 870 aa, Zea mays
  Coding DNA Sequence Number=SeqID_34374
  Gene Ontology: Mol. function=glutathione gamma-glutamylcysteinyltransf erase activity; Cellular component=membrane; Biological process =phytochelatin biosynthetic process
  Homolog annotation: Hit_ID=Q8GZS7; Match level="QueryCoverage=12%, HitCoverage=23%, E-value=8e-36, Identity=64%"; Hit description =Phytochelatins synthase
  Pfam annotation: Domain name=DUF1984; Domain location=729-803; Score =87.2; E_value=5.4e-23; Accession=PF09328.1; Description=Domain of unknown function (DUF1984)
  Pfam annotation: Domain name=Phytochelatin; Domain location=628-728; Score=-6.2; E_value=9.5e-06; Accession=PF05023.5; Description =Phytochelatin synthase
  Pfam module annotation: Pfam domain module=DUF1984::Phytochelatin; Domain location=729-803::628-728
  Subcellular localization annotation: CTP_CleavageSite=5; ConfidenceScore=5.32e-01
MGHSRSAATTALTACAIDCAPNNKQLASSLWSSTSDALTTRRHQTTEYKYQFTETPSSSRLPSVFLAPISDLLSSTFCGANNMVSEGPILVENDFATLLAELAACEKRLTASIEGALARCSAQCPNTFGGFTATATPVPALANDEAVFDAWPIFDEESIFDGEPLFDEEPNDHIIDYVDVFSSWYDVSFHGNGSVQSLQLERLCLAGRTPDPGRDQDGPPPVKRGTILHARAAAGGAVLRRATARHAQPRGRVYPHRQDAAELPHQQRHRLRHQPRLLQIQVSPRRAPRRDRMAESARADGLVVNTFEEMEAVIQMFDIRASLPSLESPWSQYTRRDGFGHPNAYGATSILVIVKCVLHEPALGGYDGSLDDDPKSGVTYNDDSGADYIFINTGTGCVEEDDATPSATLDPLRTVTNTTTDVLDEDTSGDAAHSTSASTVGVATSQDVETQLHANLEPFTPRSHPLLQDASATSNSPTKCSTYRLSHDIVLWRTISAAPMFTLVSSTPSVEVEVANISLTSEDRALQRRLLKFFAARHGWRRTGGRDHIGLEHHPSGMLDARYMFWPCVFMLCNFGRLPSSVKLPLRVHVLFTHIQKMMTGDSVVMAETGDSWFSCHKLKLPEGYGYEFQMQYGLIGWSMGALLGYAQGANHKLFSPVTALHPLVVVCCDHGSIMDDAAGFSDELVVTSMGVDCHIIASYHMWPFGQTGTGHFSPIGGYHVRHDMVLILYVARFIPLHFLWKARNTTNDSTGLLRGSMLISRKVAKSSLLYTVSCRDENWKSMSKFCVEDLPSILKAGIGAGVGLVTSGLSAVSSGQGIFSVFVWDPGDSGLVTSSLSAVSSDQDNFSVFVWDPGDRGLVTYGLRVVSIA

SEQ ID NO: 77750 - protein, 130 aa, Zea mays
  Coding DNA Sequence Number=SeqID_34375
  Homolog annotation: Hit_ID=A3A0D2; Match level="QueryCoverage=43%, HitCoverage=26%, E-value=1e-10, Identity=56%"; Hit description =Putative uncharacterized protein
  Subcellular localization annotation: CTP_CleavageSite=49; ConfidenceScore=5.22e-01
MSSTLTPPAPPALLVPVAYAAVGAPVEAAGRGSSSYGPVIAMLAVVAVLAAAAVAVGRLCFGRRAHGGARDLEAWVERTCGPCVGATVLAQATDEGGGGAVAGAGAGAAAATEPGGAPEGTDDGDGARRQ

SEQ ID NO: 77751 - protein, 114 aa, Zea mays
  Coding DNA Sequence Number=SeqID_34376
MDRRPPARRRPGDPHRRGAAMHGAVEQQKQHRGRRPQGTVPPPPAGYFTAELLLAFVFVAVSLAFLPLVLPPLSPPPFLLLLVPVGLLAVLLALAFVPLDAHSHLVVVGSGSSR

SEQ ID NO: 77752 - protein, 493 aa, Zea mays
  Coding DNA Sequence Number=SeqID_34377
  Gene Ontology: Mol. function=protein serine/threonine kinase activity; Cellular component=cytosol; Biological process=protein amino acid phosphorylation
  Homolog annotation: Hit_ID=A9PGJ5; Match level="QueryCoverage=100%, HitCoverage=100%, E-value=1e-164, Identity=61%"; Hit description =Putative uncharacterized protein
  Pfam annotation: Domain name=APH; Domain location=95-301; Score=-8.9; E_value=0.027; Accession=PF01636.14; Description=Phosphotransferase enzyme family
  Pfam annotation: Domain name=Kdo; Domain location=81-271; Score= -69.5; E_value=0.0048; Accession=PF06293.5; Description =Lipopolysaccharide kinase (Kdo)
  Pfam annotation: Domain name=RIO1; Domain location=106-286; Score =251.3; E_value=2.1e-72; Accession=PF01163.13; Description=RIO1 family
  Pfam annotation: Domain name=Rio2_N; Domain location=8-89; Score =182.8; E_value=8.9e-52; Accession=PF09202.2; Description=Rio2, N -terminal
  Pfam module annotation: Pfam domain module=APH::Kdo::RIO1::Rio2_N; Domain location=95-301::81-271::106-286::8-89
MKLDVNALRYLAKDDFRVLTAVEMGMRNHEIVPVELIDRIARLKHGGTYKVLRNLLRNKLVHHGATKYDGYRLTYLGYDFLAIKTLVNRGVFASVGRQIGVGKESDIFEVATDDGTVLAMKLHRLGRTSFRAVKSKRDYLRHRRSFNWLYLSRLAALKEFAFMKALGDHGFPVPTAVDCNRHCVIMSLVQGYPLVQVKKLQNPDDVFDSILGLIVRLAEHGLIHCDFNEFNIMIDDDEKITVIDFPQMVSVSHRNAQMFFDRDIECIYKFFNKRFNLRSVKNEEQAGSENDDEGNSRPSFLSVEKGAGSLDKELAASGFTRKEKVDMDKVVFRLSSQVPFFWQTFLQYIEEVVEGHDSSSDDDNDEDSSDEPDCDLTPSDSDAPGTFSEEHGTSCSGENRLEIPPSDGNGVVMAPLESGIKTFSMEDDDNDDGSSEDADEEEDAELTKQLNKQRRKAIAAAHGRRRPTSSRNAYKDKGKGTMNSKMQRQACNW

SEQ ID NO: 77753 - protein, 262 aa, Zea mays
  Coding DNA Sequence Number=SeqID_34378
MFYASTTDQAKDGGKKSFEVPSAQEKVKETRNPKPGVKKKTCKVKDDRVKEELWCIKDHYIRTWLTTNESPTLTSNIPSVKEMQIKSKAIVEVQGNLRQELLFRCNLLEGSFIPLQSNLRVERHPDPVLGHRELSIGIRARPLQCGLSRPEMTMSSQEGEENRLQPNDESTSPIGLSSISYKFLIANNDSGHESDDEEEYEDDSEDESSSPQGTFSCIASTDNNDRENETDDVEEEEIRPFYTHLNKEDKVLLVKLLRRNKE

SEQ ID NO: 77754 - protein, 151 aa, Zea mays
  Coding DNA Sequence Number=SeqID_34379
MDWAPGEQTEGGSEGAWGRRVTARAGSSAGGDGPHLGTRDERLGEQGGWSSAMGTGAGRRAEGSRSAAGGRTRRAARRGIPGERESRERGGREAGRGLQRSAEDREEDAQIFPQKRSRWRRHKNDAHARKNQQRAVERMRSAVAEKNRRMG

SEQ ID NO: 77755 - protein, 389 aa, Zea mays
  Coding DNA Sequence Number=SeqID_34380
MKARVAQRHHVGFRPLAYAAHSMPRGSIGAPPERGAGVSQMEVRCQTSFCQNEDGFPKLLRACTVRLGIRSQPEYDGREFVEHETEKCVVTVYIGSSPHHVEWSVTAAGHRFKDTCQVVALKALRALCQIYEEEVVDTPLRFFPPFQRDRPAWMARMRALEEQQLLEDDPTVVYLTAYLLTLDAQYDFLARHHRQMIARAEDAEKRNRQLHVDLTTAQARATALESREVIAVEALKQAKDEHVQKLMEAYLVTVTPQLVEFSLQPRSGSLPLGAQPLFPWRSTTLPVRPAARLWCPDVVRLLQQSFLRAQSLSSPKRPRFLPLSARQAPNPWPTVPARCSPAELPCWPLSGACVELPAVAQLAGVRPAPYAPSTVRREVPARKLSVGRA

SEQ ID NO: 77756 - protein, 94 aa, Zea mays
  Coding DNA Sequence Number=SeqID_34381
MEGLIPFIYKAIKERRGPELQLLLLAQKQWESAAGGKAPAGAAAEREIAQAHRRHRSLDELAGEVGASPGWRRRHPGAPLRARSVRIFSCIGGV

SEQ ID NO: 77757 - protein, 106 aa, Zea mays
  Coding DNA Sequence Number=SeqID_34382
MSIIARGRMMRRAGENKGVGDGTLGQSGHIDTSVWRVGSRRGDELTSDEETKSDDSFATILTNSELYHTKPQLSERSCHLVKASSASLRLTVEPEASSASSHPFTG

SEQ ID NO: 77758 - protein, 499 aa, Zea mays
  Coding DNA Sequence Number=SeqID_34383
  Gene Ontology: Mol. function=DNA binding; Cellular component =extrachromosomal circular DNA; Biological process=DNA recombination
  Homolog annotation: Hit_ID=P0A0C5; Match level="QueryCoverage=78%, HitCoverage=94%, E-value=0.0, Identity=92%"; Hit description=Plasmid recombination enzyme type 2
  Pfam annotation: Domain name=Mob_Pre; Domain location=1-175; Score =301.6; E_value=1.5e-87; Accession=PF01076.10; Description=Plasmid recombination enzyme
  Pfam annotation: Domain name=Rep_1; Domain location=307-497; Score =184.3; E_value=3.1e-52; Accession=PF01446.8; Description=Replication protein
  Pfam module annotation: Pfam domain module=Mob_Pre::Rep_1; Domain location=1-175::307-497
MQFHNQRERKSRTNDDIDHERTRENYDLKNDKNIDYNERVKEIIESQKTGTRKTRKDAVLVNELLVTSDRDFFEQLDPGEQKRFFEESYKLFSERYGKQNIAYATVHNDEQTPHMHLGVVPMRDGKLQGKNVFNRQELLWLQDKFPEHMKKQGFELKRGERGSDRKHIETAKFKKQTLEKEIDFLEKNLAVKKDEWTAYSDKVKSDLEVPAKRHMKSVEVPTGEKSMFGLGKEIMKTEKKPTKNVVISERDYKNLVTAARDNDRLKQHVRNLMSTDMAREYKKLSKEHGQVKEKYSGLVERFNENVNDYNELLEENKSLKSKISDLKRDVSLIYESTKEFLKERTDGLKAFKNVFKGFVDKNTENYVNQKQWIQFWKKAMKLDYDPNVKVQMIRPKNKYKSDIQSAIDETAKYPVKDTDFMTDDEEKNLKRLSDLEEGLHRKRLISYGGLLKEIHKKLNLDDTEEGDLIHTDDDEKADEDGFSIIAMWNWERKNYFIKE

SEQ ID NO: 77759 - protein, 266 aa, Zea mays
  Coding DNA Sequence Number=SeqID_34384
MVDLTLSNTVDFPNTGIKNVVLGSVVDLALGGTVDFSNEDIMDLALGSVAHPNGPRIAYPVATKLRLDRPRGLISSPFAQSLPDRRPCSTATLPDRRPCPSAAGEAAPAPAPARAAAYPSGALAERRRRLSAAALPEAAPPKRRRRRPECHHKLPSSSYPERRRPQPVVVHRPLVPRRESLTEQQGMTSNFPPPPQWSQFANTPVPPPQFTTPPTHIPAPEDRVTPEAGGSGSDPAAGTGFVDSLFAFPAPGGGGGSDQSSNHPSG

SEQ ID NO: 77760 - protein, 68 aa, Zea mays
  Coding DNA Sequence Number=SeqID_34385
  Subcellular localization annotation: CTP_CleavageSite=60; ConfidenceScore=5.02e-01
MVVAPWVKYLSQEYDPMLTWAASTYRSPSCPSFRYKQNMQRENPLALLKSVLRVVLERVRIAYRTIRF

SEQ ID NO: 77761 - protein, 33 aa, Zea mays
  Coding DNA Sequence Number=SeqID_34386
MGVRRGRRIYRGEGALMESKWERKKKRSREELH

SEQ ID NO: 77762 - protein, 370 aa, Zea mays
  Coding DNA Sequence Number=SeqID_34387
  Gene Ontology: Mol. function=nucleic acid binding
  Homolog annotation: Hit_ID=Q6ZLD1; Match level="QueryCoverage=32%, HitCoverage=18%, E-value=3e-18, Identity=48%"; Hit description =Putative RRM RNA binding protein NSAP1
  Pfam annotation: Domain name=RRM_1; Domain location=282-355; Score =42.2; E_value=1.9e-09; Accession=PF00076.13; Description=RNA recognition motif. (a.k.a. RRM, RBD,
  Subcellular localization annotation: CTP_CleavageSite=54; ConfidenceScore=5.69e-01
MPMRPAASPSPTGHRAPPQLPLLLPSALVPMKKRRTPRRARPPATVPVPVPPPAAAALIPVPVPSAPYQIPAPPAAAAALDAHYLMLLAHTVVSQADAEEAAQAWSPSPPAAPVGEKLSSSPPPLPPSAADEEKPHAPPPPLPPLAVDENPSSYSISMYHHGHGHAATEESAEDCKETACPQLGGNAGGGSSKGDQRGGGVPSPAAGASPPRPGNEDDEELELGEIPPEKNPAADCNAGSAHESSLGLGKEEATGGSGRHAAPVHAAVTEMSAAEQKRVREVFVGGISRDAGEADVRAALSAAGEITEVRMIRDRTTGKKHKGYCFVAYRDAAMASKAVAEFPQCGGCASLPQLLLFHHISRSSALPVLW

SEQ ID NO: 77763 - protein, 219 aa, Zea mays
  Coding DNA Sequence Number=SeqID_34388
MVGRGGGSSEVEVESVLQGRGQVRAPGRARRRPSSEARAESEPWGRARRSSSSSGAEAESKPWGRARRSPSSSGAEAESEPWGRARRSPSSSGAEGESELWGRARWSPSSSGAEGESEPCGRARRSPLSSGAEAESEPWGRVKRSSSSEAETGAEPWGRARRSFLWCPRPDLATVSLTLSSGTAVGATQATLSSCQVGQWSGEVTAVTSALSTEERASG

SEQ ID NO: 77764 - protein, 181 aa, Zea mays
  Coding DNA Sequence Number=SeqID_34389
  Gene Ontology: Mol. function=nucleotidyltransferase activity; Cellular component=cytoplasm; Biological process=biosynthetic process
  Homolog annotation: Hit_ID=Q6ZLC4; Match level="QueryCoverage=93%, HitCoverage=93%, E-value=2e-62, Identity=73%"; Hit description =Bifunctional phosphopantetheine adenylyl transferase dephospho CoA kinase-like protein
  Pfam annotation: Domain name=CTP_transf_2; Domain location=30-163; Score=21.8; E_value=1.1e-05; Accession=PF01467.17; Description =Cytidylyltransferase
MVDAGDITAGGPPRAHEEEQAGTPAYGSVVLGGTFDRLHDGHRRLLKLLDPVVIHSRFIDSVGQYAELIEPVDKRIKGVEDYIKSIKPELIVQVEPIEDPYGPSITDEKLDAIIVSKETLNGGLAVNRKREEKGFPLLKVEVVDLLSGGVEGEKLSSSALRKLEAEQAQQSETKSGSLEAS

SEQ ID NO: 77765 - protein, 157 aa, Zea mays
  Coding DNA Sequence Number=SeqID_34390
MSSSHGVDAEASGKGAESRWGWESHPLGDSALRAQPAIGRSQHEPYSARLKRDLRTPKTILQTAHQASRLSAVRVCPATVLIDHAMILDGPTAVVAVSVIRVSSSSYSSGQGTQWWCRERLQWGHRRATPHKLYLLLRQGGRALLLQLLALTLLLLV

SEQ ID NO: 77766 - protein, 41 aa, Zea mays
  Coding DNA Sequence Number=SeqID_34391
MQDVTRHALSHYCLVLGGVADGLDLRYLGEDQKGLGCHTRI

SEQ ID NO: 77767 - protein, 195 aa, Zea mays
  Coding DNA Sequence Number=SeqID_34392
MAHQLPLIAAKNPLATNAPEHGGFTEFGEEFPDTQCTTSKLRQRMASLRADQSTEDQLRAWVVLPAAINGDANEAHKVEEISLLFFVYNLKYYIGKGQGISLHGEVIRVSQSTFLELQLSLEQNRYSFAITPTLVGQSHRSLFATCSAGPKNQMDKDKGLKLNDDECVSQLELKEMMRVMTEAFKKIPGLCGDIL

SEQ ID NO: 77768 - protein, 174 aa, Zea mays
  Coding DNA Sequence Number=SeqID_34393
  Subcellular localization annotation: CTP_CleavageSite=44; ConfidenceScore=5.17e-01
MHCPKKAAQQQSAPNAPARQNIPHQGASNRVQTRYNHGRLNHLEAEAVQETPGMVAGEVETELVSPKPKKGGCHQMTIDSKEVDTLEAIKVVSKFLDVFPKDLPGVSKIVRPMTTLLANKVEFKWTQKCQDAFEALKENVGMKANTPPFARRLRPRLAQAKAGSTEPARTGQGR

SEQ ID NO: 77769 - protein, 207 aa, Zea mays
  Coding DNA Sequence Number=SeqID_34394
MKSSQHNFLRKVRLRSADLEMNLFRAASLPVSRWTSLVDYGGCHVDDCLDLGWVGLDPSVGQVVLFAFACDDNVVYISEDVAAYLVFKDLLAREAIKEGHDFVACCTVDNFVNSWQREIVLGAGLIEGYCLRPIVALELGLDFFVCDWASALEAFALCRDAVEGVLTAKSVEGIICRLEEAVTDSHMIEGMQKNDISLIAVVDKHFV

SEQ ID NO: 77770 - protein, 161 aa, Zea mays
  Coding DNA Sequence Number=SeqID_34395
  Subcellular localization annotation: CTP_CleavageSite=51; ConfidenceScore=5.23e-01
MTPEQKQDELKKLQSAKSHLTPPVIAGDHGSITASSSSSPAPRSDVRRAVCAAAPRCTPARCLGRAPKLRHAPRLCPALVRALRCAPAPCLGRVLDPGQRVGLLGAVSVVERAPPEKNPRYEKLEFLNFEGSQVIVVVVTLRVLHHPKNSHPPHLYQKDTT

SEQ ID NO: 77771 - protein, 46 aa, Zea mays
  Coding DNA Sequence Number=SeqID_34396
MAMMGSTSEKMYLCQVKKRQTFAVSIPRWSQKKKTKSRAAGGKVPP

SEQ ID NO: 77772 - protein, 157 aa, Zea mays
  Coding DNA Sequence Number=SeqID_34397
MDPGTHMLCARFYPLEPGVTEVMVRTLQTTRVNTNYAPQPRQILVYPVVVEEAPANLPPVRVENVINLEDSSEEQLPTPTPLAESLAFAAGSSTSASSAPAFQAPAPGGDDPDDSGDGDDEDDDDEDDGEDGHINEEADYAQQDNFMGFGPVVEHYT

SEQ ID NO: 77773 - protein, 104 aa, Zea mays
  Coding DNA Sequence Number=SeqID_34398
  Subcellular localization annotation: CTP_CleavageSite=60; ConfidenceScore=5.31e-01
MDKGSVSPRLGGYQRGGLACSQCAGHVARQAGSSAPSGPTGGPTATSRRLALHRPSRAPQADAAAPSERAQAERLRSFASLINGALHATVSSSSPTSAYARLRA

SEQ ID NO: 77774 - protein, 102 aa, Zea mays
  Coding DNA Sequence Number=SeqID_34399
MTPSPCAVTPACAQDPAEPLATEALKSHAVHSSLDARHQEHPLPSARQDLAPSPAQLPRPSSRDPAAERIAPSAQPDAALRSLTHPVPRRPEAARAKTAGTR

SEQ ID NO: 77775 - protein, 77 aa, Zea mays
  Coding DNA Sequence Number=SeqID_34400
  Subcellular localization annotation: CTP_CleavageSite=36; ConfidenceScore=5.24e-01
MDGRARVAGFWRWVGFLARSCSLGAGGFGASRHRVRRASKRGVGLGARRDALGRGVKRGRSREEYNKVSGLDNAKQI

SEQ ID NO: 77776 - protein, 96 aa, Zea mays
  Coding DNA Sequence Number=SeqID_34401
MASFGGETDPSMGDFSPVIRPRQGTLLLRGCGTGRAVLHPGILDAGWCVRWTIPGACWWSRGSRDDRRTGVFAPMARHRCVAAPRGVGSSSIYCRW

SEQ ID NO: 77777 - protein, 405 aa, Zea mays
  Coding DNA Sequence Number=SeqID_34402
MGSARVAFVLLLLEEHHFAEVGSPAASPCRWSPKTVTTSLMVGRSKLGCGLCPALSFKDLHHPCWGGGRGEPGPAFAWASVPLPSASGGGNHPPALRRRRPPAMPGKANCCCPARVQHSVLCPGDGGQPHRGGGGVSQHVVRREGGTRVLGRSHSRFRDEDGSEDLPVRFGAAGARWCGVGGQVDVTVGAEVVAAGESFSADETVSATRGPTSGSLALISGSRPPRGDANESLPAAASVLGPSLLLQRSLASRPEFIVLHALRCGGCSYPREWNRSSICNGTLSAGRNPRPLYDELEPEAAVSAWTEAELARKEDFVGPGADPPTVLSSEARSDFAEGGVDTEGAAAPPIDDLFVGNRIVYPSKSYFSWKVMSEDPTVEVVEKHERCSGRKIFSEENFDAEGAPI

SEQ ID NO: 77778 - protein, 67 aa, Zea mays
  Coding DNA Sequence Number=SeqID_34403
MASFGGETDPSMGDFSPVIRPRQGTLLLRGCGTGRAVLHPDEQATVDSEVQQVEVAEQELIEDKLCP

SEQ ID NO: 77779 - protein, 249 aa, Zea mays
  Coding DNA Sequence Number=SeqID_34404
  Subcellular localization annotation: CTP_CleavageSite=44; ConfidenceScore=5.72e-01
MAAASERKQRSNRLQAHVPSWSSRRALSHNGKTTRPCFVPRTARARTTAASRTTRPVALTLRQGRRHLWQAKQATLHPRHDDHVKKGTEKGDTSKGILLHEGSGPRALLLLRCSKAGPSEGFDSRLRALGLHAHYWSEVRRLAPRKGSIAASGHSGSAPTTDQGFVGWPPKGSTAASEHAERGMTLDTSDTWLRLGLCSRGTLGHFRDQQERFYNGIPLDGGIEPSDPIKRDRVRQITCRYFWSAPLGH

SEQ ID NO: 77780 - protein, 190 aa, Zea mays
  Coding DNA Sequence Number=SeqID_34405
  Homolog annotation: Hit_ID=A8RT18; Match level="QueryCoverage=54%, HitCoverage=59%, E-value=3e-12, Identity=33%"; Hit description =Putative uncharacterized protein
  Subcellular localization annotation: CTP_CleavageSite=56; ConfidenceScore=5.06e-01
MWDYSQQEAPPRSRLSLGPGVGRGGDRLPESRLSPSLGGRARRRPSSEVEAESELRGRARRSPSSEVEAESELRGRARRSPYSEVEVESELRGRARRSPSSEVEAESELKGRARRRSSSEVEVESEPWGRARRSFLWRLRPVLAAVSLTLTGGTAVGAAQAALFSCQVGQWRGEVTEVTSALSTEEHASG

SEQ ID NO: 77781 - protein, 230 aa, Zea mays
  Coding DNA Sequence Number=SeqID_34406
  Homolog annotation: Hit_ID=Q6J9V9; Match level="QueryCoverage=28%, HitCoverage=33%, E-value=4e-08, Identity=45%"; Hit description =Putative uncharacterized protein
MAERYQLPRSCVPPTTRRKDCGQPPSGGSEGGKIRCIREREDMVAFQGGHPPFKGDSPYLRPQPSRAESSPTRSKVLPLRRGGWVPRVMQAGPGQKKPNRRARCMQPSSGYKRPSTFAQTSGGSERRFAFAIMTASKKGPGKGDTPKRILLREGNRLRASLLIRGSKAGPSEGFNSRLRVRGLHTHYWSEVRRPAPRKGSTAASGHSGSAPTTDQRFEGWPSKGSQPPQT

SEQ ID NO: 77782 - protein, 279 aa, Zea mays
  Coding DNA Sequence Number=SeqID_34407
  Gene Ontology: Mol. function=hydrolase activity; Cellular component =mitochondrion; Biological process=nucleoside diphosphate metabolic process
  Homolog annotation: Hit_ID=Q75IK6; Match level="QueryCoverage=78%, HitCoverage=88%, E-value=2e-58, Identity=55%"; Hit description =Putative uncharacterized protein OSJNBb0016G07.6
  Pfam annotation: Domain name=NUDIX; Domain location=70-189; Score =21.2; E_value=0.0017; Accession=PF00293.19; Description=NUDIX domain
  Subcellular localization annotation: CTP_CleavageSite=93; ConfidenceScore=5.68e-01
MRSLLTRLFTSTHIVMASSSFSSSPSRRLVHLTRHLVSSSSGELSSVGAPAAAASDADPVKSPRSTASRVHAAVLVCLFEDPSSGPRVLLTKRASSLSSHSDPKATALREAKEEIGLDPALVSVVTVLEPFLSKNGLTVVPVIGMVPDKALYKPVLNKAEVEDIFDAPLEMFLKDDHRRTRQMNWMGIDIPVQFFDYEADGKKFVIWGLDCAHPDTRSGSHFREETIIRRASQTQICRLHISCICTCCLCVTVVLEVAVELIKPPLHVMPGSPPSKIPR

SEQ ID NO: 77783 - protein, 292 aa, Zea mays
  Coding DNA Sequence Number=SeqID_34408
MQAACNRTKGTHPFDFDASSMGAQAHTSSAGEGATGDMAKSGPAVMEAAGGRKQRSSRLQAHVPSGDSERALSHGVKTTRPCSVPRTARARTMAAPRTTRPVALTLRQDRRHLWQAKQATLHLRYNDRVKKGTGKGDTLKGILLREGSGPRALLLIRGSKAGPSEGYNSRLRALGLRAHYWSEVRRLAPRKGSTAASGPSGFAPTAGQRPAPEGFDSRLRARRARDDSGYVRYMAEARATLPSLDFVTMDSALAPTPGLGLSLDFDDGLRLARPQGSDSTSTSDDGLRLARP

SEQ ID NO: 77784 - protein, 326 aa, Zea mays
  Coding DNA Sequence Number=SeqID_34409
MNNRINNQFISHYFLSLGRPAEPRQHPGSLLPDGVPPGSEIQAPSATFAAPTHARTIRLVRQETLALSQVADRPSPWPRTVRACAESTAASFHRVIGAQKGTNTLLATPLGTTHIDSSDRPSMAGSRDSFDVSPSNIIELTWETLPADKQFQFEEHKEQLIQEAKAKFLTNFKMDRNNKVVRQRATDLASLRPSMTTPKVPKVQLKPIKGPSQGSKRKEQKKPKDALVWRTGLSGVPPDSVRCTRVDQLELATFGFLEKPLHYNSPDCLFAQSQSRRQKAHRTVNSACPVHHRTVRWPRLSELQRSNPNGDTKLWWSLWGLSDPID

SEQ ID NO: 77785 - protein, 87 aa, Zea mays
  Coding DNA Sequence Number=SeqID_34410
MGAYGMPSATNNPDASGQSFSEALKSSRKHLLQYDAFESADGGPGETPSVRCVDTDYHGTGTSNSIYAAVQGGVGAGARAGGVRWVL

SEQ ID NO: 77786 - protein, 116 aa, Zea mays
  Coding DNA Sequence Number=SeqID_34411
MGKSKKGGSSSHHSGDKRKHDSQGIAAEVWTYIRVVERTGLEGSDESEYSSDEENSSDSSEEGGGDGDGGDDDDDGGDGDIGGDGGKGDGKGGDGGGKGGSGDGGDGSKGSNKASG

SEQ ID NO: 77787 - protein, 116 aa, Zea mays
  Coding DNA Sequence Number=SeqID_34412
MKLVLPTEGMMEYVSPSPPLKILSHAQNLACGRISWVDDVEVANQQGRRGQKITSSRVKTLPKNLIRPLPVQDLEDEGFRRPALLIADAPLRSGRRELKGGSAMKRGERELGSGMI

SEQ ID NO: 77788 - protein, 47 aa, Zea mays
  Coding DNA Sequence Number=SeqID_34413
MTVGGGCLSYGAPDSPVHTGHVRRSLARSSRYPAVTPDSPVYIGHVR

SEQ ID NO: 77789 - protein, 161 aa, Zea mays
  Coding DNA Sequence Number=SeqID_34414
  Homolog annotation: Hit_ID=A2WLM0; Match level="QueryCoverage=47%, HitCoverage=18%, E-value=6e-20, Identity=63%"; Hit description =Putative uncharacterized protein
MSCFQGFFFCSEVASLLLHNFCVYHTNPQGHEVSDAGSIPVIRVLQMGAAPMSSDVPVPCVADLADQVADVLHFFRLVQLQLDLCFFPFVRGILFPMVFMQQTYVGNSTDLDDEPDGENPCGVKKDLEAMVFHPEQAGSRYDMVLLAPCGSARPSLLAALM

SEQ ID NO: 77790 - protein, 218 aa, Zea mays
  Coding DNA Sequence Number=SeqID_34415
  Homolog annotation: Hit_ID=Q5SMR2; Match level="QueryCoverage=23%, HitCoverage=23%, E-value=5e-16, Identity=82%"; Hit description =Putative uncharacterized protein P0445H04.43
MDRPHRHRNEDLTGGRAGVRRGGGGGAMEASRRGRFHRHDGPAAPVPVVDQADCTAQTCRSCVAVTLADAIALGCCPCAVVSLLGLALVKAPLALARRCLRRLRGELRHRKRVRDMHGPADKAKCRSSDAGAASRGAWALEAAARARASNSSSSGSGRLDAEKVWMEEMYRVGHWGFGRLSVSVSVSVTPPPPVWPGRSPDGDGGGGGRKDVDLRCES

SEQ ID NO: 77791 - protein, 68 aa, Zea mays
  Coding DNA Sequence Number=SeqID_34416
MDLFVVRRPIPCCRLTQGWARRGAVNCRGLESESAMRLKTFLLEESSAAGTAPASVAARVSLQTAGSG

SEQ ID NO: 77792 - protein, 186 aa, Zea mays
  Coding DNA Sequence Number=SeqID_34417
  Subcellular localization annotation: CTP_CleavageSite=64; ConfidenceScore=5.70e-01
MKSTVTGLPQTAKNGLAQKLSIARPPAPTSATQSGSFRRCSQPLQLVSILPQMQPLMVTRPFHDCMVAPSPERGCNYLRLWWLHDLCKRLEKSRRPIGIASVGARVSRRPYLQSGASSRARVSSGEEHTTAISHITTSARFFPNSCVEILQCLVVEFPTIHAGKPPNARVSVYSALMLGSLSTCIS

SEQ ID NO: 77793 - protein, 401 aa, Zea mays
  Coding DNA Sequence Number=SeqID_34418
MDSLDETNEVPVDDSQLDKHSTVDNESPLDGKIDEHTRLPIHPIEEDIFGTQINYLAPIDECKFALHHNKPKKDMATVIVQEDYMCNQGDMTLIESIKNIPYATMDVELVCIGSQVISKKFMECLFQPDSYLRDEIINSYIYLLIAQEHMKQRPGGTVHIEITFLKGLQKQIDGVSHYMKLKDHNWLDLQVVYWPWKLIEFKDAKQTDMPKLTAILLSSDLNKRKGCLLYKNKTNKSTEDNETNSSGVEILEPSPNPNKRKRSPPISPEDDHISLYFEEICAKEENDVIPNPTFVNECGQDSLISGLSTKDMPVRKADMIEFLCDYIMTIQDATILDVNTGHFALHIMEWWESGLKAQFSMDGATLHRNLLIDLLTYEGNTYRFNIPVNIREYLDRIMEKD

SEQ ID NO: 77794 - protein, 79 aa, Zea mays
  Coding DNA Sequence Number=SeqID_34419
MGVVVGRQQIQRADCRDDVCEGEVGRESEGEDEPTNSQRYSWSATSEPKVMAVSEQTASKKGHSVAAGTAAAGRERGRR

SEQ ID NO: 77795 - protein, 169 aa, Zea mays
  Coding DNA Sequence Number=SeqID_34420
  Gene Ontology: Mol. function=carboxyl- or carbamoyltransferase activity; Cellular component=ornithine carbamoyltransferase complex; Biological process=amino acid metabolic process
  Homolog annotation: Hit_ID=Q8SA97; Match level="QueryCoverage=80%, HitCoverage=24%, E-value=4e-22, Identity=47%"; Hit description =Ornithine carbamoyltransferase
MAPPVDMAGPRPRLGDVEAPPRSRSSPSSMAEAESKPLGRARRRPLAEARADFESWGRAKRSSSSSGAEPKSEPWVGRSGVRRLPGLCPSPSPGSGGAEFAVFRGLARVQALGRLYADGGYQLRIRSLEGTPNYGPRQQQSQRKQHKRHTIFILWFGQVTLAYFHVVAS

SEQ ID NO: 77796 - protein, 79 aa, Zea mays
  Coding DNA Sequence Number=SeqID_34421
  Homolog annotation: Hit_ID=A2Y712; Match level="QueryCoverage=60%, HitCoverage=18%, E-value=5e-07, Identity=54%"; Hit description =Putative uncharacterized protein
MVRPTEHVPDPQNYIVGNLTARHKMKEARNHYHTRGSSRGGGGTAAERDLVLQWGNQKRMRCVKVQRRDETAAEKTTIS

SEQ ID NO: 77797 - protein, 77 aa, Zea mays
  Coding DNA Sequence Number=SeqID_34422
MAHRTVRCTPDSLVPPATSSLPLDSTVEASDLWARLGVRCTPDRISFSLKCQAYQKLRWKFMTIMETMWHRTKALTS

SEQ ID NO: 77798 - protein, 196 aa, Zea mays
  Coding DNA Sequence Number=SeqID_34423
MWGPHGWEVVRERSDRAIDQMAHAEEVEDLGDLDSVLPVTSGVEAAPPSDASEDPSTVPAPTVPTGASEDPAPTGEDALKAVVLRFGPAHATATNNTIFVAASTVAADDDLFGSVSKCFESDDSGSSIAWTEESSDEDLDYFAALDVAAAEPSPRVEGSEGLPGEEELRNLFEGEELRIMLFNYREMGIIPKVEPM

SEQ ID NO: 77799 - protein, 108 aa, Zea mays
  Coding DNA Sequence Number=SeqID_34424
MEAEKGELRRQLVEERREANKAFADAQAAQTDAKLARAEGSLACQRAEDLEARLNSLRNRVDKAEASTRAEVARTHAQFVDAYRELGARTAAFDTPSQEMGLRFLEWL

SEQ ID NO: 77800 - protein, 36 aa, Zea mays
  Coding DNA Sequence Number=SeqID_34425
MKAHDEVPPSHVLTQPGGPRVCNPPLWEYSRDNPGA

SEQ ID NO: 77801 - protein, 156 aa, Zea mays
  Coding DNA Sequence Number=SeqID_34426
  Gene Ontology: Mol. function=enzyme inhibitor activity; Cellular component=cell wall; Biological process=response to stress
  Homolog annotation: Hit_ID=A2Y689; Match level="QueryCoverage=35%, HitCoverage=19%, E-value=7e-22, Identity=89%"; Hit description =Putative uncharacterized protein
EERDDGQALHQCRHPSLGAALRSSAGGCDPALLPALLLLLAGRDQPGPHHRIAIAVDLFDESAFTVKWAVQNYLRPGDAVVLLHVRPTSVLYGADWGSILVSIADEADAAEDTAASLLDVGEDAEGDDHGGGRPPPGGKDEPPGGPGQLVWVGGGW

SEQ ID NO: 77802 - protein, 83 aa, Zea mays
  Coding DNA Sequence Number=SeqID_34427
MYMYGVMKKLGESGYIMAVHQLRMASSAYNCVNNILPNIISQLLAFSNKFCYEGMKPTYDNQVFLWETLKSLTHLDITRVVIG

SEQ ID NO: 77803 - protein, 88 aa, Zea mays
  Coding DNA Sequence Number=SeqID_34428
MCSCFDLKYMHTGDEAAERKEGQVMYNLSMHKTKWNTQERVSSATTVTNPGKKCPDLFTVVCASFSTRLIHVWASVGVSWVRAGEPPP

SEQ ID NO: 77804 - protein, 186 aa, Zea mays
  Coding DNA Sequence Number=SeqID_34429
  Homolog annotation: Hit_ID=Q7XBD4; Match level="QueryCoverage=71%, HitCoverage=14%, E-value=2e-08, Identity=27%"; Hit description =Cinful1 polyprotein
MGYGPRAMLFGGGHQMLKCVPNPDESKIGLILSKALRIQQEKEEVEISNLQYKVETLRKSLEEKETEVISLKEKTTEKIFSTSAISRAISYSHEDTKRELGWIEKELGEVESIINARSDYCAMITSMLENADYQHVKVIGEANFGMVVEDIRAPLKNILSVVKRFFFELWNKEQRNEEEDEEAEEV

SEQ ID NO: 77805 - protein, 143 aa, Zea mays
  Coding DNA Sequence Number=SeqID_34430
MPIFRFSIYSVHVLDSNAALYSRQKSAEAKLYETWMMPTMCSLKSPQVAKKYIYDVHIPDKEEGLKARCHYRSGKVSGAADPFIHQLQSLGPIHIVRPSIAIASRTAGSTYNCVDNILPNIISQLLAFSNKFCYEGLKPTYDN

SEQ ID NO: 77806 - protein, 156 aa, Zea mays
  Coding DNA Sequence Number=SeqID_34431
MYRYETLLIRAAQRRMDGGEFIVPTATHSHDGEREMCPWAISKYFGDLVSKQVLKCKMVNKVQTKDKGKIQLEMSWLEQPRICSVSEHRTVRWCTGQSPVRQTGSSEVAALGNSPATYGYNSPDYPVCTGLSGEPTVGRANGRPRDLRGTRGRANG

SEQ ID NO: 77807 - protein, 101 aa, Zea mays
  Coding DNA Sequence Number=SeqID_34432
MYMYGVMKKLGESGYIMAVHQLRKVYKLLPQLLVGRYGSLHRAAASSPPASLHYPPPKAKASKVKMAVIHDALHRLHIANEKGNSLCLADALRAHHNCDRH

SEQ ID NO: 77808 - protein, 244 aa, Zea mays
  Coding DNA Sequence Number=SeqID_34433
  Subcellular localization annotation: CTP_CleavageSite=49; ConfidenceScore=5.34e-01
MANTVVASIWCAIGVPGTTTAAQARTHGGNYGQRTTSMNQVPNSKFDQRCAMLREGQIVPQSTRRRDFSANLHDDDEVRPPRTVFPVRPRLPHHRQDRRTSDSPPPNPSLAGAGDEPITLRHQRIPSGELEPRQASVREKFQTGVAGLRTGGYGDLMPPIPRENRSPTTNPGGYGVRRGPRGLLQGAASGGRRHCSDGPTRHWSQSPRRATLGSLEFWARASAQAPSAPAHAESGRSGPHGCNG

SEQ ID NO: 77809 - protein, 281 aa, Zea mays
  Coding DNA Sequence Number=SeqID_34434
  Subcellular localization annotation: CTP_CleavageSite=35; ConfidenceScore=5.38e-01
MSSCSLMRRVFPPSKPPDGGPAAPLHRRSPKMVTSSLMVGESEPGCGLSPSLSLKDFHHQGWGGDCSVPGFRTRVASEPLAAPASATAAGRGSSAGVIAKAGHGPTSNSTAFCPSLPYEFWHGQGPPSSSTRPEVSAAAVRPPGAEVVVVAAAGAGDGAPFVGLPLLRRPSPMEWGCSYLRRGNRSSVCNGTSNVGVFVHCGCRGLNIRGLGPGWHPWKMVGRGPWGNRSSRLLGPDSRRSPWTASPSEAGSDLAEGVVDAEGATAPFQREDPSLQDQIVL

SEQ ID NO: 77810 - protein, 246 aa, Zea mays
  Coding DNA Sequence Number=SeqID_34435
MTVAGGREQRSRRRPDSRPVRGQQENPLSRREDRAPDKRVTLRLRRNNRAKKGTGLRAPPTDQRFEGWPPEGFNSRLRSRGPYTHYWSEVRRPAHRRAPRPPQATRAPRPLLIRGSKAGLRRVHSRLRRRARDDQGYVRYITKARAALPSSPETPCSVPIEGNMALSPLLLAERRRRGVCKKAESVPDRPLALCGGSGAALANPAPAEPLTASTYQPENLGPDRAPGLRPVRMREQPDQPKHYARH

SEQ ID NO: 77811 - protein, 102 aa, Zea mays
  Coding DNA Sequence Number=SeqID_34436
  Gene Ontology: Mol. function=carboxyl- or carbamoyltransferase activity; Cellular component=ornithine carbamoyltransferase complex; Biological process=amino acid metabolic process
  Homolog annotation: Hit_ID=Q8SA97; Match level="QueryCoverage=79%, HitCoverage=19%, E-value=1e-10, Identity=42%"; Hit description =Ornithine carbamoyltransferase
MALPVDVAGLCPRSGDVEVPPKPRSKARAESEPWGRAKRSSSSSGAEPESEPWVGRSGVRRLPGLSPSPSPGSGGAEFAVFRGLARVRALGRAERSSPSSGA

SEQ ID NO: 77812 - protein, 143 aa, Zea mays
  Coding DNA Sequence Number=SeqID_34437
  Gene Ontology: Cellular component=thylakoid membrane; Biological process=response to singlet oxygen
  Homolog annotation: Hit_ID=A7PD17; Match level="QueryCoverage=79%, HitCoverage=18%, E-value=1e-46, Identity=73%"; Hit description =Chromosome chr17 scaffold_12, whole genome shotgun sequence
MDPFNGLYVGAFSPYGPEIVQLRQKFGHWNSSDDVEFFEYVEAVKLTGDLSVPAGQITFRAKIGKGKRLENRGAYPEEFGVIASYKGQGRIAQPGFKNPRWVDGELLVLNGKGRVIYKKCVETPGQDALKLTGFLKTLMQRRN

SEQ ID NO: 77813 - protein, 446 aa, Zea mays
  Coding DNA Sequence Number=SeqID_34438
  Homolog annotation: Hit_ID=Q7XDC6; Match level="QueryCoverage=95%, HitCoverage=95%, E-value=1e-134, Identity=60%"; Hit description =Expressed protein
  Subcellular localization annotation: CTP_CleavageSite=23; ConfidenceScore=5.05e-01
MPADAAAAAPAPAPAPHPPPAILDARTGGRILRRAAGHLVHPASLPPLLLAALLLLLFRSALLAGTLRLASFADRDPALRSLLARLSSPNPPSPPPPPHHLPRRRSPFTSPSSSLSDDDILVSPLDPTASTPSSRRNASYHHVQFTSYSTVPKPYTLPLPASASPFFIAVYNETAPPKPASRRGSELGLLDLTRRDAAAIVNLLALLSSAHIFAILGYIAVHSIALGAVFASVAGHHRPGQRLVFLLTGAAKGAKRLTGFAFLRWATRDAVVQMLCLWFFADVHDQAQLFRLFVVAKLMPFSASVNPWLGAAVAGPELGGFFVAWAVFDAVVSVLFTVVPWVVVMDRDPRPPGRNAVKEGCYLVSLMATDATMLKCWETVVCGSMGRLIMVTFGGKVFGGFLHSIAQVYFMVVWLLFYFAARCKEVRLGGRQFGLEDVAAALDGFR

SEQ ID NO: 77814 - protein, 263 aa, Zea mays
  Coding DNA Sequence Number=SeqID_34439
  Gene Ontology: Mol. function=calcium ion binding
  Homolog annotation: Hit_ID=A3AGB6; Match level="QueryCoverage=28%, HitCoverage=9%, E-value=3e-28, Identity=88%"; Hit description =Putative uncharacterized protein
  Pfam annotation: Domain name=efhand; Domain location=167-195; Score =28.0; E_value=3.5e-05; Accession=PF00036.23; Description=EF hand
  Subcellular localization annotation: CTP_CleavageSite=82; ConfidenceScore=5.13e-01
MEDDVFDGRGRCGQLLAPPPLIPPPQTRQRPAFPHASTGRTGSKASAASAGDEVFGGVVAARAGARAVRRRRRAQLPRPPNRAASQKAQQQKEIAKRFGGPLVSTTPYEVRSPPPPPIEGSPHLASTLLRWRLPHRQDVIACDIINPDSMALSASAMSTGRGLRAEKVRRIFERFDTNGDGGLDRNEMAALVVAVNPRVKFSEDQISAILDELFRTYAEFILPDGCAHGGCAGKEVGAAVRGAATVAGVGSNGGDGCNRTVRI

SEQ ID NO: 77815 - protein, 110 aa, Zea mays
  Coding DNA Sequence Number=SeqID_34440
  Subcellular localization annotation: CTP_CleavageSite=36; ConfidenceScore=5.07e-01
MAALPTTRPVALTPWRDRRRFWQEKRATLRLRRNNRAKKGTGKRGIPRKGSFPVKEPGSEPPTDQRGSKAAPPKGSTAASGYSGSAPITDQGFKGWPPKGSQLPQTPSEG

SEQ ID NO: 77816 - protein, 72 aa, Zea mays
  Coding DNA Sequence Number=SeqID_34441
MAKVDTMLTSRGNSGCGRFHGTSYSFGASGVDTMDRCKDDDTTRDIEASFSSMSRLHQRHGKTAGWARLEGA

SEQ ID NO: 77817 - protein, 305 aa, Zea mays
  Coding DNA Sequence Number=SeqID_34442
  Subcellular localization annotation: CTP_CleavageSite=35; ConfidenceScore=5.30e-01
MSSSSLMRRVFPPSKPPDGGPAAPLHRRSPKMVTSGLMVGESEPGCGLCPSLSLKDFHHQGWGGDCSVPGFRTRVASEPLAAPASATAAGRGSSAGVIAKAGHGPTSNSTAFCPSLPYEFWHGRGPPGSSIRPEVSAAAVRPPGAEVVVVAAAGAGDGAPFVGLPLLCRPSPTEWGCSYLRRGNRSSVCNGTLNANSPVDYLNRFTKHESPRVKVTSEPGCPLAGPTSELTSRGLGPGWRPWKMVGRGPWGNRPSRLLGPDSRRSPWTASPSEVGSDLAEGVVDAEGATAPFQREDPSLQDQIVL

SEQ ID NO: 77818 - protein, 257 aa, Zea mays
  Coding DNA Sequence Number=SeqID_34443
  Gene Ontology: Mol. function=hydrolase activity
  Homolog annotation: Hit_ID=Q6YX89; Match level="QueryCoverage=77%, HitCoverage=82%, E-value=1e-74, Identity=64%"; Hit description =Cyclase-like protein
  Pfam annotation: Domain name=Cyclase; Domain location=86-244; Score =36.6; E_value=4.7e-08; Accession=PF04199.4; Description=Putative cyclase
MAKEESTLGSSALAGTDECAATALRSRISILLLLPVVAVVSGETAAHPGYAHAEEACGGVLEAEAEKATVLVPAPERRKEFDGGRIVDIIHYYREDMPEWESSEGSGEFLQLAWSMRNGSDIANFSELRLTAHSGTHVDVLGHVFEHYYDACFNVDTLELAVLNGPALLVDVPRDKNITENLWKKEFDTSYVGFMKDGAQWLVDNTDIKLVGVDYLSVGAFDECIPAHLVFLEKRGWCEDPIIWSWASADPIDTNMS

SEQ ID NO: 77819 - protein, 30 aa, Zea mays
  Coding DNA Sequence Number=SeqID_34444
MALAEGKRLEMESLLEVMEGERRMILRSCQ

SEQ ID NO: 77820 - protein, 273 aa, Zea mays
  Coding DNA Sequence Number=SeqID_34445
  Subcellular localization annotation: CTP_CleavageSite=29; ConfidenceScore=5.34e-01
MVRIQFAFQNGCDISATWRDCIVACTRSRSAAARSRSSRTLPPRLNRRWSLGGSLPLHPARDAPAPPQGISATGGYPDEDRDGNNSGSSSHNMEILEEQELEGWIARAITHDAARGCHFHDALDTLLCPAFDRYTWSIEYRCVVYQHRRGLYPDQWEATCLVRRSGDDLQGAEAFSEHYSITERDTVEAVMQDVARRALPQYCPLFSGVADDLDLKYYPRCSTSSAIDVIVSPVGEGNPRLNSMVNLHPYRLLPHGHFTYGTPVCRTQIDLEP

SEQ ID NO: 77821 - protein, 96 aa, Zea mays
  Coding DNA Sequence Number=SeqID_34446
MEVVPKFLPDDGFRVYMGGEASVAYELASKVEVGVAVAAPTALLLKSSQSLGLLGFASGTSAQWSSGVAVATAAAVPPPGVSAALAEHTFHLCICF

SEQ ID NO: 77822 - protein, 71 aa, Zea mays
  Coding DNA Sequence Number=SeqID_34447
MSQLGASVGVVILRRCTLRARVEVADIGVGGFLGNCSPELSPPCGSWVCRGLSYCTRHPWYAGEETQPGAI

SEQ ID NO: 77823 - protein, 105 aa, Zea mays
  Coding DNA Sequence Number=SeqID_34448
MGGGADRWGPLSREGAGARTRKGRRRHAGPRWQREEERVGVSEAVGTKANMPPSLDCCCINVSKIEGPEDKPRKPGSRTTPMRRLKCSLRSGEPKRRPSKALGLR

SEQ ID NO: 77824 - protein, 118 aa, Zea mays
  Coding DNA Sequence Number=SeqID_34449
MAKAALLAEKKGKALADNTLQEAFEDDAINSKRQRQDNHPTPDDTVCTYSSEGALRAPPPGFAPPEGEYTIEDDEIIGISAEDQLKLRALRIKNNHLQKQKEILEAKRQRITMQAKVR

SEQ ID NO: 77825 - protein, 82 aa, Zea mays
  Coding DNA Sequence Number=SeqID_34450
MEKEKPLCTRKNHFALVPMVEKRAAGLTGGEIALVKCPGRSGRLRQSRRGTGQRRRWPELVGPRAQAGKFIGGKDSGLTTAE

SEQ ID NO: 77826 - protein, 521 aa, Zea mays
  Coding DNA Sequence Number=SeqID_34451
  Gene Ontology: Mol. function=pyridoxal phosphate binding; Cellular component=nucleus
  Homolog annotation: Hit_ID=A2ZLQ9; Match level="QueryCoverage=17%, HitCoverage=64%, E-value=2e-41, Identity=89%"; Hit description =Putative uncharacterized protein
  Pfam annotation: Domain name=Complex1_LYR; Domain location=335-401; Score=20.7; E_value=0.00065; Accession=PF05347.6; Description =Complex 1 protein (LYR family)
MPPPSPSRQSRSSARPIPAAVTSAYIEAEHRQRVRGARVPQEEEEGRQRQGSREEDGEGAAQRQEPPQKKQFWAPAPLTTKSWADVEDDNDYFATTASPRLVWGTAGEPAKEEDDIDDVVRAALQEVATLGNKVEKEMEDMAFFFAELALMQYGYGLVTRLPSLVAASAVYAVRLTVKRAPSGPTPSSTTLLCTRCSEERPAKGSGSWSSPVGSVPAGGQPRADNGSTTIEIALKIAFRKFSLDHGIMASSENSTRNERNIKLKVLVLNGSYHGDTLGVMEAQAPSSYTSFSSVAMVHVQRRICAAQLLQRIGGPSVITTTLKEMPSLQKALPPELADNVLRLYRECLRRAKYIGHQKHNTELLVAMVRQQFKKNMHETDPEKIQKMKDDAARGLINHILYESEKITGRKFSAWGQFLQLKLRNLRKCLLILAEESSMDLDLKILPPFAATPLNSSRYFLVSPRIIHQILLLRPLLSSFSTVSSPVSATPITSPSARALEENCRSGKGRRTAIIADKGRVV

SEQ ID NO: 77827 - protein, 185 aa, Zea mays
  Coding DNA Sequence Number=SeqID_34452
  Pfam annotation: Domain name=zf-CCHC; Domain location=158-175; Score =18.9; E_value=0.0021; Accession=PF00098.14; Description=Zinc knuckle
MELAQRSLKSGSPPSSFADPQGLGGTIFLPCSQRIERWNGESSRQLSEDTTYQPGLWTESSMSFWHSLRATGQCCNMPRLLMTCATRQAEKKRKIPVAGPSAQPQCFRIVSDIQSRGPQQQQGRWVIRPQQQQQAPNRTQFPAQRNNQQQQYRQANDNRCFTCGNTGHYAKNYPRNQQRQGQNVN

SEQ ID NO: 77828 - protein, 44 aa, Zea mays
  Coding DNA Sequence Number=SeqID_34453
MGDHVSGRVRGKVCGQVHSGIRTLILIPFSHLVDNQSPWIVVYN

SEQ ID NO: 77829 - protein, 63 aa, Zea mays
  Coding DNA Sequence Number=SeqID_34454
MAINLHYRIANIFNNPLPTIDDAESPSHVGVWFPGSDRNNHDPNPFARDAFAPDEASGGGHSW

SEQ ID NO: 77830 - protein, 213 aa, Zea mays
  Coding DNA Sequence Number=SeqID_34455
MAQQALRERAGVICLLGVGVLRGNDTRRCLRHEVNARHVPRWGAGVVDSLDSQRGAASCLATVAPPPPPAARKATGQTQMLLFRHGGKTSPSAPPPGGLTVVVVAAALRRKEYHVVAAIEGHELETPETEQRPGLKRLLETTHLELDGKLFVNTQQAPTWRANCRRFDPGGSLDRRVKLSLRAPAQMGWREIEHKEGENHGSCYPAPEWVRLQ

SEQ ID NO: 77831 - protein, 90 aa, Zea mays
  Coding DNA Sequence Number=SeqID_34456
MTKATRPAEKTRGTSWKRLRTWPCYTRRDISSLCDATTPEGFGPETSKWETWCFGYGKTPEGATSLLLPETSFAPFNCFDSGILKTTEYT

SEQ ID NO: 77832 - protein, 334 aa, Zea mays
  Coding DNA Sequence Number=SeqID_34457
  Homolog annotation: Hit_ID=Q6QP51; Match level="QueryCoverage=56%, HitCoverage=92%, E-value=2e-36, Identity=46%"; Hit description =Putative growth-regulating factor 1
  Subcellular localization annotation: CTP_CleavageSite=68; ConfidenceScore=5.04e-01
MQVVCNRTTETHPFNFNASSMEAQAHTSCERKQQSNRLQAHVPSWSSRGALSHGVKTTRPCSVPRTARATTAPRTTCPVALTSRQGKRHLWQAKRASFHLRHDDSVKKAAPEHSGFRLITDQRFEGWPLGRVRQLPQSTRAPRPLLIRGSKAGPSEGFDSCPKACRARDDSGYVRYMAEARATLPRVRLTAAESSLRRHKKLRLARPWASASGEVSALPDPRAQPPPRPRKVVSASPDPRARPQPRPRKVVSASPDPRAQPQPRPREESCPRPTPASASGGVSASPDLGLGPTTPQGPLTEARRRQQGPNSPDSCASTGLKRSSDDHDTAYTGL

SEQ ID NO: 77833 - protein, 425 aa, Zea mays
  Coding DNA Sequence Number=SeqID_34458
AGPLVQALVLDLGPPPEQLLAPAGVLVAGECTGQTTAIWFNPRARRASRGNVVTVCTRNRKMVERITRSTCAGGGKNSSEHGFAIPVTRVLGSSLSKLHGLTRKLSEGLDRTEEDGKGAGHGGCSRAALAGRGEVAGAKGWLGEVRRGTEEATGKAAEHWDGLYSRGAGVVTGGRGPVAPTVEHSSGKELVMGMEDEVAEATTVSDLRIRERTLLGAWPREGTLAVVADAAGVDENGHRLLVHCSLQGGLVGVVHHVPAVDVHHRTKDSQSMERLGRGDSTDCIDLCRGIEIHGERGDERARMGALMEGIVGAGTRITGHPKMAPVGVGERGGGENRGSGELAAWCARAGGHHSEASGFRRGFVVWSASFAAALAAGFAETTPSALEAPVYFVSGNCAAAGAYGAAPSRPKKVKCHTRDLRDKAG

SEQ ID NO: 77834 - protein, 161 aa, Zea mays
  Coding DNA Sequence Number=SeqID_34459
  Subcellular localization annotation: CTP_CleavageSite=61; ConfidenceScore=5.06e-01
MAQGHISLSRPPSPQGQWQQQQQGWQQQQQWQRVPRFQGHWKIHGPKASSSSASVDVPSPPAGMPTEGSGSHRHMPARDIADDPSTATMDAPSSSTAMPTGGSSSHQHTSAENVADDPSTATTAPSASAPSPPSTAAEEIPVAFAPTVQDDAGAEMAPSDP

SEQ ID NO: 77835 - protein, 623 aa, Zea mays
  Coding DNA Sequence Number=SeqID_34460
  Gene Ontology: Mol. function=protein binding; Cellular component =integral to membrane; Biological process=regulation of translational fidelity
  Homolog annotation: Hit_ID=A2Z999; Match level="QueryCoverage=99%, HitCoverage=98%, E-value=0.0, Identity=68%"; Hit description =Putative uncharacterized protein
  Pfam annotation: Domain name=DUF726; Domain location=260-609; Score =256.9; E_value=4.4e-74; Accession=PF05277.3; Description=Protein of unknown function (DUF726)
MATSSTLGQTQRYAAGALLALALRQAQTHQTVLLGSHGLDDEPHPDAATAVEPDARDLWTHESRGLLRPVLRFLEIDPKAWVGVEKTAASSDPKHHIGAFLRKVFEDEDDDEKARSERSDHELALAKAVDAMAMGLESGGVGSVAEALRPESHGSDDDDGDPALAASTRTKDYRKMAVLYMLLSACVADVNMAEEGMGSPRVTKGYDARHRVALRLLATWLDVTWNKMEAVEIMVACSAMAAAREEEQSRENSSPNSRWENWKRGGIIGAAALTGGTLMAISGGLAAPAIAAGFTALVPTLHTLVPLIGASGFAAIATAAGHTAGSVAVAASFGAAGAGLTGTKMATRIGNVKEFEFKTIGQNHSQGRLAVGIFVSGFAFSEDDYSKPWEGWKTNLERYVLQWESKHVIGVSTAIQDWLASRVAIELMREGAMQTVLNGIISAFAWPATLVSAADFIDSKWSVAIDRSDKAGKMLADVLLKGLQGSRPVTLVGFSLGARVVFKCLQELAQLGNNVGIVERAVLIGAPVSVQGEMWEPARKKPQLLPFLHLLIGIASLQMVAGSLFTQGLAGIQDVHVPGVENVDVTELVVGHSSYLSLLQKILDHLELNTYYPVFYPCTPRTK

SEQ ID NO: 77836 - protein, 374 aa, Zea mays
  Coding DNA Sequence Number=SeqID_34461
  Gene Ontology: Mol. function=zinc ion binding; Cellular component =nucleus
  Homolog annotation: Hit_ID=Q7XCX5; Match level="QueryCoverage=95%, HitCoverage=20%, E-value=1e-135, Identity=69%"; Hit description=Plus- 3 domain containing protein, expressed
  Pfam annotation: Domain name=Plus-3; Domain location=270-370; Score =111.0; E_value=3.6e-30; Accession=PF03126.9; Description=Plus-3 domain
  Pfam annotation: Domain name=SWIB; Domain location=132-207; Score =74.0; E_value=4.9e-19; Accession=PF02201.9; Description=SWIBMDM2 domain
  Pfam module annotation: Pfam domain module=Plus-3::SWIB; Domain location=270-370::132-207
MLYNVGVDFDDKNSWEYLFKLYWLDLKGKHLLTIEELKSAKNYWTVPTTAGRREKEESSDELYDASNDQDATFDISSKKQRQNNSSGKRGQKRKKDGGITSRKRGISINSAGSLPNGSTGEGMSLAGDTKWASSELLEFIGHMRNGDSSYISQFDVQVLLLEYIKQNNLSDPRRKSQIICDARLSNLFRKPRVGHFEMLKLLEMHYLVKQVPTLNADSERAFDSYSAQVNHGGYNELSDKLGSDKRRKAHMKIERESTINPEDYAAIDMHNINLIYLRRSVMEDLIDEVAVFSDKIAGAFVRIRISGLGNKQDMYRLVKVLGTHKVAERYTVGKKTTDYALEISNLEKKEIITMDTISNQDFTELNTFRMWYIV

SEQ ID NO: 77837 - protein, 924 aa, Zea mays
  Coding DNA Sequence Number=SeqID_34462
  Gene Ontology: Mol. function=zinc ion binding; Cellular component =nucleus
  Homolog annotation: Hit_ID=Q7XCX5; Match level="QueryCoverage=70%, HitCoverage=40%, E-value=1e-141, Identity=45%"; Hit description=Plus- 3 domain containing protein, expressed
  Pfam annotation: Domain name=GYF; Domain location=155-203; Score =33.5; E_value=7.7e-07; Accession=PF02213.7; Description=GYF domain
MAGSGTKVFGKLGFLLENWKRITKGGGNHPATPRSQLLNTPEETERMINEAPEVHVDPQMDPSYESAEEPDYKKAVDWTMHRNGPDLLFPGRKGTKLNSVENHTQNSLDASGHISSLPTEDVDHRLGAGSNINLNNMAPEPASLGVLSNDTEPEKVWHYKDPNGNVQGPFTLLQLSNWASFFPRDLRIWLTFESEENSLLLTEVLPKQQKDFIQPSTVTTSDKSIWAGSGQDRINSNANNSSSPSLSAECYDPTKYLKPLGGTSPSRSLKDSHALHEVQNQVNDSSTILSSAGSYVPTSSHDERVSRDRVDEWNSSQDNGGIWNPTMNHSRKSNAQQHPDGFTGKDQMLTESKCSSHMVSVLTPQQSERDPATSLSTTSRPECKTMCRQEGSSWSSATNAGVHDLQLTIALTKPETCSPTNPVEDRDSSSASAVSCQSGAPACIPQPDPTSTCNSSKIEATMDLHKTCQPDTSNESFGRLPEPQSGSLFSLKTLNLESEHPSSTPKLEGKETSMNQSGSTSVAHENLATKTRVRPPTSKIDSLQPLKERSCPTERDSITQLEHLFEENVVKRNNEVVNPVSDAEGIAVSDVLESLTEQDCEKYSTHGADCEKYSTHGAAPLQNLVPASAEEEQPQCSSPIALSPWGEPSYYQGEAVDSALWGVQDGNDMWSMPSPTPGLQPSSDRSAKVDGWQRTSSSPEGNRKASGWHSSGRESSKITYGASENRKSFSSHQATTPTGRHSLARRQGSSDKGAAGWEESLGNTWEASKRQQRNSDKNAGCGEALGSNRTWHPSSGNPSRSSQGNHQHDRHSHGSDSRRGSSNYPRRSDHRHDHGSGGSSRPSSRGQPQRGRPSGWRLENWLLALSGRPPDRPGAKRQTPVAGAWRHHATETDARRQTTTRKRQLLQQGCPPKCQTPVAGDLGS

SEQ ID NO: 77838 - protein, 175 aa, Zea mays
  Coding DNA Sequence Number=SeqID_34463
MDIKNIALGATNATSHVAAAGLRLSGKHKARARHVSALDPYSCRGPPGLGTLPRPGPYPGDLGLTRGTRHTLLGAPDPFVQGSGGGPGLSVHPGESYLSLPRGAPSPAPCGGVGCSSPCDQGVSYGCSVFILQKGVPLSRGTDSGPRAHLRGGCESVGGAKPCILRKHSVAEASS

SEQ ID NO: 77839 - protein, 17 aa, Zea mays
  Coding DNA Sequence Number=SeqID_34464
MERSSGRASAELVMWSE

SEQ ID NO: 77840 - protein, 60 aa, Zea mays
  Coding DNA Sequence Number=SeqID_34465
MRTRLGVTVAEHDRGQRPSSTGDEFGRRGPGDGEDPVGLKNWRAQLGVYKSKFKLGFKFK

SEQ ID NO: 77841 - protein, 107 aa, Zea mays
  Coding DNA Sequence Number=SeqID_34466
MTDTYVQPACALHPYVNYVMGTTNNLMTDLRKGVMVMLMAAMDHNMGMDKFPLHRPITISMTDWINITTLPTCLSTITMTRAEHMGFWCHLAADPASWQVELDWEFS

SEQ ID NO: 77842 - protein, 156 aa, Zea mays
  Coding DNA Sequence Number=SeqID_34467
  Subcellular localization annotation: CTP_CleavageSite=81; ConfidenceScore=5.15e-01
MGGSGEAGGKPPLVNRYRPWRFWSPSRSASAAAAAGERPTWAPPPQPQAQALSRRFLLYRLLLRVRHVYNLCDGCGSGAVVQGREKTMGCEDTEARGREMGGRYRAEVVGETGETARGRRRITAAAMVARRDATEAGDSNRTTIPKREKDSAHQSD

SEQ ID NO: 77843 - protein, 53 aa, Zea mays
  Coding DNA Sequence Number=SeqID_34468
MRQGHSVGKIYAQVLAWVDRTVRERVGLSHAIARDVNGHVSEMARSRVEMYFI

SEQ ID NO: 77844 - protein, 172 aa, Zea mays
  Coding DNA Sequence Number=SeqID_34469
MGDAIATRPRPTPGKRCNHDSLEANPRWETQSRFARGHPWVGDKVTTHPRPTLGGRRSHGSPEVNLGREMQSWLARGQPQVGDVVTTRLRPSLGRRGSHDSLDGRCSNDSPEAIPGCGRRSHDSAEANPGWETVMSRPRPIPDGRHSHDSPVANLRRERQSQLARGQLGMTI

SEQ ID NO: 77845 - protein, 187 aa, Zea mays
  Coding DNA Sequence Number=SeqID_34470
MEDEHQTGGATEEEHHMEKYHCMDTHTGIEKGPRKNDLTNYWALGPFVRPFTSLVDPGDIYPPQAPDLWVDLENNIPWGAPEVHPMGVAPDLQMDFLRIIHSKRAGLEGSDESEYSSDEEDSDGGDEGEDDDDDDDDDDDDGGSSGRGGGDGRGSTKGSSGGSGDSTRGSGRGSTKGGGGGRGRASG

SEQ ID NO: 77846 - protein, 92 aa, Zea mays
  Coding DNA Sequence Number=SeqID_34471
MAVAPRRSSKERGWRNTSVFILRSRPPNSGTPRPRITAPHWLAAADAEDPMKKTNPNSAAQRDSHSAGETWFCSKGPISQQHGRGRAEVKRR

SEQ ID NO: 77847 - protein, 106 aa, Zea mays
  Coding DNA Sequence Number=SeqID_34472
MAPRRPGYLLRLVAGVQALGLAVLHLNVATAPDATALYTLSLKKKIKIIAQINNNKTQRDKIKLKTHQVSADITTPTSLCLKTRGYKKLECFCEGFCDSLEALVLL

SEQ ID NO: 77848 - protein, 178 aa, Zea mays
  Coding DNA Sequence Number=SeqID_34473
MSVGLWCAGVGTWTVVDDECVGHTAGTWDMLRRNDVAEKIVSLARSRTGGTHVQDAWHVHAERFYKEGLKNKYLQKAKIKEHAFLASLSDPNHDFNESTSSSSDKEPILRNKCFVLKQGNLDKFESRSSDGLDQMGETIFMVEEQDDDDCPLEPKPAIEGGSNLFKGVKHLGPEVMFS

SEQ ID NO: 77849 - protein, 721 aa, Zea mays
  Coding DNA Sequence Number=SeqID_34474
  Gene Ontology: Mol. function=sequence-specific DNA binding; Cellular component=nucleus; Biological process=regulation of transcription, DNA-dependent
  Homolog annotation: Hit_ID=A7PXH2; Match level="QueryCoverage=86%, HitCoverage=93%, E-value=6e-51, Identity=28%"; Hit description =Chromosome chr12 scaffold_36, whole genome shotgun sequence
  Pfam annotation: Domain name=Homeobox; Domain location=111-165; Score= 80.8; E_value=4.5e-21; Accession=PF00046.20; Description=Homeobox domain
  Pfam annotation: Domain name=START; Domain location=275-428; Score= -19.1; E_value=0.0029; Accession=PF01852.10; Description=START domain
  Pfam module annotation: Pfam domain module=Homeobox::START; Domain location=111-165::275-428
MKYEHLTREAALAEKELLEEEYKKKFDEAKKELSLENDLAGIYLVTMVHEGQLKNTEPDIGVNMGDDELIYLPDIEEYDMDALMGDEDQLNTDQAIFCEEHNLDKVSSSKRPKRFTVQQLQQLESSFQKCSHPDDEMRQELAAKVGISARQVKFWFQNRRSQIKVRSCGTENNKYRRQNAELLATNMELKEQLKGMTCSRCDAPTIMQKWQLMDENAKLREMYSLASAELTKLMQEANLPPSVILEDMALVTSMNPLSSNASSSRSTINQDELLSYVECAIKEFEMLVRDGTPLWLPTIGGDVLNSKEYACQRFPRLHGTIRPEGFVVEATRDTAIVKGSAPDIVDILTDVPRWYKAFPCIVAALRAYHVIFSGPFASGNVLIQEVTWIVHAEYEEASVPPLFRQFYQSGLAFGASRWLASLQRHCEYMVVKHSIQVPTGCVSGSGVLTLSALGRWNLLELAQRMMAIFYKTTSGLPTVEPGNIVTRWGRGCMGTTGEMLEPAVRMVLGNYFGAMDGQPSPLQVLSATTTVWLPGTPPESVFNYLCNGQRRGEWDAFVCAGAVQELSSVATCPHLHGNAVSVLCPNVTNAANNAMLFLQQTSIDVSRALVVYSVVEETMLRSVLDVSDDTSNLVLLPSGFAILPDGHGRAHHAAASNSSSALAGLNGTAGCLLTAAYQVPVPFNNLRHPDVQETYENAGKRICHAIKKIMDAVGAPIVVPI

SEQ ID NO: 77850 - protein, 79 aa, Zea mays
  Coding DNA Sequence Number=SeqID_34475
MTVEIQIATLDIEEKSRSKDVPRSGPMDSGTSNANVVESNQICETSHIARKCRNKKGKKVDGQKIANVAIADTRNSVTP

SEQ ID NO: 77851 - protein, 141 aa, Zea mays
  Coding DNA Sequence Number=SeqID_34476
MAELCRRRGHGHAGGPRALGRAQACIPSRGPSQRGGGQPRAAQSKSWEAKERVVTPPPVKWDLTIVGGSAMAIWGSAAGVDAWGGVARREKTLWPPELVTGAPIPPRATLHCGRVLSVQRQPTLNFLGIALAIHKLPKTTK

SEQ ID NO: 77852 - protein, 104 aa, Zea mays
  Coding DNA Sequence Number=SeqID_34477
  Subcellular localization annotation: CTP_CleavageSite=59; ConfidenceScore=5.07e-01
MEQGRCLEGTTAPHPSKASNNRGAMGGEEPSSPLQLLARSRKMNVASCLGRRGGRTLCRASAIGGSKGRGLLAGRSCCSPAGGQGARPWRPWLLVLLPADCRGD

SEQ ID NO: 77853 - protein, 146 aa, Zea mays
  Coding DNA Sequence Number=SeqID_34478
MEGSARWGRRLHGRDGWEKREREWRLKKNRGGSGKLPSAREGRLQCLFKFSLESVFVNHKNNKTRLFHHLQQHGFENPEYGVYFRKSYPTKEMTSQGYAGLWDSRFLKTKKGSHQPRAEIHHRLAYGHWFTVYGGHCRVFTACDEW

SEQ ID NO: 77854 - protein, 391 aa, Zea mays
  Coding DNA Sequence Number=SeqID_34479
  Subcellular localization annotation: CTP_CleavageSite=51; ConfidenceScore=5.25e-01
MSSRSLMHRVIPPSEPSDGGCPQSFRLVVGGMQLRGSWYLSTIVRLQGFSSASPAASPRRWSPETVTTRPWVGMSKPGCDLGPTLSFKDVHHPRWGGGRAETELYFPHGFVGQPLLQRSRERALTGPARGADFDNAGLVDGGRRQPQCVGLASLAPGAPSCREGGCRAVRSGGPPKMSRAARATFVFWGGPAFAPESLGSVGLAVRGFSCLVKGTPRPLFDEPEPGVAVSAWTEAELARKEDLVGRSLAGSSVSGTDAGVDLPRPRAGLMSSGDSWPRPRGDQPSHLLESDSWRRPRRRWPGRDVEVVLQGGDPRTASPSEARSDLAEGVVDAEGAAAPFNCQDPGLQDRIILYREGPKNRFGRGAFEREDLFGPRNRLSERELLIAEGDE

SEQ ID NO: 77855 - protein, 141 aa, Zea mays
  Coding DNA Sequence Number=SeqID_34480
MAGGSPRKTGGCHSPPDARGRKGQPTHAGAAPRLASSSILAWMTKILEAEGGAEAAAWLAFPTVKLEGPGKGDTPRRILPCEGTGLRAPLLIRGSKAGPPRGSTVASDRVGPTPTTGQRFEGRPPEGLHGRLRLLGLRAHY

SEQ ID NO: 77856 - protein, 291 aa, Zea mays
  Coding DNA Sequence Number=SeqID_34481
MGTEHGVSGELQAGNPTGRPCPVRWGSARGPEARPKVPAGDLPDPVPWRRGPRARCLPPMGFRYKIAPTGLGNVLGDVCAGESCFSRKVMSEVSVSRRRRSPSARRATWGLLRGWGRVCLPWPRPSPSPWVGRGGGRSAEARAESEPWGRAKRSSSSSGAEPESEPWVGRSGVRRLPGLSPSPSPGSGGAEFAVFRVLARVRALGRAERSLPSSGAEPESEPWVGAERSSPSSGAEPESEPLVGRSGVHRLPGLSPSPSPGSGGAEFAVFRGLARVRALGRAERSSPSSGS

SEQ ID NO: 77857 - protein, 401 aa, Zea mays
  Coding DNA Sequence Number=SeqID_34482
  Homolog annotation: Hit_ID=Q6J9V9; Match level="QueryCoverage=15%, HitCoverage=31%, E-value=9e-07, Identity=43%"; Hit description =Putative uncharacterized protein
  Subcellular localization annotation: CTP_CleavageSite=44; ConfidenceScore=5.44e-01
MAAAGGRKQQSNCLQAHVPSWDSERALSHGVKTARPCSVPRTVRARTTAAPPTTRPVALTLRQGRRHLWQAKRATLHLRHDDRVQKGTGKGHTPKGILLSEGSGPRALLLIRGSKASPSEGFDSRLRALGLHAHYSSEVRRLAPRKGSTAASGHSGSTPTTYQGFVGWPPKGSTAASEHAERGMTLGQGSVHSRDTISPRPSPASGKDSRPRRIHVSPEGPLKQRAHLRLARGPARAGFAEKQPWPDRLASRLNCMSIQCKDRLTPYPDARSSVDRAEVTAFTSPLHWLTRQENSAACAAPTAVPPVRVRLTAAKSGLRCHRKLRLARPQGSDSTSTSDDGLRLARPQGSDSTSTSDDGLRLARPQGSDSTSTSDDGLRLARPQGSDSTSTLDNGLRLARP

SEQ ID NO: 77858 - protein, 239 aa, Zea mays
  Coding DNA Sequence Number=SeqID_34483
  Subcellular localization annotation: CTP_CleavageSite=26; ConfidenceScore=5.04e-01
MPSHSPYALRPSIFRAPDGERPRCFRLAVVGGAQLRGSWYLSAIARFQGFSSGSPAPSPCRWSPKMVTTSLMVGRSKPGCDLFPALAGEEGEASRGLPSRGLASRFFLRLLGVETILQLCGGGALQPCRGRRTAAAQSRVQNSVLYPGDGGQPHRGVSQHVVRREGGTRVLGWSHSRFRDEDGSEDLPVRFGAAGACWCGVGGQVDAAAGAEVVAAGESFSADETVSATRGPTSGSFGF

SEQ ID NO: 77859 - protein, 70 aa, Zea mays
  Coding DNA Sequence Number=SeqID_34484
MKKTMPGASSTNAADCDMSRQSKKWSRCPCYAEMSGVGSDADTVACPCGVHYSAETNTERESMGGYKCGE

SEQ ID NO: 77860 - protein, 57 aa, Zea mays
  Coding DNA Sequence Number=SeqID_34485
MHRIGFLAGVCAAACAWGSPRSAVGGGDDPDEQATVESEVQQVEIAEQELIEGKLCP

SEQ ID NO: 77861 - protein, 300 aa, Zea mays
  Coding DNA Sequence Number=SeqID_34486
  Pfam annotation: Domain name=CDI; Domain location=223-268; Score =37.5; E_value=4.9e-08; Accession=PF02234.10; Description=Cyclin -dependent kinase inhibitor
  Subcellular localization annotation: CTP_CleavageSite=95; ConfidenceScore=5.03e-01
MGKYMRKRKRNVGRTTPAAEHGVRTRAQSDAVASTASAAAAAAPKRPRKQTTAAVTGNTSGAAAPGSCYLHLRTRRLQFLPGGEGEVQRPVPPLPAAAAQRSSSVASGEPVEGAGSSRCSSTASSSVDVVVLAVAPASERGGGEAEEARNDDDDYCGDVESVVSDSAECCRRDRRRETTPSSQARVDRPCSDEECSQAADGPTRHRRRRKALAATATAAVACRARATPPAEEIEQFFAAAEKAQAERFAAKYNFDVARGLPLGAGRILLVFMQFVTLRKKSGMLFTGGRTSGLERNNLKF

SEQ ID NO: 77862 - protein, 85 aa, Zea mays
  Coding DNA Sequence Number=SeqID_34487
MTGKKTTASSDCGTPKKAKVVVEDEEEAGLEDEEEATVTLSVEKDALECDICCLPFQSEVFMASQITMHCKNGFVANNNQLHDMS

SEQ ID NO: 77863 - protein, 309 aa, Zea mays
  Coding DNA Sequence Number=SeqID_34488
  Homolog annotation: Hit_ID=A2YAN0; Match level="QueryCoverage=78%, HitCoverage=72%, E-value=6e-95, Identity=67%"; Hit description =Putative uncharacterized protein
MVRALRLGGRAAAAARWCTCRRAAVALCVANLVAALLVARALYAPGSFAFAPKPFETLGFGLWCEKVKKLRKAFTREEKTRKGLPLELKQKVSLEILQRLHDLGEGSNTTEQQEAVEAWRVGKLKDMRSASSKNLSNFGLSSEDSRMLKRALEFNWQRILEDIGLWIPPTIYHIEHDDKPENEPEDEEIIPGPPLPPECNTELHTDYGGTAVRWGLTHHKESAADCCQACIDQAKRARPGALKCNIWVYCPSEYGCYSPDKYEHKHQECWLKQADHPRLNFKDRYPEPYRDSHPTAPVVVPWMSGVITA

SEQ ID NO: 77864 - protein, 119 aa, Zea mays
  Coding DNA Sequence Number=SeqID_34489
MGLAPAEISAPDPRQVVRKRLCEEMEAIHGVLRKAELAEMLVEIYKLMDEVAEEEKRRQQKNESTNACKSTASHSSPRELEDGEFIEEDCGGTPANTCGGDGSDSVVVRKGLGSPPLTM

SEQ ID NO: 77865 - protein, 86 aa, Zea mays
  Coding DNA Sequence Number=SeqID_34490
  Subcellular localization annotation: CTP_CleavageSite=73; ConfidenceScore=5.83e-01
MASSSVLAVPSIPLPPPGAYKRTRPSPVFTTPASAISFAFPRANRASAAVLPPSLRHHFSPPIVPGNRTGGITAADVRHHAADRPP

SEQ ID NO: 77866 - protein, 132 aa, Zea mays
  Coding DNA Sequence Number=SeqID_34491
MQDAARRALSHYCLVLGEVVDGLDLRYYPRCPSGKTGGVVVSPVGEDNPRLSSTVNLVVVLNVELDHALDKLCRAHAEIAQLWAERAERAERRHLADGSPAPVRTQHPYRLPRHGRYVYGNSNCRTRINLGP

SEQ ID NO: 77867 - protein, 165 aa, Zea mays
  Coding DNA Sequence Number=SeqID_34492
MAIVILFEYGYPPRMFGVDIELYEAKFGVVRLSTEHQPRGTSGKGIEVWDDIYGDDIPAKDVLTVAASTISSESTCWQGDPGADWELVDSYMQNCVDKETKEFEDELENMNLDEEVAAPGPGTSRIRCNCMTRCEKDSGRKMVYKSFNEFKVFLVYGIKYRIETN

SEQ ID NO: 77868 - protein, 136 aa, Zea mays
  Coding DNA Sequence Number=SeqID_34493
MVGRWRGWGEDPINRHRAVPLMVARAATTTTANGVTVVPDLVVGGEEAKAERSGGRKAEGWVRIHGDPAASGQSERDERHRHVPRTQKWLGCIEGAIVNLSRPSKASNGEHNRTQGVMRDELGGCKNKRTPSHYDV

SEQ ID NO: 77869 - protein, 61 aa, Zea mays
  Coding DNA Sequence Number=SeqID_34494
MANQQGYRPSVLRLRSSSATARERMAVKVPEDGSTKRKYHPKSLKAKGRIRNQGCKSVMQQ

SEQ ID NO: 77870 - protein, 71 aa, Zea mays
  Coding DNA Sequence Number=SeqID_34495
  Homolog annotation: Hit_ID=A7TVU8; Match level="QueryCoverage=61%, HitCoverage=7%, E-value=1e-07, Identity=60%"; Hit description =Asynapsis 1
MDVSEYVTSNDNYVCSLLAIRPSSSKDGYTVNQKVDPETPHIKEATMSDVSPTKVTKHNNGDLLYMKVNLL

SEQ ID NO: 77871 - protein, 192 aa, Zea mays
  Coding DNA Sequence Number=SeqID_34496
  Subcellular localization annotation: CTP_CleavageSite=62; ConfidenceScore=5.71e-01
MPRTPPQGGLALGRRTHQLSRPRRAPPPSRPSQALPTRPRNTHEPPVPASRSPWPPSRPRSRSESPGARSGRHCGRLSRPQQRPPSSSRSLHPSSCLFLSLSIEHSSTPPSPSWRSRAGAPSHVGHNAVEQPRAQHPTCHCVMCGLLPPRGYGWGGDLPIGEDFFQMREKEKFEKEAERQKDQGNVEDKSQV

SEQ ID NO: 77872 - protein, 362 aa, Zea mays
  Coding DNA Sequence Number=SeqID_34497
MGARTHHAMGHAWGMGAWGTTIQRIGTGAGNGRSTELSQLLGPVERKSHAIKRLDEVRKFTANGSSSPSARKPWHGPLPKPRISPSLTIGDIIERAGDLENRASKVTVLPSSQSDPTLPPFPKFTQFELAQLRKGLNQNGPGYHSRGLLSKTWSARNPGMYALRLRVYVRPKSSVHSSQLHLHQPPFQIFTSPSRSYAQALMDGRGAVRDGKAMAWKEVDRRRHPRIEVKTEQLHLRGHRLSRGRGPSEDRGRRTWRSRGGRYGGRPFHGAFRAPQDFAESSEGADPELERKQRRSVRLLMVLLLMIKERNAKKSCAAKFVKWITLHRSVRRSMALNHTLFYVVLQEAIRVSSKFPQVEPRA

SEQ ID NO: 77873 - protein, 145 aa, Zea mays
  Coding DNA Sequence Number=SeqID_34498
  Gene Ontology: Mol. function=nucleic acid binding; Cellular component= cytoplasm; Biological process=multicellular organismal development
  Homolog annotation: Hit_ID=Q7FS89; Match level="QueryCoverage=59%, HitCoverage=49%, E-value=3e-43, Identity=95%"; Hit description =Putative argonaute protein
  Pfam annotation: Domain name=Piwi; Domain location=3-142; Score= -112.6; E_value=0.037; Accession=PF02171.8; Description=Piwi domain
MNPFAVVNGEPYPLDIRGELDDTTAFKKFKKDGISEGQFNHVLILEMDAIRKAYASLEDGYLPPVTFVIIQKRHHTRLFPGVHGRRDVTDRSGNILPGSVVDTEICHPREFDFYLCSPCWNSDTHDARALSQLVSLYASFTKFFV

SEQ ID NO: 77874 - protein, 85 aa, Zea mays
  Coding DNA Sequence Number=SeqID_34499
MVGRRHKDMVGEEDMGRQFGLASAHENTASIEDHEANDQRVQSLILPFASEDSLPMADQRADEQQKTQEDIQVFYLELIKKHQQL

SEQ ID NO: 77875 - protein, 782 aa, Zea mays
  Coding DNA Sequence Number=SeqID_34500
  Gene Ontology: Cellular component=endoplasmic reticulum
  Homolog annotation: Hit_ID=Q6KA74; Match level="QueryCoverage=76%, HitCoverage=94%, E-value=0.0, Identity=74%"; Hit description=Ankyrin repeat protein-like
MGSDEAKSIFRGRDGGRTLGSGETELPMSPEAGLSRCRPHSGEWHGSRSGAGDAVFLSAPLLHLQQEINSIRSRTGVFLLLAAGTDAHLPARPGTGTATAAATGDFVDPVDVAAFGGSGICPRRTAEQPATFDAGCLVERVVRAQPGAPGRPAGATTRRCGGWSPRSRACPRAGEVATEEESIAGGGLGGRRLGRRRPPRRASEGDPLHLARAPSGTPSPPTSSCPPGADWSLQNADGWSALQEAVCTREEAIATIIARHYQPLAWAKWCRRLPRILASISRIRDFYMEITFHFESSVIPFISRIAPSDTYRIWKRGAALRADMTLAGFDGFRIQRSDQTFLFLGDGARPEDAGGKELHPGSLIVLAHKDKEITDALEGAGVQPTESEVAHEVALMSKTNMYRPGIDVTQAELVPHLNWRRQERAEAVGQWKAKVYDMLNVLVTVKSRRVPGAMTDEELFAMDGEEKNGRGAELDAELDEVLTAEERKQLDSALRMGNNEEESEQRCDEGDTGAGHMDEHAAAKDKKGWFGWGGKKGAKGDDKPSKMGSKDETSDPGKQKEKGSGKKKKGGSPAESLKHESEYKKGLRPVLWLTPDFPLKTDELIPLLDVLANKVKAVRRLRELLTTKLPTGTFPVKIAIPIVPTIRVIVTFTKFEELQPLDEFATPPSSPTQFQDAKTKESEGSGSWYSWVKGGRGTQSSDSGDSRSWKDEVDPFHIPSDYTWVDATEKKRRMKAKKAKSRRGPARKQSSKNTAEGAHRPNDGWLRGVNHALTGVLHAEAG

SEQ ID NO: 77876 - protein, 182 aa, Zea mays
  Coding DNA Sequence Number=SeqID_34501
  Homolog annotation: Hit_ID=A3ACJ3; Match level="QueryCoverage=64%, HitCoverage=64%, E-value=2e-25, Identity=51%"; Hit description =Putative uncharacterized protein
  Pfam annotation: Domain name=PBD; Domain location=23-134; Score=36.0; E_value=1.3e-07; Accession=PF00786.19; Description=P21-Rho-binding domain
MKGLLKGLRYISQIFDAKEPEMQIGKPTDVKHVAHIGWDNASVTAPSWMNEFKASPGAARGGDPEPSQPGGSGGCGDEQTGGEDAGGKAERPRRTRGNKVSGGNEPAKRRDCAAEGSRRDRRVAKAADVAEGAEGDAAAAPRQRRRKPRAASGGRSKSSSGGAAASDAEAAQPEAEADRDGC

SEQ ID NO: 77877 - protein, 885 aa, Zea mays
  Coding DNA Sequence Number=SeqID_34502
  Homolog annotation: Hit_ID=Q6KA75; Match level="QueryCoverage=100%, HitCoverage=87%, E-value=0.0, Identity=64%"; Hit description =Peroxisomal membrane protein-like
  Subcellular localization annotation: CTP_CleavageSite=40; ConfidenceScore=5.75e-01
MSSRLKDTGGGGGRATAAATRPLTPKPFSVSSSARRTTAVAAAGKENTASKPSKPTSAVRWSTSSLPRASRIQSSVESSKLVSTLRAPVLPGRPSVGKDNVVEAGLRRSVNGGIRASSVEKGRRSVSVVGSRASEARRGSAGAGGDGTSRRERLDAKAKGLDEISRRRDDLDAKGKQTDEIGRKRESFDAKPKQIGGKRQGFGVNVSKQCDEIKGKTDAFVSNMKKQSEDVGGRRVGSDSKAKAGEEINMRKEGLNKLVKEMHTQKADPGEVSSKSVECCATQKDDEIGNTSVIPVFTVHVVDSMDAPDPIRKQQKNNEEGRKPEEKGKLSDRIRVFEKVAAGGEGASAKPVSAVNRYPSKLHEKLAVLEGRVQKIATDIKKTKEMLDENNPDEPKQILSNIQKEITAIEKAISHVKDDNKIQLGTAENSECENSHPETAEKCTIAKPGDLKQAGKGLNADELEARFLPHHKLLRGHISSTSTQQESSVGMRKDCNGKTRSAASNPDDDENSIAMEFLASLDGEENDFFKERKANKLEKNKTCEVADATSKTSSQGSSKNPVVPNHKEETELLATEELEEFDDRENKSSMMLQEETDESCNSQLSEGEAVLLAHGDGTCSYYDIANHEFKSEYKPPSMVSNNMWGDCWLIRAPGVDGCSGRYVVAASAGNALDPGFCSWDYYTREVKSFHVEEEASQAFAPTSRAILGALSNVGSSRSSSALSNAERQQWWYRPCGPLLLSTASKQKMVTAYDIRDGDVVMKWEVSNPVMGMEYSSPLQWRSKGKVVIAGSESIGLWDVNSLNPQPLLSVASGKKLYCLHVNNTDAEVGGGVRQRVSSSEVEGNDGVFSTQESVNVFDFRVPAGIGLKIARHGGTANSIFSRGDS

SEQ ID NO: 77878 - protein, 417 aa, Zea mays
  Coding DNA Sequence Number=SeqID_34503
  Gene Ontology: Mol. function=Rab GTPase activator activity; Cellular component=intracellular; Biological process=regulation of Rab GTPase activity
  Homolog annotation: Hit_ID=Q6K986; Match level="QueryCoverage=99%, HitCoverage=99%, E-value=0.0, Identity=75%"; Hit description =Putative GTPase activating protein
  Pfam annotation: Domain name=TBC; Domain location=145-338; Score= -62.7; E_value=0.0042; Accession=PF00566.9; Description=TBC domain
MRLRLLACCYNDPEMRIDPDTVYPIRPDCRDDAPKTRFKPRPGLTLSPKRWKLLHNEEGCVDIAGMIKRVQRGGVHPTIKGEVWEFLLGCYDPKSTTEQCNQLRQQRRLEYEQLKAKCREMDTAVGSGRVITMPVVTEDGQPIENPNGGASGSEQKNSGAPLPKEVIDWKLTLHQIGLDVNRTDRLLVYYERQENLARLWDILAVYSWIDKDIGYCQGMSDLCSPISIILENEADAFWCFERLMRRVVEKLDNTELHFNTISQDGYCMLHQNLDGGEYLFAFRMLMVLFRREFSFVDTMYLWELMWSMEYNPNLFSMLESDTGTSSASTKDESVLGQCGKFERKKLQAAKKDDQIPLSVFVVASVLEARNKKLLGEAKGLDDVVKILNEITGSLDAKKACREALQIHEKYLKTVKAS

SEQ ID NO: 77879 - protein, 766 aa, Zea mays
  Coding DNA Sequence Number=SeqID_34504
  Gene Ontology: Mol. function=nucleotide binding; Cellular component =cytoplasm; Biological process=meiosis
  Homolog annotation: Hit_ID=Q6K987; Match level="QueryCoverage=97%, HitCoverage=100%, E-value=0.0, Identity=68%"; Hit description =Endoribonuclease L-PSP family protein-like
  Pfam annotation: Domain name=ATP_bind_4; Domain location=1-266; Score= 69.3; E_value=1.3e-17; Accession=PF01902.8; Description=ATP-binding region
  Pfam annotation: Domain name=Ribonuc_L-PSP; Domain location=447-577; Score=5.2; E_value=9.2e-06; Accession=PF01042.12; Description =Endoribonuclease L-PSP
  Pfam module annotation: Pfam domain module=ATP_bind_4::Ribonuc_L-PSP; Domain location=1-266::447-577
MEVVALVSGGKDSCFAMMRCMDYGHKVVALANLIPLDDTVDELDSYMYQTVCPVSYLPSLAPGARSVIRPSVLAGIWMTLADAPACCGRGRGGFRLGTRLWDQGLRYSVTAGDEVEDMFALLSEVKRRIPSISAVSSGAIASDYQRLRVESVCSRLGLVSLAYLWKQDQTLLLEEMIRRGIVAIIVKVAALGLKPSSHLGKELAELKCHLLQMNENYGINVCGEGGEYETLTLDCPLFRNARIILDDSEVILHSADSIASVGILHPRAFHLEQKPDSSDRIGDGSAVQESSSCVYEVDEVTTHDDVGEKQALSPAVDAYTNVDLCISKTGNNLRSMSCWIQDPSRASEGLKADLIAVLSRIENQLKEEGLGWVNVLYVHLYISSMKEFGLANEVYVSFITEKKCYLGVPSRSTIELPLVQAGLGKAYVEVLVSNEVVKRVLHVQSISCWAPSCIGPYSQATLYEDILYMAGQLGLDPPTMKLCLGGPRAELELALQNSEAVANAFSCSIYISAIHFLVYCSAQLTSSEKEEIEQTLKSSYITRLDRSKGGSYPTVLYVFASDLPKGARVEVKPILYVPSTDDWVAAEETETGVPLPAPSKTWTDCTAPYSALRDSCCQVHTTGGRICSAVVSITDDIASKICSAAGQLHHGEENLKIMARFCAFQIAKTLADNRFSWDSVTMLRLYYSVDLAVAADAVSGAFSEALAELAQDNPSMRTDVPFYNVVPVAGAGRSACANDIMACELLASNVSSAKSIPAEPFAVTPA

SEQ ID NO: 77880 - protein, 908 aa, Zea mays
  Coding DNA Sequence Number=SeqID_34505
  Gene Ontology: Mol. function=microtubule motor activity; Cellular component=microtubule associated complex; Biological process =microtubule-based movement
  Homolog annotation: Hit_ID=A5BX96; Match level="QueryCoverage=98%, HitCoverage=96%, E-value=0.0, Identity=47%"; Hit description =Putative uncharacterized protein
  Pfam annotation: Domain name=Kinesin; Domain location=62-390; Score =254.1; E_value=3e-73; Accession=PF00225.14; Description=Kinesin motor domain
  Subcellular localization annotation: CTP_CleavageSite=35; ConfidenceScore=5.31e-01
MAPPPTPRSTPAQVPPGAAATPLRTPASKHRLHFPAATPRNAHHANHGGGGATEHPVEVIGRIRNLASGSASALEIMGSGTAVRVRGDAVGCRDFTLDGVSVSEEEDLEGFYRRFVRSRIQGVRVGAKCTVMVYGPTGSGKSHTMFGCTKQPGIVYRALRDILEGGEGDSAEDDAGFDAGLFVQVAVLEIYNEEIYDLLVGSGATAKGNTPKCIVEASQFCIYAQAKLEVMGKKAKNASYISGNEAGRISREVFKVEKRRTVKSTLCNERSSRSHCMIILDVPSVGGRLMLVDMAGSENIEAAGQTGFEAKMQTAKINQGNTALKRVVESIANGDSHVPFRDSKLTMLLQDSFEDDKSKILMILCASPDPKELHKTVSTLEYGAKAKCIVRAAHATTPRDKMSSEESSVMLNSRIVAMNQFIHKLQKENKLREKERNEAQNVLRLKEEELAQLRAKLKLIEGQGKATENEINSKVMEKTQLLRSELMKMEEAMLKQQQELTSLRQRLQEVEHEKADGCQPLQQDIIGGRLLARLSEMPAGLDQSVAMDMSMDLDMGDQPVMQDVKVIKEDTRQQGHIWNHTATAASACTGSVVQEDDVKLSGYPEKTVLSTVFEEGDEEDAEKCGLQEEVRKEVVEENFNVDITQHTLSEPDDPATRKHRIENIFRLCGNHREIAKKPKVQSPAKEMFCSENKSPAKQVFGDQNKSSSNQIFGDENKEPSAWGAIETPMCDVRVTDSPVSSQLSPIVCQVVAAPLSEELNTCSAVEGSDPSKEKNSLAGQKDGGGLLEVYIKWESGNLIKGLKLLRNSCLSDLRKLIEAHFEEVGSKQQQQQFIFLLLGDPSGAPVSRDKEASVQISRLPHWNNQADGYLACLRADKKPAADHTPFSPLDSKLNTVVKDAHLAGAMFA

SEQ ID NO: 77881 - protein, 109 aa, Zea mays
  Coding DNA Sequence Number=SeqID_34506
MSGRPTAVAPSLSFPILLPASTCTFLLQEGVEPLHEEFIDKEGVTGSSGLFVGDVCANVADSGFVFYAVSMVFRERFVFLGSKGIRKKLQEVDVASGSAPGFGEPKYRR

SEQ ID NO: 77882 - protein, 310 aa, Zea mays
  Coding DNA Sequence Number=SeqID_34507
MALPVDVAGPRPRPGDVGAPPKLGSNLSSVAEAEPEPEPLGRARRRSFGSGQGGVRALGSGEAEFVVFRVLARVRALGSGEAEFAVFRVFARVRALGSGGAEFAVFRVLARVRALGSGGAEFAVFRVLARVRALGSGGVEFAVFRVLARVRALGSGGAEFVVFRIFAESEPWGSGGAEFAVFRVFARVRALGSGGAEFAVFRVLARVRALGSGGAEFAVFRVFARVRALGSGGAELPMAPLARPDCLSDSLCRVALQSEWRRRRCPSVRPLYADGGYQLRIRRLEGLRFNLKRWETSLPIGRQGLRMKKK

SEQ ID NO: 77883 - protein, 90 aa, Zea mays
  Coding DNA Sequence Number=SeqID_34508
  Homolog annotation: Hit_ID=Q9XEQ8; Match level="QueryCoverage=37%, HitCoverage=14%, E-value=6e-07, Identity=76%"; Hit description =Putative uncharacterized protein
MGASAPTTALSSAPPLPLSLLGGDSKEEEEEGFRRVPGTHQECTSYSPRSFLILTSVLTFVCVQDHGYKTIVTIGDGATDLEIEQDRNNR

SEQ ID NO: 77884 - protein, 121 aa, Zea mays
  Coding DNA Sequence Number=SeqID_34509
MEFKNSQIEGFLEEEGIKHELSSPTHLSKTVLWRERIELLLSAFRDRGVPKPTSECAACPSPDGSSAWASAKGGSEVAGDGRERGGNPAAFVFVPRPGQRTQVYNGGVAECYVSSGGELAP

SEQ ID NO: 77885 - protein, 119 aa, Zea mays
  Coding DNA Sequence Number=SeqID_34510
  Gene Ontology: Mol. function=carboxyl- or carbamoyltransferase activity; Cellular component=ornithine carbamoyltransferase complex; Biological process=amino acid metabolic process
  Homolog annotation: Hit_ID=Q8SA97; Match level="QueryCoverage=90%, HitCoverage=21%, E-value=4e-16, Identity=47%"; Hit description =Ornithine carbamoyltransferase
MALLVDVTGPRPRSGDVEAPPKPRSSLSSLAEAKSEPLGQARRRSFGRGQGGVRALGSGEAEFVPESEPWVGRSGVRRLPGLSPSPSPGSGGAEFAVFRDLARVRALGRAERSSPSSGT

SEQ ID NO: 77886 - protein, 167 aa, Zea mays
  Coding DNA Sequence Number=SeqID_34511
MCIKLRRETGRLTAGNEGGVDGWRARRGRTADSLLRDGGHGLPSSRAGSASSAARARGLRAAACSLLRERAARRGRAGALRRAARGSSEGALRRGAGGSARADGRAQAAGGRLGRGRAQAGHGRLGAGRLARSGGARAGALRRHGERGPRAWRAWALRRRGAARRAR

SEQ ID NO: 77887 - protein, 266 aa, Zea mays
  Coding DNA Sequence Number=SeqID_34512
  Homolog annotation: Hit_ID=Q6J9V9; Match level="QueryCoverage=36%, HitCoverage=28%, E-value=7e-08, Identity=39%"; Hit description =Putative uncharacterized protein
MEAWAHTSCNRRNGYCVQENRTTTRANAASFRLRNQCRDSRQPCAASDTSGRRSEHCFVSVIMTASKKGPGKGDISKKDPSQRRKRAPSPPTDQGFEGCALRGSVTAPEHSGSVPFTDQGFECWPLGRERFCNGIPPEGGIEPSDPIEWVRVQQITCRGSGAALALGVQTDSRLARGSPQAMSAPSARPKPNLGILCREATLAKSPYQPTASASEEDLRLARPQASASGGVTTSPEPSLGLRRSLRLARPRPRIDCATGDTSLPYS

SEQ ID NO: 77888 - protein, 255 aa, Zea mays
  Coding DNA Sequence Number=SeqID_34513
  Subcellular localization annotation: CTP_CleavageSite=45; ConfidenceScore=5.06e-01
MAGRCARRAAMALQGWISRCGGRLVAPLSAPPNHRLAPPSSSLPRGAKGSIRATRPRLERDYHQNMQMSQIIFCGFGDGEGACARSRANLGFYRSPPRSSRANLASAMIRTFDVCTFAESMSIHEPCFRSSPQLFLLQSELEVLSSSGRPTAPQFFCMTRAAALGRGLLATSLTTCASATLSGFLRSKQWMFESEVDGVVYQSYLDSSCLLRLFQFWDQVAPIPKSSILESEVDGVVYQPYLGNLLSEPNIQPKA

SEQ ID NO: 77889 - protein, 66 aa, Zea mays
  Coding DNA Sequence Number=SeqID_34514
MVAMNFEEDARRPEVEESTGAREFVANGVATSPAMMGWPKGVMATRSKSLHQSCSATYQLQLDYRD

SEQ ID NO: 77890 - protein, 262 aa, Zea mays
  Coding DNA Sequence Number=SeqID_34515
MTTSSVVGRSKPGCGPCSALSFKDLHHPCWGGGRAELGFYLPHGPAGRLFLQHSGERALTGLVEGANFDNAGPVGRKRRQLQRAWLAGSAGSVAASDATSCRLIRAWSSVHRTGDCCAVRTGGSSKTTAGAQVAAVVGAEVVAAREGFFADETVGATCSRTPGSLALTACPRPSCGDVGEGLLTTVFALMSSLLLFSRPRRRSLSLLVQWSSASHLEFVVPQALWCGGCSYPREWNRSPICNGTLSMGVCSLWLSRPEHLGI

SEQ ID NO: 77891 - protein, 376 aa, Zea mays
  Coding DNA Sequence Number=SeqID_34516
  Homolog annotation: Hit_ID=Q6QP51; Match level="QueryCoverage=66%, HitCoverage=78%, E-value=8e-15, Identity=31%"; Hit description =Putative growth-regulating factor 1
MQKACNRTTVGHPFGFIASGGDWERGYFERDPSPRRKRALSPPTDQGFEGWPLGRVRQPPQSTRASSSLLIRGSKAGPRKGSTVAPEHSGSAPTTDQGFEGQGFVYLRDAISPRPNLASGGNCSPGRSYVSLEGLLRQWAHPRHARGPTRVGFVEKQPWPNRLSNRPYHRRIQCEDRLTPYPDTRASVGKVEENSAAHPALTAVPATRARLTTASSASDTTGSSASPDLRPRPREEFSASPDPGLGLNLGLGRWSPPRPTPGLGLNLGLGRNRVLARPRSRPQEKSPPRPTLGSDRPCHGGYIITLPLASSSYGEQDRRPIWLAPVTGLRHFSDGHVIAYAGLKHFSDSHVGMYTRLRHFPARHGPPGVETPTFGD

SEQ ID NO: 77892 - protein, 127 aa, Zea mays
  Coding DNA Sequence Number=SeqID_34517
  Gene Ontology: Mol. function=peptidyl-prolyl cis-trans isomerase activity; Cellular component=spliceosome; Biological process=protein folding
  Homolog annotation: Hit_ID=A2Y8V7; Match level="QueryCoverage=59%, HitCoverage=56%, E-value=2e-20, Identity=62%"; Hit description =Peptidyl-prolyl cis-trans isomerase
  Pfam annotation: Domain name=Pro_isomerase; Domain location=42-127; Score=-44.5; E_value=0.00023; Accession=PF00160.12; Description =Cyclophilin type peptidyl-prolyl cis-tr
MEDSAGQEVCVVLGIGDNIKGLLATLSRVDAIISYDSSPRSTCILSYPIPCQVPRTAENFLALCASGYYDSTVFHRNIKGFMGLHLGTKFADEFRESQGSTLCSAGANSRPNANGSRFFITYAKQPF

SEQ ID NO: 77893 - protein, 864 aa, Zea mays
  Coding DNA Sequence Number=SeqID_34518
MCSHYYSAYPPFEVAEEDADEGALRCAAGQSSGRDLVEEFVAYGVWPLAHGWVLGEVCPCQMPFHGGRVVRSPAFTLNLWNRDPAAFVRDAEDGAVRLVGRYVPRTEGQRSFDIRGSNDRLNRVFELNQLPYDGYPGQDEADRRGKKPAVETGDDPAPAAAPPSKKRKLGTATGGIGVSDSFARDLMRTCAAPGERMSSPELRESSARMLRVTGGCWPRNVPIPCAAEEDYFTSRMVHRWRVFPYGRNIGAVVWTAMDKDHQGAAQKCQATVRIHEARPKRPRGTAKAVASGGGSDEGQLAIVAPAAAIAMAAQAPKARGEILGAGGEVPALALVRDEAGATTRRLKGVTEALSQATEALSQVADFTSRTASGALTAALSAEVERLRTQHADAVREKSASDSKCRNLTDKVAALEREKVDLRRQLAAERREANEAIAKEQAAQADAKLARAEGNLAKELVEQLQGRLTALESRAKEAEAAMRAEAERTRTQLMDTYRELGARTGDFEVPDREPGLRCLQWAQEELLELPTVVGGLMSYASLVTCEGAMNALSREGCRHFEAFDQVDEDFERDIYKVEDPVVKESAGALYDRMWGLYGREVVRERAEAARAQAERGERVDDFGALDSVLPDLGSTLAEAVTGVDLGPTPETAAIATAAPPSAATGEGDPDAPAAAVPSAEGSAAVAAETAAEAAAEPTAEAPAAPGPSQVQEFGPAHATATTEFLAASTAEGGNEYGGPVSEFFDFTDSGSSVEWTEESSEEDLDYFAALDVAAAAASPHTADASNVPGPSTGRRRRRAVAKPRVSAEEGARLRVSRAGRQELLSSPAAAGVGEGELRSLFVGEELRIMLFNYREMGIIPKIEPM

SEQ ID NO: 77894 - protein, 236 aa, Zea mays
  Coding DNA Sequence Number=SeqID_34519
MKLRSSNDKAEGLRVFPIQGLGSRREAESSPKRSKVLPLWHGGWVPRVMQAGPGQKKPNHRARCMQLPSGYKHSSTFAQTSGPRASLLMRGSKAGPSEGFNSRLRALGSRVHYWSEVGPRRVHSRLRHRARDEPGYVRYITKARATLPEVLLERASEPLADPNKWGTGVHSDYPSAAHRRHHVRRPPRATWRFTPSSLRKGDAGAYVKKLSLSLTVLSPCAEARGLLSRTRLRPNR

SEQ ID NO: 77895 - protein, 83 aa, Zea mays
  Coding DNA Sequence Number=SeqID_34520
MPVAVASWVAAAASLGLRLSCDDHVFMTLLFQHIQVSQKASFPLLSEDISFGPIVFQGVRNIRSQIPLKSGQKRDPQTTEDTL

SEQ ID NO: 77896 - protein, 238 aa, Zea mays
  Coding DNA Sequence Number=SeqID_34521
MEKCSMAVYLGESRNYLNHPSFQVTFTGYRFPDTCQNVARKALRQLCQNYNRVMFETPLRYFPPSNKNTPAWRKRLQALSGRDPTEDDPTIVYMAGYLHTLDNQYDDLASHCTHLNSRVESLEHQVRELTREKASLQESLEIAEGEETNTREAYRTLKMDYNKKLKKLAPTRKIRKKTKSQECQTEQKEEAPPALPPTRIGNLSDTKEMSLASLDDLLKEFGDTLEKEFGSTLDSTRV

SEQ ID NO: 77897 - protein, 1706 aa, Zea mays
  Coding DNA Sequence Number=SeqID_34522
  Gene Ontology: Mol. function=1,3-beta-glucan synthase activity; Cellular component=1,3-beta-glucan synthase complex; Biological process=1,3-beta-glucan biosynthetic process
  Homolog annotation: Hit_ID=Q8S1X0; Match level="QueryCoverage=98%, HitCoverage=99%, E-value=0.0, Identity=80%"; Hit description =Putative callose synthase 1 catalytic subunit
  Pfam annotation: Domain name=Glucan_synthase; Domain location=888 -1651; Score=984.1; E_value=5.5e-293; Accession=PF02364.6; Description=1,3-beta-glucan synthase component
MSLLRNRRAAAAAAAAAAAAGGGGYPEPPAYNIIPIHDVVMHGEHPSLRFPEVRAAVEALAHAADLPPPPLARAWDAFRADLFDWLGATFGFQLDNVRNQREHLVLLLANAQLRAGGTLPTDHPADVLHHSIARDIRRKLLKNYKTWCSYLGKRPHVHVPSGGRRVAQGVGPDTRRDLLYTALYLLIWGEAANLRFMPECLCYIFHYMALDLNHVIDQSIDIETGRPSVPAVHGVDAFLDKVVKPIYDVLEAEVKFSRNGTKPHSAWRNYDDVNEYFWSRRVFRRLQWPLSPARSFFIKPGNPGRIGKTGFVEQRSFWNVYRSFDRVWVMLILFFQAAMIVAWDGHTPWFSLRYRDIQIRVLSVFITWAALRIVQAVLDAGTQYSLVRTDTIFLAVRMVLKVLVAVGWTITFIVLYVRMWNQRWHDRRWSFSANSRVLNYLEAAAVFLIPQVLALVLFIVPWIRNFLEKTNWRILYVLTWWFQTRTFVGRGVREGLIDNIKYTTFWVCLLTAKFSFSYFLQIRPMVKPTKTILSLHDIRRNWFEFMPHTERIAVIFLWAPVVLIYLMDIQIWYAIFSSLTGALIGLFSHLGEIRSVEQLRLRFQFFASAMQFNLMPEEHLDAVHGGLRSKLYDAINRLKLRYGFGRPYRKIEANEVEAKRFALIWNEIIQTFREEDIISDNEVELLELPPVVWKIRVVRWPCFLLNNELLLALSQAKELVADDRTHWSRIRNNEYRRCAVIEAYDSIRHLLLEIIEDGTVEHIIFSQLFFAFDAAMENGKFCEEYKIELLPEIHSSVIALVELLLKEKKDQTKIVNTLQTLYVFAIHDFPKNKKDMEQLRRERLAPSTLEDSRLLFEDVIKCPGNDDVSFYKQVRRLHTILTSRDSMNNVPKNPEARRRITFFSNSLFMNMPRAPTVEKMMAFSVLTPYYNEDVMYNKDQLRRENEDGVSILFYLQKIYEDDWGNFLERMQRDGMTDDSEIWAGKYQELRLWASYRGQTLARTVRGMMYYHRALKMLAFLDTASEVDITEGTKHLASFGSVRHENDVYPMNGGFRRQPQRRLDRGTSTVSQLFKGQEDGAALMKYTYVVTCQIYGKQKIAKDQRAEDILTLMKKNEALRVAYVDEVHQRGYTEYYSVLVKFDQSLQREVEIYRIRKKNHAIIFTRGDAVQTIDMNQDNFFEEALKMRNLLEQYNYYHGSRKPTLLGVREHVFTGSVSSLAWFMSAQETSFVTLGQRVLANPLKVRMHYGHPDVFDRLWFLTRGGLSKASRVINISEDIFAGFNCTLRGGNVSHHEYIQVGKGRDVGLNQISMFEAKVSSGNGEQTLSRDVYRLGHRLDFFRMLSVFYTTVGFYFNTMLVVLTVYTFVWGRLYLALSGLEAGIQGSANSTQQQKPWLGFFTALPMIIENSLEQGFLPAIWDFFTMQMNFSSVFYTFSMGTKSHYYGRTILHGGAKYRATGRGFVVQHKSFAENYRLYARSHFIKAIELGIILTVYAAHSVIAKNTLVYIIMNISSWFLVVSWIMAPFAFNPSGFDWLKTVYDFDDFMNWIWYPGGLFSKPEQSWEVWWYEEQDHLRTTGLWGKILEILLDLSLLAFIPTGWGLISIAQVIRPFIESTVVWDSIISVARLYEILLGVFIMAPVALLSWLPGFQEMQTRASVFLLNTLLMVKVVLTQIVAAVKVKQRCSISYVQLSNSVWKGFVLTDIA

SEQ ID NO: 77898 - protein, 175 aa, Zea mays
  Coding DNA Sequence Number=SeqID_34523
MEEDNTKEDDLLGEDLVDYGASPELDIQKFLNKENSSACTAPTVVPPARVRLTAAKSSLGRHRKLRLARPQGSDSTSTPEDGLHLARPQGSDSTSTPEDSLRLARPQGSDSTSTPEDGPRLARPQGSDSVSTSEKPPPRTTLGLRLSLDLGKASASPDLGLGPTTSQRGTSLPYP

SEQ ID NO: 77899 - protein, 193 aa, Zea mays
  Coding DNA Sequence Number=SeqID_34524
MAAREDGLTSRLSLSLPRERLRRRDSTSYSGSTGEKAFVKNLREGRNEAGDSATSSARTKTTSYKLGAENSFTRRNPLSTSSTEKMDTGYKEKKKQRPIKLPFWHLRPQRRIERSLSSRQLHSTPTSSSSGGGGVESSPSPTTNRPYLGKNLLSGKLVDGGTDAVTPDDIMKPENKIQRSLYRETRYQSWEKL

SEQ ID NO: 77900 - protein, 115 aa, Zea mays
  Coding DNA Sequence Number=SeqID_34525
  Subcellular localization annotation: CTP_CleavageSite=23; ConfidenceScore=5.52e-01
MAAVARSFLRSSGSSSLRSAAARAASRAGPVPLPRRIPSSGPRRVPGVPDAHAQRHGFGAHDVATRCPGLQGIGLAIRRWNVADYYPVTSDLQMDDLSLLETCSDGIWSGLCNTS

SEQ ID NO: 77901 - protein, 57 aa, Zea mays
  Coding DNA Sequence Number=SeqID_34526
MAPPVDVAGLRPRLGDVETPPKPRPLQLYADGGYQLRIRSIEGTPNYGPRQSHYAQP

SEQ ID NO: 77902 - protein, 209 aa, Zea mays
  Coding DNA Sequence Number=SeqID_34527
  Subcellular localization annotation: CTP_CleavageSite=37; ConfidenceScore=5.02e-01
MSGAPEDSNAHSSPSGNSGGNSAIIHRTVRCTPDSVQCSKEERPPELASLGKTQRLLRYNSPDMSGVHQTVRCDCGATTTSCQRSPAGAFNARQKRAKVRHARAGTPDIKQYMFGVHRTSRWAQKTELQRSKSNGFGDVAGAPDMSGVPENRSNTNKSNVDMILIPGISTSTSGLVSTSSETRNNKLLHGYNSANLLLLLPNAQSIIKI

SEQ ID NO: 77903 - protein, 378 aa, Zea mays
  Coding DNA Sequence Number=SeqID_34528
  Subcellular localization annotation: CTP_CleavageSite=45; ConfidenceScore=5.69e-01
MKTAACSRVKAPSSSSAGSQAGGQRRAPGREAGTHCVAPLPGFVVGSSPRVGFRRCRCLCHPWRLKRRAKAEHRRGVGTGETRQSLTARRKRERRVRGWSAPRDSCCRGQSLPLAHMADKFRLGRKQLLVTSAYCRAGPGVGRPHTSVTASLAGPLRDPHVHVGVDVQRSTPLGSGSGGRRTRPVATGVGSLSVWHEDETDRQAEPVARCDAVWAEALAGGLLLGEQWHLKQQPAAAALQRPRTVASSVQQQRRAQRRATPQRRSSSSAPHPGAAVPHGKRKQPVQSIPSPHCLSLSLTRTSPLLGLTSSQVHISSSSRNRSVIKTWSSQDSLRPSDAAAATQEATATGIDRGSRGGGTGGGRERSPQEQSGTAWGPE

SEQ ID NO: 77904 - protein, 165 aa, Zea mays
  Coding DNA Sequence Number=SeqID_34529
MWEDAGAHMPHLHVVMPGYRLVPKIQTPSYSSNGGDLRVALVALSGRRGAPHLHAGRRVPPAPTTRARALWARASAMSYGLCRAATSHGTFSASHVIVAWARDFDEVCGRGSGEVQPRCEYAASGTSCAASTTMAIVPVRVRERVDSISPFRCREIEACRVGQFG

SEQ ID NO: 77905 - protein, 143 aa, Zea mays
  Coding DNA Sequence Number=SeqID_34530
MSEVDDGLPQPGISPQEAIPPLDCLPGVSASLRQLSSVGSHRFLVIGGWGGLHTVSGVRDRPMTVSGVFYYPQARASIVRQRLGRLKRHEAHAAGRSSLAGRVTVAGSMSSQPTRPKHLAAGANASLSTAQPGLVRYETWMEW

SEQ ID NO: 77906 - protein, 353 aa, Zea mays
  Coding DNA Sequence Number=SeqID_34531
MEAQAHASCNRRAECFVHAAAPPLAPPPRLLDYRTNTATRGDPAHDPAAPTWRDDNAHMFRSSNGSRTRNGRPANHSPRRINSAAGQAAPLAGEASDASPSPLRASLLIRGSKAGPSEGFNSRLRARGLHTHYWSEVRRSAPRKGSTAASGYSGSAPTTDQGFEGWPPKGLGLGLSPGRRRTPLRPTRGSDSGSAPEDDELRFARPQGSDSALASADGLRLARPRGSDSTSATEDRLDLGFGGVSTSPNLGRRPATSTGGAIITLPRADSATGNKTDVPSGSLCQIGNDGAPAYSVTTAALSPLTEARGRQQGLNSSDSCPSARLQHSSDGHDITPAGCQNLSGCHDDMYLGR

SEQ ID NO: 77907 - protein, 446 aa, Zea mays
  Coding DNA Sequence Number=SeqID_34532
  Subcellular localization annotation: CTP_CleavageSite=51; ConfidenceScore=5.66e-01
MSSRSLMHRVFPPSKPPNGGYPPSFRLVVGGTQLRGSWYLSAIVRLQGFSSASPAVPLRRRSPETVTTSPWVGRSKLGCDLGPTLSFKDVHHPRWGGGRAEPELYLPRGFLGRPLLRRSRERALTGPAGGSDFDNAGLVNGGRRQPQRVGLVGLAPGAPSYRKAAAAPCAREDRPRYRALPGRRSCSGAVLPLHRWRRLEKSPLLTGSPPPSALRASGSLYLSSPLERRRGRGQDCSSIRPEALAAAVRPPGAGVAVVAARAGDGEPPVGLLLLRSPPHRVGLFVPTEESLGSVSLVARGFSCSVKGTPRSLFDEPRLGVAVSARTEAELARKEDLVGRSLAGLSISGTDARIDLPRPRVGLMSAGDSRPRPRGDQPSRLPEPDSRRRPWQRWPGRGDDVVLQTGDLRTASPSEARLDLAEGVVDAEGAAAPFERQDPSLQDRVVL

SEQ ID NO: 77908 - protein, 78 aa, Zea mays
  Coding DNA Sequence Number=SeqID_34533
MAPLRCAQRRGGSGCDIGSRGHKRDSGPMRCARRRGGSGRVADPEGHKRGSVSLRCTRQRLLKVRTTVTWERLRRRDG

SEQ ID NO: 77909 - protein, 146 aa, Zea mays
  Coding DNA Sequence Number=SeqID_34534
MAGYLHTLDNHYDELSSHCTHLNSRVESLEQQVKELKQEKASLQESLNIAEGEEANTREAYRTLKMDYDKKLKKLAPKKKIQKKTTNQGCQIEKKKKKAPLALPPPRIDDWSDDEDVSLASLDDLLKAFGDTLDKEFASTSGNALV

SEQ ID NO: 77910 - protein, 94 aa, Zea mays
  Coding DNA Sequence Number=SeqID_34535
MTGKKTTTSSDGGTPKKAKVVVEDEEEAGLEDEEEATVTLSVEKDALKNGHSGCAKCCIRTDGHRIAWDASLNVPYLGWMVYEKRHVVELVKIL

SEQ ID NO: 77911 - protein, 88 aa, Zea mays
  Coding DNA Sequence Number=SeqID_34536
MPTRTRGQDAAGTSGGRDVTPNPPPVPHTLAEAIAALVNATADNTRFLREMAETQKPLFAAQQLRGPASTWWGNFCGYSTCQPSSHLG

SEQ ID NO: 77912 - protein, 109 aa, Zea mays
  Coding DNA Sequence Number=SeqID_34537
MARGLFSLQEGFKENFDILKQKFDLLRKKNAFTKGLFGWFLSPTWLYEPGSLEPGSGDATNLLVSGEPGPGCFKDRASLDLNLHAGNQTQSSHAHSLAHSNQTAATRIL

SEQ ID NO: 77913 - protein, 359 aa, Zea mays
  Coding DNA Sequence Number=SeqID_34538
MAAPRTTRPVALTLRQDRRHLWQAKQATLHLYHDNRVKKGTGKGDTPKGILLREGNEPRAPLLIRGSKAGPSEGFNSRLRAPRLHAHYWSEVRRLAPRKAAKSGLGRHRKLRLARPQGSAPVSASEDDELRLARPQGSDSASALEDDELCLARPQGSDSASALEEDELRLARPEGSDSASAPEDDELCLARPQGSDSASAPKDNELRLARPQGSDSASALEDDELRLARAQGSDSALASDGGLRLAPRPGARTRPRPRKTDLTSTSEEPPPRPTQGSDRPRHRRGHHYPTPSSLRLRGTRSASHLAHPGKQIMMVPRVLHDDGGSQPLMEARRRQQGLDSPDSCPSARLQRSSDGHDIT

SEQ ID NO: 77914 - protein, 593 aa, Zea mays
  Coding DNA Sequence Number=SeqID_34539
  Gene Ontology: Mol. function=oligosaccharyl transferase activity; Cellular component=membrane; Biological process=protein amino acid glycosylation
  Homolog annotation: Hit_ID=Q6F2Z1; Match level="QueryCoverage=100%, HitCoverage=79%, E-value=0.0, Identity=78%"; Hit description =Putative oligosaccharyl transferase STT3 subunit
  Pfam annotation: Domain name=C4dic_mal_tran; Domain location=86-377; Score=-86.7; E_value=0.055; Accession=PF03595.8; Description=C4 -dicarboxylate transportermalic acid transport protein
  Pfam annotation: Domain name=STT3; Domain location=1-541; Score =145.8; E_value=1.2e-40; Accession=PF02516.5; Description =Oligosaccharyl transferase STT3 subunit
  Pfam module annotation: Pfam domain module=C4dic_mal_tran::STT3; Domain location=86-377::1-541
MVPSYISRSVAGSYDNEAVAIFALIFTFYLYVKTLNTGSLFYAALNSLSYFYMVCSWGGYTFIINLIPMHVLLCIVTGRYSSRLYIAYAPLVVLGTLLAASVPVVGFNAVMTSEHFASFLVFIILHVVALVYYIKGLLTPRLFKVAMTFVITVGLAVCFAAAAILIALIASSPTKGWSGRSLSLLDPTYASKYIPIIASVSEHQPPTWPSYFMDINVLAFLVPAGIVSCFLPLSDASSFLVLYLVTSVYFSGVMVRLMLVLAPAACILSGIALSEAFGVLTRSMKFQRPTLDDGSFTAGDGSSDTPTNSEMGLKEKTSKKNRKKDKESEGSSPVDHRTEEKLLVLPCGPSAVGIMLLTILSGFYVIHCVWAAAEAYSAPSIVLTSRSHDGFHVFDDFREAYGWLRHNTDADDKVASWWDYGYQTTAMANRTVIVDNNTWNNTHIATVGTAMASPEKVAWEIFNSLDVKYVLVIFGGLIGYPSDDINKFLWMVRIGGGVFPQIKEADYLKDGNYRVDAHSTPTMLNSLMYKLCYYRFVETDGKGFDRVFTTHHWLVRIYKLKPQKNRVRGKLKFKSSLKASFMRKTGGKKSPWK

SEQ ID NO: 77915 - protein, 434 aa, Zea mays
  Coding DNA Sequence Number=SeqID_34540
  Gene Ontology: Cellular component=membrane
  Homolog annotation: Hit_ID=Q8LIZ0; Match level="QueryCoverage=64%, HitCoverage=45%, E-value=2e-85, Identity=56%"; Hit description =Putative nucleoporin Nup75
  Subcellular localization annotation: CTP_CleavageSite=73; ConfidenceScore=5.02e-01
MPGMPTDGGGAMVPFTGEPGQGAPPPAPVRPIRHGVAPPIFRIYVSWSSGNLLQVACLRPPNSDGGGGTEEVVGSVVEVNLGDGGSGGSEAEEKIDEAEMRRIEYGSVPAFALLQSRKNTLADVATMSHVPSVPDHAECKTIGSLLGNPDPSGFMIEEPKTILKDFDSLLSTMASTTPSIMWLSQHVIAILFYYLIVEDDPDYWNGLSAALSVGWLDIVVNMLRFHGSYQLDQMDSRETENGLVEAVAVLVSMMPRMRPNLPTGKLGQCCKTRPDFIKPWRRRRKVGEAGQVQPGLAGVYDAVDGKNLKEREVLMGIGAGMVEVADAGEAEAKVYAPSLDMDSEEVGATSWTSAMSTSMLAAVAAVAGTGGGAAGVVGADEHASHWRSYRRPSLGKRRSGEGAGCERGRMTGLRPWSLRRRFSRRRQWKRTRVE

SEQ ID NO: 77916 - protein, 237 aa, Zea mays
  Coding DNA Sequence Number=SeqID_34541
  Subcellular localization annotation: CTP_CleavageSite=67; ConfidenceScore=5.12e-01
MADGIDSLSRHLANTSIALGAPPTAPVSTFLGPPPPVCRDENSFGIFQYSGNRFRKFSIGFTGNGCLDSEEEDGPSFGLDFSGLRDHEPMLQSYMHVIKCFLRAWRVKALVVRAMTQLGNASTSTRRSLMKEITSACHGKVTSLHRAFKKRWNQAGPRPLLGAMRLTLSNSESYTISSEKNNNGYSSCKRLWRGKPPTKPSIGARAQRHVMSSVASWKMSTPPHLSFSTEPVKFSQR

SEQ ID NO: 77917 - protein, 195 aa, Zea mays
  Coding DNA Sequence Number=SeqID_34542
  Homolog annotation: Hit_ID=Q8RU34; Match level="QueryCoverage=49%, HitCoverage=11%, E-value=2e-07, Identity=41%"; Hit description=Bzip transcription factor-like
  Pfam annotation: Domain name=DUF630; Domain location=36-85; Score =38.8; E_value=1.9e-08; Accession=PF04783.3; Description=Protein of unknown function (DUF630)
  Subcellular localization annotation: CTP_CleavageSite=50; ConfidenceScore=5.22e-01
MGCTTSHDAAAAAVTSSNSRPRARRSSASEPSPRRGDPAALCREHVALIRAAADRRYALAAAHAAYFRSLAVVGDALRRFVASALAPATPGSSPVLTLPPSPAKLVAAASASLPSWPSSTVSPLSHSLAEKRWIIREAALKGSAGERTRSRTQATAAHSCIRIRFRVRAHTCQRRIRDAPVKCGRSFKRGEVLIT

SEQ ID NO: 77918 - protein, 403 aa, Zea mays
  Coding DNA Sequence Number=SeqID_34543
  Gene Ontology: Mol. function=cysteine-type peptidase activity; Biological process=proteolysis
  Homolog annotation: Hit_ID=Q6J9V9; Match level="QueryCoverage=15%, HitCoverage=22%, E-value=2e-25, Identity=89%"; Hit description =Putative uncharacterized protein
MDTLTWHSLLRHACTFAFFQAEGPSEAEGPQQGCLLYKYEKEVDSGSPSDVEILENPIDSKKRKLLHVLDDSEVVFEDEEGPITQADLQKWFVDDWDKRPHVKVSTDGCTNDFLMVGLSTKDMPVTKSDSIDVLCDYIMSIEDDTTLEMTWVRSFNPFKIEISIKDLQNILTIHQDMTLRCFDMAVRLLANKESRRPKGEIINNRKHYMDMCFWRMIGFGKLPKYHQDPTTEELAKTLDCWPSMNYYITGCRYVLMPWKFNGCHALFVIDHVKKHVTFIDFTPTQDLCKHMPYKRFEEAIIMASKKYKIAYNKKCSGWAEDIFKWEHTIQTGVPIYSRGFNTSYLVLQAMTMWGNDRRMEFVGDAKIVRRNFVIDLLSYEDNSCRYAIPANIQRRLIDIAKKD

SEQ ID NO: 77919 - protein, 146 aa, Zea mays
  Coding DNA Sequence Number=SeqID_34544
MEKARTPMRRRVKMHSTPPKALRRRSTLPLDATEDWGSGIAAEKKSFGKSEQLWAAYSAGQSPLHVSIDGAYPVVYITFSLLNMPEQLNMTPSSPSCTTSLAGPPVLRPPRRVRQRAVCASGCIVEELQMEQSVQPYLFAFAAGKN

SEQ ID NO: 77920 - protein, 259 aa, Zea mays
  Coding DNA Sequence Number=SeqID_34545
MSWLLEVRRSLMEGQLLERPSQGVGRGGSRSAEARAESEPWGRARRSFVVFRVLARVRALGSGGAEFAVFRVLARVRALGSGGAEFAVFRVLARVRALGSGGAEFAVFRVLARVRALGSGGAEFAVFRVLARVRALGSGGAEFAVFRVLARVRALGSGGADFAVFRVLARVRALGSGGAEFAVFRVLARVRALGSGGAEFAVFRVLARVRALGSGGAEFAEAPLSRPDCLSDLLCRVALQSEWRRRRCPSVRLASGAVE

SEQ ID NO: 77921 - protein, 351 aa, Zea mays
  Coding DNA Sequence Number=SeqID_34546
MGTEHGVSGELQAGPTRSEATVEPLGGPAFEPLISRGARSPVPSQGRILFGGSRCACASRSRDGSRAPCLHTVRGGSLAAPRRDVSLADDHLARRLRDAWAWASMLACWESVKRVHLARLHATCMAARPFRPLVWAKVGGHFPAAPLHRRSPKMVTSSLMVGESEPGCGLSPSLILKDFHHQGWGGDCSVPGFRTRVASEPLAAPASAAAAGRGSSAGVIAKAGHGPTSNSTAFCPSLPHKFWHGRGPPGSSIRPEVSAAAVRPPRAEVVVVAAAGADSPVDCLNRFTKHESPRVKVTSEHEQRRSWLENENLVGRSLAGLSVSRTDAGVDQPRPRTGLAPLEDGWPRPLG

SEQ ID NO: 77922 - protein, 134 aa, Zea mays
  Coding DNA Sequence Number=SeqID_34547
  Gene Ontology: Mol. function=transferase activity, transferring phosphorus-containing groups; Cellular component=membrane; Biological process=two-component signal transduction system (phosphorelay)
  Homolog annotation: Hit_ID=Q2ACB8; Match level="QueryCoverage=64%, HitCoverage=9%, E-value=2e-23, Identity=65%"; Hit description =Histidine kinase
MGVGGGGGGGGEAAAVSAPAPAEEAGKDAEDGNDWTLKAKLIAVAVLGATALGVFLHSYFRHAAAQGGGGLVSMCEERARMLQDQFAVSVNHVHALATLVATFHYEKHPPALDHIHLCAAARHLHSAGGQSWRE

SEQ ID NO: 77923 - protein, 133 aa, Zea mays
  Coding DNA Sequence Number=SeqID_34548
MSPPTVTAGLVADTKDAALEVIQDVVEMAAARFQRDPTDVEFDVSRLDTSIPKKELVSWPPGGSLDWDLDLFTASARKCLWYGTRLSGYTAPDHPRGCLGCGTKLSGYTAPDPQVMSTHSLELAPRLPDPLLS

SEQ ID NO: 77924 - protein, 52 aa, Zea mays
  Coding DNA Sequence Number=SeqID_34549
MNMYFKMVAVIKGELMKIKKMMKKKKEELNNFKRNEMQSLTPRLKQNVVGTK

SEQ ID NO: 77925 - protein, 116 aa, Zea mays
  Coding DNA Sequence Number=SeqID_34550
MAATAAEEVQVQRGAESSKAKSRVVNNTLPCNVGGSGVATWPGKRIYSKISTLGPDPHGKVSDPCTCRPDLRVRSRTPTGATRTPGTGLGPLCVGSGLPTAGSRDSETENTQALLR

SEQ ID NO: 77926 - protein, 64 aa, Zea mays
  Coding DNA Sequence Number=SeqID_34551
MEIRPNSDPVGGLRLPKVPSDIYQRGRTSKDTKVGSAEAVKQESFGMFAEKGTDLKMKRPFRPR

SEQ ID NO: 77927 - protein, 296 aa, Zea mays
  Coding DNA Sequence Number=SeqID_34552
MDGGLVAQWGLGSRVEERVSASAGCSAHGTRHAAAAGGVLGILGASREEREGGQHSVSDTAVLHSALGSDAADHFLCPRLPVCASPISPAKAATGSPAATWAGRVRTLGGRSVLTRRRHRSDRGLRVARREVEVQASRASLASVGVTERRHLRALEVVGIGIPAAAPAAAATASRASAATPIPGAHRPRHIPCSAHAQPVLLDPDLCPDPSFSRPTRPAKPIRSQMRHGSRGTEGDVLTREEVGDGEDAERPPDGAQFCLLDQIVVALHPLPHLGLRARHGAARPVGGGEGSGGTD

SEQ ID NO: 77928 - protein, 465 aa, Zea mays
  Coding DNA Sequence Number=SeqID_34553
  Gene Ontology: Mol. function=zinc ion binding; Biological process =regulation of transcription
  Homolog annotation: Hit_ID=A2Z3S7; Match level="QueryCoverage=71%, HitCoverage=40%, E-value=1e-138, Identity=69%"; Hit description =Putative uncharacterized protein
METKIFLSKNFDMKDLGEADVILNIKLIKATIIVLAQAHQSGSGVSPVASAAWEHLAPVAVAFRVDVLGWGTQLAVMLRRLVALCGSASAREAPMRFEAPWPEVSAASPRVKTKREREHRRTRMRILFVPGFEGRVTCICMEEGGDPQLPSISARTTSEGAGGVDLDLLEQLLSDDNGWLETGGASPSSVEEQFSQALSYIRDTQSDGDVLVQLWVPVNHDDGKLVLTTSEQPFTLDHRSDSLLRFREVSTKYQFSANVKSGDSPGLSGRVFIGRLPEWSPDIRYFTSYEYPRVRDAQYLDVHGTMGLPVFEKGSYNCLGVIELIMIRQKINFTSELNTICSALQAVNLRSTEVSSIPRIKFSTASYKDALPEILEVLRAACLTHKLPLAQTWVTCAQQGKRGNRHSDENYRYCISTIDEACFVNEAEMRGFHETCSEHHLLRGEGVARKAFTTNQPCFLPDIGS

SEQ ID NO: 77929 - protein, 403 aa, Zea mays
  Coding DNA Sequence Number=SeqID_34554
  Homolog annotation: Hit_ID=Q5SN38; Match level="QueryCoverage=62%, HitCoverage=30%, E-value=1e-104, Identity=71%"; Hit description=TA9 protein-like
MHDTWSPVDADLAELLLEGFVKRTSDRELVRPPAATPQKEVLVHVAMGGFVTHYGMLARVAEARLGLLIAILMLIPGLPKMDRAQNLSRIDEAKGIIDKMKVKFPDKIEGWKEVKEVGELRGAREDVRAFCFTILLFMIQHQPLFYWNFLQTSKQGGFPNIQSTQHVPSTSISSGLPLPQQLPVYSQPTLPLGPFTSLVGYPYLPQNYYLPSSPFQQAYSSNGPFHQSAAPAMPGAGMKYPMPQYKSSPPASTLPQPSSLSGYGGFGSANNIPRNFSQNQGAAAAPTTLGFDEALGTQFKHPNHYAALQQSDNSAMWLHGGAGSRTISAVPPGNFYGFQGQSKHGGFRQAHHPSQYGGLGYPSFYQSQTSLPQEHPQSPTEGSLNNPYGVPSQPSHQLWQHIY

SEQ ID NO: 77930 - protein, 165 aa, Zea mays
  Coding DNA Sequence Number=SeqID_34555
  Gene Ontology: Mol. function=transcription regulator activity; Cellular component=nucleus; Biological process=transcription
  Homolog annotation: Hit_ID=A2Y4N7; Match level="QueryCoverage=52%, HitCoverage=16%, E-value=6e-20, Identity=62%"; Hit description =Putative uncharacterized protein
MDEDGNLRHSNDPSLVNKRGNNGGRLASHSTVARQDPPRSYPRVVEKVQPRRLELARQEPPMRQANPQTLQSSSLQAKPQGSWKQRSGTRKRRMVRGLYFNTHKRIKNEDFEVLAKSHQLQANSWWGKLDIRGGEKNIAKAQRKTEARDFKANEGSEYLQRSSTC

SEQ ID NO: 77931 - protein, 132 aa, Zea mays
  Coding DNA Sequence Number=SeqID_34556
  Subcellular localization annotation: CTP_CleavageSite=65; ConfidenceScore=5.20e-01
MEEQRRPPSSKIAPVSMKASSANATLQGMKNRSHFRRDRKTALQQDVCVLFYLVFSRGQAEEEVVAREERPLSSKAGVLEAALPRLPIVSSIAAAAARQPNRVKGLHHRTQSPTCVDSNGSTYPCCIIKRAA

SEQ ID NO: 77932 - protein, 160 aa, Zea mays
  Coding DNA Sequence Number=SeqID_34557
  Gene Ontology: Mol. function=binding
  Homolog annotation: Hit_ID=A2YL78; Match level="QueryCoverage=55%, HitCoverage=8%, E-value=4e-39, Identity=88%"; Hit description =Putative uncharacterized protein
  Pfam annotation: Domain name=TPR_1; Domain location=33-66; Score=9.5; E_value=0.39; Accession=PF00515.19; Description=Tetratricopeptide repeat
  Pfam annotation: Domain name=TPR_1; Domain location=67-100; Score =26.0; E_value=0.00014; Accession=PF00515.19; Description =Tetratricopeptide repeat
  Pfam annotation: Domain name=TPR_2; Domain location=33-66; Score=8.3; E_value=2.8; Accession=PF07719.8; Description=Tetratricopeptide repeat
  Pfam annotation: Domain name=TPR_2; Domain location=67-100; Score =25.0; E_value=0.00027; Accession=PF07719.8; Description =Tetratricopeptide repeat
  Pfam module annotation: Pfam domain module=TPR_1::TPR_1::TPR_2::TPR _2; Domain location=33-66::67-100::33-66::67-100
MDYINWDLESDIIEWKIQENNCNLWERGDGNHEPFVRGLGQIQLKFGDFKSSLGSFEKVLEVHPENCESLKAIGHIHAKSGETEKAIETFKEVTRIDPKDHQAFVELGELLVESDWAAAMEYLKTWDLESDIVEWKIQENNCNLWERGDGNHEPFVRGEP

SEQ ID NO: 77933 - protein, 115 aa, Zea mays
  Coding DNA Sequence Number=SeqID_34558
MGKSKKSESSSHHSGDKRKREPTPPSEDFSDSEYSEEEFSSESEGSPAYTSPPASFEDSDDSQGIAAEGSGGDGHGDSDDGGDSEGTAARATAKVAAAAAAARLVAKRHWLKILV

SEQ ID NO: 77934 - protein, 37 aa, Zea mays
  Coding DNA Sequence Number=SeqID_34559
MAPFTSKVSKRLANPGNMGYTTCVYRVQPLQSVKLVY

SEQ ID NO: 77935 - protein, 18 aa, Zea mays
  Coding DNA Sequence Number=SeqID_34560
MPRLTMLYLEEIYGVKRL

SEQ ID NO: 77936 - protein, 151 aa, Zea mays
  Coding DNA Sequence Number=SeqID_34561
  Homolog annotation: Hit_ID=Q6QP51; Match level="QueryCoverage=29%, HitCoverage=20%, E-value=1e-13, Identity=84%"; Hit description =Putative growth-regulating factor 1
MQVACNRTTGTHPFDFDASSMEAQAHTSCNRCAGYYVRETAPRLASMSCLLDCGTSTVTRGNPAHGLTVPIEHIGHGDRKRGYFERDPSPRRKRAPSPPTDQGFEGWPLGRVRQPPQSTRALGSLLIRGSNAGPSEGFDSRLRELGLCAHY

SEQ ID NO: 77937 - protein, 35 aa, Zea mays
  Coding DNA Sequence Number=SeqID_34562
MKKPWKNGVEMAHETAMRMQLGSWAMVDSGGVGAS

SEQ ID NO: 77938 - protein, 398 aa, Zea mays
  Coding DNA Sequence Number=SeqID_34563
  Gene Ontology: Mol. function=nucleic acid binding; Cellular component= intracellular; Biological process=regulation of transcription
  Homolog annotation: Hit_ID=Q69WZ1; Match level="QueryCoverage=87%, HitCoverage=86%, E-value=1e-119, Identity=58%"; Hit description =Putative WIP1 protein
  Pfam annotation: Domain name=zf-C2H2; Domain location=189-211; Score =21.7; E_value=0.0027; Accession=PF00096.17; Description=Zinc finger, C2H2 type
  Pfam annotation: Domain name=zf-C2H2; Domain location=273-295; Score =23.3; E_value=0.00093; Accession=PF00096.17; Description=Zinc finger, C2H2 type
  Pfam annotation: Domain name=zf-C2H2; Domain location=299-324; Score =6.8; E_value=2.1; Accession=PF00096.17; Description=Zinc finger, C2H2 type
  Pfam module annotation: Pfam domain module=zf-C2H2::zf-C2H2::zf-C2H2; Domain location=189-211::273-295::299-324
  Subcellular localization annotation: CTP_CleavageSite=60; ConfidenceScore=5.01e-01
MGDPYSNFLRGHYSHLPPSNAPPATSFPSSYASSYYLHHPPPHSPPIREALPLLSNLTPSSATNHNHGGGDVRDHKDGNKRATSRSNQEEADQAAAGEVTVALHIGLPSPGSGPSPSESAADGGDSQEPSAEGRSQQHQGVDHEAGEEEEAEEEDAMTVGCASIGIGRLTKGQYWIPTPSQILIGPTQFSCPVCYKTFNRYNNMQMHMWGHGSQYRKGPESLRGTQPTAMLRLPCYCCAAGCRNNIDHPRARPLKDFRTLQTHYRRKHGIKPFMCRKCGKAFAVRGDWRTHEKNCGKLWYCACGSDFKHKRSLKDHIRAFGRGHAACGIDCFDDLDDDDRDPSSEVDHAATTNATSMTTTAAAAAANAHRRHHSVWKPPPPPPPPLSSSSRGSGDRLL

SEQ ID NO: 77939 - protein, 51 aa, Zea mays
  Coding DNA Sequence Number=SeqID_34564
MAQRVFFAADLYLTSRERPRQGGEIPGCVLASPGLVRLALNPCGLSGIGWV

SEQ ID NO: 77940 - protein, 215 aa, Zea mays
  Coding DNA Sequence Number=SeqID_34565
  Subcellular localization annotation: CTP_CleavageSite=36; ConfidenceScore=5.17e-01
MRTVRAPDADRLDVCRGGDAPAPGRGPSGPVRRTVGASTESTARRSVPVFGAQFDANTLFDDFARISLTAEGQQHYEDYWAVWTGTYGAAPRLRCGGQFERHTRVWRGVASGRAYQTCLTYVKRRRNSCHNTRWIATKRLSNMERPTSHLFYLRFKSPISRISVSNTSATNEDSQPQPLYGMPMNSYPGQIPPPPSLLGRSAPLDTVGPSELFPG

SEQ ID NO: 77941 - protein, 170 aa, Zea mays
  Coding DNA Sequence Number=SeqID_34566
MAHRTVRCTPDMSGAPATSSVPLESDRWSSDLWATLDVRWRTGQLLFIVRCASMGKPDVCARCGAFNASAADEPLAFPEAEEFLRPLLHGAPDTVRCTPDSLVNYSARAPEIPEGGEFELESPGAPDTVRWHTGQSGAPRPEGLRLALCPFVEPNTWSFYWLCCEPLTPV

SEQ ID NO: 77942 - protein, 188 aa, Zea mays
  Coding DNA Sequence Number=SeqID_34567
MSAMKPEVLVGHEREADQRHAVGSATPDPGLGATGFNRGRSPVHQAELHSNSSLSGFSGARSAIIHRTVRCAPDMSGEPMEQRTKAPMVVRSKTPTGVLTWHTPDSEQWLSGAPPDYPVCPSSAKAANDHAKREIVTGDKAMGSGRFLSRESGDKYKEESSSSIKSHRRGDKKKKNMKKVVYYETDSS

SEQ ID NO: 77943 - protein, 612 aa, Zea mays
  Coding DNA Sequence Number=SeqID_34568
  Gene Ontology: Mol. function=transcription regulator activity; Cellular component=nucleus; Biological process=regulation of transcription
  Homolog annotation: Hit_ID=Q67UR9; Match level="QueryCoverage=99%, HitCoverage=88%, E-value=0.0, Identity=72%"; Hit description =Putative TAF5
  Pfam annotation: Domain name=TFIID_90kDa; Domain location=34-176; Score=117.9; E_value=2.9e-32; Accession=PF04494.6; Description=WD40 associated region in TFIID subunit
  Pfam annotation: Domain name=WD40; Domain location=356-393; Score =20.9; E_value=0.0046; Accession=PF00400.23; Description=WD domain, G- beta repeat
  Pfam annotation: Domain name=WD40; Domain location=425-463; Score =45.1; E_value=2.4e-10; Accession=PF00400.23; Description=WD domain, G-beta repeat
  Pfam annotation: Domain name=WD40; Domain location=467-505; Score =42.0; E_value=2.2e-09; Accession=PF00400.23; Description=WD domain, G-beta repeat
  Pfam annotation: Domain name=WD40; Domain location=509-547; Score =51.0; E_value=4.2e-12; Accession=PF00400.23; Description=WD domain, G-beta repeat
  Pfam annotation: Domain name=WD40; Domain location=551-589; Score =50.3; E_value=6.9e-12; Accession=PF00400.23; Description=WD domain, G-beta repeat
  Pfam module annotation: Pfam domain module=TFIID_90kDa::WD40::WD40::WD 40::WD40::WD40; Domain location=34-176::356-393::425-463::467 -505::509-547::551-589
MEDEEMEKKVQQYLQRKGFRLTELALQEERNRLSTSAISDVALARSDNDPARYYDGYSRLRTWAYSSLDQYKHELLRVLYPVFIHSFMDLVAEGHMQEARSFFHTFREDHEVMHSRDLQKLEGVLSPSHLEEMELARSFRKNKFKIKLCEGWPTDTRQKLGVLDAGHPLVLLQFFAKSATADTAQGRDRRRNTSSQLPPVPYSYELLLQYLQKTQALVVLGVINEHITFEVSPGQPSLISDDADVVALIGTSKDLAKQINQKEVHWGLLEDSVEERMEKALAESDKIEAESKDADAEDNKAMTFFLISESSHILCPKRNAEGGKQGASLKKAKKDKLVGATGKSVRTETSMVSVAPRVKPELTLPATLNCSSISHDGSLVVGGFSDSSVKVWDMSKMGQPAKISRSQGENGPSQGERISTLDEGKRTYTLFQGHSGPVYSAAFSPFGDFLLSSSSDSTIRLWSTKLNANLVCYKGHNYPVWDVQFSPVGHYFASASHDRTARIWSMDKIQPLRIMAGHLSDVDCVQWHVNCNYIATGSSDKTVRLWDVQTGECIRMFIGHRSMVLSLAMSPDGRYMASGDEDGTIMIWDLSTGRCVSPLLGHSSCVWTLAFR

SEQ ID NO: 77944 - protein, 448 aa, Zea mays
  Coding DNA Sequence Number=SeqID_34569
  Homolog annotation: Hit_ID=Q338U1; Match level="QueryCoverage=53%, HitCoverage=13%, E-value=8e-07, Identity=27%"; Hit description =Retrotransposon protein, putative, Ty3-gypsy subclass
SQMEVRCQTSFCQNEDGFPKLLRACTVRLGIRSQPEYDGREFVEHGTEKCVVTVYIGSSPHHVEWSVTAAWHRFKDTCQVVARKALRTLCQIYEEEVADTPLRFFPPFQRNRPVWMARMRALEGKQLLEDDPTVVHLTAYLLTLDVQYDFLARHHRQMIARAEDAEKRNRQLHVDLTTAQARATALESREAIAVEALKQAKDEHVQKLMKAYLVTHNQHRALRIQEPASSNPVQSVRVEDPQILEGHPVSIKGEKKTCELPEGAIVLEGIPVFPQAMDKQEHPESSQDPLPELFEPLTMKKISAPSLEVKEEAASTPPAPPLRSYKNPSSTSPSLRARQSAAAINHRRPEPVSPSASEPRRALCQAAEVCHRRPGPSSHHCRHQKVPGVRLEGRFPHTPLCPPGPACQPPTPALPARPRLSAARARSARLVPSVSRSCRRALARLPPI

SEQ ID NO: 77945 - protein, 44 aa, Zea mays
  Coding DNA Sequence Number=SeqID_34570
MAWGQNQQGRQCQSSGISRVDEDLEGEGFRRPALLIADARLRSG

SEQ ID NO: 77946 - protein, 154 aa, Zea mays
  Coding DNA Sequence Number=SeqID_34571
  Homolog annotation: Hit_ID=A2YFN8; Match level="QueryCoverage=100%, HitCoverage=100%, E-value=3e-32, Identity=51%"; Hit description =Putative uncharacterized protein
  Pfam annotation: Domain name=DnaJ; Domain location=52-119; Score =50.4; E_value=6.3e-12; Accession=PF00226.22; Description=DnaJ domain
  Subcellular localization annotation: CTP_CleavageSite=34; ConfidenceScore=5.32e-01
MAVGGGVCVASPSPSSVEAWSWRTSGARRRAAVRCSVVGEAGPGAAGGRVEDPYRTLRLRRGATRGEVKKAFRRLALMYHPDVRKEREREMECDGDSGVQFQRINVAYQRLMSSMREADERLEYWRLKYGLADEDLDRYRRRLNEEDADDWFDM

SEQ ID NO: 77947 - protein, 17 aa, Zea mays
  Coding DNA Sequence Number=SeqID_34572
MTREAGQGSGSSERMGG

SEQ ID NO: 77948 - protein, 171 aa, Zea mays
  Coding DNA Sequence Number=SeqID_34573
  Gene Ontology: Mol. function=transcription regulator activity; Cellular component=nucleus; Biological process=regulation of transcription
  Homolog annotation: Hit_ID=A2YJA5; Match level="QueryCoverage=35%, HitCoverage=10%, E-value=2e-22, Identity=86%"; Hit description =Putative uncharacterized protein
MDFQFPNVDAATGVLCYTGHGEAGFWLGNPRVSRVPNEFVICEGALLASGSADCTVKLWDVASSTKTLKTEDTKGSSANRLRLLKALPTKSTPVYSLRKTRTGPVLTLSSEAGISETAYCTANIFISNSNELSMYCRIEHRRFVVAGCDIVTILLGCDLMNATKCTSADRR

SEQ ID NO: 77949 - protein, 425 aa, Zea mays
  Coding DNA Sequence Number=SeqID_34574
  Subcellular localization annotation: CTP_CleavageSite=48; ConfidenceScore=5.37e-01
MVLLPPSPQADTQERPRVRPRPSRRRRQRQSNCNSATRGTPCPGEAPRLAKDANSLARDLANDTPTLLDLPPTGWEEPIAPWQDMSMAGGEPSVYNPIPFQWSFDTSSLTSLYAGLPFPSGCLESKEEDGPGIGLDFPGLRDPSPCYSSCSHDTNCFPTAWVTTTPIRGVMTQLGSASTWVTRSATKGTISTCLGRMMCHHHTLGKQESWVRPRPLQGVTWPTSNSFMSCTPISKKSSNVCNSSGRFSRGKQLARFLTKVHAPRHATFIVISWKMPRPKPLRHFTGLVKTSLQQQSCSAPCRSHPPPRDIESKVKFGDSWSVLWSSRPRAQPLGFGSLPQSTEQDPLALRRRLRSIPNQQEKPPPQCKTAFSTTARTEVCTTVSAAVSSTPIDRYVTEGLCGFSQLCLVGGKLQLSAAHRTVEST

SEQ ID NO: 77950 - protein, 143 aa, Zea mays
  Coding DNA Sequence Number=SeqID_34575
MARRWPGAAVADLRGCTGSGGLTEPVPTDYEKIRAMNMMKNNQLFQWLGLGQLKSLVTATAANNKEDCPQQSGSLYDGENTDNSNEEFWVHNEFDMHILIVFYIFRNPNVVTYDGRANISNDGDQISTKVTRGNKRIMAPAQE

SEQ ID NO: 77951 - protein, 185 aa, Zea mays
  Coding DNA Sequence Number=SeqID_34576
  Gene Ontology: Mol. function=nucleic acid binding
  Homolog annotation: Hit_ID=A2X2U6; Match level="QueryCoverage=55%, HitCoverage=21%, E-value=8e-34, Identity=65%"; Hit description =Putative uncharacterized protein
MDNDSKAVEDACLDMLKVGQRQMRYRLKQKYFNGIPANQVKTTSPISSMSDEDWRKLVEKWSTPKHKKQEKYKDAEPSAIDLFKDMHCSKKKGFSENVKNAINAGLQDNSKKRSTTTVSAKVQELQNQLESKRLEKDGLREEVETLKAQAQASKETMDNMKRSMEENNSLLHQLLSFNQSQAPPS

SEQ ID NO: 77952 - protein, 778 aa, Zea mays
  Coding DNA Sequence Number=SeqID_34577
MQVRSPAFALNLHGRDPAAFVREVEDRAMRIVGLYVPRTEAQRSWDIRGSNDRLNRVFELNRLPYGGYLGQDVVDRREKKPAAETEDDSAPAAAPSSKKRKLGTAKGGLGVSDSFAMELMGTCATPEGRMSSPELRESSARMLKVTGGWWPKNVPIPRAADEDFFTSRMVRDMRVFPYGRNIAAVVSAVMDKDRQEAAEKRRAVIRLPEARPKRARGTAKSAAPGGSQSTLVAKSAAPGSSKVPEVAKAAGAGGTKSVSAGSAKAQELASPARRVADFATDISVDDYLVGSGEGQLVVVPPAVATAVPVAKGSALSAGGEIPALTAVKDEAGTVSRRLKEASQWLSQAADFADRVALGAPTAVVSAEVERLRAQHADVVWEKSVADSKCRKLAEKVGVLEGERTELRRQLAEERREANQALAKARSAQAEASLARVEGSLARQRAEKWEERFNALQARMERAEASTRSEVERTRKQLMDSYHKLGARTADFEVPDRESGLRCLEWLQEELQALPTIMEGFMSYASLVSCEGAMNALSREGCRHYEVFDRSDEDFEREIYKVEDPVVKESTGALFDRMWAPHGREVVRERSDRARGQAARAEIVEDFGSLNNARPEAEMNPVEAEAEVVPAPPPETGEGSLAAPAAAASGGGSSPTAVPRAEDPRRRRRSRRWRIPRRLGLRRIKILGLRTQPLLLILWQLRRWMLGMNWMSLLLSFSDFGDSGSSIEWTEESSDEDLDYFAALDVAAAEASPHAAGAQVVPGLSAWALGGEGRLRSVE

SEQ ID NO: 77953 - protein, 58 aa, Zea mays
  Coding DNA Sequence Number=SeqID_34578
MTKVDACRRWSFEFTGGQEQGNTIVNYYGPSSSEALSSHGFNAHQTKVKKDIPSSFNM

SEQ ID NO: 77954 - protein, 65 aa, Zea mays
  Coding DNA Sequence Number=SeqID_34579
MEVENLLENDVGCPTTTTKMVWRLERQYSAKRRRALATEVQRDRVAGSWRLGGVASYTLGITGVR

SEQ ID NO: 77955 - protein, 146 aa, Zea mays
  Coding DNA Sequence Number=SeqID_34580
MKSMREDDIPVSDTWIIPPRGARRHDLPHRIIGKQTSGKLGLSMPVTATTMVRTHMRFAPATTYHQDRHVGTGSHIIGPCGPSGLLARFQPRNRRRAEEERESAMERELRSATMGEDGVREGGSWLVLAEVTRWEKQQASSPVRRL

SEQ ID NO: 77956 - protein, 142 aa, Zea mays
  Coding DNA Sequence Number=SeqID_34581
  Subcellular localization annotation: CTP_CleavageSite=15; ConfidenceScore=5.13e-01
MDFALPDPRARTQLRLRRRRTLPRPTPGLGHSLGLGRRSPPRPTPGLGPRLGLGRWTSHRPTPGLGLNYDSEDDRLRLARPEGSDTASASEDGLRLARPRARTRPRPQKTDSVSPDPRGWTQPRPRKTDSTSTSEEPPPRPT

SEQ ID NO: 77957 - protein, 142 aa, Zea mays
  Coding DNA Sequence Number=SeqID_34582
  Subcellular localization annotation: CTP_CleavageSite=15; ConfidenceScore=5.34e-01
MDFASPDPRARTQLRLRKRRTPPRPTPGLGHSLGLGRRSPPRPTPGLGPRLGLGRWTSPRPTPGLGLNYDSEDDVLRLARPQGSDTTSASEDGLRLARPRARTRPRPQKTDSASPDPRGRTQPRPRKTDSTSASEEPPPRLT

SEQ ID NO: 77958 - protein, 398 aa, Zea mays
  Coding DNA Sequence Number=SeqID_34583
  Gene Ontology: Mol. function=flavin-containing monooxygenase activity; Cellular component=microsome; Biological process=electron transport
  Homolog annotation: Hit_ID=A2YKR5; Match level="QueryCoverage=98%, HitCoverage=98%, E-value=1e-174, Identity=78%"; Hit description =Putative uncharacterized protein
  Pfam annotation: Domain name=FMO-like; Domain location=16-390; Score=- 437.8; E_value=0.00029; Accession=PF00743.10; Description=Flavin -binding monooxygenase-like
  Pfam annotation: Domain name=Pyr_redox_2; Domain location=15-391; Score=-36.4; E_value=0.012; Accession=PF07992.5; Description =Pyridine nucleotide-disulphide oxidore
  Pfam module annotation: Pfam domain module=FMO-like::Pyr_redox_2; Domain location=16-390::15-391
MAAAASRTVWVNGPIVVGAGPAGLSVAACLRERGVPSVVLDRADCIASLWQRRTYDRLRLHLPRRFCELPGMPFPAHYPEYPTKRQFVEYLQAYADRAGVEPRFNQAVTSARYDEAAGLWRVRAEDVLASTSTTEYIGRWLVVATGENAERVVPEFEGARDFAGPVSHVAEYKCGEAYRGKRVLVVGCGNSGMEVCLDLCDHGALPSMVVRGSVHVLPREMLGVATFSVAVFLLRFLPLRLVDAVLVLLARLFLGDLERLGIRRPACGGPLQLKNARGRTPVLDIGALARIRSGHVRVVPGIRRLFRGGAELQDGRRVAADAVILATGYHSNVPQWLKGSDFFTEEGYPRVAFPHGWKGESGLYSVGFTRRGLSGVSSDAVKVAQDIAVEWEKQTSKR

SEQ ID NO: 77959 - protein, 116 aa, Zea mays
  Coding DNA Sequence Number=SeqID_34584
MQVACDRTTGTHPFDFNASSMEAQAHTSCNQRAGYYVRKTTPPLAPLPRLLDCGTSAATRGNPAHGPTVPAEHIDHGRSERRFTFAMMTASKKGPGKGTFRKGSFSAKEAGPEPSY

SEQ ID NO: 77960 - protein, 352 aa, Zea mays
  Coding DNA Sequence Number=SeqID_34585
MAEGFGPETSKWETWCFDCGKTPEGATSLLLPGKGHSSSPRSSSPKRTSWPTIKARSTATLGTSDSYVAFTLKMFSSRSYTSFSIHTQIKSNRQGRVRLASAKPDPPSGARRGDPLYVKIFLGKSLSARTSFALFDCFDSGILKTTEYTQLSPEDISRAHGLGSMTLRPVPLTDDLAKLQPSLLHLLGQGGHASLGARNEEEAQYYTRIPRCSGPDSHNEHTPALKVPLQMELRFHSRGYEQPPHRRACGTTNSRWLAGDRSISSDNDLRLGRLNSSSDDIRADAATTRPSPTSPIEGRGQAIKAKEPEVSQRVAPTVSSVEKPSPAATTSAPTTAAEREMCPWAISKYFGD

SEQ ID NO: 77961 - protein, 36 aa, Zea mays
  Coding DNA Sequence Number=SeqID_34586
MPPCAAGRNNPRARHRSNRHRIRGPVARHGLTSHRG

SEQ ID NO: 77962 - protein, 309 aa, Zea mays
  Coding DNA Sequence Number=SeqID_34587
MQAACNRTKGAHPFDFDASSMEAQAHTSCNRRAGYYVQETAPPLAPLPCLLDCGTSTATRGNPAHDPTVPTEHIDHGDRERGYPERDPSPRRKWAPSPPTDQRFKGWSSEGFNSRLRALGLRAHYWLAPGGFDSRLRRRARDDPGYVRYITKARATLPRVRLTAAKFGLGAIGSSASPDPRAQTRARSRKTMNSASPDPRARTWPRSQTTVSASPDPGLGLDLDLGRQTRPRPRRSLRLARPRARTDHVTGGAIITLPLASSGYWEQDRRPIWLAPPLTEARRRQQGLDSPDSCPSARLQRSSDGHDII

SEQ ID NO: 77963 - protein, 546 aa, Zea mays
  Coding DNA Sequence Number=SeqID_34588
  Gene Ontology: Mol. function=nucleoside-triphosphatase activity; Cellular component=protein complex; Biological process=proteolysis
  Homolog annotation: Hit_ID=A2ZWD4; Match level="QueryCoverage=98%, HitCoverage=27%, E-value=0.0, Identity=83%"; Hit description =Putative uncharacterized protein
  Pfam annotation: Domain name=AAA; Domain location=108-298; Score =257.2; E_value=3.4e-74; Accession=PF00004.20; Description=ATPase family associated with various cellular activities (AAA)
  Pfam annotation: Domain name=AAA_3; Domain location=108-253; Score= -22.2; E_value=0.091; Accession=PF07726.2; Description=ATPase family associated with various
  Pfam annotation: Domain name=AAA_5; Domain location=108-244; Score= -4.4; E_value=0.0062; Accession=PF07728.5; Description=ATPase family associated with various
  Pfam annotation: Domain name=NACHT; Domain location=107-250; Score= -40.1; E_value=0.081; Accession=PF05729.3; Description=NACHT domain
  Pfam module annotation: Pfam domain module=AAA::AAA_3::AAA_5::NACHT; Domain location=108-298::108-253::108-244::107-250
MKIKKMKADIRKVSHDAWRKDREAEEKWLENCGEDEEFLKREGKRLNRDLLRIAPVYIGGSSENEKSYRGWESVAGLSDVIQSMKEVVMLPLLYPEFFSSLGLTPPRGVLLHGHPGTGKTLVVRALIGACSQGNRRIAYFARKGADCLGKYVGDAERQLRLLFQVAERCQPSIIFFDEIDGLAPCRSRQQDQTHNSVVATLLSLLDGLKSRGSVVVIGATNRPDAIDPALRRPGRFDREIYFPLPTFEDRSAILSLHTKKWPSPISGAFLSFVASQTVGYAGADLQAICTQAAINALKRTCPLHQILQYAEKGVPHGRVPLPTVLVEDKDWLAALAAAPPPCSKREAGIASNDLVSTPLDSCFVPSLFKPLVHLLISMYLDERVWLPPSLLKACCSIKEVVFSSMEKNTVPHTLWPTYLSSLIQQKDIADRIGTILSSCGLISAQLGNRGSMLLSDVKTQENFCGSRLNPTGLHMKGGLPHKLSGFRVLVAGAPRSGQQHLIRCVLHGFMGQIVIHKLDLATMVQEGNGDILSGLTHILCKLLCFP

SEQ ID NO: 77964 - protein, 809 aa, Zea mays
  Coding DNA Sequence Number=SeqID_34589
  Gene Ontology: Mol. function=nucleoside-triphosphatase activity; Cellular component=protein complex
  Homolog annotation: Hit_ID=A2ZWD4; Match level="QueryCoverage=42%, HitCoverage=33%, E-value=1e-69, Identity=46%"; Hit description =Putative uncharacterized protein
LCYTPHCTPGSSPYGYKREDQGLLREGWPRGTEDGTGALLGPLASLTRVDACNPLLQAHLTWARDEHEGRGTSTSLTLDSGHLASPPFALTHALDPSVSLTCSVALLLPPVHWQLCYQPTTVPPHDPTRTQAVPSGNTLSNVKLECSPKAEADPKPPATRRRRLGASRVMPPSKPKRRRGGAASRGRKKQKRLDAIRDVPPPPPPPAPLAGGGGSDSEEESIRRSKRVRRAPVVLDTSPLPSPRGKRSRRGVRVGSSGSSRRGSRGRAPHEVDARGVEEGEYDEGSVVWRSRLRDRVKGKAKLGVRARSMWFEDEDYVAEGDGQGEEEEEEEEEDEDEEEDAGMVVVDVRERSEDDEVNKESGCLQLQGKELTDREINLTIDLNLDAHDARDGVDAIEKEEGGKGGNVGKEDVAAEQEQDDEGPTVGTRNDLEEGTGEEMVVEEGLQQEEIGGLESHVSRGNSSDELPCGESNEGVRASNSDRIEQLDMEQTAEESNLPVEQQTEPHLSSPSEQEEEVQQDGQSVHFPDAVLAKDGSKESMQNSWVLDENQGVKVVKEGRRCALCGGGTDGRPPKIALHDSVDSENEAYEGALPSEEPNYDMWDGFGDDPGWLGRLLGPIHDRFGIARVWVHQNCAVWSPENDQQVNGRKKAGTAGDGCWRVRRAWGRPAWSAPGRRGKKRPIRWPCAPHEGRDVGKTGCHREGICRGRPWVAGGGSGMACVAQVVLVGNWMPRRGGSSPVLGRRRTRHPSLDDIYLNIPQNEGRASRPRRSGRGRRPCEGPSAPLRSDKTRRRPPTTARVGRPRPRRP

SEQ ID NO: 77965 - protein, 52 aa, Zea mays
  Coding DNA Sequence Number=SeqID_34590
MGWYRGRLVAELPVHRRQEESNRAKLLSIVVIPYLSRPSLLASVGVSRQGGP

SEQ ID NO: 77966 - protein, 182 aa, Zea mays
  Coding DNA Sequence Number=SeqID_34591
MKNSMLTTITEKGQDSKNSNEEKENKVTTMPMLTLHRFVKKHWYVVIREFISAYEGVLDDDCIGFIIHNAIMQMSINGFTCMWLAMLHRTDHREPPHCGPTPHRAQASLVATFLRFRLEWRRHRSPICTHKDFARSMGTSPVCCLLCDVGVLDTTIINARHTVTATSTNPPTTTPTKEERPR

SEQ ID NO: 77967 - protein, 161 aa, Zea mays
  Coding DNA Sequence Number=SeqID_34592
  Subcellular localization annotation: CTP_CleavageSite=46; ConfidenceScore=5.16e-01
MNKHTGIRSAITNGTPVPPPQVRTTPLRGGRPAEQRKADEWCAVTRSSSSDDDAFCSEGPSSGNADLRLDAAARRPPPMPKLVRQGRAEGHRVGGQPVAGPGYLAGSRTSSSCRGGCRHRERLRSHSRPKARHAAAASATDDGRLSLQSLSEGAGRRPRGG

SEQ ID NO: 77968 - protein, 504 aa, Zea mays
  Coding DNA Sequence Number=SeqID_34593
  Homolog annotation: Hit_ID=Q6QP51; Match level="QueryCoverage=27%, HitCoverage=56%, E-value=5e-15, Identity=42%"; Hit description =Putative growth-regulating factor 1
MEAQAHTSCNRRAGCYVQETAPPLAPLPCLLDCGTSTATRGNPAHDPTVPTRHIGHGPAGGSSSQVVSQAHVPSWDSGRTLSHGVKTTRPCSIPRMARARATAAPRTTRPVALTLRQDRRHLWQEKQATLRFRHNDRVKKGTGKGDTPKGILLREGNGPRAPLLIRGSKAGPSEGFNSRLRALELRAHYWLTPEGFDSRLRRRARDDPGYVRYITKARATLPSHFAAPLTSLTRGQRRLSRSDCCATRQSEADSSQGSDSASAPEDDELRLARPQGSDSASAPEDDELRLARPQGSDSASTPEDDELRLVQPQGSDSALASADGLRLARPGARTRPRPRKTDSTSTSEEPPPRPTQGSYRPRHRGAIITLPLASSGYGEQDRRPIWLALVPKVQHKPIKSPRKGSKGKEQMKPKTALVWRTGLSGVPPDSVRCTKVDQLELATFGFLEMPLRYNSPDCPVWLRTVRCAKRSNGRQLNVRFQRSADTATVHGQFAQSQSRRQKAH

SEQ ID NO: 77969 - protein, 126 aa, Zea mays
  Coding DNA Sequence Number=SeqID_34594
MEAANTHAEEAMMDGPAQPRPPNRTREPGGRPTGPAPSVPSVTATRLLLLGAAQPQPQPLCKGHVSHCGCSTSTGSGSRGSEWRGGGDDVGEGRWRQREEGRRREVASAVEAGGEQRGREERAGGG

SEQ ID NO: 77970 - protein, 138 aa, Zea mays
  Coding DNA Sequence Number=SeqID_34595
MRQRLQSANGRLRQRRKEIRTGQCSLVHRTVRCQRFIYNYTKSTVRNTVDYSGQEKLFGKTGQARTVRALAADRPQHKNNPRTEPMQKSESALWTVRRISADRRRPRSDRPVSGADRPGRTVRTWHADRPRSAEWSND

SEQ ID NO: 77971 - protein, 176 aa, Zea mays
  Coding DNA Sequence Number=SeqID_34596
  Subcellular localization annotation: CTP_CleavageSite=51; ConfidenceScore=5.70e-01
MAALPSPALPSSAPVPSPPGANLSTSLTPASTPDPAATPSSSTPLPPAGLQSEAGDHLRPPRSGARILHPPRSGFPDWTLKIPEMDRRHSPFYVGRTVANRRYDDGRRAEVSCQKPVVKLDSAAGGWQLVKSRRARRSEQTVAVKKAAGQQRDQQGLRVPVWQRLSGMDGPGHQDL

SEQ ID NO: 77972 - protein, 201 aa, Zea mays
  Coding DNA Sequence Number=SeqID_34597
  Gene Ontology: Mol. function=DNA binding; Cellular component=nucleus; Biological process=DNA replication
  Homolog annotation: Hit_ID=Q2QTM2; Match level="QueryCoverage=54%, HitCoverage=20%, E-value=4e-45, Identity=83%"; Hit description =Expressed protein
  Pfam annotation: Domain name=Pkinase; Domain location=1-147; Score= -85.7; E_value=0.0018; Accession=PF00069.16; Description=Protein kinase domain
MEFVRGGELFARVAKGRRKEDTARRYFQQLISVVGFCHAHDVFHRDLKPENLLVDERGDLKVSDFGLSVVADQFHPEGFLSSVHVTEELAIAEVGFGHPDHLSRAEKMQSLIECSLQHVLGCNVEIRFKLVPCPVRKYARLKRHSFSFLSCSGRKQELSDSVVTDEDEAVRPGARETPLKGYKGQQIQFCQLRQGYKGDTA

SEQ ID NO: 77973 - protein, 870 aa, Zea mays
  Coding DNA Sequence Number=SeqID_34598
  Gene Ontology: Mol. function=RNA-directed DNA polymerase activity; Biological process=RNA-dependent DNA replication
  Homolog annotation: Hit_ID=A2XIP1; Match level="QueryCoverage=49%, HitCoverage=40%, E-value=3e-36, Identity=31%"; Hit description =Putative uncharacterized protein
MAASSGATAPELRSMRKRRRAKRRRGGVEQVLLPLPPPSDHDAPLVMQEEAGSDESSVEPTCVLELSIGMAQEEVALRRALYVMVVGTRPKVLGAEVVEEVARCFGIDADSLAIHQAMPEDFLLFLPNEDTATRVFNEGKVFRGPRFNLQFKRWSRFTHATAGALPFLVDVQIWGISAHAWARSTAEHLLHDSCLVSDIHPATALKSDLSSFKLRAWCFDPKKLHRNMKLYIAEPGMVTSEKRCLSYNISMAAFPVDASSGAEDSPPPPHRLMARIQMETMNAIDRIPRLGILVKAPVSGDQFIFVWVYNRQRDTGPLDLAVHASPLHDNLSAGLFELNGPGSPQSTLVSGSGDITGGDMLKKMHSQVDIVADFADGLSGQHSNGFDGLEMRSGTGPLDLDIHVPPQHNAMCAGLLELSGAEKTRKNDTNKDRSKRLRCPLEQDQRQQVECNEMRNDSREGNVEMTRLVCQDGAKRNFNQKKNATAPASSDSTKCDGKNILSPKCSKTIASSHTPNLSEGSNDMDPKSDNYVDGCTERGILQHIPVTHTERNIQLKISDNFTQSEAFRRDCLILWRERQLRKDSAAKADNIVKPDQQQTAQRSKMSTGRRVGSGGSAASSCSKSDNKYDSAPECSDQFSGATSSDKLQKFGGRANKKLEQTIKFPSNSKCNKRPQDATAEKVLKCSLKLLSEADPLEIAQPKGKEKLVDRRQVSTEHQDAKAHSSLNGCSDTCKVDQAAISHCHNSAHQNISQQEKNSVVSDARREEKPGVKCEKKAAGHGAKLAEQSTGLYSDPISLDKETVVSCSKHGTSKVNALKVPDHEIGSTSLDGSMLPRGTVDMFLRKSINRSSESGSGVFTHLLLIMIPIGG

SEQ ID NO: 77974 - protein, 217 aa, Zea mays
  Coding DNA Sequence Number=SeqID_34599
  Subcellular localization annotation: CTP_CleavageSite=61; ConfidenceScore=5.04e-01
METGDFFYSALPSGSLLIDSALFVRQPGGNQKARVLLGGRQDFFYLALPLVSLPTAAPLAPAGSRSGGRSSGASTQTAWDRDAPPMGDREDDRSPPAQPKPKHWRSVRSSPDCGMGIMSFVPEEAGWALSSCFVQGTELTPDVSHRKELFKKFVRLCFGTQIIRYNISAQQLHENKQYLTNSSGDILNPYVATIHYDHLMDTDQAVCVANLFLLSLT

SEQ ID NO: 77975 - protein, 66 aa, Zea mays
  Coding DNA Sequence Number=SeqID_34600
MNQPHLEKNHLNENPADGGIDAGTFDDITRPGNGIRSSLSRETRSRRSKPSKMQGNAGRIRSSGAT

SEQ ID NO: 77976 - protein, 602 aa, Zea mays
  Coding DNA Sequence Number=SeqID_34601
  Gene Ontology: Mol. function=nucleic acid binding; Cellular component= nuclear matrix; Biological process=positive regulation of transcription
  Homolog annotation: Hit_ID=A2XWI1; Match level="QueryCoverage=100%, HitCoverage=60%, E-value=1e-131, Identity=56%"; Hit description =Putative uncharacterized protein
  Pfam annotation: Domain name=ResIII; Domain location=420-598; Score= -28.9; E_value=0.013; Accession=PF04851.6; Description=Type III restriction enzyme, res subunit
  Pfam annotation: Domain name=SNF2_N; Domain location=426-602; Score= -32.8; E_value=6.8e-07; Accession=PF00176.14; Description=SNF2 family N-terminal domain
  Pfam module annotation: Pfam domain module=ResIII::SNF2_N; Domain location=420-598::426-602
MHRAFEEISDEEWSNHTFEPSRVLKRPNQRPSQPPPSIDSFIYNPKACSAAGTSTATVVLSDDDSDFDLGADGGSRRAAKSQRVLKRPHNGAPSRPSLPVKSSRRNPQPSNAAAAFGFSDSEDDDFDLPTSPLRTSSLRRKGKNQRPLKAPQLKPHLRAPPPPNSSSHNPKRSKFASDVKLSNSEDDDFDLTKTLSLNSSTNRQHIQKRPQHKPRLQHRQSFGSSCGNQKHSKAVATTRLSDSDDDDFNITDNDFDLPASHSRISRPRRTTSCRRLTSFAIDISEEDEEDLADDDFDYQDPRPPQQRSSGRRFVVGDDDDSDVPVALEEEDGVNWSELEKEDVDEDYNGVRSVHVEEPEGDVVGMALHKCSRISSDLRKELFGSSAQNCESYCEIDASTCGIVTQEDVNAACTREKSGFEPVLKPYQLVGVNFLLLLHRKSIGGAILADEMGLGKTVQAVTYLNLLQHLYNDPGPHLIVCPASVLENWERELRKWCPSFSIIMFHGAARTTYSKELSSLGKAGCPAPFNVLLVGYSLFERRSAQQKDDRRALKRWRWSCVLMDEAHVLKDKGSFRWRNLMAVAQHARQRLMLTGTPLQNDLH

SEQ ID NO: 77977 - protein, 78 aa, Zea mays
  Coding DNA Sequence Number=SeqID_34602
EHRVARGDDAPHEASLGPDLHGGIPDPYGIRVILQTAHLSNLLSNRRKKIAPAGDISGYIRYVPGPTCRSSALLYMPL

SEQ ID NO: 77978 - protein, 320 aa, Zea mays
  Coding DNA Sequence Number=SeqID_34603
  Gene Ontology: Mol. function=nucleic acid binding; Cellular component= nuclear matrix; Biological process=embryonic development ending in birth or egg hatching
  Homolog annotation: Hit_ID=Q9ZUL5; Match level="QueryCoverage=98%, HitCoverage=40%, E-value=1e-128, Identity=73%"; Hit description =Putative helicase (SNF2/RAD54 family (ETL1 subfamily) protein)
  Pfam annotation: Domain name=Helicase_C; Domain location=228-306; Score=83.1; E_value=9e-22; Accession=PF00271.22; Description =Helicase conserved C-terminal domain
MPDIFATGDVDLKKLLNAEDRELISQIKSILGPFILRRLKSDVMQQLVPKIQHVKFVVMGTEQSEAYKNAINEYRAACQARSAKSSDGISNNVAGLIPKRQISNYFTQFRKIANHPLLIRCIYGDKDVDRIARLLYPKGAFGFECSLERAIQELKNYSDFNIHQLLLSYGDVGTKGALKDEHVFASAKCQFLLCVQALGELLPSLANDGHRVLIFSQWTTMLDILEWALEIIGVTYRRLDGGTAVTERQTIVDTFNNDLSIFACLLSTRAGGQGLNLVGADTVIIHDMDFNPQMDRQAEDRCHRIGQQKPVTIYRCYSSN

SEQ ID NO: 77979 - protein, 101 aa, Zea mays
  Coding DNA Sequence Number=SeqID_34604
  Subcellular localization annotation: CTP_CleavageSite=77; ConfidenceScore=5.41e-01
MTIAPAYHIKTKNSMKRSFRYMSNKAQTNISNSPAMIQGFRTTGKRERVIPIAIITDSPSGRLVFPQLHPSSTALAQAQVAAGGQHPTAQKAGTETSKSVS

SEQ ID NO: 77980 - protein, 39 aa, Zea mays
  Coding DNA Sequence Number=SeqID_34605
MFVKKLVERASKKAETIPTLRVVKVKSEAGGSWSVTGKE

SEQ ID NO: 77981 - protein, 115 aa, Zea mays
  Coding DNA Sequence Number=SeqID_34606
  Homolog annotation: Hit_ID=A2XLZ3; Match level="QueryCoverage=79%, HitCoverage=7%, E-value=6e-08, Identity=36%"; Hit description =Putative uncharacterized protein
MKLRAEAEAARGVGVDVSKTDSLERKHCEAIMEAEACKSSVLMEVACNGGEANGLVNLDACDVSEESTRCSDNNMGMPGVPAIDFSQHGGLAQARDRNTQPYRLSRAGDRKSLRG

SEQ ID NO: 77982 - protein, 59 aa, Zea mays
  Coding DNA Sequence Number=SeqID_34607
MTQLFEFYEAEDPEHLFGEGKDVRIPDGVEKVGFGINSGNGEDEAVEGDHQEFQDYDEF

SEQ ID NO: 77983 - protein, 568 aa, Zea mays
  Coding DNA Sequence Number=SeqID_34608
  Gene Ontology: Mol. function=myosin II binding; Cellular component =integral to membrane; Biological process=vesicle-mediated transport
  Homolog annotation: Hit_ID=A2XWH2; Match level="QueryCoverage=94%, HitCoverage=52%, E-value=1e-140, Identity=70%"; Hit description =Putative uncharacterized protein
  Pfam annotation: Domain name=WD40; Domain location=159-200; Score =0.1; E_value=31; Accession=PF00400.23; Description=WD domain, G-beta repeat
  Pfam annotation: Domain name=WD40; Domain location=212-251; Score =6.8; E_value=4.6; Accession=PF00400.23; Description=WD domain, G -beta repeat
  Pfam annotation: Domain name=WD40; Domain location=435-474; Score =10.3; E_value=1.7; Accession=PF00400.23; Description=WD domain, G -beta repeat
  Pfam annotation: Domain name=WD40; Domain location=488-525; Score =4.9; E_value=8; Accession=PF00400.23; Description=WD domain, G-beta repeat
  Pfam module annotation: Pfam domain module=WD40::WD40::WD40::WD40; Domain location=159-200::212-251::435-474::488-525
ITSGQQHIGSISSLRPENVSPRLAFHYGVPADAALLAYDPVLHVLAVATRNGQIKLFGRDNTQALLQSPSPLPSRFLQFAEGQGVLLNVNTQNQIEVWDIDAKKLCYLHPAEKAITAFSVLQKSFYIYVGDSSGSVSPLKLDLAQRCLADLPYWIPFTESYGSTTSAGNDVEVVFVSPQPLSESNRVLIIFRDGVMSLWDIKASKAVSISGKTTQQQSQKEAKNVTSACWVCAKGSKIAIGYDNGDLYIWAIPEVTSTQNSSSMGGQNLPIQRLNLGYKLDKLPIVSLQWIPSDGKAGRLYINGFNDHGHLFQVLILNEESESRIVKMVLPIAESCQGMELVTGLSDPNKHRQSALALLLKSGHICLYDDSEIERYLLHSQSRSPPTLPNCSYVKLPYGDSGISVAKFYTSNPAALASLDEACIYLDYFSSATKYPCLFSMKGKGQTLTSFTNIHKTRNLYITGHLDGTISFWDASCPHLLQIFMIKQQNKDDTSTGNPITSLQFDMSSSILLSGERSGMVHIITFKKDSSDNIFSFLNGTVLTLFLNPTFGASTLFDVYLLSKNCGT

SEQ ID NO: 77984 - protein, 69 aa, Zea mays
  Coding DNA Sequence Number=SeqID_34609
MVGSPDGPEIRQFPARVPVVPTKTHKHHRDLVDTHAETATGGASRRSKFDGESWLAEDGARATLRLVLK

SEQ ID NO: 77985 - protein, 161 aa, Zea mays
  Coding DNA Sequence Number=SeqID_34610
MSSSWRCPHDSRRRRLWAYRLLLVASLHDGECVRCRQMLEAALVTVDLGTWGRDLALSADHQQRHRAAISNCEHGMCPAGDELQLYGSGGREGTPLIIGKGALFSATTFRYRPPRGCLRWLCCDLFQVLAHVLPFRPDGVHGIQVAAHVQVQCVEGACLMG

SEQ ID NO: 77986 - protein, 221 aa, Zea mays
  Coding DNA Sequence Number=SeqID_34611
MRIKLKTMKKKIKKMSHLKRRKMIKGEMTMIKKYRVKDRHTQESTKRFKEITLVEDALRDSDWVLAMQEELNNFTRNEDVKPIKTPMGTNGHLDLDTGGDPSVLAENPKEAPASVVEPGAAVTSNKAAATGFLANARHTGYRLPPPDLQRDWIAATSQSKPEHRGRRNAFGQTPRGRYSKRIKDPPRNSRASLNSQFHRRPNLLRYNIGNPGLTDAPHPRH

SEQ ID NO: 77987 - protein, 470 aa, Zea mays
  Coding DNA Sequence Number=SeqID_34612
  Gene Ontology: Cellular component=integral to membrane; Biological process=vesicle-mediated transport
  Homolog annotation: Hit_ID=A2XWH2; Match level="QueryCoverage=100%, HitCoverage=43%, E-value=2e-98, Identity=74%"; Hit description =Putative uncharacterized protein
MSSISKSKHFAVGTEKGIVSVINVEDATILYQEQFECRLPGGIASLQFEIYSHNGYDKDILIIAMEDSSIFVIEEETGKLLNPNPVQTDKPSKAILLQMLELSPIDTPAVSDNQDTVSKESLLLLCTENAIRLFSLGHAIQGTKKIINKKKLSSCCCFASLIHSSSNDIGLILVFSNGKLEIRSLPDLSLLKDAFLRGFVYSRNLNSSSSITCSSDGEAILINGEETYFFSTLCQDEIYRHVDSISTVYRKENSTREDSSFVVKSPKEKKKYGTQQGLFGMIMKDNKGSKSKESDAIGSEQCIATTSEELASIFSSTNFAPPSEGRNSSLRDDENAELDIDDIDIDDNPQKPKGPHFPGLSKDKISKGLQTLKGKLKPKTEEKISSGNKKTEDETSVSQVDQIKMKYGYANTTNDDSTSVTKMIGNKLQENMKKLEGINLRAADMASGAQSFSTMAKELLRTTKNEKGTS

SEQ ID NO: 77988 - protein, 245 aa, Zea mays
  Coding DNA Sequence Number=SeqID_34613
  Gene Ontology: Mol. function=nucleic acid binding; Cellular component= nucleus; Biological process=regulation of alternative nuclear mRNA splicing, via spliceosome
  Homolog annotation: Hit_ID=Q94BR5; Match level="QueryCoverage=80%, HitCoverage=17%, E-value=4e-29, Identity=40%"; Hit description =Putative DNA-binding protein
MPFRLFAETCCSENVCVRLNSSETSTSTSDLPFPNAIFCDIKVEYDVEQKIFSSDERAVYEEALKHITQETKEEDLPKGGMSVLLLKHQKIALAWMLSKENCSHCRGGILADDQGVGKTISTIALIQKEMVKQSRFMTAGSYSTKFVPNSDYDNGSDVVISMDKKEPKDEPLNELDGSARLHVASSLKLCDSKPNTATDKAEPKKKARVRYSASNLRSKTRPAAGTVVVCPASVLRQWANELSVK

SEQ ID NO: 77989 - protein, 215 aa, Zea mays
  Coding DNA Sequence Number=SeqID_34614
MAHRTVRCTPDSPVPLPRHHCRWILTVGASDFWALLGVRCTPDMYCLMSGVPAWAILTSARAEGALNARQRAVGAEMTVASEAHRTVRCTPDSPVNFSGLAVGVSRSWRVPEADLPWRTGHCPVYTGQSDCNLADGEYVLVPEQGPTQEVAPDPAPEPAPEDLPATALEGKPRNPFEMDTSSLEEMVAGVTWPSILPPGWTVEWDPASAEEEHEE

SEQ ID NO: 77990 - protein, 57 aa, Zea mays
  Coding DNA Sequence Number=SeqID_34615
MAGIAQSTRAGGCSRRRRVYRPNHGDLVQSKGTVMKHTTTFIFGPSHDHKVYMIFCS

SEQ ID NO: 77991 - protein, 122 aa, Zea mays
  Coding DNA Sequence Number=SeqID_34616
MNHVQQSSTQESPSIVILGAKEWKNGVACDLVEEIFIRCDGGEGGPGAGHDGGGGCAAKGAWVAVVRCKGGGTRAGGTEKTFLRKTKRKHTSSAMISTNKSNVLNKGRIEFFQSTDYSDSGG

SEQ ID NO: 77992 - protein, 82 aa, Zea mays
  Coding DNA Sequence Number=SeqID_34617
MGLGVCGSLCQGGDETDGLGYAYGVASPLQPNRILAEYVDVYSPLLYTPNPPSPGCQHCNHCSGEDEAVEGDFQEFQDYDEF

SEQ ID NO: 77993 - protein, 59 aa, Zea mays
  Coding DNA Sequence Number=SeqID_34618
MNSTEGAFIVSKNTSEGLVSLVTMLICEPSALGGLIVRKGSRSSGLKGRTVRRMMDYPH

SEQ ID NO: 77994 - protein, 32 aa, Zea mays
  Coding DNA Sequence Number=SeqID_34619
MAPGRKTTAKSTKPTELGQIQLAFQSILKYSH

SEQ ID NO: 77995 - protein, 91 aa, Zea mays
  Coding DNA Sequence Number=SeqID_34620
  Subcellular localization annotation: CTP_CleavageSite=49; ConfidenceScore=5.13e-01
MAVSVSEAAASGGRFAESTAVPPMRFASGCSRLGGRDPPPLPARLPRPRGQTAEAALEVHGIFVDGFAGLKRDPSLLIFSLIFLGEKRKRK

SEQ ID NO: 77996 - protein, 391 aa, Zea mays
  Coding DNA Sequence Number=SeqID_34621
  Subcellular localization annotation: CTP_CleavageSite=60; ConfidenceScore=5.35e-01
MSSSSLKRRVFPSSKPPDGGYPPPFLLLVGGTQLHGSWYLSAIVRLQGFSSAGPTVPPCRRSPRMVTVGFWVGKSKPGCDLGPTLSFKDVHHPRWGGSHAEPALYLPRGSAGHPFPWCLGVEAFAGPADGADFDNVGLNDGERRHLQRVGVVGRASGGPSCRRAAAASTGGGEPAIGLLWFRRPSPWSGVVRTRGGGNRSSVGSGISTRSRPFDYLIRFTKHELPRVKVTGEAGGSDISMNRGGVGSRMGTWGNRLSRLLGPDSRRSPWTAAPPEAGSGFAEDVVDAEGATAPFGVKTRACRIRSSCSVCFLRPPRPEENTLAALAKLRLFSSCFEHLDFVGNRDVCVSKSCFSRKGRVRYPYPRGVGIPRLGRPCRLRVLSPVHEALSPT

SEQ ID NO: 77997 - protein, 115 aa, Zea mays
  Coding DNA Sequence Number=SeqID_34622
MVCQGKGRGATRVRRKKSTAIRGRIGGEDFSPRHGGSPDAGEDGTGQGEEIGHSSKVWAARGFIGCYAIARRELCLGLKTERRGGGFLGADAYRAEGVARLTESLGACASAALRG

SEQ ID NO: 77998 - protein, 47 aa, Zea mays
  Coding DNA Sequence Number=SeqID_34623
MGSHDPRAKWESRLMDDKDDGYDYGNGKEEGVEVNLQEFQDFGEFED

SEQ ID NO: 77999 - protein, 126 aa, Zea mays
  Coding DNA Sequence Number=SeqID_34624
MTLTKNKIEQQASYQVERCFCYKCGEQGHLRQVILRKEVHEQKEPSIGDNRCSHSTLPKKVDLMVFRRNTPLAREARARGFKIGDLEGLKIEPHCEVHGEKGKDLGATFAWKGQGEDPSMTLETEH

SEQ ID NO: 78000 - protein, 87 aa, Zea mays
  Coding DNA Sequence Number=SeqID_34625
MAPKRANSKAAASIDDAAKVALLAEKKGKAPIADNIPQEAFDDEAVKQQKATPGQPAYAGGHHAHLQFRGGTLGTPARASSTQKAKT

SEQ ID NO: 78001 - protein, 1145 aa, Zea mays
  Coding DNA Sequence Number=SeqID_34626
  Gene Ontology: Mol. function=zinc ion binding; Cellular component =nucleus
  Homolog annotation: Hit_ID=A2Z3D4; Match level="QueryCoverage=96%, HitCoverage=68%, E-value=0.0, Identity=55%"; Hit description =Putative uncharacterized protein
  Pfam annotation: Domain name=GYF; Domain location=555-610; Score =39.3; E_value=1.4e-08; Accession=PF02213.7; Description=GYF domain
  Pfam annotation: Domain name=Plus-3; Domain location=297-404; Score =149.5; E_value=9.6e-42; Accession=PF03126.9; Description=Plus-3 domain
  Pfam annotation: Domain name=SWIB; Domain location=159-234; Score =83.1; E_value=9.1e-22; Accession=PF02201.9; Description=SWIBMDM2 domain
  Pfam module annotation: Pfam domain module=GYF::Plus-3::SWIB; Domain location=555-610::297-404::159-234
MASLLPPGALPLSWPLEVDFDDKSSWWYLFKDYWLNLKTNLSLTVEEISAAKSQKSGELPDTNDEINSESSSGRHLENNTSKKRGRNRSKQAAIEQGSEGKETTGKSAKLGLSGIRDAQTSSGKKVRKLSRRSLSSQHSPKDSESVGTSTSSADEVSWASKELINFVAHARNGDKSVINQYDVQPLLLDYIKRNNLRDPRRKSQIICDSLLQSLFGKDRVGHFEMLKLLESHFPTSEVSPIDADENHGGVVDPDPSQDADGNSEASVVMSSEKRRKSRKYDLKHQPNIDDYAAIDNHNIGLMYLRRNLMEELIDDVDTFDEKVVGSFVRIRIPGTGQRQDIYRLVQIVGTGRSAEKYKSGKRTTDITLVILNLDKREAVTIDIISNQEFTEEECKRLRQSIKYGFIPRLTVGEVQEKAKVLQTLKVNDWIESEKMRLGHLRDRASDMGLFTLRECVEKLKLLSTPEERARRLNEEPEIHADPAMDPYYESPEEQEQEIERSSFNKSRSSFLRKDGSLVSPVLHKGHPGASSGSLATNIGSGAKTASQSAINESEKIWLYMDPSNKIQGPFSIIQLRKWNSNGYFPPSLKIWKASEKQDDSILLTDALAGKFEKDLPPWEPPHVSLSQINKTPLEQSTIADEQTPKSVIAKSFSSSDQRHDYSSTNLGTTMIHSGSQGYYGMQNSHAAYTSQQSLTGSWNATSSQFGVAISPLTPTQPAMQSLSGQNIVAAENMGHLTTGMAPATANAEMVNSDLTSQNQMLSSLPQTDDRLADGIESKSGEDVSHGRVRSSAEAIGPQDAQLGPVQLNAQQLENTRNHMSSIDLSKSMMPSQMMSAPSAASVQPSLTTTARSDNQSSGWAVPAQMANTPGQSQITGNLTWGNTPQGDASLGWGMVGQSNMNMPWVASAQGASGYNMGVAMPTQPNAVPNMGWLPNPGNTSMNMIWAATQGQGTPNAAPMMGGQMQGVPMAPWGGVAAGSANSYPAWGNQQAGNMNQNVGWSAPVQGNPGQANNNMNWNAPNGNPNWNNQQRENGGRHSGHRGAFSGGDSGGRSWKSRSGGDGGSRGHSRFSHSTNTEGYPSRTDRHYDRQNSGNERRYENHNERNGRQFDRQPSDNERNHDRPDGRHGGRDDDRQADRSESRELR

SEQ ID NO: 78002 - protein, 85 aa, Zea mays
  Coding DNA Sequence Number=SeqID_34627
MREAVVEMKPGSTAGVEGGQWSIGGATAAATRATRAGEAGSGVDHERMDSGGHWRLGQDLDSCSASPVTIAVNAVQGKRAGAATP

SEQ ID NO: 78003 - protein, 39 aa, Zea mays
  Coding DNA Sequence Number=SeqID_34628
MKGGWAAGWVQLGRGLRRTWQGVLTAPAREKHEEEACWG

SEQ ID NO: 78004 - protein, 138 aa, Zea mays
  Coding DNA Sequence Number=SeqID_34629
MEGTKPHSRWTDVRSAGQHCRGNGSAKQAVHLGLYSQVRKEPGVDYLDDATAGIRPERGDGRRREAERHGRTSLGAPGTEYAMGSTGGSRPGNQAPSGTKQQPSAATRDEAAALSRQDGETLGKKANGEEGTHNQQFG

SEQ ID NO: 78005 - protein, 314 aa, Zea mays
  Coding DNA Sequence Number=SeqID_34630
  Homolog annotation: Hit_ID=O48967; Match level="QueryCoverage=14%, HitCoverage=9%, E-value=2e-11, Identity=81%"; Hit description =Putative uncharacterized protein
MAALGASPNRCFLILATREDMTLLILSMREDTTGPNPRASSPSRSRLYVSWTGPPRGSAGSLYARTRPPSTVRNSQVACRVPWTGSGSLRYPGISKGLVLTRVRPYPVRLRSPLRRRPAAATWLVARNISQWAEPDVRPLGRAVSAFIMERTRRLSTLLTGDVPPQHLMRSVHSTGRWRQGHPVDGAPVQSIVKQCTRAVRRTVSIIPYTRSFPCTSILRRSRMSGRKKIARATNISGSKYYIRYVPGPTCRGSVPLCMAPVAEDGIIISMMVQIVEHHTETSTDFLVEEEAVSSAPQVSNRPVSGIAAVHAAR

SEQ ID NO: 78006 - protein, 94 aa, Zea mays
  Coding DNA Sequence Number=SeqID_34631
MALGPTDRGCLVGWLGCRPLRRVVECREIIDLAKRVSERREQSSKDDSPPRRRPGKEKVDDGEVAAAKRDLGYQSPEGDLKDVFAGDSYSGGDN

SEQ ID NO: 78007 - protein, 206 aa, Zea mays
  Coding DNA Sequence Number=SeqID_34632
MEHRPGPERLLETTHLELDGKLFVNTQQAPTWRANCWRFDPGGPWVGRGGGSSEVEVESVFRGRGRVRAPGRARRRPSSEAKAEAEPWGRARRSSSSSGAEAESVPWGRARRSSSSSGAEAESEPWGREKRSSSSEAETGAESWGRARRSFRWRPRPDLAVVSLTLSSGTAVGAMQAALSSCQAGQWSDEVTAVTSALSTEGRASG

SEQ ID NO: 78008 - protein, 131 aa, Zea mays
  Coding DNA Sequence Number=SeqID_34633
MEKMAARGAGKADTRRLWREERATLHLRRNNRFRKGTGKGGYPERDPSPRRNRAPSPPLLIRGSKAGPPRVQQSPQIAWARHPLLVRGSKASPPKGFMAASGYSGSAPITDQGFEGWPPKGSQSPQTPSEG

SEQ ID NO: 78009 - protein, 155 aa, Zea mays
  Coding DNA Sequence Number=SeqID_34634
MSKNEGPYTGSFIKKACSMMMDGNLLNKYEVVKNIAKDLPYTKSTRMNNMNQPMNLKRLTRTHKNTRYNPRFGNHHKGVLLLVEEPTKDWVFSNPNPPQADHKGQGNLFSNQLKERVRAEVAGEQYQNRLNRFQDRLNRFWGLKPNFEYFEENKK

SEQ ID NO: 78010 - protein, 292 aa, Zea mays
  Coding DNA Sequence Number=SeqID_34635
MQVVCNHTTETHPFDFDASSMEAQAHTSCNRRAGYYVRKNAPPLVPMSRLLDCGTGAATRGNPAHDPTVPTKHIGHRSVSRGRRCDGRYGQKWADSNGGSRRTEAAVKSSAGSCPLLEQQGSPLPRCEDNTPVFRPSNGSHNDRPASHPSLRINFAAGDRERGYFERDPSLRRKRAPSPPTDQGLAPRKGLTAASEHSGSTPTTDQGFEGWALEGFDSRPRARRARDDSGYVRYMAEAQATLLRPPPRSLGLEASGLVIIASASPLYVSTSVGTSLELACWQAYTVLKKWWL

SEQ ID NO: 78011 - protein, 223 aa, Zea mays
  Coding DNA Sequence Number=SeqID_34636
  Subcellular localization annotation: CTP_CleavageSite=61; ConfidenceScore=5.39e-01
MRGRRTAAAWPGCSIPSSVRATVAGRTGGSHNTSYAARAVLVFWDGPVLVLAARTGVRTCQCALGRPVLAGAVLVGRWLPSSVLRWWQPEKVTSEVSRRRRSPSARLALPPKASLAQLKNPWLLYNEPEPEPAVSAWTEAESAREEASLAQEHVASLAEEVQQRRLEPGQDPYEDLSYDGPSMVLASSFEVEILPPASPSEAGPDFAEGGDDAEGPAAPFVDV

SEQ ID NO: 78012 - protein, 66 aa, Zea mays
  Coding DNA Sequence Number=SeqID_34637
MAYAKQTDSSSCGLFLLNYIKYWTGDELYDSFTQVPSDSDQNHNMKKYKECKGWRRAEAMRRGPSA

SEQ ID NO: 78013 - protein, 110 aa, Zea mays
  Coding DNA Sequence Number=SeqID_34638
MGSVGCRVAELSSSPTHSQGVRESWRREDRGSAVVAQGDERLARPAAAGRDGRLDRDLERLKRNIREEEKGWGASDITAADLGEEEATTQRSGRRRRQRGARGGDERCGG

SEQ ID NO: 78014 - protein, 25 aa, Zea mays
  Coding DNA Sequence Number=SeqID_34639
MHGLGVIARRSFAGVVTVPNFCELT

SEQ ID NO: 78015 - protein, 105 aa, Zea mays
  Coding DNA Sequence Number=SeqID_34640
MEQEMGGEEQDTKTSNGDWPVYSFVDTGGEAARESSTERRAADTGDGEAERGEQKLGLMGYVPTRETRDADGVYSPYYRAPGRRCAAGEPESARSFLGNPVAARS

SEQ ID NO: 78016 - protein, 229 aa, Zea mays
  Coding DNA Sequence Number=SeqID_34641
  Gene Ontology: Mol. function=ATP binding; Biological process=apoptosis
  Homolog annotation: Hit_ID=A2YHL2; Match level="QueryCoverage=91%, HitCoverage=36%, E-value=1e-33, Identity=45%"; Hit description =Putative uncharacterized protein
MEIFLSALLGDLASRSINLLISTRSRPTGMDVGDSLQSAILRAQVIVDEAMGRHITNRAMLQQLDMLRDAMHQACYVHDTFSCQQSHAEEDAAGDHLQVVNHSPSLLPSTSLKGVIYGASDRKTPPPLLLKQLQESLRNLSSMILDASELAVFFRSYPPRLYSQPYSMHLLLGNCMFGFQLETELVMNFLLHAEPPPGSEALDVLPIVGPIYVKWAGLARLGTARHRRA

SEQ ID NO: 78017 - protein, 107 aa, Zea mays
  Coding DNA Sequence Number=SeqID_34642
MDITSKMDIAKVRLGCVARRQLIKPRTKARKASRYQVHGRRSRRLRNPKPRVKKKACKVKAKAAQSGTPDCPVVHRTVSGGAPDSVRCARLNSSKLAALGNWLTAYG

SEQ ID NO: 78018 - protein, 225 aa, Zea mays
  Coding DNA Sequence Number=SeqID_34643
  Gene Ontology: Mol. function=aspartic-type endopeptidase activity; Biological process=DNA integration
  Homolog annotation: Hit_ID=Q8S474; Match level="QueryCoverage=28%, HitCoverage=8%, E-value=8e-09, Identity=46%"; Hit description =Putative pol protein
MTRCWVQQKGKGATKGSSGLSLRAIIHRTVRCTPDSVRCSIEDTAQELASLRFSFQPLRYNSPDCPVCTGLSGASAEQRLLQAPTATCSAFIARQRAQGSGTPMLAHRTPYSACPVRHRTSRRTQKSELQRSISNGTGDVAGAPDCPTTDQAKDEGKKSFEVPSAREKVKEAEEPKAKAKAAQSGTPDCPVVHRTVSGGAPDSVRCARLNSSKLAALRNWLTAYG

SEQ ID NO: 78019 - protein, 210 aa, Zea mays
  Coding DNA Sequence Number=SeqID_34644
  Subcellular localization annotation: CTP_CleavageSite=70; ConfidenceScore=5.49e-01
MTTATVAGTVAIAAARGGSGGPSAMGHGAQALSTKLIRRPKRKPSGKRVSFASPLAVVLGVNPIVQLLPSVDLASGILPLAVSTFHPRNDPMLDEVLYGVAVSEAQALRASKIMQLIHSAEDREYMLAALPGLNSEATMEHNIQVETVQILTDLDVVEQLAQHFEQPLSERKAEAIITLVNHGKQSKGKMKKKLHARGSVAPASLEMEVA

SEQ ID NO: 78020 - protein, 106 aa, Zea mays
  Coding DNA Sequence Number=SeqID_34645
MALDLKYYPRRSTDSARGVIVSPVGEGNPRLNSMVNLVVMLNTELDHTLDELGKMSENRRRGVRRAQPEQQAPQEEAAPQQHLPPPPPMTIEQMFLMQTQTVQAIG

SEQ ID NO: 78021 - protein, 462 aa, Zea mays
  Coding DNA Sequence Number=SeqID_34646
  Gene Ontology: Mol. function=ATP binding; Cellular component =intrinsic to membrane; Biological process=apoptosis
  Homolog annotation: Hit_ID=A2YHL3; Match level="QueryCoverage=95%, HitCoverage=86%, E-value=7e-94, Identity=42%"; Hit description =Putative uncharacterized protein
  Pfam annotation: Domain name=NACHT; Domain location=163-302; Score= -34.6; E_value=0.03; Accession=PF05729.3; Description=NACHT domain
  Pfam annotation: Domain name=NB-ARC; Domain location=119-399; Score= -90.3; E_value=0.00016; Accession=PF00931.13; Description=NB-ARC domain
  Pfam module annotation: Pfam domain module=NACHT::NB-ARC; Domain location=163-302::119-399
MAVEESLQRALLQARAIIEEAVGRRITNQAMIQQLGMLRDTMHRGYYALDAFRYQPRYGEDGNVPAVRRFISLSKVHSVKDPYFSCRTAQFREQLQDALDRLSSMIVDLNELVVFLASYPRLYRQPYNMHILLGNCMFGRQVEAELVTEFLLHTQPHSLQELEVLPIVGPLRVGKSTLVAHVCKDERVREYFSEILWLYDHDFTDDELAFKQGCAMENQISNLNKDKRVLVVVELSGDLYEDAWNRLYLASKQSICSGSKIIVTSRSDKIVRFGTTRALTLKLLSHEAYWYFFKVLTFGSNDPNTHPRLAQLAMEIARKLNCSINGAYVTSYLLRDNFNVHFWCKVLSFLSWCIQKHISKFGVHPSVLFSQNVPVELGRMAAPSEDFMLCDQYHRSSQEEVPEIRIQDVMYGSIKRHGKFDVLVWRSQIPPYYSYVNACVIQERKNTGGKRKRCINDGATVS

SEQ ID NO: 78022 - protein, 106 aa, Zea mays
  Coding DNA Sequence Number=SeqID_34647
MEIKPTCLNGKAARKAIASAEAKQLASKWADWVVYLEPGGPTVEPGGPTETPWPHRVRAASTDHQASCRRDGVGAPQSALVVGEEDTNHRSDDHGFLPVRIKGNLI

SEQ ID NO: 78023 - protein, 64 aa, Zea mays
  Coding DNA Sequence Number=SeqID_34648
MASVTSQGINGESNGEEETVGVMILNATSNRTDADVESRVGTRCRAGGSTRGRRVWVLSIQQQS

SEQ ID NO: 78024 - protein, 79 aa, Zea mays
  Coding DNA Sequence Number=SeqID_34649
MALFPTVETCTTSSLHWRCFGCFGWLLGQEDGLPDCSNVGIDFLLAGYSDGTVVVEETASGTTIAGSDADAGAGTGDLA

SEQ ID NO: 78025 - protein, 152 aa, Zea mays; identical to SEQ ID NO: 76486
  Coding DNA Sequence Number=SeqID_34650

SEQ ID NO: 78026 - protein, 165 aa, Zea mays
  Coding DNA Sequence Number=SeqID_34651
  Subcellular localization annotation: CTP_CleavageSite=39; ConfidenceScore=5.41e-01
MAVAGGREQRSRRQPSSRPIRGQRENPLSRRKDNAPVFRSSNGSRTRNGRPANHSPRRINSAAGQAAPLGPVKGDTPKRILPCEGTRLRATLLIRGSKAGPPKGFDSRLRSRGPYTHYWSEVRRSAPRKGSTATSGYSGSAPITDQGFEGWPPKGSQPPQTPSEG

SEQ ID NO: 78027 - protein, 82 aa, Zea mays
  Coding DNA Sequence Number=SeqID_34652
MPETKDYNSLGQKPRSVSWKQFAARKAFCIAANYRCWPVTGSWDLTSKSTESLKKSDSGSNGYMFAQNNASPIWSTSYDDAK

SEQ ID NO: 78028 - protein, 164 aa, Zea mays
  Coding DNA Sequence Number=SeqID_34653
  Pfam annotation: Domain name=Collagen; Domain location=25-83; Score= -37.4; E_value=0.035; Accession=PF01391.9; Description=Collagen triple helix repeat (20 copies)
MERRWRGSSASSRRFATHQDLLGAGVAGAAGTAGTTALRGRGEFGDSGDEHGGGDCGHSSFAGARRIRGQRGRARRRGLRAQQLCGGAANSGTAGTSTAAGTAGVAALAGTAGARTAARTAAARSHERGRESSRPEYQPFRYLRKRKRKRKLSSPHAAVATGRI

SEQ ID NO: 78029 - protein, 223 aa, Zea mays
  Coding DNA Sequence Number=SeqID_34654
RIPDSDPRPGGSFLLQKKPEFMLPIGSTTIPEVEEGPELLTLNGAQVINVETHRHRGNRKSKNAVSQLKHFEILGEPTKGSLEKMTNRNRIQLEDASTKGNHQPEGRPQTGASRANRSFQGIPEGFRKDQAWPKVQEREIHSGKARRPEGRTREAGEPENLTDCRAARCPLGAGDLSPPGQRADRFRLTDRGAVPDRTAQVLCCRLPKGQSCVALMILQFWSY

SEQ ID NO: 78030 - protein, 84 aa, Zea mays
  Coding DNA Sequence Number=SeqID_34655
MAWQWQALTIRMEMDWQVLMVCLVLMLHRKIQLKHDRKNETKVDSEQAMFHGYGNLLKYHRLLKNSCRNNLTEINMVVRSQVTI

SEQ ID NO: 78031 - protein, 110 aa, Zea mays
  Coding DNA Sequence Number=SeqID_34656
MAVGFHIYNLGSIERKEFRAFFNLWNRGGPNWKHEFRLFLEEEAASWSRARNIWRPQALPRPLPRVSVFNRLRPQASGPWHSASNGRTGLPRFLGPNRSGVAIGSCHTRF

SEQ ID NO: 78032 - protein, 988 aa, Zea mays
  Coding DNA Sequence Number=SeqID_34657
  Homolog annotation: Hit_ID=Q10CJ6; Match level="QueryCoverage=63%, HitCoverage=99%, E-value=1e-157, Identity=50%"; Hit description =Expressed protein
  Pfam annotation: Domain name=DUF863; Domain location=134-979; Score =774.5; E_value=6.6e-230; Accession=PF05904.2; Description=Plant protein of unknown function (DUF863)
MGAKVEGESYMPGYYATGDLNVEASGRWSPYYEEMTSNGQLCNGFATKPTSGYSEFDKEILKHQILEHEAVFRQQPHNPLAIQVYELHRVYKIQKDMMKQHQRKEVYSYPTLAGASHTNSPSQVPPNGAKMMWQMPVPPVSTTYRKAIGEHNDTNQSCMKFLREGSVQSSPNGFLSSDAAPRTRQGTFDLQLPADHYIDDDDTSDNKPIDFLGLASDAKPQNDAELTLVSAERLGKFSDNSSSSGLRTTNNLGSRQVTNLNESNTGFFMGRANGSVSRGLPHTLENSWHQPILRSSTTTFNFSKEYSKEKHTNEGTSSNFFDTSAKLTHDDKPTINKGKQVSSITFLAPRYNDADPPKYFKAADGRPASYNQFLYQGQNSSAGWIARSPLEPSVINNFARVDRPHHSNLGTFTVPISIPQIDNPSIVSPMGSCTADPRSSIVNNPALIPRFNGSSTVNSYASLSAVTQSIGTSIPKLKNVDNLDKRYPGFPLDSFSVSHSRHQVAISSNLEQKNSQKFEDSDQQSHGKGMKNFNLNETLSDCQEDGLVEQDGRCAASFQHGKDGGSVFGISWLKNKAVSADPTALEKAGKIFGHSFGTTMELKNAKDQNEPAVTIRNLSDSASTSLGCGIKKDGPSEDIATGTLLVCNKAQEDATCLPLSCQKHVPKDGQDADGVIKISGASIRNFIDLNDAVPNDDNSEESVVSHECQAEPSRNNHPKRAFVIDLEVPACEEDAAWDFDQECAQPKPDAHQEVDGRSDTSALAAAENIVALSRIIPTALEASDDMLQWFADLAVLNIKDLAEQAELQACTNDSSNDESDSFESLTLKLEETKIDEYWSRPLEPEITTDEQLISTAHLLTKPRRGQQRRRRQKRDFQKDILPGLSSLSRPEIIEDVQLLEGLVQASGGSWESSLTRRGRYGGRTRGRKPRKTVVTVIVEEEVEVSPPPKPVGTGDLEADGRGMVGWGRTTRRCRRARCPSGNNLAAAS

SEQ ID NO: 78033 - protein, 114 aa, Zea mays
  Coding DNA Sequence Number=SeqID_34658
  Subcellular localization annotation: CTP_CleavageSite=44; ConfidenceScore=5.21e-01
MATASRPQMPPTAWTRAPPGAETEPQPARVGSGVCGTGMRCDPMSMRGPAGSNSIPIPGPDLRVPQPDDTVSVFRRSNSNSYVNFSSLNHRFKKLLNGFWSKKMKSFRELLELL

SEQ ID NO: 78034 - protein, 51 aa, Zea mays
  Coding DNA Sequence Number=SeqID_34659
MGWSFLSCGCHPWPSMRAAGMGWAQGQGETKHNVVQEPTTGQDMDARSLAQ

SEQ ID NO: 78035 - protein, 119 aa, Zea mays
  Coding DNA Sequence Number=SeqID_34660
  Homolog annotation: Hit_ID=Q10CJ7; Match level="QueryCoverage=38%, HitCoverage=18%, E-value=6e-07, Identity=55%"; Hit description =Transducin family protein, putative, expressed
MNRPDLPLPIAVDLLLAGQIMTGSLDKKLKLWDSKTRNICISLSSKFQKRKMESGPCKLHLSSSLLPMYLGSVASVAYNHNGQLLAVASNYFLEVDKEEQHHQVFIETVENFKGKSRVG

SEQ ID NO: 78036 - protein, 139 aa, Zea mays
  Coding DNA Sequence Number=SeqID_34661
MVSAAGGIEIGQVTGTAAHSSERTRRRRMLRQTWHSGHCQQRQRREQITTQCVQAAMEHGDDWISRGQPVGRVSGENRDGNGSTKVRAKRFIAEEEETDAAGERKSAINDGVRINNRETVPHGRETARASTAINGGGAV

SEQ ID NO: 78037 - protein, 135 aa, Zea mays
  Coding DNA Sequence Number=SeqID_34662
MTVEQKNEKSRKRREASQRNKGPPIQTEASRVSLSDGCSTIDFTNFATQVPNVNRDDDSDWLHRNETFKSDDVFTTRDLLTPGGVHETVGNTPNHNLGRAAYFRERYKNLTPAERELNRERLSCIIIHQSGKGQR

SEQ ID NO: 78038 - protein, 454 aa, Zea mays
  Coding DNA Sequence Number=SeqID_34663
  Gene Ontology: Mol. function=cysteine-type peptidase activity; Biological process=proteolysis
  Homolog annotation: Hit_ID=A2X4U2; Match level="QueryCoverage=67%, HitCoverage=39%, E-value=6e-37, Identity=31%"; Hit description =Putative uncharacterized protein
  Pfam annotation: Domain name=Peptidase_C48; Domain location=1-150; Score=-2.0; E_value=0.00024; Accession=PF02902.10; Description=Ulp1 protease family, C-terminal catalytic domain
MAHICSAERRVLLYLDHDMVFIPINIRETHWYLAVIHARNMEIQVLDSLGTSQDRKDLTDSIKGLQRQIDMISQRKELKDHRWPDLQVASWPLREIDMGYAKQTDSSSCGLFLLNYIEYWTGDELSDSFTQDDMSHFRKKMAAILLSSDLNKRRGCLLYKNEKEVDSGSSSDVEILENPKDSNKRKLLHVLDDSEVVYEDEEGPITQADLQRWFVDDWDKKAPVKVSTDGCTNDFLMVGLSTKDMPVTKADSIDVLCDYIMAIEDDTTLECFDMAVRLLANKESRRPKEEIINNRKHYMDMRFWVLMPWKFNGCYALFVIDHVKKHVTFIDFTPTQDWCKHMPYKRFEEAIIMASKKYKIAYSKKHSGWAEDIFKWEHTIQTGVPIDLKGFNTSYLVLQAMAMWGNDRRLKFVGDAKTLRRNFVIDLLSYEDNSCRYAIPANIQQRLVDIAKKD

SEQ ID NO: 78039 - protein, 300 aa, Zea mays
  Coding DNA Sequence Number=SeqID_34664
  Gene Ontology: Mol. function=triacylglycerol lipase activity; Biological process=lipid metabolic process
  Homolog annotation: Hit_ID=A3ABY9; Match level="QueryCoverage=27%, HitCoverage=13%, E-value=5e-24, Identity=70%"; Hit description =Putative uncharacterized protein
MVKRAVIVTPTSLVSNWESEIIKWLKGRVQVLALCESTRADVLSGIESFLKPLSRLQPPENWNGGVGFVSKEMIQSHCPAPAEYIQTVTSEAVSEVVQSSVSVAVDAVDLVDDKGDSDDDIVDHHGDEDRMTDVELWQQLESELYRKREGEEDDIAEEMAESTIAEETVTSEAVSEVVQSSVSVAVDAVDLVDDKGDSDDDIVDHHGDEDRMTDVELWQQLEGELYRKREGEEDDIAEEMAESTIAEEVGGVAEDVLSETKEVHRFYPPGKIMHILFSSSEEAVRGEEPDDDHGHHLCCS

SEQ ID NO: 78040 - protein, 121 aa, Zea mays
  Coding DNA Sequence Number=SeqID_34665
  Subcellular localization annotation: CTP_CleavageSite=51; ConfidenceScore=5.20e-01
MPPSPPPIALGSLVGDLTAASARHRAVDRPPQAPSSQIGPTPMIPYPRPCLATTPPSQNRAPGGEPPRTSPAVEPDRFTPPPLADTWVRAHGVRSRRSTLPWADWATCPRPCSLGRIPSSP

SEQ ID NO: 78041 - protein, 196 aa, Zea mays
  Coding DNA Sequence Number=SeqID_34666
ALSGRDPSEDDPTIVYMAGNLHTLDNHYDDLFAHCTCLNSRVESLEQQIKKLKEEKASLQESLEITEGEEANTREAYRTLKKDYDKKLKKLAPTKKIRKRTKSQGCQTERKEEAPPTLPPSRIENLSDVEDMSLASLDDLLREFGDTLEREFGSTLESARTYAAVRNATWAEFEAAFREHHVPQGIVQLKEDEFQN

SEQ ID NO: 78042 - protein, 168 aa, Zea mays
  Coding DNA Sequence Number=SeqID_34667
MTRTINREIWVRGSFLPQARTPERLEDGGKALKSWVDGGRLQLHGKHSGEQGLGKPEGLGANRGVSRVVNGEAELTGAMEAKGTQRRSWNDGGLRCAGAELGWSRAQGKRGGKRARLRAQMTGGKCNTPGVTQGSLEDMVAGVTWPSILPPGWTIEWDPASAEEEHEE

SEQ ID NO: 78043 - protein, 85 aa, Zea mays
  Coding DNA Sequence Number=SeqID_34668
MTRTINREIGARGGCLPQARTSERLEDGGGLQLHGKHSDEHGPGKPEGLGANRGVSRVADGEAELTWTTDATGTQRRLWNGCGLR

SEQ ID NO: 78044 - protein, 177 aa, Zea mays
  Coding DNA Sequence Number=SeqID_34669
MELERVSARATRSPNLSLGLKEAHQQTPPAQQHRVWVAHKESSWISTTIWIVFADMLWKALLNGSCPRPARQTRPIWSSIHPHDNDGPRLPPSRSPFSTEGVGAGVSFPYSSDTSSDTDLHSGYCTSTRMFHSMHAPSFSSSSDVPFVFPAFAMFFLPNQLPPPTVAAGNRLTLVHA

SEQ ID NO: 78045 - protein, 37 aa, Zea mays
  Coding DNA Sequence Number=SeqID_34670
MARVACTLRGKRLDGGVSVLSVGVNPPYLDSLKPAYP

SEQ ID NO: 78046 - protein, 63 aa, Zea mays
  Coding DNA Sequence Number=SeqID_34671
  Homolog annotation: Hit_ID=Q5VPL8; Match level="QueryCoverage=96%, HitCoverage=70%, E-value=2e-18, Identity=66%"; Hit description =Putative uncharacterized protein P0566A10.33-1
MAAQGSLVMWRAVFAALGLLMVATLVYTLATDGSPFRLELFTPWMVATLADFYVNVIAISVMS

SEQ ID NO: 78047 - protein, 158 aa, Zea mays
  Coding DNA Sequence Number=SeqID_34672
MAAITPTSDPAERNPPNWNALNVDRNMVEPSASEEVVCAIHARLLTRRGPSRLLTASNTGNQVRRRFFPLGYRRTPHPHPVERGARIGYGRESTGGSLVCLCSWPTWSEGSENSGTAQPPGRKVRAGREQAEHAVHVPAIAPEDRLRPARVSDRGVSH

SEQ ID NO: 78048 - protein, 440 aa, Zea mays
  Coding DNA Sequence Number=SeqID_34673
MGGSEPGSFAKKDPFRATGAPVARRVGLGSKLACQKSEKRVHLARLHAACMAARPFCPLVWAKMGGRLQPGRTPSPAVARDGDLQLDGGGKRAGLRPLPLPQPQGFSSPRLGRGECRVGVGPCVGGGSLLHSVMGGEAGIARGVRQLQRAWSSAASGFGATCGVGVCHGSWKRFFRRRGGRDRPRADLQLLRPSARPCLTSFGMGGGLLAAASTLRLALPLFGPLEQKSPSSPLLEQVTARRSSAFRCSAGLPPRSGVVRTCGGGTGVPLVVASPEPTPKSVSRGLGSGWRPWKPVDRGPRGNRLSRLLGPDSRRSPWTAAPPEAGSGFAEDVVDAEGATAPFGVKTRACRIRSSCSVCFLRPPRPEEHTLAALAKLRLFSSCFEHLDSVGNRDVCVSESCFSRKGRVRYPYPRGVGIPRLGRPCRLRVLSPVHEALSPT

SEQ ID NO: 78049 - protein, 87 aa, Zea mays
  Coding DNA Sequence Number=SeqID_34674
MAVNPARCGPGVLLLVALLVALVVSGHCPGCAPPRAEASPAEARDPLSDQGGGGRGDVRWRYTSNYSKDTGNHNSSIDSSCQDETEA

SEQ ID NO: 78050 - protein, 85 aa, Zea mays
  Coding DNA Sequence Number=SeqID_34675
MVKNFGSKTVQIAMNVVVTSHLLVCLYSDADTTDQAKDGGKKSFEVPSAGEKVKETRNPKPGVKKKTCKVKVDRVKSYGASRITT

SEQ ID NO: 78051 - protein, 47 aa, Zea mays
  Coding DNA Sequence Number=SeqID_34676
MVEYPEQHLDPRPSKASASGGIVTTPNPGLDLSLSLGLGRRSSPRST

SEQ ID NO: 78052 - protein, 115 aa, Zea mays
  Coding DNA Sequence Number=SeqID_34677
MFGEVHNALEISGVTSDFQIPHQTEYISGASDIPLGCHTDHHTGYPMLNDRNGSFQLLAGMDTHRTCSMGALESSLIQQLIQGINQSFTCELRRMFQESMKLDNRYGTQKYPMRH

SEQ ID NO: 78053 - protein, 119 aa, Zea mays
  Coding DNA Sequence Number=SeqID_34678
MRAAALAFYSLVVAGEGPATALGLARAGGLLCLDRPGCRCPRPYAKDLQRQATAQKSSGQWSPTYQRSLASSSRQIPPCADGVRRVSAVNPTRTRPKDGAATVPPVGFRVSGSQTQAQG

SEQ ID NO: 78054 - protein, 311 aa, Zea mays
  Coding DNA Sequence Number=SeqID_34679
  Gene Ontology: Mol. function=receptor activity; Cellular component =integral to membrane; Biological process=signal transduction
  Homolog annotation: Hit_ID=Q94A20; Match level="QueryCoverage=63%, HitCoverage=91%, E-value=9e-48, Identity=47%"; Hit description =Protein FBL4
  Pfam annotation: Domain name=UPF0005; Domain location=133-308; Score =14.6; E_value=8.3e-07; Accession=PF01027.11; Description =Uncharacterised protein family UPF0005
  Subcellular localization annotation: CTP_CleavageSite=97; ConfidenceScore=5.64e-01
MELKASSGGSLGLALLCKTLFPMRWPRTSLAGFTSARSKSTKSPTASQQSLPTEVHSYAQTASRAKNPHFPFPAPHRTQPPSEREMASVAEMQPLAPAGYRRAPEMKEKVEASVVDLEAGTGETLYPGISRGESALRWGFVRKVYGILAAQLLLTTAVSALTVLHPTLNATLSDSPGLALVLAVLPFIRKIVLEALVLTAGVVVSLTAYAFWASKKGKEFGYLGPILSSALTILVLTSFLQVFFPLGPVSVGLFGGLGALVFSGFILYDTENLIKRHTYDEYIWASVGLYLDILNLFLSILNMLRSMQSDN

SEQ ID NO: 78055 - protein, 231 aa, Zea mays
  Coding DNA Sequence Number=SeqID_34680
MAKRYSHQIRADHGQINDPKSTDQIDSQTSDAHPTRSSAVAVCHRRAIPIAAEVETPPPGHERPPRNTAKYSKATQTFRQWPRTVTKLAGAPCRDPSPSSEKFRGTRATIREWRGGTLTRGVVGTRCVMKLSDGALGCLDSSPNCKRRWNSMVAAANCSLTPSRAHTVVKFSAMGKREGVLGSYLYAGKAGNHNTLTTRRINKESATTAWIAPKLLRQGDRSDKSVPRAVE

SEQ ID NO: 78056 - protein, 230 aa, Zea mays
  Coding DNA Sequence Number=SeqID_34681
MVTTSSMVGRSKPGCGLCPALSFKDLHHPCWGGGRAEPGLAFAWASVPPLPPASRGGNHPPALRRRRPPAMRGKANCCCPARVQHSVPCPGDCGRPHRRVSQHVVRREGGTHVLGRSSSRFRGEDGGEDLLGRDLSQVLGQDSYVWAAQQREEQGQKQRATCSTRSELARARPTRAPACPASRQSQAGAMARARAYKAPREFGHTPLRTLDLTGARNHRRCPVHGVPAAT

SEQ ID NO: 78057 - protein, 65 aa, Zea mays
  Coding DNA Sequence Number=SeqID_34682
MAHARAYKAPRDFDRTPPHALDLTGAQNHRRSLEDMVAGVTWPSILPPGWTVEWDPASAEEEHEE

SEQ ID NO: 78058 - protein, 183 aa, Zea mays
  Coding DNA Sequence Number=SeqID_34683
  Subcellular localization annotation: CTP_CleavageSite=59; ConfidenceScore=5.56e-01
MHDGSAKAWLPPKGVSPFSKATLPTRVLRRRRLSLHQRALGSSPYDTGVGSHTSCKLARTEEAKPQRAERVTAQRLQALLHLRLNQQVKGRTAMQATCNCTAGMHPFDFDASSMEAQAHTSCNRRAGYYVRITAPPLMPMPRLLDCGTCAANRGNPAHGPTVPTKHIGHRDRERGYFERDPSL

SEQ ID NO: 78059 - protein, 130 aa, Zea mays
  Coding DNA Sequence Number=SeqID_34684
  Subcellular localization annotation: CTP_CleavageSite=43; ConfidenceScore=5.47e-01
MGAIQENSFACPAPTVVPPARVRLTAAESSLRRHKKLRLARPRGSAPASTSERWSPPRPTLGLGLNLDLRRRSSPRPTPGLGLNLDLGRQSPPHPTSGLGLSLDLRGVSASPDLGLGPTTLQAGTSLPYP

SEQ ID NO: 78060 - protein, 231 aa, Zea mays
  Coding DNA Sequence Number=SeqID_34685
MAKRYSHQIRADHGQINDPKSTDQIDSQTSDAHPTRSSAVAVCHRRAIPIAAEVETPPPGHERPPRNTAKYSKAARTFRQWPRTVTKLAGAPCRDPSPSSEKFRGTRATIREWRGGTLTRGVVGPRCVMKLSDGALGCLDSSPNCKRRWNSMVAAANCSLTPSRAHTVVKFSAMGKREGVLGSYLYAGKAGNHNTLTTRRINKESATTAWIAPKLLRQGDRSDKPVPRAVE

SEQ ID NO: 78061 - protein, 322 aa, Zea mays
  Coding DNA Sequence Number=SeqID_34686
  Subcellular localization annotation: CTP_CleavageSite=53; ConfidenceScore=5.44e-01
MVAPPPPPVAGKVTGQTQMLLFRHAGKTSSIPPPSGGPTAVVVARRRKEYLVVAAVEGHELETPETEQRPGLDRLLETTHLELDRKLFVNTQQAPTWRTNCRRFDPGGPWTDDRGLQAFAREGESLFVSPSSRAATFSYEGPGPSFYRCKEGAQVESEPWRRARRRPSSEVEAGAEPQGRARRSFLWRLRLDSATVSLTLAGGTAVGAGQAILALNAPAIRSVGEAIWPRLLHCEACPSRASGESKRLRIFTHKSCYPSAKRWPIPYTSTEEARQGFLPDRHRSKINQGPPYTDHSPTALAPFGPNGYRALRAVGSAAEGTD

SEQ ID NO: 78062 - protein, 166 aa, Zea mays
  Coding DNA Sequence Number=SeqID_34687
  Pfam annotation: Domain name=GRP; Domain location=65-144; Score= -26.4; E_value=0.039; Accession=PF07172.2; Description=Glycine rich protein family
MVGGKGSNGKRGPKDQGGKRKHPPTPPLEDFSDSKFSEERFSSEGEESLPPTPLSSSSKGLDNSMGLSTAKRAYIRSMECVGLEELDDSEEDSEEEDSKEEGGGGEDGSGYDSGDEGGNNGNCGDRGSGGKGGGEKGDGDKGGGGDSSYDDDDEGGNGNSGGRAPP

SEQ ID NO: 78063 - protein, 104 aa, Zea mays
  Coding DNA Sequence Number=SeqID_34688
  Subcellular localization annotation: CTP_CleavageSite=40; ConfidenceScore=5.25e-01
MQGHSVPTHINRPHRFPGNRSGLTALAYNAPLTPTGRRAVTALVPTITGMGDLVSGHVRGYVCGQVLWCRLGCWIWGYLLSSSLLRHEDVLSVSKITVYRNAMN

SEQ ID NO: 78064 - protein, 169 aa, Zea mays
  Coding DNA Sequence Number=SeqID_34689
MEIPKDRGYTLGGGLGKGWLGFDGEWAAAAKRRGIGSASRVEERKREGGGQRGGRFSGVVDGLDLKYYPRHLTGSAGGVIVSPVGEGNPRLSSMVNLAVVLNTELDHALDKLGKVRAEVAELRAKCAAHHYLDGGSPAPFGIQHPYRSPPRGRFDYGTPKCRTRIDLDP

SEQ ID NO: 78065 - protein, 436 aa, Zea mays
  Coding DNA Sequence Number=SeqID_34690
  Gene Ontology: Mol. function=peptidyl-prolyl cis-trans isomerase activity; Cellular component=nucleus; Biological process=protein folding
  Homolog annotation: Hit_ID=A2YZH7; Match level="QueryCoverage=100%, HitCoverage=91%, E-value=1e-114, Identity=52%"; Hit description =Peptidyl-prolyl cis-trans isomerase
  Pfam annotation: Domain name=FKBP_C; Domain location=342-433; Score =107.5; E_value=4e-29; Accession=PF00254.19; Description=FKBP-type peptidyl-prolyl cis-trans isome
  Pfam annotation: Domain name=Nucleoplasmin; Domain location=1-170; Score=-77.1; E_value=0.021; Accession=PF03066.6; Description =Nucleoplasmin
  Pfam module annotation: Pfam domain module=FKBP_C::Nucleoplasmin; Domain location=342-433::1-170
MAFWGVEVKPGKPYTHIHHADHGRLRICQATLGNCDAAARTVLQCNVGNKIPIKLCSLNPKLAETCHLEVEFEEVDDVIFSVIGHSSIHLSGYYVCASNRESYGEDIGHSSTDEEHDTSEDSYESDFIDDREVPLSEKYGSGSIDDSDDECTQRCHRQKAEKTTQNAERRRRLKKHQVGSTDYDDDDTPVMKHVAKRCAPKISDSGDDDTPVTKPVVKRRASIFDSDSDEDDNVPISLALGKKDNAKVAEETEHQNGQANGITKKRIIDVKKRKQSSISEDPASSMDMTDANAPSVSKQVDEIKKKSKKKMRNQSGENNEKQSNIRTLDDGLVVEYLSMGNNDAKVASDGCKVYIKYVGMLKDGKIVESNVSEKPYKFKLGAGKVIRGWDVGIHGMRVGEKRKLTVPPSMLSGGKSVGEVPENSSVIYEIELVKVK

SEQ ID NO: 78066 - protein, 111 aa, Zea mays
  Coding DNA Sequence Number=SeqID_34691
  Gene Ontology: Mol. function=protein dimerization activity
  Homolog annotation: Hit_ID=A2Z7B2; Match level="QueryCoverage=62%, HitCoverage=9%, E-value=6e-13, Identity=57%"; Hit description =Putative uncharacterized protein
MEADEEDVLPLGHLERDPTLRSTAPPRPPQRRGSSSGSCPNHGAPNSVDDASFDDNLGSSAANIDDAPFHVDIFDLRYWDSLDPRQVDILVVKGPKRDLSIVKGPKDRLTV

SEQ ID NO: 78067 - protein, 153 aa, Zea mays
  Coding DNA Sequence Number=SeqID_34692
  Gene Ontology: Mol. function=aspartic-type endopeptidase activity; Biological process=proteolysis
  Homolog annotation: Hit_ID=A7QF49; Match level="QueryCoverage=73%, HitCoverage=28%, E-value=9e-12, Identity=39%"; Hit description =Chromosome undetermined scaffold_87, whole genome shotgun sequence
MSGSLVLGGTEGGEGMQYVPLVKSATGDKLSYDMYYYLALRGVTVGEKAVWLSVRAFTANAAGSEGAVVDSGTTFTYLDPTVFQPVADAVVTVVGRRYKRAKDTEVGLGLHPYFVLPQNYLVEYDLEKERLGPGVLLADMHVVVGNRDRSGGY

SEQ ID NO: 78068 - protein, 43 aa, Zea mays
  Coding DNA Sequence Number=SeqID_34693
MAGGNTLAGAKERWLADEGFELGIKVNIPDLWLKEVMALGVAF

SEQ ID NO: 78069 - protein, 38 aa, Zea mays
  Coding DNA Sequence Number=SeqID_34694
RHYGTDGYEIDGFGYDYGTGEDEAVEGDFQEFQDYDEF

SEQ ID NO: 78070 - protein, 111 aa, Zea mays
  Coding DNA Sequence Number=SeqID_34695
  Gene Ontology: Mol. function=phosphoprotein phosphatase activity; Cellular component=cytoplasm; Biological process=protein amino acid dephosphorylation
  Homolog annotation: Hit_ID=A3B8P6; Match level="QueryCoverage=67%, HitCoverage=40%, E-value=2e-18, Identity=64%"; Hit description =Putative uncharacterized protein
MAVTTTEDACFDMGPGLTMCWRSSWPKALVTAIDDLIRRLLEAHGGRTPRNAQVTDVEIRRLCAAAKDIFLSQPNLLELEVPIKICALVAPLKIQQKWSNCEKNLSDIRIT

SEQ ID NO: 78071 - protein, 39 aa, Zea mays
  Coding DNA Sequence Number=SeqID_34696
MAVMGSTSDKMYLCQVPNFGIVNDKNETGQVVPKEEPQQ

SEQ ID NO: 78072 - protein, 36 aa, Zea mays
  Coding DNA Sequence Number=SeqID_34697
MARVACTLRGKRIDGGGSQGRAPAVKWSREDIGLPL

SEQ ID NO: 78073 - protein, 142 aa, Zea mays
  Coding DNA Sequence Number=SeqID_34698
MFCWRSRALSKEIRASSPARLRLSYARRSLVYAPLTEGERTDADASCWRRDDRGLNLVEVECAMLSSRSTSSRHCFMAPVLPEPSSTESGMSAQLYAAVQRAQQQCPTLGGWEPVAWKKQLLPPPGNPLKSRRGAQRFAPSC

SEQ ID NO: 78074 - protein, 380 aa, Zea mays
  Coding DNA Sequence Number=SeqID_34699
MEVRMMAEREAERRADHQRMAEMFQYMQSLGAAQGIAPPPPLFPLVDPALFHTPAITLGTESRPGHRHRFFAECNVSDTRQRSTLCRVPDLAFGKEPDMGTLSNGFFTECLRWHSAKMHPLPSVAGQTPGTLGKVAVSVTRRRNGCFSLPSALWHSANLFVECPTKNTRQRRLCRCTVCRAFFAECDTQQRLCRIDSAARNVVSNPNHLPLGEMCAARHHISAISHVAASCHGSMKKKSARGWKATRETTAMRAREWIGEPWLAQILDGTLVLVLSPVHLRGGGARSREALDRGLELVQRALPALPRVGLSRVVVAGLLLERAAPQQGRLVSERGGGGGGERPMIRRAVVLQRRGLLNKQFKQFNIHVLQSQTDQNQAAA

SEQ ID NO: 78075 - protein, 100 aa, Zea mays
  Coding DNA Sequence Number=SeqID_34700
MRLGVPFIAPRQLGAVESTSGRLSLPSVVGRTGQSVAGEKPESGLFGRGGLAHRTLSGAPPDTVRDAALLRFLLVSAMLHVSGGLDNGGCCLLGSSAGYR

SEQ ID NO: 78076 - protein, 505 aa, Zea mays
  Coding DNA Sequence Number=SeqID_34701
MKNVGSLCPVLVRLICFTICALIEVGVVFFCNISFTFIWVDRRRVLSVINAETRDHATQRPYVRLRQLAYVTGNKPRGIIGSPPERGAQAHRIKPGHMSVPDLCLGWGVPCPGTSLWVARTPLRGVWTSPKGSGLLVWEPWTLLGDPVVSTEVQRFLEEGTDSGPQARLRGGYEPAGGAKEPAPKEGDSWTRAPMLEPGLVSTEVKRRTTAGGGVIPQAVDWSAAFGRGEETHHRGWWRAPYAAVCLCRTRRPTPKEHDSWARAPVPETGSPLRASVEVFCGASGRQWENPSLKRDSPKRGSHSHQRPFALELSVLLCRVAAMALLDPCELFQPEVALNLVRNSLGWGVLALARRTCVAAGGAWPLASTRGVLLHPSGGHHRLPPRDVRGGDAPSRFFLQHLGGVITSLVKADIGLSHDSIPRAPNSFWVGSEPCCGSIFLALMASVPPPTLPPTAEWGVAVRPLHRRRSRQVAASAGEPLGVEVVATSNEPPVQRWSPPLASRS

SEQ ID NO: 78077 - protein, 113 aa, Zea mays
  Coding DNA Sequence Number=SeqID_34702
MVVVTTPTEIDAGWKKHIAVVEGPPASQCETSAAVDSGPETPHAGKLAPMGHAAEKGIWAGQSSICNTQVLKTSTYREEKILVFLAAAGLPAPCRVATAPTRHSPTSLTPPPP

SEQ ID NO: 78078 - protein, 157 aa, Zea mays
  Coding DNA Sequence Number=SeqID_34703
MGKSNKRKRELTPPSEDFGDSEYSEEEFSSESEGSPAPVSPPASSDDSDDSQGIAAEVWTYIRAVERSGLEGSDESEYSSDEEDSDGSGEDEDDDDDDGDDDDDDGGDGDGDGSGRGRGSGDGGRGGDDGSSRGSTKGGSSKGSTKGGGGSRGRASG

SEQ ID NO: 78079 - protein, 184 aa, Zea mays
  Coding DNA Sequence Number=SeqID_34704
MDYAAPAGVALEAGSGQPHQRRRPPLHQWIAGSNDHLCTSSDNHLRSEWLTSGGDHPKVCTIARRSSPPSSYGGDNEAIKAKESRTRRQVALMVSPVEATTSAMGSLTSGGDHLITNDSAHLCTGEVVDVADPRTARPSPVRWMDSHTPTRAAGGSVGGSAEAIQPNGPDTLQLTAYSQQAPRS

SEQ ID NO: 78080 - protein, 219 aa, Zea mays
  Coding DNA Sequence Number=SeqID_34705
MTSLPYRIVRQKGRQLVHGWSSNKGTKKDKVDKKRWRAEHQMHRDHGAENNLTNEDRDDDGDASASSELCIGSCSTSGLLVVPAGTPPVSLMLASKAGGGTGASPRCHEGEVPFKGPRELNKESDVTEKALRDDLHWLSIAHQKLPSLAKGLACSEAAKAYAPTALIQNAYDTMVRPTRRDAESMTLARLESEKANSYLRILELGKEVAEARVTAWRRS

SEQ ID NO: 78081 - protein, 165 aa, Zea mays
  Coding DNA Sequence Number=SeqID_34706
MKNKHRYNGLDRPFFPFLRNAPNLAFRGLQGNPRKPHHEGVGRHREATLMEVTNETTKPDSGFGTSSEPGSRISGHSLANDCEVDRPISKNLEFKGWPVKGSRLLPKPQSKGDYEVDTEAASTLDHECQGALLNRVQVTGNVGLMVYREERQRVVGPSRMGSLTI

SEQ ID NO: 78082 - protein, 118 aa, Zea mays
  Coding DNA Sequence Number=SeqID_34707
MSANVCKCKDDFCLHTSKDMKPYRTPPRATYDAKNVPVCLAVHHGVRRCAARALAFKQFWSGYKLGTGDLSEDATIGALEDFEDVFGMDVGATVDILSLEDVINGSPKLGCSRRLQRS

SEQ ID NO: 78083 - protein, 124 aa, Zea mays
  Coding DNA Sequence Number=SeqID_34708
MRLPWALYTRLRVTPSVHDDDILPAYPLTNRTKDRISEVAPVPLGIPKIVLATSSSMCSQVISMGQRKDFQISFYQGMIPILSSWTSSNFWERLAATHIALEAADGDVAGLHARLVEEDRHVVG

SEQ ID NO: 78084 - protein, 195 aa, Zea mays
  Coding DNA Sequence Number=SeqID_34709
MSLPCNGKSLPSMKHGDEGTDVGTCGNIMKLGNRIRCSRYPEAKPQRWEELPMNECTEKSVTLTAAITDRLKTGRKIQLKMPWLEQPRLCSVWSTELSGGAPDSVWCARLTLANRLLSGLRRRCTAIIHRTVRWCTGLSGGPFTGELVALGNSLAMYGYNSPDCPVCTGLSGEPTVGRANGRPRDLRGTRGRANG

SEQ ID NO: 78085 - protein, 534 aa, Zea mays
  Coding DNA Sequence Number=SeqID_34710
  Homolog annotation: Hit_ID=Q8LJ71; Match level="QueryCoverage=57%, HitCoverage=56%, E-value=1e-88, Identity=52%"; Hit description =Putative uncharacterized protein B1097D05.32
MKKIDEEAHRQKDQVLKVADKWYLSHFRVDCHQKTVQEREINVEYMLAVLQQLPTIAPSFPRRTPSSLPPAAASADTEHSSTILASPDAEFSSSISVLLPMHEHDNVGSGSQPNAPFAADADDFSFLFDSDEHDHLGAVDAMTMMPLPPQVFADLPVNPIPSSESSDGQAQAQAAATAVASRRVWVRKRSTEWWDHLDGPSCPDAEFRRAFRMSRTTFGALCDALGGAVAKMDTALRTAIPVRQRVAVCLWRLATAEPLREVSRRFGLGISTSHSIVLQVYHALAAVLRPTVIYWPGPDSAATVVARFEAAFGLAGIVGALYTTRVPIVAPKANVAAYYDCGLTERNQKASYSVAVQAVADADGAFTDVWIEPGSLSDAAILGRSALSGLLAGGHGQGQRLVGGTSYPPMDWMLVPYAHQNLTWTEHASNERVAAARGVARGAVRRLKARWRCLQRRSEVKMQDLPSMVAACCVLHNVCERAGEELDPELMQYDLDDDDGGVIAHDAAAAAPSAPPAQAAGDSIAHGLLHGGHA

SEQ ID NO: 78086 - protein, 428 aa, Zea mays
  Coding DNA Sequence Number=SeqID_34711
  Subcellular localization annotation: CTP_CleavageSite=12; ConfidenceScore=5.34e-01
MADPRREAKRARGSAKVAASGGSQPVPTAKPAAPGSSKPSVGAKTATAGVTKSPLVEAAKGRELPSPGKHVTDFGMNISVEDYFVGSGEGHMVVVPSSVATALPSAEVRARGTAQDPWAAFCASGEILTAAAAKDVAGTMSQRLREASQWLSQQLSQQLSQAADFTDRFASGVLTADVAAEVERLRAQHADVVREKSAAESKSRRLVEKVAALEAEKTDLRRQLAEERREANQVITEAQATQAEAKVARAEGSLASQRAEEWEARFNALRGRVDKAEASTCSEVERTLAQFVSSYRELGARTANFEVPDREAGLRFLEWLQEELLDVGAHGREAVRERSDRAREQMERAEDVEDFGSLVGAPPKVSEANPVLPLDAGEGPSAVAVPVMTGGEDPLSAPALTIEGALEVADEPPAEDPTAAARPSQVAK

SEQ ID NO: 78087 - protein, 291 aa, Zea mays
  Coding DNA Sequence Number=SeqID_34712
  Subcellular localization annotation: CTP_CleavageSite=53; ConfidenceScore=5.28e-01
MAARGAGRAVSSSLAKSLGLRKPKREAGSGAKNHHQTLSREKRATLRLRRNNRAKKAPGLLTDQRFEGWPPEGFNSRLRSRGPYTHYWLAPEGFTVASDAEQEMTRDHPQVLLGMPLGPLPTPNERGTDVHSDYPLAAHWRHHVRRPSRRLGGCSRKPGSGQTVDSVNIPARELGPRPYTRATASSHEGTTRTAEALRKALRPRRSETTPPRPLGLHPAGALARTHRNKMQPRKAGPLAKKCDESLQASANTPFEARGLLSGTIIRGTPETPNSQLVTPISIKLLRPDGCD

SEQ ID NO: 78088 - protein, 513 aa, Zea mays
  Coding DNA Sequence Number=SeqID_34713
  Gene Ontology: Mol. function=asparagine synthase (glutamine -hydrolyzing) activity; Cellular component=cytoplasm; Biological process=asparagine biosynthetic process
  Homolog annotation: Hit_ID=Q5QFC3; Match level="QueryCoverage=60%, HitCoverage=58%, E-value=1e-129, Identity=69%"; Hit description =Glutamine-dependent asparagine synthetase
  Pfam annotation: Domain name=Asn_synthase; Domain location=222-425; Score=196.7; E_value=5.6e-56; Accession=PF00733.12; Description =Asparagine synthase
  Subcellular localization annotation: CTP_CleavageSite=56; ConfidenceScore=5.35e-01
MGANVGTRVLGPSRALYGDRHYIKAFTNRARNTTGRAGPVTMGQIPRGPSRSTRTRGGATSSETGEGIERGVVSLPSPQHPPARQTRQLRSARSPQSPPALRNPRPPCEACWKSINHRILSSHLTPVVLPDEHALTESIKRRLAASGCPDDALSSADLHSKLSIRAPERLCGRSSTCSTRSPRTQPSPKPSDRGTPSNPPGYDDNDDDEAIVTPSIPYDPMALRKAFEKAVVKRLMTYVPFGVLLSGGLDSSLVAAVAVRHLAGTEAARRLGTKLHSFYVGLEGSPDLKAAREDDIDAIEDVIYHTEAYDVTTIRASTPMFLMSHKIKSLGVKMVISGEGSDELFGGYLYFHKAPNKEELHRETCRKARVPFLDKEFINAAMNIDPEWKMVQPDLGRIEKWVLRKAFDDEEQPFLPKVHILYRQKGRFSDGVVYSWIDGLKAHAASNVTNKMLSNAKFIFPHNTPTTKEAYYYRMVFERFFPQKYAILTVPGGPSVACSTTKAIEWDAYNRVL

SEQ ID NO: 78089 - protein, 157 aa, Zea mays
  Coding DNA Sequence Number=SeqID_34714
  Subcellular localization annotation: CTP_CleavageSite=50; ConfidenceScore=5.14e-01
MAPAANGRPCDQRATRGPHQRSVGHTRLSGVHRTVSGAPTGPEDQRSAVPGMEGNRAPDCYSGCSVVLQTIRARGSNLWRFLANGKDTLKGKDCGIQVMCGHRNHKSKINLLPLRWCIPQLKTMNRYLKKKGKIKGEHKKNRIMRKKHHEFLQLKSE

SEQ ID NO: 78090 - protein, 120 aa, Zea mays
  Coding DNA Sequence Number=SeqID_34715
MLVRGASARGNRILGSGDEIERDAAATRALSHDVTARLVLALSETRSILLSSVMPLAILRRMVCLDVLNGSGDELPMYLLDKQGRHYRSFDSFDLLLRKFESEKNDLDAGSTVTDGLATS

SEQ ID NO: 78091 - protein, 22 aa, Zea mays
  Coding DNA Sequence Number=SeqID_34716
MEMEGYLTVSSTTSPVLNDLQI

SEQ ID NO: 78092 - protein, 114 aa, Zea mays
  Coding DNA Sequence Number=SeqID_34717
  Subcellular localization annotation: CTP_CleavageSite=15; ConfidenceScore=5.23e-01
MDFASPDPRARTQPRLRRRRTPPRPTPGLGLSLGSGRRWTPPRPTPGLGLNLDLGGIATSSKLGKQVMMTPRTLHDDGNSQPLTSARRRQQGFDSPDSCTSAGLQLSSDGHDIT

SEQ ID NO: 78093 - protein, 499 aa, Zea mays
  Coding DNA Sequence Number=SeqID_34718
MDKDRQGAAQKRQAAIRIVEARPKRQKRESAKAAAPGGGKPPLAAKSGVPASSKAPEAAAGAGGSKPAKAVPPLSEVAEAAKAARALPSAGKRVADFATNICVEDYLGGSDEGQLAMVAPAAAIATAGIVPKARGEALGSGGEVADFANRAASGALMAAVSAEVERLRTQHADAVREKSASDSKCRKLTDKVAVLEKEKADLRRQLAAERREANEAIAKEQAAQAKAKLARAEGNLAKELAEHLQERLTALESRAKGAEAAVRAEAERTCTQLMDTYRELGARTGDFEVPDREPGLRCLQWVQEELQELPAVVGGFMSYASLVTCEGAMNALSREGCRHFEVFDQADEDFDRDVYKVEDLVVKDSAGALYDRMWGPHGREVVRERAETAMAQASRGERVDDLGALNSALPDPEPTPAEAVSGVALEPTPETAAIAVAAPTSATAGEDLPPKVAEGAPDAPAAVVPCAEDPAAETAETTAEAAAEPAAEAPAASGPSQVA

SEQ ID NO: 78094 - protein, 705 aa, Zea mays
  Coding DNA Sequence Number=SeqID_34719
  Gene Ontology: Mol. function=protein serine/threonine kinase activity; Cellular component=plasma membrane; Biological process =protein amino acid phosphorylation
  Homolog annotation: Hit_ID=A2YMS7; Match level="QueryCoverage=70%, HitCoverage=92%, E-value=0.0, Identity=89%"; Hit description =Putative uncharacterized protein
  Pfam annotation: Domain name=Pkinase; Domain location=64-323; Score =319.7; E_value=5.5e-93; Accession=PF00069.16; Description=Protein kinase domain
  Pfam annotation: Domain name=Pkinase_Tyr; Domain location=64-317; Score=-45.1; E_value=1.2e-09; Accession=PF07714.8; Description =Protein tyrosine kinase
  Pfam annotation: Domain name=efhand; Domain location=361-389; Score =28.1; E_value=3.2e-05; Accession=PF00036.23; Description=EF hand
  Pfam annotation: Domain name=efhand; Domain location=397-425; Score =25.7; E_value=0.00017; Accession=PF00036.23; Description=EF hand
  Pfam annotation: Domain name=efhand; Domain location=433-461; Score =27.5; E_value=4.9e-05; Accession=PF00036.23; Description=EF hand
  Pfam annotation: Domain name=efhand; Domain location=469-497; Score =38.7; E_value=2.1e-08; Accession=PF00036.23; Description=EF hand
  Pfam module annotation: Pfam domain module=Pkinase::Pkinase _Tyr::efhand::efhand::efhand::efhand; Domain location=64-323::64 -317::361-389::397-425::433-461::469-497
MGNCCVTPKAADDAGGGKKPKEPKQKKGKKPNPFSIEYNRSGQASAPKLVVLRDPTGRDIAARYELGAELGRGEFGVTYLCTDRASGEALACKSISKKKLRTAVDLEDVRREVEIMRHLPKHPNVVTLRDTYEDDNAVHLVMELCEGGELFDRIVARGHYTERAAALVLRTIVEVVQMCHKHGVMHRDLKPENFLFANKKESAALKAIDFGLSVFFTPGERFSEIVGSPYYMAPEVLKRNYGPEVDVWSAGVILYILLCGVPPFWAETEQGVAQAIIRSVIDFKRDPWPRVSDNAKDLVRGMLNPDPKRRLTAHQNIKKAPNVNLGETVKARLQQFSVMNKFKKHALRVIAEHLSVEEAADIKDMFEKMDLNKDQMLSFEELKLGLHKFGHQMPDADVQTLMEAADADGNGSLNYGEFVTLFVHLRKIGNDEHLHKAFAYFDRNQSGYIEIDELRESLADDLGQNREEIINAIIRDVDTDKDGKISYDEFATMMKAGTDWRKASRQYSRERFTSLSLKLQKDGSLQMTTLLLVLMFHCFVFFACGLFEGLGGIVYAMIPLRRTLVPVRPLRFDFSCPVEWSTPQPHTCLRLLPLQAAAAALEAGFASSRIGGAVEHGLHIRSRRSKAKQAAKQASNRGAVKMEHGRAAVGRPTSNGPTGQAQAHGRKAEAARQDRSPREAASQRRSGCVAAAALCVRRAVGTETG

SEQ ID NO: 78095 - protein, 123 aa, Zea mays
  Coding DNA Sequence Number=SeqID_34720
MAYVVLEDALLQNPQPAVLQSLSDDPKTAHNGAHPCSPFDTFASNFSFWLHSRVLCILRYDTRWRDKDVSEGNQLLIGGKGGEEAARRETPEEKRKRLEELDALLEGAGRAHDAASNATSSSG

SEQ ID NO: 78096 - protein, 324 aa, Zea mays
  Coding DNA Sequence Number=SeqID_34721
MQAACNRTKGAHPFDFDASSMEAQAHTSCNRRVGYYVRETAPPLAPVPRLLDCGTSAATRGDPAHDPTSANQAHQSRVSQPREKARRSIRPEMGRTSGTFGRRSRRRFTSAIMTASKKVCHVIRFRILFHFLFLSLAIRTGKGDTPKGILLRKGSGLRAPLLIRGSKAGPSEGFNSRLKALELRAYYWSEVRRLAPRKVSTAASGHSGSTPTTDQGFVGWPPKGSTAASEHAERGMTLAQTCKGMMGAIKVKAQPSQGTRSRLTRAQPRAKAADPGGFMSRPRAPSSNGHTFGSPEAQSSQRSNLGQIATPTDCIAGAFNARIA

SEQ ID NO: 78097 - protein, 114 aa, Zea mays
  Coding DNA Sequence Number=SeqID_34722
  Subcellular localization annotation: CTP_CleavageSite=73; ConfidenceScore=5.09e-01
MKKRNLDGSPSKLMKKMVTKRMKAVEPPDSWTTRLKVRPGLPPVISKGPLLWTSVILLAFNHLNHRGPSSTSQCMNVALDRGTKSCLCLDCWKNYLCLGIKKGPLTSAKLVRDT

SEQ ID NO: 78098 - protein, 61 aa, Zea mays
  Coding DNA Sequence Number=SeqID_34723
MEDILDLDLGGASTSPHPGLGPTTSQEAPSLPYPKLTQATGNKTGVPSGSLRLFAAARFNK

SEQ ID NO: 78099 - protein, 434 aa, Zea mays
  Coding DNA Sequence Number=SeqID_34724
  Gene Ontology: Mol. function=zinc ion binding; Cellular component=PML body; Biological process=negative regulation of fibroblast proliferation
  Homolog annotation: Hit_ID=Q69XV8; Match level="QueryCoverage=98%, HitCoverage=55%, E-value=0.0, Identity=75%"; Hit description=Zinc finger CW-type coiled-coil domain protein 3-like
  Pfam annotation: Domain name=HATPase_c; Domain location=112-213; Score=0.3; E_value=0.08; Accession=PF02518.17; Description=Histidine kinase-, DNA gyrase B-, and HSP90-like ATPase
MTSGKRVNSNVMNASKRPFKSDFQYGSRNSKPPHFKEEVCDSLLKPKKMETSPKHYDPFVTEHHRLVLESSPCESVEDSPRVLNPVVKKRMASPTKNFIVADPSYLRTLSQTHASWIFGAIAELIDNSRDAGASRLSISIEHLFSKKAQKKIPVLSVIDDGHGMTYPDIMRMISFGHKRPNGHREDQIGRFGIGFKTGAMKLGKDAIVLTQTKSSRSVAFLSQSFNEEKDNLEIPVVAYRKEGQYMEVDLSVQSDATAEYNLNAIKNFSSFNEYFIGEKLGLFGEDTGTQIYIWNLDTWGTDYTLEWNSGKSSENPVHHGRGDILIRSRRVRSRPGQTSNKVLLDYSLQSYLEVMFLNPRMKISVQGSLVKSRPLAKTLNKTSVVSGEIMERTIILTLGRSKSYKRVGGQKHSTDMGRGVIGVADITNLIDDED

SEQ ID NO: 78100 - protein, 564 aa, Zea mays
  Coding DNA Sequence Number=SeqID_34725
MTFDYIDNGTLKTTRGTLSGKADRAEGLLRLRDTDTSLITFRENGILKTTRVHVSGKADRAEGLLRLRDTDTSLITFREKFRHRQREQQHPRRRFHPRRNLAQPQTATRVEGSPPRRRTPAPRLGPHSQGLRQGPGPSRHLGWPLRSHNQLSPEDLSPAHGLDSVTLGLVPLADDLAKPQSPLLHLLGLGSHLLLGRQSLFSSRLRLCPRQHRYLRLQLITERPKASPSARNEEETRHYTQMPRCSSLDSHNEQTPILRVPLQTGLRFHSRGYEQPPHQRAHGITNSRWLAGDHCTSSNNDLRFGRLNRSSDDLRANAAVEGPSPMSPHEGRGQAIKAKESEVRPQVALTVSSAETTSSSCHHLSTDDGDHLPTNTAPANGGRPNLHQQIPTHVLPDGSAPTSAWRRRAGVRTRQSKNTNAAHAAYDVLYGPPVRTARQPPVRWTDSNARTKRQEAASEAAPEPAAPGTLQLTTLAADRSNVVKVRPLHKGRPACFSPPPGLRSSSWVTAGGGLQPGCMMKILEAERWLKGANPRKVALLQQQQDEGNAGAPHPGARKVEGRDA

SEQ ID NO: 78101 - protein, 101 aa, Zea mays
  Coding DNA Sequence Number=SeqID_34726
MQVACNRTVVVRPFGFVAFGMEAQAHTSCNRHARYCVQETTPPLAPMSRLLDCGTSTATQGSPAHDPTVPIECNDHGDRKRGYFERDSSQQRKRTLSPPTD

SEQ ID NO: 78102 - protein, 1157 aa, Zea mays
  Coding DNA Sequence Number=SeqID_34727
  Pfam annotation: Domain name=Transposase_28; Domain location=81-236; Score=-61.3; E_value=0.046; Accession=PF04195.3; Description =Putative gypsy type transposon
  Subcellular localization annotation: CTP_CleavageSite=68; ConfidenceScore=5.12e-01
MALFELHFPRSVKTLAARRIAARLPAVLLFAGDLARMKQTARRRRWYVAMLTSSSSAAATPPANPSPPAAASSEETLSSLMAEELRAGDSVDFGVSRMSSVRMQEMQRLGYFGGGVARVPGTEEVPEPEGELVVFEAFFAAGLRLPAHRFVGEVGGQPSVEVFAKYYCLHWQKRMIGDEVAQFGSCTFTPKTGKTTMQVVELVPCARNKWGNWNEFWFYVAEGTVEGHEGLPVSEMCSHFYSVYPPFEVAEEDVDEGALRCTAGVSSGRDLVEEFVAYGVWPLAHGWALGEVCPRQMPFHGGRVVRSSAFALNLQSRDPAAFVREAEDGAVRLVGRYVPRTEGQRSFDIRESNDRLNRVFELNQLPYDGYPGQDEVDRRGKKPVVETGDDPAPAAASSSKKRKLGTAMGGLGVSDGFARELMRTCAAPGGRMSSPELRESSARMLRVTGGCWPRNVPIPRAGGEDFFTSRMVHEWRVFPYGRNIAAVVSAVMDKDRQGAAQKRQAVVRLVEARPKRHRGAAKAAAPGGGKPPLAAKSGAPASSKAPKATAGAGGSKSTKMVPPSSGVAEVVKAARALPLSGKRVADFATDINVDDYLVGSDEGQLAIVAPAAAATTAAVVPKTKVGALSAGGEVSALAAVRDEAGAASRRLKEVTEALSQVADFANRTTSGALTTAVSAEVERLRTQHADAVREKSAADSKCRKLTDKVAALEREKADLRRQLAGERRETNEALVKEQAAQAEAKLARAEGNIARERAEQLQERLTALESRVERAEAVSRAEAERTRKQLMDTYRELGAWTGDFEVPDREPGLRCLEWVQEELQALPTVVEGLMSYASLVTCEGAMNALSREGCRHFEVFDQADEDFERDIYKVEDLVVKESAGAIYDRLWGPYGGEVVRERAETAMAQAARGERVDDFGALNSALPDPEPTPETAEGAPDAPASAAPGGDLPPEVTEGAPDAPAAAAPSAEDPAAVAAETTAEAMAEPTAEAPATSGPSQVQDFGPAHATATAKFLAASTAEGGNECGGSASEFFDFADSGSSVEWTEESSEEDLDYFAALDVAAAEASPHAVGAEDVPGPSTGRRRRRAVAKRRVSGAKGARLRVNRAGRQELLSLPAAASTGEGELRSLFAGEELRIMLFNYREMGIIPKVEPM

SEQ ID NO: 78103 - protein, 191 aa, Zea mays
  Coding DNA Sequence Number=SeqID_34728
MADGLPVIVLETAPAPRGAALQRDCTTIVPSGGGVPWCDSKIDDRRNALDFDSPGAANRIVPRGTSGGAVLILAAAVIAAKPEEKAEEEPEFPLEVISNAGVIQNLPFEDVMQLCHLFYKIAIKVVENDDIYIKYSNVKASSTQGTQYRLARAKPRARTVVPGEFTPRPRASSSNGRTFDSPEAQLGQASL

SEQ ID NO: 78104 - protein, 307 aa, Zea mays
  Coding DNA Sequence Number=SeqID_34729
  Gene Ontology: Mol. function=DNA-directed DNA polymerase activity; Cellular component=nucleus; Biological process=DNA repair
  Homolog annotation: Hit_ID=A2WV83; Match level="QueryCoverage=41%, HitCoverage=25%, E-value=6e-58, Identity=85%"; Hit description =Putative uncharacterized protein
MAKNKPSNLSSDRKDHHLSLCSLQKQGWSQVYEYRTRSGSHHHNFLGGIQRVHIIKGCVDVSLLLEFFTGDGEGTMIASNKNIWKFIIYNMSWEFPNCTFLMDQTLTKLRFTRNDFTEDDKAMFNVNKIFLENAFDAVMHFVTVAYVGVMQRKCSYKLPQIHQRGFLWRQQSQISWAFRLEKEKNVRAWLCQSEADYQDKLLACGAIIVAQLRVRVLEETQFTCSAGIAHNKMLAKLVSGMHKPAQQTVVPSSSVQDLLASLPVKKMKQLGGKLGSSLQDDLGVETIGDLLSFTEEKLQEQYGVNTG

SEQ ID NO: 78105 - protein, 82 aa, Zea mays
  Coding DNA Sequence Number=SeqID_34730
  Gene Ontology: Mol. function=oxidoreductase activity, acting on the CH-OH group of donors, NAD or NADP as acceptor; Cellular component =integral to membrane; Biological process=isoprenoid biosynthetic process
  Homolog annotation: Hit_ID=P93080; Match level="QueryCoverage=62%, HitCoverage=8%, E-value=1e-14, Identity=82%"; Hit description=3 -hydroxy-3-methylglutaryl coenzyme a reductase
MKEVSILCDAKIGLIIISSTSMLYEFSNTKSSRFGRLQGVKRAIAGRNLYKRCSCSCSTGDAMGMNMISKGVQNVLDCLQAP

SEQ ID NO: 78106 - protein, 295 aa, Zea mays
  Coding DNA Sequence Number=SeqID_34731
  Homolog annotation: Hit_ID=A2YGC2; Match level="QueryCoverage=44%, HitCoverage=55%, E-value=1e-07, Identity=29%"; Hit description =Putative uncharacterized protein
MTVSWRSPKELQVKTLSSSWLMKASGDEDDGYDYAYGTATWRGCTTASTRSRSVDDRSWTEQQDSSFSLQQVIESVRSCSPVLPLEAPPAPPLSAPATGVAAGGDPDDGDGDNSSSHSTDLSEEQKLEGWVARPITRDAARSTVAGFTPDRWEATCLVRRPENSLRGAEVCSEHYSISKRDSAEVAMQDVTWRALSHYCSVLGGVADGLNLKYYPHRPSGNTGGVIVSPVAEDNPRLSSTINLATMLNTELDHALDELSRARAEIAQLWAERAEHRHMEDGSPAPVGTQHPYRSP

SEQ ID NO: 78107 - protein, 722 aa, Zea mays
  Coding DNA Sequence Number=SeqID_34732
  Gene Ontology: Mol. function=aspartic-type endopeptidase activity; Biological process=DNA integration
  Homolog annotation: Hit_ID=Q33BC8; Match level="QueryCoverage=35%, HitCoverage=17%, E-value=7e-17, Identity=27%"; Hit description =Retrotransposon protein, putative, Ty1-copia subclass
  Pfam annotation: Domain name=zf-CCHC; Domain location=245-262; Score =19.3; E_value=0.0018; Accession=PF00098.14; Description=Zinc knuckle
  Pfam annotation: Domain name=zf-CCHC; Domain location=637-654; Score =28.0; E_value=3.4e-05; Accession=PF00098.14; Description=Zinc knuckle
  Pfam module annotation: Pfam domain module=zf-CCHC::zf-CCHC; Domain location=245-262::637-654
MSGGDGPPSVFYGDDFSYWKIRMEAYLEAIDIGVYKAATQGFPEPRDPTNLVGEEFNYEKWNAKAKTPFLEAFAKMCLIELETIKMLMICGWTYVLCMKELDEVNGLGLTQISQPDVVRKILSVLPIDKYGHIVTVLHQMDLSVATPTHILGKINAHKMYMHINDKDESSSKRNDLTLKSNQEIKGKAKVQIEEEFSSDDDLDANIALMVRKTTKMLKKLNREGIKFNSRKKKFFSRKRKSISEMDCYNYGELGHLAHQCNKPNKNKFKGKKEDDSDDEKKEKRFFKRKDGKHKRFHKKKNGKAYIVGDWLTDIESSSGSSSSEEENDEKVVAIAGDFSSPPPSPSSTSHLCLMARGERKVQNDNDIIDDSDSDDEFASPSYDELADLLKEYTQIIRKSKAKCDKLKDENEFLNAKYDIVMKASDEMKEENKTMPSTVNELTSSLKDAKDKCDKLNEANRELKDRLVKIKEDDTKIKFDHDNLLVENELLSCNTHEAINLVVKIDAATSCDDLSQGDQTSLHDELTEKVEVLTLDNQKLKRYLTDATTRGKVAIKNNDFNNELAVDNERLKNEVKKLKSENEHLATSVQKFKKGQYLQNELLMNTVMKNNKSGIGYNSFVQKKATTQYKPKQTHKPIKCFECGKEGHFAHNCKAKPPTPLPKHSRPFAFNAHYVLRKVANGKVKVTFLGPPSKSRPRQIWVAKSLIEKVTGPIGDLFSNAMS

SEQ ID NO: 78108 - protein, 215 aa, Zea mays
  Coding DNA Sequence Number=SeqID_34733
MAPPVDVVGPCPRLGDVEAPPRSRLSLSSEAEVESEPLGRARRRPSAEARAESEPWGRAKRSRLVERRSDCGHFGSIDWRTCVRIKLCADGGYQLRVRSLEAPEASEEWFDSSEVLMPRAMLRLGERTVKDRLDFFRYAPASPFRKEEGGKAPCCPRRAPNMVSPVSCWRVIRVDARAPFVRGRLEARRRAQKYLRVICRTRSPVDGVRGLDASL

SEQ ID NO: 78109 - protein, 146 aa, Zea mays
  Coding DNA Sequence Number=SeqID_34734
  Gene Ontology: Mol. function=cyclin-dependent protein kinase activity; Biological process=protein amino acid phosphorylation
  Homolog annotation: Hit_ID=Q38775; Match level="QueryCoverage=37%, HitCoverage=16%, E-value=5e-09, Identity=58%"; Hit description=Cell division control protein 2 homolog D
  Subcellular localization annotation: CTP_CleavageSite=47; ConfidenceScore=5.22e-01
MAASSSSNSSPIGCRHPTLIFMRSTTVPKRKDRLVERAPYACPVVPRGGAGEEDGQAGLGLGLLARARQYGLHLLPHRTQSPLARSPLNLQAQILMYQLCNTMAFVHDPKVLHRELKLHILLKDHKTMVLKIADLSLSHAIRFMEI

SEQ ID NO: 78110 - protein, 274 aa, Zea mays
  Coding DNA Sequence Number=SeqID_34735
  Subcellular localization annotation: CTP_CleavageSite=61; ConfidenceScore=5.31e-01
MVAFQGGHPPFKGDSPYLRPQPSWAESSPTRSKVLPLRRGGWVPRVMQAGPEQKEPNRHARCMQSPSGYEHSSTFAQTSERKGGQPCRRHATAPSGCAPPTSNAPSMGAHAHASCNRRAGRYVQATAPPLAPLPRLLNCGTSTATRGNPAYDPTVSARRDGGASGMGSERRFAFAIMTASKKRPGKGDTPKRILLREGNRLRASLLIRGLKAGPSGGFNSRLRARGFCTHYWSEVRRPAPRKCSTATSGHSGSAPTTDQGFVGWPSKGSQPPQT

SEQ ID NO: 78111 - protein, 106 aa, Zea mays
  Coding DNA Sequence Number=SeqID_34736
MTTKEVSNRGHSIPRKLRGSNKAIFGRQLQGAEVPGASEEGLGISLGKFIAYSMTYRVQKVAEAQKAVFKAQISSKLQKVVLRNAAFGQKLSNDFVHNGFSHANNF

SEQ ID NO: 78112 - protein, 65 aa, Zea mays
  Coding DNA Sequence Number=SeqID_34737
  Subcellular localization annotation: CTP_CleavageSite=22; ConfidenceScore=5.40e-01
MAPRTLYDDGGSQPPYGSKRTSARTRQPRQLSFRQAPALLRRPRHHTNWVPKPLRLPPWHVHNVC

SEQ ID NO: 78113 - protein, 168 aa, Zea mays
  Coding DNA Sequence Number=SeqID_34738
  Gene Ontology: Mol. function=protein binding; Cellular component =thylakoid membrane; Biological process=photosynthesis
  Homolog annotation: Hit_ID=Q2QWN3; Match level="QueryCoverage=86%, HitCoverage=97%, E-value=9e-46, Identity=63%"; Hit description =Photosystem I reaction centre subunit N, chloroplast, putative, expressed
  Pfam annotation: Domain name=PsaN; Domain location=5-145; Score =289.4; E_value=7.2e-84; Accession=PF05479.2; Description=Photosystem I reaction centre subunit N (PSAN or PSI-N)
  Subcellular localization annotation: CTP_CleavageSite=51; ConfidenceScore=5.47e-01
MNSSFIGLKPAAAAAQANTAAASSPMKQQVQVAPEGRRAALLGLAAVLAVTATTAGSAKAGVFDEYLEKSKANKELNDKKRMATSAANFARAYTVEFGSCQFPYNFTGCQDLAKQKKVPFLSDDLEIECEGKEKFKCGSNVFWKWKVTDASLDSKLINVICEVFVITV

SEQ ID NO: 78114 - protein, 522 aa, Zea mays
  Coding DNA Sequence Number=SeqID_34739
  Homolog annotation: Hit_ID=Q6JAD6; Match level="QueryCoverage=54%, HitCoverage=38%, E-value=1e-100, Identity=69%"; Hit description =Putative uncharacterized protein
MVPDGRSGCGSVAWVGDVHSGFGDCAADADGRIRGTAAAGASAAAVGARAGAGGGGRARRGPGTAEAAATAARSGGAALRASGAGRGGGSHGGGRVGRGGLARVGGGVGWARERRLGLRERRRRPGAGSAGRGRGGRRAGDRETLRKPTGDLLSGRAPATSGAPAQASSSLFLNHQVRMSRTKNVSALGGGDDEDPPRPFRQCATAARVRRFQHVLVESWLPAQRDPAAADLFSTRIHEYFFRAQLSAQIALQAHRLLGLPAFLLAASADSEVHLSYLPRLLTLLTSSGRYVEEWVRVFYASVCIDPDHQWMRFCFEREDVILHANQIHQLFGFNESSTRLHSLCYGTSDPPRRPHGGVPPATSHVAALFRPPFSDGLRHSPADFTTAAKYLYQLMRRTLLPWMGYREAATHIQLWLLGALISHSEFDVVDFLICEIEDMFETQGATVPDDDDDDDFGIPPSPPRSHDHEAGSSSVVPAAPPAVDPALSVILQALTQQQTLMASEQARLASEQARQAAEQAR

SEQ ID NO: 78115 - protein, 245 aa, Zea mays
  Coding DNA Sequence Number=SeqID_34740
MTTSLVVERSESGYGLPLPSASRMFIIHAGEEGKPSGSFAFRMGWRPASSSNIRGRGAFASLAEEANSGFAGPAICGAVSCRVSGSSVWVALAPPSALPSAAGAERGCPSTVRAMVAPCAGWPHPRLLPCYRPHWEAVQDVPPPIDAEVVAATGGADAVASAGSWYGTGLSGYMVSGPPRRQVPVLQSRTSRLDVLRLDTSVSERVIDNPREANSPGSGSGGGACRPTVRDQAERLHGLWTTPGD

SEQ ID NO: 78116 - protein, 128 aa, Zea mays
  Coding DNA Sequence Number=SeqID_34741
  Subcellular localization annotation: CTP_CleavageSite=51; ConfidenceScore=5.07e-01
MVPLSTMGTGQSAVGISTAVGKAIGGPVVIAATGAREQQSNRQPDFGPTCRLASSPEAGPGATVGTLSQGYPLLQHKDAAPMRRLLATRGTTPDPTTWAGQRAPRGKEGQHTPVGPGPPQKDTGPRYI

SEQ ID NO: 78117 - protein, 50 aa, Zea mays
  Coding DNA Sequence Number=SeqID_34742
MEASLPLPRPPLPRSLALVRFPENFPFPVVWGKRFRTDFGKFHSKFLKLI

SEQ ID NO: 78118 - protein, 118 aa, Zea mays
  Coding DNA Sequence Number=SeqID_34743
MDPKGKAKVTEEEMKIPSGDTPKGGQTVNSGFDKKNLERMECFDYVFGVYSYALVLNEKMTVGEVDRCSIGSPDSPVNFSGVVLRKPESRQFVKCFAWALDSVRCATGSTKSCMLQAL

SEQ ID NO: 78119 - protein, 520 aa, Zea mays
  Coding DNA Sequence Number=SeqID_34744
  Gene Ontology: Mol. function=serine-type peptidase activity; Cellular component=lysosome; Biological process=proteolysis
  Homolog annotation: Hit_ID=Q67WZ5; Match level="QueryCoverage=90%, HitCoverage=58%, E-value=1e-120, Identity=77%"; Hit description =Putative prolylcarboxypeptidase isoform 1
  Pfam annotation: Domain name=Peptidase_S28; Domain location=155-486; Score=-107.2; E_value=2.7e-06; Accession=PF05577.3; Description =Serine carboxypeptidase S28
MDKRVSVAPGLHGALVTIDDTRGKIMVRNMKLVVLASWFRLKYPHVTIGALASSAPILQFDYITPWSSFYDVVSQDYKVIGKVGLGYVLMANEDHLASMILECSTNSVEVNSPPQSMWNTLSFISDSPSAHARMCLMATVARSFKGIIATHIYRLSSSNSRRKYLFPPGEAHIIGPYKSLYVSAPRAPVHSALQNYELKLTFRKYLSTAKLYNFNKYLKDMSLKSVVLANWFLESESLNCFSVIKAAWDVLEERGSNGNGLVELSKLFRACKTVKYADSIRRWLRTAFVSIAMMDYPTPASFLENLPAYPVKEMCKIVDGFPADADILEKVFAAASLYYNYTGDQTCNQIEDEGNPRCLNLNYWGWQACTELMMPMSSANDSMFPPHTFSYEDKANYCLQTFGVRPRPHWITTEYGGYRIDEVLKRFGSNIIFSNGMRDPWSRGGVLKNISSSIVALVTEKGAHHLDLRSATKDDPDWVTEQRRQEVEIIHGWIDQYYRDMAQVKTFFCAKTMGVILYYA

SEQ ID NO: 78120 - protein, 191 aa, Zea mays
  Coding DNA Sequence Number=SeqID_34745
  Gene Ontology: Mol. function=serine-type peptidase activity; Cellular component=cytoplasmic vesicle; Biological process=proteolysis
  Homolog annotation: Hit_ID=Q67WZ5; Match level="QueryCoverage=81%, HitCoverage=35%, E-value=1e-34, Identity=46%"; Hit description =Putative prolylcarboxypeptidase isoform 1
  Subcellular localization annotation: CTP_CleavageSite=23; ConfidenceScore=5.46e-01
MATPPVLAFLLLLLVSSFSHASVAAVLPAHSNPNPFPTTTPLHLQARRQQRVRQPNSPADATKLAAAAADDTGTTAGPFTVHYFQQELDHFSFTPNASTVFYQKYLVNDTFWRRPGGGGTAGPLLVYVGGEADIECIAHNVGFMFDIAPTFGALLVFVEALADLAILITDLKRNLSAETSPVVIFGGSYGG

SEQ ID NO: 78121 - protein, 104 aa, Zea mays
  Coding DNA Sequence Number=SeqID_34746
MSRAFDDYYIKDYDVILATEEHKAIMLYKSSSYSFSMKLDAHEAEPSQNEDNDDYLTHWLFTEDNDKDELVNVSGSVTDVMRGAREQEAGEGIGEQLCSRIFEG

SEQ ID NO: 78122 - protein, 476 aa, Zea mays
  Coding DNA Sequence Number=SeqID_34747
  Gene Ontology: Mol. function=serine-type peptidase activity; Cellular component=lysosome; Biological process=proteolysis
  Homolog annotation: Hit_ID=Q67WZ5; Match level="QueryCoverage=88%, HitCoverage=76%, E-value=0.0, Identity=74%"; Hit description =Putative prolylcarboxypeptidase isoform 1
  Pfam annotation: Domain name=Peptidase_S28; Domain location=80-476; Score=177.5; E_value=3.4e-50; Accession=PF05577.3; Description =Serine carboxypeptidase S28
  Subcellular localization annotation: CTP_CleavageSite=60; ConfidenceScore=5.57e-01
MAAPTVLAFLPLPLLLLAAFSSASASAHPNSFRPIVPLRLQALLQQQQRRRASSDAKLVSAAADGTNSTAQPFTTHYFPQELDHFTFTPNASMLFRQKYLVNDTFWRRPRRGGGGGAGPLFVYTGNEGDIEWFATNTGFMFDIAPKFGALLVFIEHRFYGESLPFGDDSYSSAETEGYLTSTQALADFAILITGLKRNLSAETAPVVVFGGSYGGMLASWFRLKYPHVAIGALASSAPILQFDHITPWNSFSDAVSQDYKSESLNCFSVIKAAWDVLDERGSTDTGLLELSKLFRACKSVKHADSIAGWLQTAFTYTAMVDYPTPANFLMDLPAYPVKEPIQMCKIIDGFPAGADILEKVFAAANLYYNYTGDQACNQIESDSDDSSSSLGLSGWGWQACTEMIMPMSTSNASMFPPSSFSYEDTSNACFQSTGVRPRPHWITTEYGGYRIDKVLKRFGSNIIFSNGMRDPWSRGG

SEQ ID NO: 78123 - protein, 103 aa, Zea mays
  Coding DNA Sequence Number=SeqID_34748
MAWCLGSLLRGVRLLGLVLWMSPTASAVALVSPSTSRCAGPDVDGGIGFLGQNFVFAELIFPRRQSTCWCDCAICGWIRLLNDNSGVMRQRDSLGFSVLLISA

SEQ ID NO: 78124 - protein, 118 aa, Zea mays
  Coding DNA Sequence Number=SeqID_34749
MARAGISRVDDVEVAKSAGSTRSADHEQSREDASQKPYSPSPGAGSRRRRVPETYSPDHRCTSTVGTKGTKKRLSYEESFSAETVKLNFRLELQATPTHNLDNGLCLELQVLREMGFT

SEQ ID NO: 78125 - protein, 628 aa, Zea mays
  Coding DNA Sequence Number=SeqID_34750
  Gene Ontology: Mol. function=helicase activity; Biological process =viral genome replication
  Homolog annotation: Hit_ID=Q1EPC6; Match level="QueryCoverage=37%, HitCoverage=14%, E-value=6e-91, Identity=67%"; Hit description=DNA helicase homolog, putative
  Subcellular localization annotation: CTP_CleavageSite=35; ConfidenceScore=5.01e-01
MGVPDFCARWRAFNALQVAVGAEVSVASLSHRTVRCTPDMSGFLSEKGLLTLSIRLLFIYQGTVLVMDQMGYNADRTPFTNISNTIITVGTDTNPQSYIVGNQNESNSLGPIVDAREHSFPDDCSIIDFKILSTQGIAGGDEQVNVDLDDDSDWLHRNETFQVNNIVASNDLLTTGCVHESVDNTPNHTMKRVAYFSERYKNLTPIERESRREHLRLYNKTPKRKDAKTEYGRKRRALQSDTLNQESIAMEDPTYTPEVGRHRTDATQPYGSSVTTCDWVIPEFVGTPFLPTSIQTEDVGSLTMSTEPLSRKHHVLSGARPAILGSRNQQFEAAISRNVATVTEDTISDAVEGDDWTQPHMTTEIHNNGDDDEGVIFEEDDDDNDGYLFAGQYDETDEDIKIDGTQEESIDTDLPDTYNKVYSNVPEETHMLKSVPNYGYCNAKKFEYEPPGFCCRGGKVELAPLETPPQLWRLWDSVDSDARHFRDNIRFFNGHFSFTSLYCCLDSMTTNVRDSGIYTFRAQGMMYHNIKSFGREGGAEHKHLELYFYDDDPNLEHRYRMCREEHQQKDKDVIKQIVSILRENPYSEHLRSMGHVENLDDYRITLNLDQSLNQKTYNTPITSEVAAV

SEQ ID NO: 78126 - protein, 117 aa, Zea mays
  Coding DNA Sequence Number=SeqID_34751
  Gene Ontology: Mol. function=kinase activity; Cellular component =ornithine carbamoyltransferase complex; Biological process=amino acid metabolic process
  Homolog annotation: Hit_ID=Q6QP54; Match level="QueryCoverage=68%, HitCoverage=28%, E-value=2e-17, Identity=60%"; Hit description =Putative kinase
MGRREAEREGGRKVAGDGRERGGNPAAFVFVPRPGRSESAWGRVMMAPPVDVVGPRPRLGDVEAPPRSSLSSAAVVESEPLGRARRRPSAEARAKSEPWGRAKRCSSSSGAEPKSEP

SEQ ID NO: 78127 - protein, 346 aa, Zea mays
  Coding DNA Sequence Number=SeqID_34752
  Homolog annotation: Hit_ID=A3BE35; Match level="QueryCoverage=97%, HitCoverage=98%, E-value=1e-34, Identity=36%"; Hit description =Putative uncharacterized protein
MASSSSELRPASRRIVDYLNDGEELGALGAVVTPPCSPAAVAVGKQAKSALPRFRWPRLVRLRREGGGDEGKPGVVVVEKGDDLPVAAASTSGCESSAASDKRHPDLGVGLSLLFLLAKTSDEFNKMAKVRAEMEALLRELKDGVRTKSGGTEGHGAPKDRNRESTTSSCVTDGNDQTASARLEYQLASSCVEPAGYERSSEDDGGCCARMELDVLEEEFHAELELLQGNYESGTPSFLPEEEEEEHYSEPYDEMADYRDGVDEDSRGGVEDEDDDDDHDAEYNGVSAVQLERRLHELLHERNRDRIEELEAALRRAEKKLVEKEMEVSLWKDTAKFALRQDKELQ

SEQ ID NO: 78128 - protein, 152 aa, Zea mays
  Coding DNA Sequence Number=SeqID_34753
MGKSKKGSSSSPRSGDKRKREPTPPSEDFGDSEYSEEEFSSESEGSPAPVSPPASSDDSDDSQGIAAEVWTYIRAVERSGLEGSDESKYSSDKEDSSDSSEEDSGGDGGYGGNDGGDGDGGGDSGRGGDGGSKGDNGSGSKGSSKGSNKTSG

SEQ ID NO: 78129 - protein, 102 aa, Zea mays
  Coding DNA Sequence Number=SeqID_34754
MTEDNPALEGATKGGSTLEGIAEDDLAPEETAEGDPAPKGPEPGSSSAASMDVHVGSPLVQSEEAVVTSLDLPTAQAGPTTLENVLDSVSTQLRACGAPIPD

SEQ ID NO: 78130 - protein, 232 aa, Zea mays
  Coding DNA Sequence Number=SeqID_34755
MQPGCTPPPAVTKNGDLQLDGGGKRAGLRPLPLPQPQGFSSPGLGRGVCRVGVGPCVGGGSLLHSVIGGKGGRRPWRWQLHRAWLSDASGFGAARGAGVCHGSWKRFFRRRDSQGRPRTDLQLYGLLPVLASQVWAWAGPLGSSIRPEVSAAAVRPPGAEVVVVAAAGAGDGAPFRRSSVAPQALPHRVGLFVPAEESFGSVGLVVRGSSGLVKGTPWPLLDEPRPGVAISA

SEQ ID NO: 78131 - protein, 22 aa, Zea mays
  Coding DNA Sequence Number=SeqID_34756
MARRWPGAAVADLRGCTGNGGV

SEQ ID NO: 78132 - protein, 151 aa, Zea mays
  Coding DNA Sequence Number=SeqID_34757
MSFGLWSIEVRLVQIRKLNFELLKSTLKQNLVSSHSPPLVASPVLQLLSKPVKDFLTLVGLKSTKMDKGPCARVSSVDTWPLRAEWNMPEMKEDASKIEPGLVRLWYRYNFENKFGEPCDEWLEAIEENATRFLVTIVKRRSSQDLNNGIP

SEQ ID NO: 78133 - protein, 44 aa, Zea mays
  Coding DNA Sequence Number=SeqID_34758
MAVGSVLSHGAPDSPVRHRTLSGEEFSLECPGAPDTVRWHTGQS

SEQ ID NO: 78134 - protein, 52 aa, Zea mays
  Coding DNA Sequence Number=SeqID_34759
MGEVQGSRRAQVRAPGRDGGRGELDHENEQRRNKTGLDLGDEADGTSWKDKG

SEQ ID NO: 78135 - protein, 181 aa, Zea mays
  Coding DNA Sequence Number=SeqID_34760
  Subcellular localization annotation: CTP_CleavageSite=49; ConfidenceScore=5.35e-01
MRCVNPGSATAAPSSCPAQNGAALIPVYRLACRLGAPSNRSTAERLYVMAEAAASNARARSSPDAMYGTTWCGRRSSRGMRDGARTSTARNTTRGARQAAAVAATTATHCRRRRLAGDGVSVDMARRMPGVPAGSSAWVLPYLTSRVGKLKEKGRMRLTKRRTTERFNPELKISRLMSAKN

SEQ ID NO: 78136 - protein, 184 aa, Zea mays
  Coding DNA Sequence Number=SeqID_34761
  Gene Ontology: Mol. function=protein binding; Cellular component =chloroplast; Biological process=cell redox homeostasis
  Homolog annotation: Hit_ID=A2WY84; Match level="QueryCoverage=66%, HitCoverage=66%, E-value=4e-53, Identity=84%"; Hit description =Putative uncharacterized protein
  Pfam annotation: Domain name=AhpC-TSA; Domain location=68-164; Score=- 15.2; E_value=0.021; Accession=PF00578.12; Description=AhpCTSA family
  Pfam annotation: Domain name=Thioredoxin; Domain location=77-179; Score=114.5; E_value=3.2e-31; Accession=PF00085.11; Description =Thioredoxin
  Pfam module annotation: Pfam domain module=AhpC-TSA::Thioredoxin; Domain location=68-164::77-179
MDVLMIRNFGEDQQGLGKGQYVKEEKLPSAGRRRRRPKKRGLLLTTARGGGVLAPVRSSGIETTTTSVGAEAVTGQVTEVNKDTFWPIVEAAGDKVVVLDMYTEWCGPCKVMAPKFQEMSEKNLDVVFLKLDCNQDNKPLAKELGIKVVPTFKILKGGKVVKEVTGAKIDELAEAIEIANKKSG

SEQ ID NO: 78137 - protein, 235 aa, Zea mays
  Coding DNA Sequence Number=SeqID_34762
  Homolog annotation: Hit_ID=Q7XBD1; Match level="QueryCoverage=62%, HitCoverage=38%, E-value=2e-07, Identity=30%"; Hit description =Putative retrotransposon protein
MVETLPSLEVVPQRFLKCDRRWTCYCWIVCFPRRRVLSIKRRHSRDGFLPFACAVKSLIFLNRSPTLLALLLRKSGPRQADCTPPPTVHQLTPNAVVALAKYVWAVSSYDGQPSVEVFAKNNCLHWQKKKIGNKIAQFGSCTFTPRTRKTSAEVVEIVPCGRNKWGIWWDFWFYVSGGEIEDLPRLPAAIMCSHCYVAFLPFEVAEDDEDEGALWYAARKISGRDLVEEFIGYGV

SEQ ID NO: 78138 - protein, 273 aa, Zea mays
  Coding DNA Sequence Number=SeqID_34763
MELKSLSQRIECARNGVLVLRNDQGMLGFLLHAPRGPFYSPKAARSRWRHSWKAILAFCWVAHRTVRCTTGQPLFMSGARFPSIAGAADYCSLLAVGTPDSPVHTGQSGAPCRPLEWAMRRPRIWRPTVAVAAIGSPDSPLSWHRASCATTSKHFKYGSLRIGVWENYLGTRRHPSESPNGQLNFLDTTSPSNPEQRLNHKSWHTSSSIGWDQHDNKKSPQRKYGPLTATARGPCGGRRRGNYHFTHQRQIQIRNPPMLRLGVRQMHQQHSRA

SEQ ID NO: 78139 - protein, 97 aa, Zea mays
  Coding DNA Sequence Number=SeqID_34764
MRAWLPFLLHNYSCAWHLTTDVWGHVALSHAVAGWSILLVSDQLRMPLPLSLEHGPALSKVVSYPVSKIKPTSSLELNGIREILGGRHDQLVNASGL

SEQ ID NO: 78140 - protein, 144 aa, Zea mays
  Coding DNA Sequence Number=SeqID_34765
  Gene Ontology: Mol. function=transferase activity, transferring glycosyl groups; Cellular component=integral to membrane; Biological process=cell wall organization and biogenesis
  Homolog annotation: Hit_ID=Q6L538; Match level="QueryCoverage=44%, HitCoverage=9%, E-value=2e-18, Identity=68%"; Hit description =Probable xyloglucan glycosyltransferase 7
MPGPTSGCGLPVLASRGDVEISEDVTTQAVRHTGTALVARGCSRLASPGARAAASPRARARARVALSLLLLAVEVAAYLRGWHLEVDVGAGILTVDALFVAAYAAWMRAPLDYLAPPLQFLTNVCVVLFLVHSVDRLVICLVCF

SEQ ID NO: 78141 - protein, 164 aa, Zea mays
  Coding DNA Sequence Number=SeqID_34766
  Gene Ontology: Mol. function=caspase activity; Biological process =proteolysis
  Homolog annotation: Hit_ID=A2WW06; Match level="QueryCoverage=39%, HitCoverage=15%, E-value=2e-20, Identity=75%"; Hit description =Putative uncharacterized protein
MEQEDYSVDEVYAVTKAWAPNNGILISGCQTNQTTADATTPLGVSFGALSNSIQTILANEHGKLIRVRISGSVVNDLSNSISMCTNSGSQATCIPPPVPTRSPISYRTSCCLILASHLNESLSTLFVSWFLRYNAYMLPSQFMSTMNRLQKLLFVIFSWLDSNL

SEQ ID NO: 78142 - protein, 139 aa, Zea mays
  Coding DNA Sequence Number=SeqID_34767
MKAARCFCWLREANTKGALLLMLVETKKEGGARPDERAPLLVRQAAALRGAGIIYGQAVSGYGSDISTREVVEDLSAWKIDQSTTTKRVAKPMFTYQQDRRPGPGLRWRSCATASLSRATHAEAQAGAAAPGNASVAIT

SEQ ID NO: 78143 - protein, 325 aa, Zea mays
  Coding DNA Sequence Number=SeqID_34768
MGGSEPGSFAEKDPFRATGVPVARRVGLGSKLACQKSEKRVHLARLHAACMAARPFCPLDPAPESQGRALERVGEDSARGAWGRTNATPWELVPLSHRSASRIFITQPGRTPSPAVTRDGDLQLDGGGKRVGLRPLPLPQPQGFSSPRLGRGECRVGVGPCVGGGPLLHSVMGGEAGIARGVRQLQRAWSSAASGFGATCGVGVCHGSRKRFFRRRGGRDRPRADLQLLRPSARPCLTSFGTGGGLLTAASTLRSALPLFGPPEQKSPSSPLLEQVTARRSSAFRCSAGLPPRSGVVRTCGGGTGVPFVMALRMPVSSFIVAVEA

SEQ ID NO: 78144 - protein, 131 aa, Zea mays
  Coding DNA Sequence Number=SeqID_34769
  Gene Ontology: Biological process=primary shoot apical meristem specification
  Homolog annotation: Hit_ID=Q5NBT9; Match level="QueryCoverage=41%, HitCoverage=4%, E-value=1e-19, Identity=89%"; Hit description =Putative CTV.2
MKIFFEITKKKYLEALHRHDRAKAVDILVNDLKVFLTFNEEFYKEITQLLTLENFSVAAAVEPKLWCLLKADMAAVFCELVAQGEALQNFQHGAGFWSAMTSNITFQSRNVLSKKFMVYPYMPSLFEMKPN

SEQ ID NO: 78145 - protein, 306 aa, Zea mays
  Coding DNA Sequence Number=SeqID_34770
  Gene Ontology: Mol. function=metal ion binding
  Homolog annotation: Hit_ID=A2XDS9; Match level="QueryCoverage=12%, HitCoverage=6%, E-value=8e-09, Identity=81%"; Hit description =Putative uncharacterized protein
MASRPAGQAQRRHRLMWVSSCATTSLPRAAHAEAQAGAAAPRNASVAITIAAQQSKRIRVLQYWRLAPKSASANPPRLLAARMTLLACCLAARVSLLACCSDGLDLDCSHPPPAASPSTLRARPTPPSALRRATTLLARYPTRCAAPPASTARSTAPRRLAARAAPLGAVPLGRRALGTFGQPTALQLPADLLPALAGLHLHLYDSSFRSPPSNRSGRHAPLHRGWGWGYAAPSRSREAVTEQKALSRVLLGGRLVLQVVAIAVFSALGFAFYVFFVPFVGTKPFQIVAMAIYTPLVRFLSFFSRV

SEQ ID NO: 78146 - protein, 241 aa, Zea mays
  Coding DNA Sequence Number=SeqID_34771
  Gene Ontology: Mol. function=kinase activity; Cellular component =ornithine carbamoyltransferase complex; Biological process=amino acid metabolic process
  Homolog annotation: Hit_ID=Q6QP54; Match level="QueryCoverage=33%, HitCoverage=28%, E-value=5e-36, Identity=91%"; Hit description =Putative kinase
MNSRLPKTEHRPGLERSLETAHLELDGKLFVNTQQAPTWRANCRRFETGGSLSRRVNVAACPSPDGASAKGGGEAAGDRRERGGNPAAFVFVPRPGRVRFAVGGYKRPRGRGSERLQASACLVLVPARPTLSKRALVLPFYRRKGEDSRGLRAAVVTEYAGRHHCLSGGASQMGRRSCFPWPESARGRVMMAPPVDVAGLHPRLGDVKAPPKPRSSLPSVAEVESEPLGRARRRPSAEARA

SEQ ID NO: 78147 - protein, 101 aa, Zea mays
  Coding DNA Sequence Number=SeqID_34772
  Subcellular localization annotation: CTP_CleavageSite=41; ConfidenceScore=5.82e-01
MSSLPSIPPPPAPSLPCIPPPPASFLPCISRRPRAPNPVTCAKSFVGPFATHRRAAPTRRKERIQVYNGGVAECYVSSGGRASALSTCQCGSRRDLGTLLV

SEQ ID NO: 78148 - protein, 1330 aa, Zea mays
  Coding DNA Sequence Number=SeqID_34773
  Gene Ontology: Mol. function=chitin binding; Cellular component =extracellular region; Biological process=chitin metabolic process
  Homolog annotation: Hit_ID=Q10Q16; Match level="QueryCoverage=97%, HitCoverage=91%, E-value=0.0, Identity=53%"; Hit description =Expressed protein
MEDGQNIRLLAASLFFQPRHASDNDFQMWQQQMMFKHLQEFQRQQQLQQSDHGARMQLSFGQFHAPAKPLPGDQLSTMSNEMVNNETMNSGWPHNFTGGDLSLTSNSQMLNNGSTNWDQIVGSPVVGNFMNGSMFVNAHNQSMRPMGLATHQVDQTFYPMHATSSRGPGNQYSQFLGIPADPQSEAARVGPVQSEKTSRPFNSSMNELGLHMQGQASRGASLDPTEEKILFGSDEDSNWGALLRGDNDNVNSLDNDNYGGGYSSLQSGSWSALMQEALQSTTSESPKEEWSGLSFHKTEQVMASNANLSGRNGSKFTGLSGANLENARPSPASSYADGTMNNPNLASFQHVIRPPSERRDHMSHESSNAPVNNHQSTSEVNKGYFQQGIKQIHSDARQGQAHLVNGTWPHQKTELLRSNLQSTGVHATPPGGHGFGMSQQIATDHNINRESSNNQNDWKANNALGQDMCNSQNIFNSNENSWKSTGGNANSVQRFQQRRSDVSATNESSDGKNISMMSSSMPMMTQDHYQMVTSQSGEQIGMNRNLTHRAPETSESPGKKRRTKTRRHSVSAGKESENLGQSSQQAMGSYILQNRAMGSSGMNIGLSPGNPMSNSLFPPQTRNSLQHHFGTNSHVSNSMPSASEKMMMAQEQLQSRHGLPNSSSASTLGGADTGLSQNRAVQNSQHMLQLLHKVDNSRNSNVVADIPNNSLGVVSAQQQLNHSSLQGFGLRLAPPSQLQSISGNLWSSQTNADGKQFYQDGDRTQLPSTPSQSLTPQHQNSLSSPFHSSETENTGQPIACFPQLGSGQQYPMADDRSGPAPMLQQQPQQSNSATVFKNVWTNISAQRLTGMQPNKITPNIIQSMMFPNNAAASNLWSSQKADDQGQRASTPSDIATSSANSQNQSPKQAADSDAKLASSQKGNLELTGTTVTGGNESLQKPSSDENSINAVSSFAQLRQQGILGAKHGENPGANFQAMNVSHNNANHSGGIVLHGSPAPTNIQQQNYSLLHQMQTSRHMDVDPGSLSGKTTKPDIGSDAAQIDWNSGQRFAHVTNNSTKSSADNIGSPGVPGSFTSDLKMLSFASRNEERNPNIPSRFPSGECPSPGMITTQDDNQNQVQHMGTGAMSNSDERSERPRINPQMAPSWFGHYGNYRNGQSVATLNAATLNAQKPMALPFNFPKASRNNENNSHAENRVEPSQSVRPGHHLPSARMEALVPSNVKVSSMMRRPKKRKTMDSTLVSWHKIIESPRKLRGISTPEMDWAWAANRLIEKLIQQLLPAIPATILRAQAVSAYGSATYTLSMLTLRDACSMASSSYNSCSPVEDENK

SEQ ID NO: 78149 - protein, 71 aa, Zea mays
  Coding DNA Sequence Number=SeqID_34774
MRQAGDMFQPIKSVLAVVDAPYIKYRSIVDFSTGSVLRDYDPREVVRFQTTDQSRMSWLLNPYKMKQPKQL

SEQ ID NO: 78150 - protein, 112 aa, Zea mays
  Coding DNA Sequence Number=SeqID_34775
  Gene Ontology: Mol. function=ATP-dependent helicase activity
  Homolog annotation: Hit_ID=A2XDW7; Match level="QueryCoverage=70%, HitCoverage=4%, E-value=5e-28, Identity=75%"; Hit description =Putative uncharacterized protein
MGSAAAAVTAMGGGAGRARGKGVHANRGAGGQAPLGAEKLFGAKQEAWWLVLGNATSSELYGLKRISFADRVINTRMELPQTFNVQETKLILVSDCYLGFDLEYSLEHLTKG

SEQ ID NO: 78151 - protein, 1816 aa, Zea mays
  Coding DNA Sequence Number=SeqID_34776
  Gene Ontology: Mol. function=nucleoside-triphosphatase activity; Cellular component=intracellular; Biological process=regulation of transcription, DNA-dependent
  Homolog annotation: Hit_ID=A3AFF6; Match level="QueryCoverage=85%, HitCoverage=75%, E-value=0.0, Identity=59%"; Hit description =Putative uncharacterized protein
  Pfam annotation: Domain name=DEAD; Domain location=6-140; Score=41.9; E_value=2.3e-09; Accession=PF00270.20; Description=DEADDEAH box helicase
  Pfam annotation: Domain name=DEAD; Domain location=837-1008; Score =97.5; E_value=4.1e-26; Accession=PF00270.20; Description=DEADDEAH box helicase
  Pfam annotation: Domain name=Helicase_C; Domain location=1117-1203; Score=50.2; E_value=7.2e-12; Accession=PF00271.22; Description =Helicase conserved C-terminal domain
  Pfam annotation: Domain name=Helicase_C; Domain location=270-354; Score=33.0; E_value=1e-06; Accession=PF00271.22; Description =Helicase conserved C-terminal domain
  Pfam annotation: Domain name=ResIII; Domain location=814-978; Score= -27.5; E_value=0.0098; Accession=PF04851.6; Description=Type III restriction enzyme, res subunit
  Pfam annotation: Domain name=Sec63; Domain location=1319-1618; Score =145.0; E_value=2.1e-40; Accession=PF02889.7; Description=Sec63 domain
  Pfam annotation: Domain name=Sec63; Domain location=475-783; Score =387.9; E_value=1.6e-113; Accession=PF02889.7; Description=Sec63 domain
  Pfam module annotation: Pfam domain module=DEAD::DEAD::Helicase _C::Helicase_C::ResIII::Sec63::Sec63; Domain location=6-140::837 -1008::1117-1203::270-354::814-978::1319-1618::475-783
VKQHFRDGILHKNEFKIVYVAPMKALAAEVTATFSRRLSPLNLVVRELTGDMQLTKNEIEETQMIVTTPEKWDVITRKSSDMSLSMLVKLIIIDEVHLLNDDRGSVIEALVARTLRQVESMQSMIRIVGLSATLPTYLEVAHFLRVNPDTGLFFFDSSYRPVPLAQQYIGISERDYTKRSELFNTLCYEKVVESIKQGHQALVFVHTRKDTGKTARTLTCILKGQFSNMTYKIDLAAKAGELELFSSADHPQFPLIKKDVSKAKSREVVEFFESGFGIHNAGMMRSDRSLMERLFGDGLLKVLVCTATLAWGVNLPAHTVVIKGTQLYDPKAGGWRDLGMLDVMQIFGRAGRPQFDKSGEGIIITTHDKLAYYLRLLTSQLPIESQFLGSLKDNLNAEVALGTVTNVREACTWLGYTYLFIRMKTNPLVYGITWEEVMGDPSMGAKQRTFIIDAARALDKAKMMRFDEKSGNFYCTELGRIASHFYLQYSSVETYNEMLRRHMSESELITMVAHSSEFENIVVREEEQDELEALARKACPLEIKGGPTDKHGKISILIQVYISRAPIDSSSLHSDAQYISQSLARIMRALFEICLRRGWSEMSSLLLQYCKAVDRKIWPHLHPLRQFDKDLSPQVLWKLEERNVDLDHLYEMEENEIGALIRFSHQGKLVKQYVGYFPYVNLSATVSPITRTVLKVDLHITPEFVWKDRYHGMSERWWIIVEDSENDTIYHSELFTLTKKMARGTPTKISFNVPIFEPHPPQYYIHAISDSWLHAETLFTVSFHNLTLPQTQITHTELLDLKPLPLSALGNKTHYQFFLHSGELFVGTGKHVFLIEHKLENQAFHVLYHTDNNVLLGAPTGSGKTISAELAMLHLFSTQPDMKVVYIAPLKAIVRERMNDWRKRLVIQLGKKMVEMTGDFTPDLMALLSADIIISTPEKWDGISRNWHSRSYVMKVGLMILDEIHLLGADRGPILEVIVSRMRYISSQTERSIRFVGLSTALANARDLADWLGVTDDGLFNFKPSVRPVPLEVHIQGYPGKFYCPRMNSMNKPAYAAICTHSPNKPVLIFVSSRRQTRLTALDIIQLAASDEKPRQFLSIEDNSLDMVLSQVSDSNLRHTLQFGIGLHHAGLNDRDRSLVEELFSNNKIQVLVCTSTLAWGVNLPAHLVIIKGTEYYDGKTKRYIDYDITDILQMMGRAGRPQYDQHGKAVILVHEPKKSFYKKFLYEPFPVESNLREHLHDHINAEIVSGTISNKEEAIIYLTWTYLYRRLVVNPAYYGLEDTETNTLNSYLSRLVETTFEDLEDSGCIKVDDHSVKYLILGKIASQYYLSYLTVSMFGSNIGPNTTLEVFLHILSAASEFDELPVRHNEDNLNRILSGNVPYPVDQHHLDDPHVKANLLFQAHFSRAELPISDYVTDLKSVLDQSIRIIQAMIDVCANSGWLTSALTCMHLLQMIIQGLWFERDYESLWMLPSMNDDILDHLKSRGVSTVPSLLDLSREELRRVLQPFSASELYQDLQHFPHVDVKVKLHNEQERSKPPTLNIRLQLKNSRRSASRAFAPRFPKLLGEDVGELGGDRDADIVDSDTLADEVELDLHVLRVMVLHGIGEPRCLGYAIGHNAILGLSAGVRKDGLSHQGPGDEVGAQEHVVARDGPTRVRTTNTINVNVDDQLRSRRGSKKAVVEGAAEVAKNLLGSVEVGLPRGVHVKAHTLDRNVDGVLALVKKEALGTTLHGDLEQVVERIVVLHRELALQGDDTRCCEHDVIDVEEVDGVVAMPKDEQGCVRLRDGNFTRGFGYPSGSGTNLYPRVLPIPDP

SEQ ID NO: 78152 - protein, 269 aa, Zea mays
  Coding DNA Sequence Number=SeqID_34777
HLERLHHRLREEQERRRQEQQSSSFSLHQEIESVRSCSPVLPLEAPPAPPLGVPASGVAAGGDPDDGDGDDSSSHDTDFSANPEPEGWVARPITRDAARGCHFHDALDTLLRRAFDRHTWSVEYRCVVYQHSRGDSAEAAMQDAARRALSHYCSVFGGAADGLDLKYYPRRSSGSTGGVIVSPVGEGNPRFSSTVNLAAVLNTELDHALDELSRACAEIALLRAERAERRYLDGGSPAPVGTQHPYRSPQRGHQSYGNPDCKTKINLEP

SEQ ID NO: 78153 - protein, 114 aa, Zea mays
  Coding DNA Sequence Number=SeqID_34778
MAGEQSGASVPLALSTSVQDTKVEEFVSKIEVTTSQVEAGSMNPSKDSDNIDIEEDSTTIRPTKPSHVDFDKCKIKGGHIEVLNRFGYIDNVDWVRLGGDDLVSDLREDEVVVF

SEQ ID NO: 78154 - protein, 57 aa, Zea mays
  Coding DNA Sequence Number=SeqID_34779
RAHGYERPRELQRLVILDQRYCGTGGNETDGSGYGYGIGEDEAVEGDFQEFQDYDEF

SEQ ID NO: 78155 - protein, 71 aa, Zea mays
  Coding DNA Sequence Number=SeqID_34780
MAGSAASLPAGSAAPPPGSAAPCAASLPAGGYEIDGSGYGYGAGCQHCNHCSGEDEAVEGDFQEFQDYDEF

SEQ ID NO: 78156 - protein, 442 aa, Zea mays
  Coding DNA Sequence Number=SeqID_34781
  Gene Ontology: Mol. function=ubiquitin thiolesterase activity; Cellular component=intracellular; Biological process=ubiquitin -dependent protein catabolic process
  Homolog annotation: Hit_ID=A2Z148; Match level="QueryCoverage=100%, HitCoverage=73%, E-value=1e-156, Identity=66%"; Hit description =Putative uncharacterized protein
  Pfam annotation: Domain name=UCH; Domain location=238-419; Score= -35.2; E_value=4.9e-05; Accession=PF00443.20; Description=Ubiquitin carboxyl-terminal hydrolase
  Pfam annotation: Domain name=zf-UBP; Domain location=140-204; Score =13.4; E_value=0.0039; Accession=PF02148.10; Description=Zn-finger in ubiquitin-hydrolases and other protein
  Pfam module annotation: Pfam domain module=UCH::zf-UBP; Domain location=238-419::140-204
MGADEQPSPTRKRDREEGEDLSDGGAAEKRPRAEVASLLGLATYEDEEEDEAARGHTNGRHAVEPELEDDEDDDDEDDDVRRAPERRPRQVELRRDCPYLDTVNRQTISYFWAQSCSYFWGLIQLMGEVLVLDFDFEKFCSISLSNLNVYACLVCGKYFQGRGLKSHAYTHSLEAGHHVFINLQTEKAYCLPDGYEINDPSLEDIRHVLNPRFTKEQVLNLDKNKQWSRALDGSNYLPGMVGLNNIKETDFVNVTIQSLMRVTPLRNFFLIPENYQHSKSPLVHRFGELTRKIWHARNFKGQVSPHEFLQAVMKASDKKFQIGVQSDPVEFMTWLLNTLHAKLKSSKKKNRSIIHDCFQQLIRSHWELFVQGELEVVKEVHRKHIMEKREDGGELNGEAGSVVGTADGIVTETSKVPFLMLGLDLPPPPLFKDAMEKNIIPQ

SEQ ID NO: 78157 - protein, 51 aa, Zea mays
  Coding DNA Sequence Number=SeqID_34782
MEGIRYSHHLPCLVQASCSGIGPSKAKLTHDEACGQLKDVEPIMAMMASPS

SEQ ID NO: 78158 - protein, 188 aa, Zea mays
  Coding DNA Sequence Number=SeqID_34783
  Homolog annotation: Hit_ID=Q6QP51; Match level="QueryCoverage=68%, HitCoverage=52%, E-value=2e-37, Identity=67%"; Hit description =Putative growth-regulating factor 1
  Subcellular localization annotation: CTP_CleavageSite=54; ConfidenceScore=5.40e-01
MTTVSKKPPQSTWAPSSLLIRGSKAGPSEGFDSCPRARRVRDNSGYVRYMAEVRATLPSGCTLGSPEAQLGQASTRSNLGQIASPTDRIAGKQRHSPRSDYCASHPGKADNSKFSLGRDRKLRLARPWASASGGGLRLARPQDSASASASGGITSSPDPGLGLRRSLRLARPWAWTDRATGDTSLPYP

SEQ ID NO: 78159 - protein, 94 aa, Zea mays
  Coding DNA Sequence Number=SeqID_34784
GIAAQVWTYIRAVERAGLEGSDESEYSSDEEDSDGGDEGEDDDDDDDDGDGGGSGSGRGGGDGNRDSTKGDSSRGSTRGSTKGGGGGGRGRASG

SEQ ID NO: 78160 - protein, 73 aa, Zea mays
  Coding DNA Sequence Number=SeqID_34785
  Homolog annotation: Hit_ID=Q7XBE0; Match level="QueryCoverage=45%, HitCoverage=3%, E-value=5e-07, Identity=81%"; Hit description =Putative gypsy-type retrotransposon
  Subcellular localization annotation: CTP_CleavageSite=49; ConfidenceScore=5.11e-01
MAPKRKTANSSAAVIPAIDPNSQLPFAGRQPDVRTPSWTESPTDQEVAEAAAERQGLSGISLPRAGRLNPSYQ

SEQ ID NO: 78161 - protein, 42 aa, Zea mays
  Coding DNA Sequence Number=SeqID_34786
MSKPDNTFPLLILPVLPSLHTPGVWTAISLLTMQKIHPVIPT

SEQ ID NO: 78162 - protein, 286 aa, Zea mays
  Coding DNA Sequence Number=SeqID_34787
  Homolog annotation: Hit_ID=Q6QP51; Match level="QueryCoverage=35%, HitCoverage=56%, E-value=4e-16, Identity=48%"; Hit description =Putative growth-regulating factor 1
MTASKKASSLPTDQRFEGWPLGGVQQLPQSAWVSRPLLAGPRRVHSRLRHRARDDPGYVRYITEARATLSSHFAAPLTSLTEGQRRLLRSDCCATRQSEADRRQRTPLRPTQGSDSGSAPEDGELRSARPRARTRAQPRKTANSTPHDQGLGLGLGPGRRQTPLRPTQGSDSGSAPEDDELRSARPQGSDSGSASEDDELRFARPQGSDSALASADGLRLARPRGSDSTSASEDRLDLDLGGASTSPNLGHGPTTSTGSAIITLPQADSGYGEQDRRPIWLALPDK

SEQ ID NO: 78163 - protein, 78 aa, Zea mays
  Coding DNA Sequence Number=SeqID_34788
MELESRLLGKPPRALPTSKSRYHSYPKISLSTQLKGTPKLWPYSSVPGPENIVRLSAGFEMALNESVKNCKALAQAAE

SEQ ID NO: 78164 - protein, 146 aa, Zea mays
  Coding DNA Sequence Number=SeqID_34789
MGKNNKRKREPTPPSEEFGDSEYSEEEFSSESEGSPAPVSPPASSDDSDDSQGIAAEVWTYIRAVERAGLEGSDESEYSSDEEDSDGGDEGEDDDDEGDGGGSGSGRGGGDGSRDSTKGDSSRGSTKGSSRGSTKGGGGGRGRASG

SEQ ID NO: 78165 - protein, 218 aa, Zea mays
  Coding DNA Sequence Number=SeqID_34790
  Subcellular localization annotation: CTP_CleavageSite=63; ConfidenceScore=5.44e-01
MAMYGYKSPDRPVSHSQAKSSLSGSDQRRTTINHRTVWWCTGLSGEPTVGRANGRPRNPRETRGRANGQKGAPDCPVCTGQCPVRQRLQDFNGRLRQNRKEICTGQCPVVHRTMSDSVRCAKKERPQELASFGNLQRLVRYNSPDMSGVHRTVRCNSGATTISAPTATCGALNARAARAEVRRAYTGAPDKEQYMSGVHRTSRRAQKSEAPTVRIQRQ

SEQ ID NO: 78166 - protein, 201 aa, Zea mays
  Coding DNA Sequence Number=SeqID_34791
  Subcellular localization annotation: CTP_CleavageSite=37; ConfidenceScore=5.24e-01
MSGAPEDSNSNSSPSGISRVTRAIIHRTVRCTPDSVRCAKKERPQELASFGNLQRLVRYNSPDMSGGPRSQKLQRSESNGSDDVAGAPDMSGSPIHPPIGALKFNTTHNIPRYHEPSPVADSDAAQETTCQALVVVAAQDRICAAQDALTREHQTASDLERFATAAHNATFPPPYDDVPNNNTNVFEDPDYEATLIVNLHT

SEQ ID NO: 78167 - protein, 66 aa, Zea mays
  Coding DNA Sequence Number=SeqID_34792
  Homolog annotation: Hit_ID=Q7XBE0; Match level="QueryCoverage=50%, HitCoverage=3%, E-value=5e-07, Identity=81%"; Hit description =Putative gypsy-type retrotransposon
  Subcellular localization annotation: CTP_CleavageSite=49; ConfidenceScore=5.12e-01
MAPKRKTANSSAAVIPAIDPNSQLPFAGRQPDVRTPSWTESPTDQEVAEAAAERQGLSGISLPRAG

SEQ ID NO: 78168 - protein, 432 aa, Zea mays
  Coding DNA Sequence Number=SeqID_34793
  Homolog annotation: Hit_ID=A3B8E9; Match level="QueryCoverage=97%, HitCoverage=65%, E-value=1e-141, Identity=60%"; Hit description =Putative uncharacterized protein
MISQQCSRRGLGSVLELNNALVSSALDILLKPMSWGISIELGQRFPFSHAYFPSQQSDLLAILTGPLSYKGFLDLVSYISALVHLDNTRTRCSSQKNLQLQPSKGLVKYNSAWYMIISFPIWFSYATALLFHREGSQDYLSETLSKEITAESISDVSLVQRAAFYLSWLLCPYNHDQREMLSNNILEISHSWARNNKKCVSYQSTVNNRRKLRIPTAADSEKFHVPVNTISSLVKEFDDRCVKCCSPTAFPQAQVGNLSDLHPLYFNLLHQWIPLGVLLVSPSCVNEQNCDILLRYTSTGQVLESNGARVKTKDDATNDGFLGSCIGTAERWALTGAYLIFGWLDVVEDMAPLIFDCEDKCHSFVSQLRNKTGPYLLKCVKSLFKTLEQPNQDKDFVIDLHNRLLNWDKNVQGCEIFGDVILEMNKKFNLPL

SEQ ID NO: 78169 - protein, 566 aa, Zea mays
  Coding DNA Sequence Number=SeqID_34794
  Gene Ontology: Biological process=chloroplast organization and biogenesis
  Homolog annotation: Hit_ID=A7QVT0; Match level="QueryCoverage=94%, HitCoverage=83%, E-value=8e-76, Identity=36%"; Hit description =Chromosome chr7 scaffold_192, whole genome shotgun sequence
  Pfam annotation: Domain name=CDT1; Domain location=122-254; Score =217.9; E_value=2.4e-62; Accession=PF08839.2; Description=DNA replication factor CDT1 like
MDATPPSKKAKTTAAPPPRKLREAAALADEVRTPDKAAKKMTPAAAFEQIPTPEKPEEMPRARGRSVAFSVKEIRRAALGLRRPAAQAEAAVEDDLESVERELGVGAGAGRSPVKRKAEVKLPESYEMLFEFFNCLESSTRLLRMKGSKATFPNICSSIQNLTERRFTHSHLAQLKYIMPEAIVINKILLRDDTTCCMYPDLQVNLLVGAVENVLKQKGETAYLALRRTFRQRLVEFYREHPEGDDIPEHELPHPFNRARSSLPQDEQRTAPESSSPLKPSDVNGQQQTAAVMSHMSQSFKRRFSQRSPIGSATASAPSPLVKAASTAPSPLSRNSLFGCVDSGSTCGDEKSSSAKEDFCKSGVSENTPAKFASTPARLMAPTPGLKTPKRPISATGYDTPPLRTAKRSARAKLFTTPTKNNSTGGESQSASVSGASADDDLLSFLPQSLLQSVKEKEDRALVEKESGFADQVRRQKLIASLPSTFDVVFLIYQSRQRSVMTKQELVHKIIASSPKIADRSEVEGHLTLLKELVPDWFSEKTARSGDALCCWGLLVLHVKKRRTRA

SEQ ID NO: 78170 - protein, 301 aa, Zea mays
  Coding DNA Sequence Number=SeqID_34795
  Homolog annotation: Hit_ID=A2Y9D1; Match level="QueryCoverage=67%, HitCoverage=94%, E-value=7e-21, Identity=37%"; Hit description =Putative uncharacterized protein
MGARRRFDEQTGRAPGSSELWQPQGESSAATVVTAAADRTTEEEKKRTTAARKEVTDVDDNRFSLSNSKVRCTPDCRSTPTLVMLARVVDRRASAIRRFPPGCGRPHKPAAGPPPYHRIPTAAAAKTKHTLPNPSARAATNTAPPPPRQTLSATASLGAEAPDRGVGSGRNAAAVVTVRLVSAVRGYPPGCGRGVAVSKSKPPDSEDEAEREDGAGNPSAVVGNGDPKARACDGDVMLRASALDHAEFSSNGGVTTGGDGDAGAHDEGGGKPWEVTGLMAAPFLPWARHERRSQRGSGGRP

SEQ ID NO: 78171 - protein, 223 aa, Zea mays
  Coding DNA Sequence Number=SeqID_34796
  Gene Ontology: Mol. function=hydrolase activity; Cellular component =cytoplasm; Biological process=nucleotide metabolic process
  Homolog annotation: Hit_ID=Q7XDP2; Match level="QueryCoverage=56%, HitCoverage=68%, E-value=7e-50, Identity=72%"; Hit description =Inosine triphosphate pyrophosphatase, putative, expressed
  Pfam annotation: Domain name=ABC1; Domain location=74-221; Score= -33.7; E_value=0.025; Accession=PF03109.7; Description=ABC1 family
  Pfam annotation: Domain name=Ham1p_like; Domain location=69-210; Score=25.4; E_value=5.3e-12; Accession=PF01725.7; Description=Ham1 family
  Pfam module annotation: Pfam domain module=ABC1::Ham1p_like; Domain location=74-221::69-210
MDYNPTVWCRRFPLAFPTFCERLISESLILGLVVRKIPDELVEHYLGHRSGEDFCEMGTSPGSGSRNVAALTTSTLGKNFDDMFEFFDVEPVGSASIAQVNGPVLVEDTCLCFNALKGLPGLNNLLKAYEDKSAFAMCIFSLALGPGEEPITFVGKTAGKIVSARGPNDFGWDPVFQPDGFEQTYAEMPKSVKNEISHRGKALALVKEHFASASYTVQSDDSA

SEQ ID NO: 78172 - protein, 244 aa, Zea mays
  Coding DNA Sequence Number=SeqID_34797
  Gene Ontology: Mol. function=catalytic activity
  Homolog annotation: Hit_ID=Q5VND8; Match level="QueryCoverage=55%, HitCoverage=39%, E-value=2e-21, Identity=47%"; Hit description =Putative uncharacterized protein P0710H01.2
MAPPLEDLTRVLAELASGLAQPPAGGGTFSSTDSLPASISSLAAALNPSGDGAAASSGTGVLDAALSLMCFDPLEVNSARVNCLVRTLVSVLSASVSCCVVRPDGDAAEEMLCVGSSVSPLDCRELLRSCAALVEKLGDCGGEIFVTGLSSDTLQSGMSNVTGSAHRFPWSDDVYYLADEPEVHFVWQPNQESSVLAMSRAFDDYYIMDCGVISALDVTQRRIDNNDQFVILATVGIAFVLACL

SEQ ID NO: 78173 - protein, 215 aa, Zea mays
  Coding DNA Sequence Number=SeqID_34798
  Homolog annotation: Hit_ID=A3CJ03; Match level="QueryCoverage=63%, HitCoverage=46%, E-value=2e-09, Identity=33%"; Hit description =Putative uncharacterized protein
MERRKGATEVKMTVDVGETIAKAAQNVEDQFSVGDWFAKASAMVLKRRYKVRGDGTGDPGLDNAVHACPVGEVRRGSVVEDVAVQGVFANDEEELIAPAGVVVVGEVEDDVNETPYVLDNDGLGVEVDDSSSLVKEDGVVDALVSTTRWIREVGLIVVGWNAIGGSLSSEGAAARAYCALESSANAFVATSRSWSAVAAFCSPEGLGRVQHRARR

SEQ ID NO: 78174 - protein, 187 aa, Zea mays
  Coding DNA Sequence Number=SeqID_34799
  Homolog annotation: Hit_ID=A2ZHP2; Match level="QueryCoverage=44%, HitCoverage=48%, E-value=1e-11, Identity=34%"; Hit description =Putative uncharacterized protein
MEGEVKSGGGNTQWTSSQSTFVQNFLANLVANGTKTSTGFKKDERNKGDDEFINKPLPYYGNLATIFGNSVASGQFAKTSNDPLAVDDEVGFLEQLLGGSRRFLQYGSDEGRVIGSSVEVLDHGRLRDLGDTISHGLEPFEVRPESFVPPALDGFEVPWLRRFVGEGLKVGGEASTEIAPVVDAVSG

SEQ ID NO: 78175 - protein, 95 aa, Zea mays
  Coding DNA Sequence Number=SeqID_34800
  Subcellular localization annotation: CTP_CleavageSite=89; ConfidenceScore=5.44e-01
MGSQNPTENSPLPSLILARATDCRGSRQSRGRGGPCGAQLPFGAGPSSTVTDAAPTGNRPTVSKRSMHACMHDRCPNASGADCLIRLKRAQSSDG

SEQ ID NO: 78176 - protein, 501 aa, Zea mays
  Coding DNA Sequence Number=SeqID_34801
  Gene Ontology: Cellular component=integral to membrane; Biological process=peroxisome organization and biogenesis
  Homolog annotation: Hit_ID=A2WXK0; Match level="QueryCoverage=95%, HitCoverage=98%, E-value=0.0, Identity=77%"; Hit description =Putative uncharacterized protein
  Pfam annotation: Domain name=Aa_trans; Domain location=32-488; Score =375.8; E_value=6.7e-110; Accession=PF01490.9; Description =Transmembrane amino acid transporter protein
MDKSGGEAAAAAAAADDVERRGGDYEQDEHERRGTVWTATAHIVTAVIGSGVLALAWSVAQLGWVAGPLALAGFACVTYYTSTLLAGAYRAPHPVTGHRNRTYMDAVRSYLSPREVFMCGVAQYVNLWGTMVGYTITATISMAQDALARSLTCPCAARASAIRQADCLRRDGAGAGARCDAPGTVLMLAFSVVQVVLSQFPGLEHITWLSVVAAAMSFAYSFAGLGLSVGHWVSRGGGGLGGRVAGAAAASSTRKLWNVLLALGNIAFAYTFAEVLIEIQDTLKSPPPENRTMKKAAMYGIGATTIFYISVGCAGYAAFGSNAPGNILAAGGLGPLWLVDIANMCLILHLIGAYQVYAQPVFASVERWAASRWPEAKFMSSAYTVSVSIPLLQRGSVTVAPHKLVLRTAIVGATTAVALAIPFFNAVLGLLGAFSFWPLTVYFPISMHIAQGKIARGTKWWCLLQALSMVCLVISVAVGVGSVTDIVDSLKASSSPFKIVG

SEQ ID NO: 78177 - protein, 79 aa, Zea mays
  Coding DNA Sequence Number=SeqID_34802
MTSTAPVALAPPEAESIACSLGSNPIPFYVYPLSSVPTAEERRHVALAAILSSPSPPLDPRYWFLAPTAVSWHIAYQAI

SEQ ID NO: 78178 - protein, 133 aa, Zea mays
  Coding DNA Sequence Number=SeqID_34803
  Subcellular localization annotation: CTP_CleavageSite=54; ConfidenceScore=5.81e-01
MRLFGSASGRLLAARSRSWSQTRRFSRRFSTTRFRRKPCGHLTPEAGVSWLRFRAPRTQPHPRRERSSPPVVVVAVCPYQLAVFVLGSNLQCKQDLGVLPDCLSVASQNLHSNEGDVHIYFPLRIITIVYVKQ

SEQ ID NO: 78179 - protein, 545 aa, Zea mays
  Coding DNA Sequence Number=SeqID_34804
  Gene Ontology: Mol. function=RNA-directed DNA polymerase activity; Biological process=RNA-dependent DNA replication
  Homolog annotation: Hit_ID=A3BQI5; Match level="QueryCoverage=30%, HitCoverage=15%, E-value=6e-13, Identity=30%"; Hit description =Putative uncharacterized protein
  Subcellular localization annotation: CTP_CleavageSite=59; ConfidenceScore=5.36e-01
MDHGRHAAAEDGPGQSMNHTKKGRHRTRGRRPRSRSAASLPPVDDDSSARLPSHQSAVVKNAGSAARPVCVLERARDLTLVENNLRHCALFVVVIGSRPPVTAELLAAEIAAEYELDPASFSVHRSVPEDFVIIMQNEQAVLRVFNNGAVLNSPSGSFKFIKWSRLAHAEAVSLPSFVSVSFEGVPLHAWSVETARSLLRAHCTALELHPDTVARLNFSSFRVLGWSRHPELIPVAVDLLILKPVQSFEVETTVKHLLAYQEVLEQEVSKEASLNGSSNLEEHIPAVKELNIGAMIEASEDNVESNGRRHEQACMVEAGASGLSGGCPSHSPLPVPSSPSSPLRAPAVCCSMGGCEKEQAIQVLPPGSPSRATFDMGGQKSALVDARTSSRLSRRSPIITYFRQRRKKDSQPSLLLGASPSPPSGAKEFIDKLTRPAGGILRAPVRRPRQGKATATEVVPRHNRRVAGAGVERLATPPPATQGKKHILKELGIVNAEETVTIRPKDLDEYARVFSKGLSEVQVTAMAALFDWSRPMELLQGGPIC

SEQ ID NO: 78180 - protein, 191 aa, Zea mays
  Coding DNA Sequence Number=SeqID_34805
  Homolog annotation: Hit_ID=Q5NA51; Match level="QueryCoverage=65%, HitCoverage=29%, E-value=1e-63, Identity=88%"; Hit description=Leaf senescence related protein-like
  Pfam annotation: Domain name=DUF231; Domain location=1-121; Score =80.8; E_value=4.4e-21; Accession=PF03005.6; Description=Arabidopsis proteins of unknown function
MALETWASWVKERIDLRRTHVFFRTYEPSHWSGLNQKVCEVTQQPTAEANGNDRREFGDILAGVVANMSVPVTVLNVTLMGAFRSDAHIGLWSHPNTILDCSHWCLPGVPDAWNELVFSHLLTNGLYPQELRAAWVLDYSLMEFSWAHVVLGWPGFMKLVSVVPGSILKPLEYQSVLGKTSMIRSNLLRCR

SEQ ID NO: 78181 - protein, 495 aa, Zea mays
  Coding DNA Sequence Number=SeqID_34806
  Gene Ontology: Cellular component=nucleus
  Homolog annotation: Hit_ID=Q8L4K4; Match level="QueryCoverage=96%, HitCoverage=96%, E-value=1e-171, Identity=64%"; Hit description=SET domain-containing protein-like
  Pfam annotation: Domain name=SET; Domain location=15-283; Score=40.8; E_value=4.7e-09; Accession=PF00856.19; Description=SET domain
MADAAAAAARRLRAFKRWMRAHGVVCSDALSLDVSDPLGVHVRAATPLRDGDLVATIPRGACLTPRTTGAAAAIEAAELGGCLALTVAVMYERAQGADSPWDAYLQLLPDCESVPLVWPAGEAECLLAGTELDKIVKQDKEFLCEDWKECIEPLMLSGELDVDPDDFSLEKYLSAKTLVSSRSFQIDSYHGSGMVPLADLFNHKTDCEHVHFTSASDASDSDGEEEEDDRSDASADDKPTTKNPTSSPPGSRANDEDLEIIIVRDVNEGEEVYNTYGTMGNAALLHRYGFTELDNQYDIVNIDLALVTKWCTSIFSGRHTRARVSLWRNLGYSGCTSQDTEYFEIAYDGEPQLELSILLYIINMKPDVYDKLICVAHGFVSDEEHETICNVFKFVKATSSNQNSEVNGLEKLPDVKKLLHSESVCSALLSLADMRESLYGSNTLEDDEEELHACCVVNERKLYHSLVLRVSERRILRRLREFASSGSKGRKRKHP

SEQ ID NO: 78182 - protein, 223 aa, Zea mays
  Coding DNA Sequence Number=SeqID_34807
MAERCQLPRSCVPPTTRRKDGGSPPSEGLEGGKTRRIREREGMVSFQGGHPPFKGGSPYLRPQPSRAESSPTHSKVLPHGAGAGSHTSCEPTQSRRSQTAARENFISFPKSPRSSKSEFGAKSYAHNTKSELLKNKSSIWDVRCTPDCPGPGKGDTPKRILPREGTRLRAPLLIRGSKAGPQKGSTAASDRVGPAPTTGQRFAGRPSKGFHGRLRLLGLCAHY

SEQ ID NO: 78183 - protein, 107 aa, Zea mays
  Coding DNA Sequence Number=SeqID_34808
  Homolog annotation: Hit_ID=A2WXK4; Match level="QueryCoverage=80%, HitCoverage=44%, E-value=2e-26, Identity=65%"; Hit description =Putative uncharacterized protein
MEGASITTSFDGLHNLLAAKISLRHRGYRGSVSVLGGSHNTKPSVYPVVGGTGDFLYTEGYVRSSPVDSDRPKVIYKLEIHLYWPPKVTGVQFDSGCVTLHSGTFFK

SEQ ID NO: 78184 - protein, 198 aa, Zea mays
  Coding DNA Sequence Number=SeqID_34809
  Gene Ontology: Mol. function=oxidoreductase activity; Cellular component=cytoplasm; Biological process=aromatic compound metabolic process
  Homolog annotation: Hit_ID=A3A066; Match level="QueryCoverage=91%, HitCoverage=64%, E-value=1e-86, Identity=80%"; Hit description =Putative uncharacterized protein
  Pfam annotation: Domain name=LigB; Domain location=1-186; Score =131.3; E_value=2.8e-36; Accession=PF02900.9; Description=Catalytic LigB subunit of aromatic ring-opening dioxygenase
MQLKYPAPGAPDLALRTKGLLEQAGFGPVKEDHSRGLDHGAWVPLMLMYPDADIPVCQLSVQSDRDGAYHYSLGRALAPLREEGVLVLGSGSATHNLRKMGPFDAPVPQWAAEFDAWLKDSLLDGRYEDVNRFEEKAPHGRVAHPWPDHFYPLHVALGAAGDGAKAEQIHQCWTNATLSYASYSRQVEQIDVVLDDKG

SEQ ID NO: 78185 - protein, 82 aa, Zea mays
  Coding DNA Sequence Number=SeqID_34810
MDRADSGHHRCRAVTFTGDRQNLPEPTLPLAGPLSPPGEGLPGEKREKARGIFCSVSDSEKMVAQGYNLKGIGFRKNPGVFR

SEQ ID NO: 78186 - protein, 339 aa, Zea mays
  Coding DNA Sequence Number=SeqID_34811
  Subcellular localization annotation: CTP_CleavageSite=70; ConfidenceScore=5.26e-01
MSSHSLHASRPSTSRAPEWGALTSLCLAVVGGTQLRGSWYLSAIARLQGFSSGSPAASPRRWSPKTVTTSSMVGRSEPSCGLCPALSFKDLHYPCWGGGRAEPELYLPHGFVGHPLLQHSGERVLTGLAEGADSNNAELVGRERRQLQRVGLAGSAGSSSAPGAPSRRTSGRRATRYEGPPKTSCAARAAFVFLGYPAFAPVRRLLRGGQWSPVREDPSGDLRVGRWLPSLTLRWWRLKKSSLPTRSPPPSALRASGSLALIACPRPSSGDVGEELVAAASALRSSLLLFGHSERRSLSLLPEWASASHQGFCRPAGPPMWGVVRTCGSGTGVPFVMAP

SEQ ID NO: 78187 - protein, 93 aa, Zea mays
  Coding DNA Sequence Number=SeqID_34812
MKTLTTFCGYHPLEMVMHPLGLFPAEKKDAPMWCNRVGRVTVQCISALYRLQALQSDAMAHLANIAQTTKLTLDSREDFVVDLCGGTARIIPT

SEQ ID NO: 78188 - protein, 909 aa, Zea mays
  Coding DNA Sequence Number=SeqID_34813
  Pfam annotation: Domain name=HR1; Domain location=472-542; Score=5.6; E_value=0.063; Accession=PF02185.7; Description=Hr1 repeat
MEVVELVPCARNKWGNWHEFWFYVAEGTVEDHPGLPVAEMCSHYYSAYPPFEVAEEDADEGALRCAAGLSSGRDLVEEFVAYGVWPLAHGWALGEVCPRQMPSCGGMLVRSPAFALDLHSRDPAAFVREAEDGAVRIVGRYVPKTEGQRSWDIRGSNDRLNRVFELNRLPYGGYPGQDDVDRRGKKPAAEAGDDPAPAAAPSSKKRKLGIATGGLGVSDGFARELMRTCAAPGGRMSSPELRESSARMLRNIAVVVSVVMDKDRQGAAQKRQAVVRLHEARPKRSRGTAKAAAPGGSQPTLAAKSAAPGSSRVPEAVKAAAGGGTKSVPAGAAKARELPPPGKRVADFATDISVDDYLVGSGEGQLVVVPPTVATAAAAVVPRAKGSALSAGGEIPALTAVRDEAGVVSRRLKEALSQAADFADRAASGALTAVVSAEVERLRAQHADAVREKSAADSKCRKLADKVAALEGERTDLWRQLAEERKEANEALAKAQSAQAEANLARAEGSLARQRVEELEERFNALQTRVERAEASTRSEAERTRKQLMDSYHELGARTADFEVLDREPGLCCLEWLQEELLALPAIVEGFMSYASLVTCEGAMNALSREGCRHYEVFDQADEDFEREIYKVEDPVVKESAGALFDRMWGPHGREVVRERSETARGHAARNEKVEDFGALNSVHPDSESNPVAVVPEAAPAPPPETVEGAPDAPAATAAGGGSSPTAAPRAEDPVKMAAEPAAEDPATAGSSQVQDFGPTHATATANFLAASTVDDGNESDESASKFSDFGDSGTSVEWTEESSDEDLDYFAALDVAAAEASPRAVDAEAVSGSSAGCRRRRAVAKRRVSEADGGRLRVGRVGRQELLSLPAAASAGEGELRSLFAGEELRIMLFNYREMGIIPKVEPM

SEQ ID NO: 78189 - protein, 24 aa, Zea mays
  Coding DNA Sequence Number=SeqID_34814
MAVKNRYRRDEAHGGCCEEFVREI

SEQ ID NO: 78190 - protein, 271 aa, Zea mays
  Coding DNA Sequence Number=SeqID_34815
AGELAADEFTRLRTWTGPIPATTAVEPYLTVTARTSRSQPCPSPDLSRRRVSDSEKWWRRGITEGIDLERTQASAFGKQTPQPNSCMSRGRGVDSSHQMTSHGSSDEGNAQSHTDGLAREGFPRILWEVLQGAGYTTPPQYAVQLFEKHRVPRCRVRMTLEPHPLQPGWRSLDSESFGYRAEDTIEAIALHGLTTFCGFHPLELPTHPIGLFPAEKEDDPMWKDRVEHAKDIWVRASSDCSLDGAVHECPVSSASDARRGNVSPNGIVGGY

SEQ ID NO: 78191 - protein, 99 aa, Zea mays
  Coding DNA Sequence Number=SeqID_34816
MAAHSTKRIDHDERGVQDETIAHLSGYGECANDDVSSRSQHRRSGLATLALWTCSGEEPRRDGEARVTVDSDCARARTDTVAAFVQGRGVSGAGTQMCV

SEQ ID NO: 78192 - protein, 99 aa, Zea mays
  Coding DNA Sequence Number=SeqID_34817
MAAHSTKRIDHDERGVQDETIAHLSGYGECANDDVSSRSQHRRSGLATLALWTCSGEEPRRDGEARVAVDSDCARARTDTVAAFVQGRGVSGAGTQMCV

SEQ ID NO: 78193 - protein, 142 aa, Zea mays
  Coding DNA Sequence Number=SeqID_34818
MTQSKQQHQPPLHRQQHWASCEIQNIDTHAHGLPVQNTHKGATIGQVVWWCFNAKAGVHVSIVNDKPRGILIGISLTLLRPCLGHAFSDERAIRSTDKIGAALVDCYGRDNFSSDSKRGGPWTRYGGGVGQDLGEGLDLMER

SEQ ID NO: 78194 - protein, 192 aa, Zea mays
  Coding DNA Sequence Number=SeqID_34819
RKNKGRKQRPRVRCALGSPEHARRAPACPASRQSPAGAMACARAYKAPRDFDRTPPHALDLTGAQTHRRLPVHGVSAAARSPCHRRPANRTLSNPVQPSEKTVHTSVKLPERGIGVCFAGEASPRSLDSTRPPASVDRVTVVWPEHPPPTRAPACARGPDDSGHPRRQAVHRCDRQDLPEPTPPLAGPLSPP

SEQ ID NO: 78195 - protein, 161 aa, Zea mays
  Coding DNA Sequence Number=SeqID_34820
MASGASVGRAWAGGWREYRVVYGSLGEDEQEQRDARFWRKYRVHCTWWAAGRESAKRAAGALLGRWLHRRLAREHWGGIGPSARTRLGSAARWAIQAWGSEVGLGHGNGARARGAGALGRARSACERGSCGQGARHGLRRLARGSRLTDEPSGSGKQVEGA

SEQ ID NO: 78196 - protein, 49 aa, Zea mays
  Coding DNA Sequence Number=SeqID_34821
MYGLQVVMRRMVMIMTMVAFGAIYSQVKKKENGVEVDLREFQDVNEFED

SEQ ID NO: 78197 - protein, 131 aa, Zea mays
  Coding DNA Sequence Number=SeqID_34822
  Subcellular localization annotation: CTP_CleavageSite=43; ConfidenceScore=5.43e-01
MALAPALPGAALPLPPCAARSARLLAPERPRRPTSSRPHPPILAMAAWPNRLWRAAMARPARPPAPGVPLLSPRPGVVAQRGVLRRPGSPPAPACLVPPASACSAPTRRGLELENDLVEEPEELAGEAPEQ

SEQ ID NO: 78198 - protein, 171 aa, Zea mays
  Coding DNA Sequence Number=SeqID_34823
  Subcellular localization annotation: CTP_CleavageSite=18; ConfidenceScore=5.30e-01
MKLWKETSRSSKITTSSRCGLAATPSRLPVKAALSTFLFRTLIYLSEMEKEPLDMVESSVRVIETHVDIIRSLVTDGVVDTSEPESVYTLKTTLFQIGDVCDMLEKCALSIKKYADSKRAKIIQDEALQYAEDDETADDLEELPSPDLLTQANILEKYFGIQYDSDQSRGC

SEQ ID NO: 78199 - protein, 143 aa, Zea mays
  Coding DNA Sequence Number=SeqID_34824
  Gene Ontology: Mol. function=ATP-dependent helicase activity; Cellular component=nucleolus; Biological process=nematode larval development
  Homolog annotation: Hit_ID=Q84T03; Match level="QueryCoverage=54%, HitCoverage=18%, E-value=3e-26, Identity=60%"; Hit description=DEAD -box ATP-dependent RNA helicase 27
  Pfam annotation: Domain name=DEAD; Domain location=11-111; Score= -31.7; E_value=0.0099; Accession=PF00270.20; Description=DEADDEAH box helicase
MVSSAGDTSSSLVKIESYMSAVKIYLKSLDIQLEKQLAKTWRSTRGYELVSNGIDNHLVSVNLNNKCLVIDEADRILEQNFEEDMKQIFKRLPQNRQIVLFSATQTPEATVEGLQQGYCVISSDKRFLVLYAFLRKKRNNKIM

SEQ ID NO: 78200 - protein, 274 aa, Zea mays
  Coding DNA Sequence Number=SeqID_34825
  Subcellular localization annotation: CTP_CleavageSite=44; ConfidenceScore=5.15e-01
MGMTSSTLAGLSPAAHPSDHRHSISVGRRQGIERSGLVRRWKAAGAAESGSRRGERGDAGCRGADAAGAPAATEVALRKAGARVWRRRHMVVDGWGWGLSVAAAEVEMDGRTVDNRDIRRGRKLVAQRSPRRVSGRGPRSGAQRTRPLMLCGGDDPGQECRGAKEAISFHGECGRGPRSPGLLGSRPTQASSRPRSGARGAVGDPRQPSSCDVVGRRCALMAASDPRIGVDGGERRWGIRGNLPSAGGWGGSASRYDGWAEPEPCGRLQLYLKQ

SEQ ID NO: 78201 - protein, 226 aa, Zea mays
  Coding DNA Sequence Number=SeqID_34826
  Gene Ontology: Mol. function=translation initiation factor activity; Biological process=cellular metabolic process
  Homolog annotation: Hit_ID=A3B590; Match level="QueryCoverage=100%, HitCoverage=100%, E-value=3e-64, Identity=62%"; Hit description =Putative uncharacterized protein
  Pfam annotation: Domain name=DUF567; Domain location=19-210; Score =142.1; E_value=1.6e-39; Accession=PF04525.3; Description=Protein of unknown function (DUF567)
  Subcellular localization annotation: CTP_CleavageSite=46; ConfidenceScore=5.07e-01
MTAKVHPNVAAPSPGLGQQPAVAPGDGEPAAVTLTVWRKSLLFNCRGFTVFDARGDLVYRVDSYASDSRAEVVLMDAAGRPVLTVRRRCRKLIGLVGLGLSSDQWLLYRGVDEARRLPPLYAMKRAAAQSQHMRGGAKSVAHVAACSAGAGYEVEGSYLRRRCTVYEYDGRRRAVAEVRPSPKEAVGSDVFRLVVRPGMEVSLAMAVVLALDQMFGKPSLLRSWSS

SEQ ID NO: 78202 - protein, 283 aa, Zea mays
  Coding DNA Sequence Number=SeqID_34827
MWVGEGSANGGGYRGSVGWSAGRSGCQDEPVNGAENASSAPSHHRVDVPGVAVDGDRVVYRRLGVSRRNVGSGWWGQLTAVIDDGGVGESGRARRRARVGGRRGSGVAAATVDEGGVGKSSRSRRGRAWRRRGRRGRAERQAGSTGPRVAQAGLTGPRVAQAGSTGPRVAQAGSAGPRVAQAGSTGPRVARKRSWGPHEEQSTDRATKLSGYPGEEVCEGGECVRLQPKREGPEKMGKIIQNHQIIFITRKTEYRGGPKVTMNQVKSLLSPRRSSKWETSMSA

SEQ ID NO: 78203 - protein, 371 aa, Zea mays
  Coding DNA Sequence Number=SeqID_34828
MANEHRMVMQGCTKTKCSTHLEKRKTSKNVIDAMKVHVTGRSNLDWSWMPIHWQQNKSNARNHVRKRDGFLEALSRLTHEQLRSSRWRDREEDANILDVFVPRVRQTFDTREQAYLFYLDYAKLVGFSVRTKRCNCWSGSKIVAFCRERAGGTKTKRRFGLGGAVGSDQVRIQLCGGGRAQRRRARSRKQRATHQAWPNMSEFGGTPLERHCPHQHQGPQKARCRRRRIILCLAFAVLVLLLLAAAAAIALLVMLRTRDLVTELLSVTATGVLPSVVRPAADRLRPPQRHLLPRGPRPEPEPGRVPPRRCRHVPLLPLRDRGLRRGAGPGRGHRPDGRHGAGRPGRGGRRGRPGGLVADVLAGEMEFEART

SEQ ID NO: 78204 - protein, 446 aa, Zea mays
  Coding DNA Sequence Number=SeqID_34829
  Subcellular localization annotation: CTP_CleavageSite=82; ConfidenceScore=5.81e-01
MAPPSSLLACARPHGLVQSSPARPRRPQPWPRRLVRGPGVARSRGRGASARPSPPHAVSARRPWRLARHAVPAPALCSRGPRCRRGGNETDGFGYDYGAGKWYSFRLERMARLRHTTRKTVIPFLPSRLAERPLRRPVAGQSSHLERLHHRLHEEQERRRQEQQGSSFSLQQEIESVRSCSPVLPLEAPPAPPLGAPASGVAAGGDPDDGGGDDSSSHDTDFSADQEPEGWVARSITRDAARGCHFHDALDILLRRALNRRTWSIEYRCVVYQHSRGVYLDCWEATCLVRRPENSLQGAEVRSEHYSISERDSAEAAMQDAARRALSHYCSVLGGVADGLNLKYYPRRPSGSTGGVIVSPVGEDNPRLSSTVNLAAVLNTELDHALDELSRARAEIAQLWAERVECRHLDGGSPAPVGTQHPYRSPRRGHQPYGNPDCKTKIDLEP

SEQ ID NO: 78205 - protein, 431 aa, Zea mays
  Coding DNA Sequence Number=SeqID_34830
  Gene Ontology: Mol. function=solute:hydrogen antiporter activity; Cellular component=integral to membrane; Biological process =regulation of pH
  Homolog annotation: Hit_ID=Q94DV8; Match level="QueryCoverage=79%, HitCoverage=39%, E-value=1e-147, Identity=77%"; Hit description =Na+/H+ antiporter-like protein
  Pfam annotation: Domain name=Caa3_CtaG; Domain location=126-329; Score=-132.3; E_value=0.078; Accession=PF09678.1; Description =Cytochrome c oxidase caa3 assembly fa
  Pfam annotation: Domain name=Na_H_Exchanger; Domain location=67-403; Score=127.2; E_value=4.9e-35; Accession=PF00999.12; Description =Sodiumhydrogen exchanger family
  Pfam module annotation: Pfam domain module=Caa3_CtaG::Na_H_Exchanger; Domain location=126-329::67-403
  Subcellular localization annotation: CTP_CleavageSite=45; ConfidenceScore=5.38e-01
MATVELPAAGMAGMLPPRNATAQVAPGNNFSNPASVVCYSPMMVTAYGIWQGVNPLEFSLPLFILQTAIIVATTRLLVLLLKPIRQPRVIAEILAGVILGPSVMGQVEVWGTTVFPVRSLLTLETVAHLGLLYFLFLVGLEMDVNVIRRSGKKALIIAVAGMALPFCIGTATSFVFRHQVSKNVHQASFLLFLGVALSVTAFPVLARILAEIKLLNSDLGRIAMSAAIVNDMCAWILLALAIAISEVNSSAFSSLWVLLSGVFFVLACFYGVRPLMWWIARRVPEGEAISDVHVTLVLTGVMVAGVCTDAIGIHSVFGAFVYGLVIPSGQLGVVLIEKLEDFVTGLLLPLFFAISGLRSPHQHFPGARSRHRGAPRPRVHHGQLRQGHGHHPHRCLLHHDLPRRRRPRLSHEHQRTRGDDRPQHRKGQGGQ

SEQ ID NO: 78206 - protein, 501 aa, Zea mays
  Coding DNA Sequence Number=SeqID_34831
  Gene Ontology: Mol. function=solute:hydrogen antiporter activity; Cellular component=integral to membrane; Biological process =regulation of pH
  Homolog annotation: Hit_ID=Q94DV8; Match level="QueryCoverage=82%, HitCoverage=48%, E-value=1e-159, Identity=70%"; Hit description =Na+/H+ antiporter-like protein
  Subcellular localization annotation: CTP_CleavageSite=16; ConfidenceScore=5.13e-01
MVLVSVAMTALVTPVVTSVYRPARRLVGYKRRNLQRSKHDAELRMLACVHTTRNVPSIISLLELSNPTKRSPIFIYALHLVELTGRASNMLAAHHSAANQNRGSSSDHIFNAFERYEESVGGVSIQALTAVSPYQTMHEDVSVLAEDKHVSIIVLPFHKQQTVDGGMEPINASLRGFNESILSAAPCSVGILVDRGLSAAAARMASVHHVALLFFGGPDDREGLAYAWRMVEHPGVCLTVVRFIPPDYRAPALAPPQHMPASSVHARAITIVPKSERQMDEEYLNEFRTRNVGNNAILYMEQVVANSEDTLAAIRDLDSAHELYIVGRHPGEAGSALTSALAEWMESPELGPIGDLLVSSEFSKMVSVLVMQQYVITTPQPAAVGPAAAAPVTDDPVRQYVTNANQRTSVAGLGVGGNQMGRGGWGGADGEAASRGPPDGSPAALRGLLQQPLLHAYEAKDPAACMDIRRPRGAAAASPPAVFKACGTLNFSLAVSVIKRQ

SEQ ID NO: 78207 - protein, 141 aa, Zea mays
  Coding DNA Sequence Number=SeqID_34832
AHEQRTDAWVADGDRINELRRDIRHLQDQLADRDLALDWAVQSRLLMCAKEARAQARVKELSSTVDNLQVYCNTLHEEVHVLYSQLHPSEPAQPEAEAGPSHVAGRALGGELDLFEPPPSLRLVDVWTPTPDDEAAKSNGK

SEQ ID NO: 78208 - protein, 39 aa, Zea mays
  Coding DNA Sequence Number=SeqID_34833
MALASPGRRRWAKPGAGGSRRGGGGALCGVGAGTVSCNL

SEQ ID NO: 78209 - protein, 288 aa, Zea mays
  Coding DNA Sequence Number=SeqID_34834
  Homolog annotation: Hit_ID=Q109A0; Match level="QueryCoverage=58%, HitCoverage=90%, E-value=3e-12, Identity=36%"; Hit description =Expressed protein
  Subcellular localization annotation: CTP_CleavageSite=40; ConfidenceScore=5.05e-01
MATAWVRSLSCRSSYAMTDAAIAPSPAKKPPPPPPLPFPCATAAAADVMDAVAYAQRARRKKMEGQRLAREPRPRPKKKPKPMANDAGAEALSTPSPAPVSSAFLTMAELPEGHSSRRVVELIFASGWGGAGSPELSPSPPPSVEALFRVRSAPRAVARFEEARAAAARARGAATRCGADGYEMMRFQCRAPVPAACRRGRRHLPPQRVGLGRAQFACSGADSRQLLQPHRGVVATEMLVCRVIAGSVLPATSGTDNAIARETRTIPEHGNGSCVSIATCPDSHCLKF

SEQ ID NO: 78210 - protein, 63 aa, Zea mays
  Coding DNA Sequence Number=SeqID_34835
MAEWVAAAEHMHSHIGVETRLGSLRLAHAISPARFGSSILRVRKSGSARLAPGERADSTNQRA

SEQ ID NO: 78211 - protein, 42 aa, Zea mays
  Coding DNA Sequence Number=SeqID_34836
MAGVIDLEQVMDDDVTEFRDLVDEVADKYPCDFGGTFVGTLN

SEQ ID NO: 78212 - protein, 299 aa, Zea mays
  Coding DNA Sequence Number=SeqID_34837
  Gene Ontology: Mol. function=transferase activity, transferring glycosyl groups; Cellular component=membrane
  Homolog annotation: Hit_ID=A7QVE1; Match level="QueryCoverage=56%, HitCoverage=40%, E-value=1e-31, Identity=41%"; Hit description =Chromosome chr2 scaffold_187, whole genome shotgun sequence
  Pfam annotation: Domain name=Exostosin; Domain location=3-235; Score=- 86.0; E_value=0.0014; Accession=PF03016.6; Description=Exostosin family
MKPKKKKGSTSTSFGLRAWYEETQPVLVPHRRAAPETRLLDRRRGQSRCRVRALLGYYAALDALPSCSIRAAGACDPALDVLPPVVSRAPPRHADALSGRGASRPSRPNIRGSILSECANRTDACVVVDCSGGRCAHDPVRYMRPMLRAVQVLPAAAGGDADAALHVRRHPRRLRARVLRGPAARRQYGWHLPPVRYGEFSVHMPKEAAVFGGVRIVETLEAVPEEEVRRMRQRALEMAPRVVYRRHGSTPELRQAVNDAVDLAVDGVLQRIRRRTHALEEGLPERLYAQEEDSVSVDI

SEQ ID NO: 78213 - protein, 646 aa, Zea mays
  Coding DNA Sequence Number=SeqID_34838
  Homolog annotation: Hit_ID=Q9AV09; Match level="QueryCoverage=70%, HitCoverage=94%, E-value=8e-51, Identity=42%"; Hit description =Putative uncharacterized protein OSJNBb0014I11.11
  Pfam annotation: Domain name=DUF863; Domain location=37-534; Score= -89.7; E_value=3.5e-09; Accession=PF05904.2; Description=Plant protein of unknown function (DUF863)
  Subcellular localization annotation: CTP_CleavageSite=64; ConfidenceScore=5.23e-01
MEDLNKFYASFWKQSSSSLSSLHSVHEHKLMNLGSKRNQTQEVSTNYNKRKSLSGIVELSSDVRSSIRRKSDAYREVIDLEKPSVYGDAVEAIGCSGLGNLANQNGKSQDVSPQNNSLAESLQLCRDWKTSRVSVGSVGSSHTPDCQSPTKTSNNEARQSLFDLNVPPEESLLMPSTLFPSSSTYCGNFSDRPRETSEKERVSGIGSTKGSSITVITPDSAADSSRDVVTESSVQQKFPFDLNVSPENTNMPSEINDYRDKVVNNGVSKGTAPDHSFSTKNGLLAETSTKHVVLGHDSVLAHKQDDSHVLLTVPTANGIDKAHSPQPGTINKEFLDPGSPLLDNNFHPRLGTSHNGASDIQELSMLQCKVDDGGTTADTAARTLLSMFQHSSECVAHRPGSSNQTAAQKVDDEPQPSLDSFEKTVLDSEEAKDDGQSVTVTPPFKEGPACRIKLKRGRGMRNFQREIVPGLLLGRQEICEDLKAIGYEAKKARSRKPRKGPEPVSFVARTFVVPVKARPDLDKDQHESIIQRDTETQAGCCWVLIAVQAAGQVYGCAWNNSRGPRGPERAGSGNWVRMVSVGVISWNTRGEETQGHVKSPVVGELALFPEGKEASQKGVRYQDMPLRDREVPTVVQVRCLRSARDT

SEQ ID NO: 78214 - protein, 344 aa, Zea mays
  Coding DNA Sequence Number=SeqID_34839
MQAACNRTKGAHPFDFDASNMKAQAHTSCNLRAGCYVQETAPPLTPLPCLLDCGTSTATRGNPAYDPTVPARHVGHGSVSRRRKRDSRNGQKWAGSKGGGRRAEAAVESSAKLTRHLWQEKRATLHLRHNDRVKKGPGKGDTPKGILLREGNGPRAPLLIRGSKAGPSEGFNSRLRALGLRARYWLEVRRSAPRKGSTAASGHSGSAPTTDQGAARIAPTDVPLDRVRLTAAKSGLRRHRKLRLARPRARTRARPRKTTNSTSPDPGLGLGLGPGRRRTPPRPTQGSDSASASADGLRLARPKGSDSTSTSEDRLNLDLGGASASPYPGLGPTTSQEGPSLPYP

SEQ ID NO: 78215 - protein, 268 aa, Zea mays
  Coding DNA Sequence Number=SeqID_34840
MVGRSEPGCDLGPALSFKDLHHSGWGGGWAEPELYLPRGFVGHLLPQHSRERALTGLAGGSDFDNAGLVGGERRQLQRVGLAGLAGSGSAPGAPSRRKSGCRAARTGGPPKTSRAARATFVFWGCPAFAPVRRLCTEVGAPLVREDPSGDLPVGRWLPSSVLRWWRLKKSSSPTGSPPPSAPRASGFLALIACPRPSSGDVGEGIVAAASTLRPLLLQFGHPERRSLSLLLERAAVGDLEPYCPAGPPMWGVVCTRGGGIGVPFVMAP

SEQ ID NO: 78216 - protein, 74 aa, Zea mays
  Coding DNA Sequence Number=SeqID_34841
MAVPGRRNLTRVMPRLTLSTARRRWCSSAACVEFGREGDLATGPTEAVVEDVQGAQRERLTGAAHTSAPLRVMR

SEQ ID NO: 78217 - protein, 432 aa, Zea mays
  Coding DNA Sequence Number=SeqID_34842
MAERGAGRAVLPLLWLSLSGRKNLRGRQEAERRTITRPSPGKGGRRFAFAKITAPKKAPSLLTDQRFEGWPSEGFNSRLRSRGPYTHYWSEVRRPAPRRVPRPPQATRAPHPLLIRGSKAGPRRVHSRLRHRARDDQGIPPEGGIEPSDPVARGPGLADHPQLTGDTMFGAHRGPGGCSRKPGSGQTVDSVNIPARELGPRPYTRATASSHEGTTRPAEALHEALRPRRSEITPPRPRGLHPAGALARTHRNKMQPRKAGPLAKKCDESLQASVNTPFEARGLLSGTIIRGTLKTPISQLVTPISIKLLRPDGARTRAKSRKTANSAPPNPGLGLGLSPGRRRTPLRPTQGSDSGSVPEDDELRFARPQGSDSTLASAERPPPRPTQGLGLGHGRQTRPRLRRSLHVARPRARASHVNRRHHHHPTPSRLGP

SEQ ID NO: 78218 - protein, 61 aa, Zea mays
  Coding DNA Sequence Number=SeqID_34843
MERRSDYGHFGSVDWGACVRIKLCANGGYRLRFRSLEGTPNYGPRQRKFFGRVAERTRPKS

SEQ ID NO: 78219 - protein, 339 aa, Zea mays
  Coding DNA Sequence Number=SeqID_34844
MEVRCQTSFCQNEDGFPKLLRACTVRLGIRSQPEYDGREFVEHGTEKCVVTVYIGSSPHHVEWSVTAAGHRFKDTCQVVARKALRALCQIYEEEVADTPLRFFPPFQRDRLVWMARMCALEGKQLLEDDSTVMYLTAYLLTLDAQYDFLARHHPQARATALESREVIAVEALKQAEDEHVQKLMEAYLVTHNQHRALRIQEPAPSNPVEPIKAEDPQILEGHPDSIRGEKKIWELPEGAIVLEGITVSPKAMDKQEYTESSQDPPLEMLEPLAMKKILAPSLEVKEEAASTPPAPPPSEELQEPVQLEEEFNPVLPSQSPPEEVININSLLTHPGDISD

SEQ ID NO: 78220 - protein, 70 aa, Zea mays
  Coding DNA Sequence Number=SeqID_34845
MGKDGVAGGDGGGCAAKVKWGGGGAHGGGHACGGHGLFQASRVSFPVSSWGSSQSEEKLHYPMHAEDWAY

SEQ ID NO: 78221 - protein, 78 aa, Zea mays
  Coding DNA Sequence Number=SeqID_34846
MEWKVFLKRKISGDISVEYLGNISGKNLKGITREISGRLFEEIELQQNLALRGIRLLIASADSGYSKIIFKLQLSLGS

SEQ ID NO: 78222 - protein, 128 aa, Zea mays
  Coding DNA Sequence Number=SeqID_34847
  Subcellular localization annotation: CTP_CleavageSite=45; ConfidenceScore=5.59e-01
MQAACNRAKWARPSDFQRSQHGGPRPCVMQPARRSLRASNCTATRATATPPRLRNQYRDSRQPCYDPAVPARRDGQYGQKWAGSNGGGRPRDRRRLWQGKRATLRLRHDDRVKKGTGKGGYPEKDPSP

SEQ ID NO: 78223 - protein, 85 aa, Zea mays
  Coding DNA Sequence Number=SeqID_34848
METESSLLGFGGLDDNPIKGLTSVLSVEQRQSIKPRMEARRASRYQVHGRRSRRLRNPKPRVKKKACKVKGDRVENIYGTSRITT

SEQ ID NO: 78224 - protein, 64 aa, Zea mays
  Coding DNA Sequence Number=SeqID_34849
MMGSTSEKIYLCQPPQFLSSWLQPPTPHQTLATPFPNPPPKVQPLSFGISIEWCKPLIGELVEE

SEQ ID NO: 78225 - protein, 226 aa, Zea mays
  Coding DNA Sequence Number=SeqID_34850
  Homolog annotation: Hit_ID=Q6JAD6; Match level="QueryCoverage=55%, HitCoverage=19%, E-value=2e-16, Identity=39%"; Hit description =Putative uncharacterized protein
MEKCKPIKTSMPTNGHLDLDAGACAMALLILLDTLTAESLQLHLTSRPCSDRLSQMGRDALRQISLQWPTVPDDDDDDFGILPLPPMPPRSHDHEARSSSAAPAGPPAIDPALSMILQSLTQQQAHLAVAQQQMSERMLPMFQTIEDRHDTLQQQLLADRAEHRAFMTHILQHTSVQLPPVQSAPLQLFRSLFSISAQPPVPPAPAVTTAVVAVSVTTSAPATPTA

SEQ ID NO: 78226 - protein, 62 aa, Zea mays
  Coding DNA Sequence Number=SeqID_34851
MDEGLKPKFFKLSELRFKRRVFTISEEKMSQDKKVAAETKLTEEEKLFEEKKIVDPYIAGFV

SEQ ID NO: 78227 - protein, 141 aa, Zea mays
  Coding DNA Sequence Number=SeqID_34852
  Subcellular localization annotation: CTP_CleavageSite=40; ConfidenceScore=5.56e-01
MPSKVPMMLSKTFFVTCIKSMIYAARLLRRRSRPRLRAVSARHAVAEPEPKRHRLRAGRPSPSPSATVSEAKRRRPRPRARAPPSPSAERAAVPISECATVPVPEPKRHRLRGQAPPSPSSSPSAAEPERLLRRRAHLRAL

SEQ ID NO: 78228 - protein, 262 aa, Zea mays
  Coding DNA Sequence Number=SeqID_34853
  Gene Ontology: Mol. function=helicase activity
  Homolog annotation: Hit_ID=Q1EPC6; Match level="QueryCoverage=98%, HitCoverage=17%, E-value=2e-33, Identity=32%"; Hit description=DNA helicase homolog, putative
MEDPTYSPEVVQPTADATKPDGSSVTACNWVIPEFVRTPFPPASTPAEVVGSFDMSTESIRRKHHVLRGERQAILAHRNQQFQASIARNVTTSNGDTIGDAEINNNDDDDDEDVIFGEDDDDDEGYIFASQCTYVNFYYDSKAYINTHVLVVVFQKISDEETSEDIEIDGTQHESTGTDVPDPYKKVYNNLPEETHMLKPVPNCGYCTGKKFEYEPPGFCCRGGKVDQLAPLDTPPQLMRLWDSADSDAKHFRDNIRFLMAN

SEQ ID NO: 78229 - protein, 133 aa, Zea mays
  Coding DNA Sequence Number=SeqID_34854
MPAARRGSTFFLGWFWLLANPSGTRSDLCKIPRGAQSNEHASDIGAIGGPNELHLRLCSGCSVPGRGAVANLVDQPACKQARSELPNNIRLALGFYPGPIPVKSLHPAPVFDPRLLTRGIFPRQSQACAGEKI

SEQ ID NO: 78230 - protein, 206 aa, Zea mays
  Coding DNA Sequence Number=SeqID_34855
  Gene Ontology: Mol. function=metal ion transmembrane transporter activity; Cellular component=integral to membrane; Biological process=metal ion transport
  Homolog annotation: Hit_ID=Q8SBD0; Match level="QueryCoverage=37%, HitCoverage=20%, E-value=9e-27, Identity=76%"; Hit description=Iron regulated metal transporter
MEGPRPYAPKSQNVCTIRPLVTAMCFHQLSEGMRLGGCILQAKYVARMKAGLVFFFSTTTTFGIALELALTKMYREHSPTTLVVVGLFVYPIVKKGLPKKIREVTDCYFLPRRSWPSALTTYDVVCAASFGAGMLLEVWINKRSKRTVALSGRWINDAPHALSWPLSNLEVSNAIVEKVADYALVWINRLLVVGHDITIKTDRKVL

SEQ ID NO: 78231 - protein, 125 aa, Zea mays
  Coding DNA Sequence Number=SeqID_34856
MWCKRGPKCYKKQSLHILCQRFIYNYTKSTVRNTVDYSGQEKPFGKTGQARTVRALAADRPRHKDVSRTEPMQNTSFHYRLSGGKAKTVRALARTVRPQARTVRSGRTVRTRRADRPRSAERPNG

SEQ ID NO: 78232 - protein, 261 aa, Zea mays
  Coding DNA Sequence Number=SeqID_34857
MLVLAVFKYYVVSWLRVSHHHWCEVLSQVSDLSNSPPCFYFASSSDGGTPKKAKVVVEDEEEAGLEDEEEATVTLSVEKDALECDICCLPFQSEVFMASQITMHCKNGHSDGGTPKKAKVVVEDEEEAGLEDEEEATVTLSVEKDALECDICCLPFQSEVFMASQITMHCKNGHSDGGTPKKAKVVVEDEEEAGLEDEEEATVTLSVEKDALECDICCLPFQSEVFMASQITMHVYIQYILIGRLQHDVLLCVKSVQERAF

SEQ ID NO: 78233 - protein, 156 aa, Zea mays
  Coding DNA Sequence Number=SeqID_34858
MVHVVESQVGLGHDLERTFTSPETGSALDISDRGCPNVTGYSGDDAFHNPSPRGLRYVTEPLASASTLSKKQAGTSQQQSTRPYRLQDINTSPHSMQPTPILQEAPLEPINRVVYGFSRGRRILHKSSRPLGIGTCLNQLGTLPSPTLLVNPIAST

SEQ ID NO: 78234 - protein, 85 aa, Zea mays
  Coding DNA Sequence Number=SeqID_34859
  Subcellular localization annotation: CTP_CleavageSite=18; ConfidenceScore=5.41e-01
MKPWKETSRSSKTTTSSRCGLAATPSRLPVKAAFIYVSFPHFDLFTITLVALATTVVLMGLVTYSFGILAIAGVLLSDWEFFDRD

SEQ ID NO: 78235 - protein, 115 aa, Zea mays
  Coding DNA Sequence Number=SeqID_34860
MPRTSCPRLRSRCLCPRRHHDSRLRVRRKILALPPNPAPAPLHELRHVFPAPRNPIPPALPASPQRYSCRVGLRTITLVALAVAVVLMGLATYGRPVWQLWSQFSRVGQQYAVQF

SEQ ID NO: 78236 - protein, 300 aa, Zea mays
  Coding DNA Sequence Number=SeqID_34861
MGHACVAFFSLLFEKRDLMGVGALQSSLGFKDFYHAARLHSLTNGSRIFVIRAEAEERIEWVGRLRVGRFPSSTRAAVMPRAGQPRPGPPRTVSCTGGSLNTSYATRAVLVFWDGLGEDGSEYLPVRFGAAVVRRRGVGGQVAAVVGAEVVVAIGLRLFGFNGWFSSSVRDRSPASRSELVIPQALWSGKPAEGAADAYIVYLETCPSNLRLLCDEAKLKAVVAWTEAMSARTEAFLAREQVASHVEEMQQWQLGFGQITHEQDQSRSQATEAVSRAEILGGQMAGASERLAEAPARIVV

SEQ ID NO: 78237 - protein, 255 aa, Zea mays
  Coding DNA Sequence Number=SeqID_34862
MTSHGSSDDGNALTHTDGLAREGFPRILWEVLQGVGYTTPPQYAVQQFEKHRVPRCRVRMTLEPHPLQPGWRSLDSESFGYRAEDTIEAIALHGLTTFCGFHPLELATHPIGLFPAEREDDPMWKDRVEHAKDIWAIYPGQTAHLTVRCMNALYRLQVMRGEAMSHLMALLEATKITLDNREELVVDLSQEMVEKDLQVEQLSTDIQELEELEIQDQEANEDVDIEGGDEPASSVDTAGSGRPPSPESSVASFAH

SEQ ID NO: 78238 - protein, 131 aa, Zea mays
  Coding DNA Sequence Number=SeqID_34863
  Subcellular localization annotation: CTP_CleavageSite=35; ConfidenceScore=5.00e-01
MARARSYKTLPDLDCTLPRTLKPHWSRARRRLPVRSESAAAHSLCHRRPASGAIPNSVQPSEKIVHTSVRLPERGIGVYFAGEASPRSPELSTPPEYVDREMVAGITWPSTLPPGWTVEWDPASAEEEHEG

SEQ ID NO: 78239 - protein, 143 aa, Zea mays
  Coding DNA Sequence Number=SeqID_34864
MDEKKGLKTASAIFEMCFRLLTFDIVIMYTTKQFKVKSNYKRVNNRYKYRTGLSKLWASSLAKSRPSFAQICVINLLPMLRALLGMSTKSDGDRLKFGLFTIFACVQPAFKNVAAVPREASRAQKSPCPAITSSSASTSPSMC

SEQ ID NO: 78240 - protein, 43 aa, Zea mays
  Coding DNA Sequence Number=SeqID_34865
MENRIEPLKLKVGIEEDPTPKRLQVARLRSSLCKRALVNPWAT

SEQ ID NO: 78241 - protein, 307 aa, Zea mays
  Coding DNA Sequence Number=SeqID_34866
MTAPVKAPSLPTDQRFKGWPPEGFDSRLRSRGPYTHYWSEAGPRRVHSRLRRRARDDHGYVRYITKAWAALPSSPETPCSAPIGGNMALSPLLLAERRHRGRLGGCSRKPGSGRTVDSVNIPARELGTRPYTRATASSHEGTTRPTEALREALRPRRSETTPPRPRGLHPAGALARTHRNKMQPRKAGPLVKKCDKSLQASANTPFEARGLPSGTIIRGTLKTPNSQLAVRPHWRHHRKLRFARPRARTRAKSPEDGELRSARPRARTRAKSRKTANSAPPDPGLGLGLSPGRRRTPLRPTQGSDSG

SEQ ID NO: 78242 - protein, 165 aa, Zea mays
  Coding DNA Sequence Number=SeqID_34867
MSFVLFDYFEKWILKTTEYTRHTLQDDLILQARVLTLEGGSSTLGIDDTFGEGLLRKSGPSRRLDRSLWGLGQPSSKGASPTRGLGWSTPASVPLTDDPAGLRPTRFHFRANSAPVHADIATPSLGSSKSGQGVPLTKLEKPQTTRPTEPRDSYASGIRIPHSSP

SEQ ID NO: 78243 - protein, 157 aa, Zea mays
  Coding DNA Sequence Number=SeqID_34868
MHRHRVKVRNMTPGSQFEPMGRGSRDLVPSLMCRDSIARSSRPRSHPLAQGPSLRAEITPPHRGASPALGIILANGSRRWGLTPRQPAYVLGSSLSGTIIRGTLKTPNSQLSEADRQSGPAGGTIGNSAPPNPGLGLGLSPGRRRTPLRPTQGSDSG

SEQ ID NO: 78244 - protein, 72 aa, Zea mays
  Coding DNA Sequence Number=SeqID_34869
MTIVLLLNELVYPEAENSEDDYHYSPVSSRSLEGKDLLLNLHQASRNMVPTLLQLRVEHDFPTDPKYFDISN

SEQ ID NO: 78245 - protein, 43 aa, Zea mays
  Coding DNA Sequence Number=SeqID_34870
MTTDMLLELLHMDLFGPIVYISIGGRKISNPRDLKGILKTRSK

SEQ ID NO: 78246 - protein, 214 aa, Zea mays
  Coding DNA Sequence Number=SeqID_34871
MAHPIDVASLCPRLGDVEAPPKPRSRLSSMAESEPPGRARRRSSAEARAVSEPWGRAKRSSSSSGAGPESEPWVGRSGVRRLPGLSPSPSPRSGGAEFAVFRGLARVRALGRAERSDTAVGVAQAALSFCQAGQWSGEVTAVTSALPEGARQDKGGLGRAGNTFAVGGGPRARRKSSGVGCPCPRLGSGELYADGGYQLRNRSLEGTPNYGPRQ

SEQ ID NO: 78247 - protein, 371 aa, Zea mays
  Coding DNA Sequence Number=SeqID_34872
  Homolog annotation: Hit_ID=Q67WV6; Match level="QueryCoverage=100%, HitCoverage=100%, E-value=9e-77, Identity=50%"; Hit description =Putative uncharacterized protein P0416A11.21
  Subcellular localization annotation: CTP_CleavageSite=44; ConfidenceScore=5.27e-01
MSAVVCGKRSSSIFADELLPPSPTSPHSSHQPAPKRSRRSPSHRGSSDGHRREALVHHLLLLFPDMDPQCNFRSDLVPEIGDDGALEAEMDRKIIGNEVIRGMYVRDDENELNPNGNVSMTLLEKALEASGDDLDSAIKSLNLLRLESAEAILSSTGFNENGQHTAIQPPVEELGHQISYVVSGFTFILKALKQFQDCIADSSINFAFLAGIPNGGVDTTTEHHPTVDNYQTSKNGSEWVELFVREMTNASDIDDARARASRALEALEKSIVERAGAEATQNLHKENMMLKEQLTVVLRENAVLKRAVAIQHERQKEFDERSHEVQSLKQLVLQYQEQVRTLEINNYALTMHLKQAQQSSSIPGRFNPDVF

SEQ ID NO: 78248 - protein, 127 aa, Zea mays
  Coding DNA Sequence Number=SeqID_34873
MDYASLSPGPWGPSNGFQGGLIELIEYPYQQGASSFLEACLERTSKLSVLGLEQFGMGDRPGKFSRVCMSEDIVHTKDPGWSVGTIYDPRELPGVSTASPGIGRGVTKKSPPQVGEMTPSTMEHSGR

SEQ ID NO: 78249 - protein, 639 aa, Zea mays
  Coding DNA Sequence Number=SeqID_34874
MKGRLTAGRLHAPCAAVRLPDRRLPRIWGSHNCGAVARPFFGSVCMTCGAWPPCHKVGTLVHVGGDFARDTSGAPASRWGVPVFSGGIRVRVVSSGDLIAEELALVVAPPLQGCSSSVLGRRTSRVEAPPSVWAGGPLLPPAFGGEGRSPVLRRRRTPDTRGRPSEAPSTAACLAPRPRWLWCHLQRCLLPLGRGMAVRPPHGRRSRRVRIGHTHGFSCVAGRTGGSYKTSYAVGAAAAFLDGLVLTPAVRTGARTSSHALGRPPFAGTTLVRRWPLSLVLRWSPPLVRLPTAEVVASADDTICATCRRTSGSLALMACLSPPVGRRRRGPFRSGVHADMITAAWRVVGVEVVATVDANVVASAGEPLGASYPAVLTGVEILSPRHSVAEHAGPRYGTRLSDYMGSGPPHGTGSRSLEPAQAVGPPYFRISGPKLQAWLLNSDVVMSDRWKPYGWLGESCGALLGLVLAVGLGPDPGSPPAFDTGALVFGCGHFRVYLLAAWIRGGIQKGFRRKAYFSSVDWGARGPSGVHLVVFTGVRASGEDILQVPFGRLMLEVPLSRGHLTIVHLFFARSAARWRVVLGKLLAPLTNAFREVNDLAILRGAMATVGVHGAWAAVTPLRSWAFVAVALAPSRGCDY

SEQ ID NO: 78250 - protein, 238 aa, Zea mays
  Coding DNA Sequence Number=SeqID_34875
  Subcellular localization annotation: CTP_CleavageSite=4; ConfidenceScore=5.10e-01
MPPLAQSSPPHSLSELEQASSSRLHDSRLCGPHRHSGSSPFHRRPSRYVPTLHSSSFPSVLPGDPRLTALSLPFLCAAFSHSATNALLDALTSPPASFCLPRSPQSPHIHSILGGFDPTIASQFFVQPWRRRSDGGECRVGPVPQRVQLLLCAHDGLTLPRVRGNPGVPLGVLGHGVERFGLEGGRLRMGEVATYCGLVVLLPDVTHLVLLALVSMDVVAVVDDADVWGWDVSSAGKG

SEQ ID NO: 78251 - protein, 69 aa, Zea mays
  Coding DNA Sequence Number=SeqID_34876
MVPVEKIPEHWPPITNGLASTVHSAMAQLEGAAQDIATRERMGHNEHLSKRSRDSKVVPKGIQSLGALM

SEQ ID NO: 78252 - protein, 270 aa, Zea mays
  Coding DNA Sequence Number=SeqID_34877
  Gene Ontology: Mol. function=protein serine/threonine kinase activity; Cellular component=mitochondrial matrix; Biological process=protein amino acid phosphorylation
  Homolog annotation: Hit_ID=A2ZRG0; Match level="QueryCoverage=23%, HitCoverage=4%, E-value=2e-22, Identity=82%"; Hit description =Putative uncharacterized protein
  Subcellular localization annotation: CTP_CleavageSite=78; ConfidenceScore=5.27e-01
MAVTPSGIFSVLALGWLGDHICVSSVQMSPTLLQSGLSTAAVWCRVPDTVSSQYQPLHRTPLSLCSGSLNVQCCRNLRETALKKGTPLARELDEKVCDALHLYIEARGINEKLFRFLQAWLYVKDHCNLVRWFKSVGSFISDQSQSKVMVGKRHGPVTALAGRAHPKSTIHLFPLILHLLGSASFKHRVVTGHVLLQLANLIKILEAPFQVLFKNLTVDIKDVKPTSLLKDRLREVEGNPKLGSLGPQLQYSKYASKFLKGLLYFISYLI

SEQ ID NO: 78253 - protein, 167 aa, Zea mays
  Coding DNA Sequence Number=SeqID_34878
  Subcellular localization annotation: CTP_CleavageSite=39; ConfidenceScore=5.58e-01
MTPRVPGASLFILLLSVPINSACRVAPPHSTPSSVSIARCTLSAGPPFNTPSRPASLPSPHDHLDPPNKVGLSPHGRCGGIDAHPGEELEAWPLLPLGIEFGPRHYTIAGKSYTFVFAMASASYCVNQFRGIGLQGIESWIPANPPPWGESVRRYLATRFGECWDDH

SEQ ID NO: 78254 - protein, 432 aa, Zea mays
  Coding DNA Sequence Number=SeqID_34879
  Gene Ontology: Mol. function=ubiquitin protein ligase binding; Cellular component=cullin-RING ubiquitin ligase complex; Biological process=ubiquitin-dependent protein catabolic process
  Homolog annotation: Hit_ID=Q6Z3T4; Match level="QueryCoverage=71%, HitCoverage=44%, E-value=1e-138, Identity=79%"; Hit description =Putative uncharacterized protein OSJNBa0025J22.9
MRRATHCSILSSPVKICSKMQSLTAKGYELVSNGIDNHLVSVNLKNKNRQTVLFSATQTPEATIEGLQQGYCVISSDKRFLVLYAFLRKKRNKKIIFCKAGKVILLCTNVAARGLDIPDVETSTLLATLEKIESWIFSRIVETMVAVFLWMFLFQALTPHMQKRAEGSPTPKSGRVLGPALGDQQQGTFSVNLWKAAFHDTFNRMCPLSAGGHECGCLPVLAKQVMEQCVARLDVAMFNAILRESASEIPTDPISDPIVNPKVLPIPAGDLSFGSGAQLKNSIGNWSRWLTDKLGIDHDDSEDIGEVEDERRAAAETKSFQLLNELSDLLMLPKDMLLEKSIRKEVCPSIGLQLVTRILCNFTTDEFCPDPVLSTVLEELNSESLMERHANKDATSVFPCTAAPIVYRTPSTLDATERAADIGGARQREQQT

SEQ ID NO: 78255 - protein, 97 aa, Zea mays
  Coding DNA Sequence Number=SeqID_34880
MRRQADFVRRVKVVVGLDREAGRDGVLKGGPALKVQRAMETELGVLCGGAARQALFMGTERRRMNREAPGTRGVIRSQPLGEIRLSPPFARDCSLII

SEQ ID NO: 78256 - protein, 200 aa, Zea mays
  Coding DNA Sequence Number=SeqID_34881
  Gene Ontology: Mol. function=pseudouridine synthase activity; Biological process=pseudouridine synthesis
MEEAVVVRSNKVKKLNVAVVRITFKKGCIKVSLAVCAAARAIRRLVALLATTSIQPRIIFNIASCIPDVYCILAAKQREYAYQDKSHVNGKNGKELLSIAKLQGEIRKASKRKLFAIQVSSECSNHDVLAGSIRTQKHHMRKINDVMGHGMRIHLLVSVVEGEIKEALRDHYDRHKRQLTKHDRSFSRRMISDYLACVGL

SEQ ID NO: 78257 - protein, 26 aa, Zea mays
  Coding DNA Sequence Number=SeqID_34882
MVFVVSKPVGNFFAFDMPLILNSISS

SEQ ID NO: 78258 - protein, 106 aa, Zea mays
  Coding DNA Sequence Number=SeqID_34883
  Subcellular localization annotation: CTP_CleavageSite=72; ConfidenceScore=5.44e-01
MAILGRTCPDENPLRAQFRPDTTPPLSCPSRTTLNVGPTPRPLQSVRHPSAAASPPSASSGLYLEQNGVWVVASGNESARERAGKWQTNMEGLPDLGNEGGGGRSG

SEQ ID NO: 78259 - protein, 180 aa, Zea mays
  Coding DNA Sequence Number=SeqID_34884
  Homolog annotation: Hit_ID=A5USR8; Match level="QueryCoverage=30%, HitCoverage=5%, E-value=9e-08, Identity=50%"; Hit description =Putative uncharacterized protein
MLERRQRRHPSLEAFAAAAGPPEAKRAGTPFAGLGALTKACGDDLTRRGLVQPQGPPESKFQHSESGSQQQASAGLDAGDLPPPATVEVAPSGPQVPPATTEAAPSGPQVPTATAEVAPSGPQVPAATSEVAPSGPQALAGGPVATAPPTATADPTAAAMSSTIPSATAEDAGGVTEPPK

SEQ ID NO: 78260 - protein, 667 aa, Zea mays
  Coding DNA Sequence Number=SeqID_34885
MDKDRQAAARKRQATVRVHEARPKRQRGASKAEASGGGKPPLPAKAGASAPGKAPEATVGAGGPKLSKVVPSASGVAEAAKAARSLPPPGKRVADFGTEIDVEDYLGGLDEGPLALVVPGAAVATAAPAPKAGVETLGAGGEVTALALVRDEADAATRRLKGAMEALSQVADFTSRTASGALTATLSAEVERLRTQHADAVREKSASDSKCRKLAEKVAALEKEKADLRRQLMEERREANEAIAKEQSAQAEARLARAEGNVAKELAGELQRRLAAFESRAEGAEAAARAEAERTRTQLMTSYRELGVRTSDFEVPEREAGLRCLEWVQEELQELPTVLAGLMSFTSLVTCEAAMNTLSREGCRHFEALDQVDEDFGRDIFEVEDPVVKESAGALYDRMWGSYGQEVVRARAEAARAQAERGERVDDFGALNSAPPEPETTPAEAATGVAPVTAEDAPGALVPAAAGEGLLPRVAEGASDAPAAAVPGAEDPAETTAEAAAEAPAAAGPSQVQDFGPAHATATTGFLAASTAEGGNECGGSVSEFFDFTDSGSSAEWTEESSEEDLDYFAALDEAAAEAALHAADAPGVPGPSTGHRRRRAVAKRRISAEEGARLRVSRVGRQELLSLPAVSGVGEGELRSLFAGEELRIMLFNYREMGIIPKVEPM

SEQ ID NO: 78261 - protein, 118 aa, Zea mays
  Coding DNA Sequence Number=SeqID_34886
  Pfam annotation: Domain name=HR1; Domain location=46-116; Score=4.6; E_value=0.077; Accession=PF02185.7; Description=Hr1 repeat
MEWREFEKISRFEFLGCYKHADAVREKSAANSKCHKLADKVVALEGEKTDLRRQLAEERKEANEALAKAQSAQAEANLARAEGSLARQRAEELEERLNALQTRVERAEASTRSEVERR

SEQ ID NO: 78262 - protein, 303 aa, Zea mays
  Coding DNA Sequence Number=SeqID_34887
  Gene Ontology: Mol. function=protein binding; Cellular component =nucleus; Biological process=ubiquitin-dependent protein catabolic process
  Homolog annotation: Hit_ID=A2YI48; Match level="QueryCoverage=41%, HitCoverage=70%, E-value=2e-12, Identity=40%"; Hit description =Putative uncharacterized protein
  Pfam annotation: Domain name=Skp1_POZ; Domain location=134-195; Score= 59.9; E_value=8.6e-15; Accession=PF03931.6; Description=Skp1 family, tetramerisation domain
MDAVGEKKGATAASDSEAEKEKMMAEQFEKAVVVSEAETGKEKAVAPSEAENEKMVEVQQGDKAVAPLDAGNVKMVEGQQGGKGKAVAPSDSEQGDKAAAASGAENVQPQEENAVAASEAEIGAAEANDVTGGRLITLRSSDGEVHRVSEAAARLSGLLRGIIETNVTVTKGVILPTVDGTTLVTVLEYCNKHAEAEAAAGVTTSAVDRAAASEALEAWDRDLLDRLSVRALSNLFNASSFLKIYRLAGAIALKVAADLARAIPPAESRPRSPPSPTSETPSTSTPSTSTPSPRRNRSRRPQR

SEQ ID NO: 78263 - protein, 41 aa, Zea mays
  Coding DNA Sequence Number=SeqID_34888
MAGSEKVAVVRVMPEPRIRALTKQCDHEDPKNHPGNWNLKC

SEQ ID NO: 78264 - protein, 56 aa, Zea mays
  Coding DNA Sequence Number=SeqID_34889
MSAWTEAESSRKEASSAQEKVASQAEEVQQRRLGLGQVVRERDQPWSHAAEAEQFV

SEQ ID NO: 78265 - protein, 52 aa, Zea mays
  Coding DNA Sequence Number=SeqID_34890
MELGLRLKADVITLLFVSNSTNYPSDSWVTKDPQSRALLLATIQTSTVYREN

SEQ ID NO: 78266 - protein, 109 aa, Zea mays
  Coding DNA Sequence Number=SeqID_34891
MALLDPPERLQPEVAQLGARPRGGGALPPVLSFKDVHQPCGGGERAGLRLRLPHELVTSLFLQHSEERMITSLVKVGGELWLRGTDQTASAVCRRASTSLAWMVLSSSL

SEQ ID NO: 78267 - protein, 531 aa, Zea mays
  Coding DNA Sequence Number=SeqID_34892
MRAWADQPLARGLGPTSHAPWASASVCGEGKPSREEYATACGSAPLRLRRNQRTSLCHGGPGPRVMLFGCRPPCAEKANRRVRSTPPPVVVRLFTSAERRGPVCRVGNTPPPAIVRLFISDENNGPTSGMGARAHESSSLGAVSWVQGSQTAARASTAPPRGRRRRQKNFQNQCSEIEAPRACPKQKHQVRRSRVSQLRGHAWQWACSKAGWQIITTASARKQHANRWSNFGPTCRLVSSPEAGLGATVGTLNQGSEATTRPEETISPKVSTVGPDPSISGTDLRAGSEASAGGGPEPTRVRTMPCTLMLPAQAETRCCHVAYCPRRDVPPRHLMSPVTPLAGDVPPQHLMCPVHSADGRQPDHPAGGVPIHSVGRRYACIAAYTVLIFTCTLPVKLPPHADTTVGVSDPGGPSTELTSEFIAACPCLDGLAQDGTQGGNANVAVREVPEPCRSTVGELPVAPEAELGCCQPYPGGWHNSRSGVSGAVFLSDRSVKGRSDCGHFDLADYGTRVRIRCQAIFALNAPAIWSA

SEQ ID NO: 78268 - protein, 318 aa, Zea mays
  Coding DNA Sequence Number=SeqID_34893
  Gene Ontology: Mol. function=ribonuclease H activity; Biological process=DNA integration
  Homolog annotation: Hit_ID=O48967; Match level="QueryCoverage=88%, HitCoverage=82%, E-value=5e-82, Identity=48%"; Hit description =Putative uncharacterized protein
  Pfam annotation: Domain name=Retrotrans_gag; Domain location=112-236; Score=27.3; E_value=5.7e-05; Accession=PF03732.8; Description =Retrotransposon gag protein
  Subcellular localization annotation: CTP_CleavageSite=28; ConfidenceScore=5.43e-01
MKQWRDNVDLLLGMAHSTSTRSRPRPSRCQHEASASVRSPSVGGAQTNDLRAELNRRRAREDARISLERARERRQNIEGCNLDQDFAAVGPQPPVGARFQAGVPLADVGCIALADHLCAASWPSKFRPHLPEKYDELCARFIANFASAYQQHDVEAHLHTVRQEPRETLWTFTSRFTKCARAAEGRAWHSAPQAGVTQTGGSGAVPRDGKKKKKGRGHEKPQSTAIVVAAATGGRGNHNKRSRPQRGNSGSCPVHPNSRHSAAECREIIDLAKRVSEQHEQSSKDGPHLIADLARKGSTTARWPRLNETSGISHPRGS

SEQ ID NO: 78269 - protein, 348 aa, Zea mays
  Coding DNA Sequence Number=SeqID_34894
  Subcellular localization annotation: CTP_CleavageSite=64; ConfidenceScore=5.01e-01
MGAIKSRLGPLKGHDLASPERSLGQGEPTSKDSRLARGPPQATDTPSARPRPSLRQEATLARVRLTAAKSGFGRHRKLRLARPQGSDSASAPKDDELRLARPQGSDSASAPEDDELRLARPQGSDSASAPEDDELRLARPQGSDSASAPEDDKLRLARPGARTRPRPWKIDSTSTSEEPPPRPTQGSDRPHHGGGIITLPLASSGYGEQDRRPIWLAPVVLLVQAILRQGLHFRCDYSIVIQISSRATSRSVFLGKGNFQLVSKLGSPVENETENVEEKNICYFYTCLNKEDKTILMKLLRRNEEQGKTLLSLEETLIMTQGHLEKMTKNMRSNSALMMIWSNGMIRF

SEQ ID NO: 78270 - protein, 76 aa, Zea mays
  Coding DNA Sequence Number=SeqID_34895
MAQWLTPVYARWRSEGVRRPWTGLSGEADFDSSLGELHRARPSRKYANLGKNPARVFSWHLGLSLIRESPWQICPR

SEQ ID NO: 78271 - protein, 129 aa, Zea mays
  Coding DNA Sequence Number=SeqID_34896
  Subcellular localization annotation: CTP_CleavageSite=46; ConfidenceScore=5.24e-01
MCTRNQRMGQRFTRSTFTGDRVKSGDRGLASPAKQSPIPCSGSFTEACMVSSEGRAWLGRALLAGLWWQGLRWPRACRAWGKCQWFRAPVALQWVSGHISVAETHGTHHEQLTCVVATSIDRLQVHKFP

SEQ ID NO: 78272 - protein, 242 aa, Zea mays
  Coding DNA Sequence Number=SeqID_34897
MSTCAASQKRGRDVDAASSPLWVRMDTEFLAIQGHLKRAKNYALAPRRQRSSPSGARRGVSSTPRRTTSQPKAATEAAYQTRITAPEAISKQQHHLYPIPPAVPDNKLRPAEASTSSSQKRGRDVDAASSALQVRMDEELPVLQGILKKVKPLLPSTFPAADEKNYAPSPVGRSSTSGSPIVSSTANTTTSQPNAETEFVYQKEREEFRQMLMEMEKSALPDETIYPKDLEELGLSRHWYMS

SEQ ID NO: 78273 - protein, 295 aa, Zea mays
  Coding DNA Sequence Number=SeqID_34898
  Gene Ontology: Mol. function=kinase activity
  Homolog annotation: Hit_ID=Q6QP54; Match level="QueryCoverage=43%, HitCoverage=38%, E-value=2e-27, Identity=60%"; Hit description =Putative kinase
  Subcellular localization annotation: CTP_CleavageSite=72; ConfidenceScore=5.70e-01
MRLPSPTAWPPRPPVARPNGPQRRGLPGPVVGLFGPRGVAFLAPRARPLGPCTRSSWPRCVAPTLDSVAPRRAAPGPQQLSPSRLAKRPRWVERVGEREGGKARWPETGVREVEIPRPSCSSRAQVGRKERIQVYNGDVAECYASSGGRASALSTCQCGSRRDLGTLLLRAAVVTGLAGRHHCLSGGASQMGHRSCSLRPESARGRVMMALPVDVAGLCPRSGDVEAPLKPRSSLSSMAEAEPEPLGRARRRLSGRGQGGVRALGSGEAEFVVFWGLARVRALGRAERSSPSSGA

SEQ ID NO: 78274 - protein, 100 aa, Zea mays
  Coding DNA Sequence Number=SeqID_34899
MEPGGGTSVGAVESLLTSPCFRLCPRSGDVEAPPKPRSSLSSMAEAEPEPLGRARRRLSGRGQGGVRALGSGEAEFVVFWGLARVRALGRAERSSPSSGA

SEQ ID NO: 78275 - protein, 82 aa, Zea mays
  Coding DNA Sequence Number=SeqID_34900
MAGGGELAGSKGGCLASEGAKGSTQTNKKVQVRVQKKGAKETEENPGLAHRTVRCATGQCSVHQGGSTRTRHLRVSGKATRL

SEQ ID NO: 78276 - protein, 64 aa, Zea mays
  Coding DNA Sequence Number=SeqID_34901
MSGNMVTVGVSGALYAKAVRSGRERGIDGDDPDAKQLHGLELPYEVMTPLQAAVAGVQKCLVGK

SEQ ID NO: 78277 - protein, 618 aa, Zea mays
  Coding DNA Sequence Number=SeqID_34902
  Gene Ontology: Mol. function=protein serine/threonine kinase activity; Cellular component=mitochondrion; Biological process =protein amino acid phosphorylation
  Homolog annotation: Hit_ID=A2YIL1; Match level="QueryCoverage=78%, HitCoverage=60%, E-value=1e-159, Identity=50%"; Hit description =Putative uncharacterized protein
  Pfam annotation: Domain name=Pkinase; Domain location=281-453; Score=- 86.6; E_value=0.002; Accession=PF00069.16; Description=Protein kinase domain
  Subcellular localization annotation: CTP_CleavageSite=52; ConfidenceScore=5.14e-01
MASGGGGIRATTSGRMKPRGWGDSSDDFGTTAIALRRGATVVARRSPPPKSREMGAWGRWAGKPGGGMTLWTLGERGREYHGVGGGGSGMAGGGRPNPKLAVIRYGAEVTQLGAIAYDAELLRGGGERWHEVGVRMPELRSSTRQACLRSKKLEDLQLGEPPAKPVSPAPPRAGKRAPTRAARGRKGATGKGVPPAPTTRRKRGNIVDLEADPACEDPPKAVKGLEVAAAAAPKNLPLKEVAEVGVLKMNGVSAEKIIGAEDESTATPVPERVQVGNSPEYITDRKLGKGGFGQVYVGRRVSGGAARTGPDAYEVMDMLGPSLWDVWNSMGQAMTPNMAACIAVESISILEKLHSKGGTIRYASVHAHLGRTGSRRDDLESLAYTLIFLIRGRLPWQGYQGDTKSFLVCKKKMATSPEMLCCFCPAPFKQFLEIVTNMKFDEEPNYAKLISIFDGLIEAPASRPVRIDGALKDWIMEQWEKSYYITAIAGSTNGSSLVVMSKGTPYTQQSYKVSESFPYKWINKKWKEGFHVTSMATAGNRWGVVMSRNSGFSTQVVELDFLYPSEGIHRRWESGYRITSTAATNDQAAFILSMPKRKPMDETQETLRTSAFPSSHVK

SEQ ID NO: 78278 - protein, 72 aa, Zea mays
  Coding DNA Sequence Number=SeqID_34903
  Subcellular localization annotation: CTP_CleavageSite=24; ConfidenceScore=5.23e-01
MAGSAAPCAAPCAAPCAAPCAAPCAAPLPRRFGRPLPRRGLERFLECLSVRTCSMDDRPGKQCNHKGGMGCP

SEQ ID NO: 78279 - protein, 64 aa, Zea mays
  Coding DNA Sequence Number=SeqID_34904
  Subcellular localization annotation: CTP_CleavageSite=16; ConfidenceScore=5.12e-01
MAGSAAPCAAPCAAPCAAPLPRRFGRPLPRRGLERFLECLSVRTCSMDDRPGKQCNHEGGMGCP

SEQ ID NO: 78280 - protein, 389 aa, Zea mays
  Coding DNA Sequence Number=SeqID_34905
  Gene Ontology: Mol. function=UDP-glucose:hexose-1-phosphate uridylyltransferase activity; Biological process=galactose metabolic process
  Homolog annotation: Hit_ID=A2YIL0; Match level="QueryCoverage=92%, HitCoverage=86%, E-value=1e-136, Identity=68%"; Hit description =Putative uncharacterized protein
  Pfam annotation: Domain name=GalP_UDP_tr_C; Domain location=244-389; Score=-61.2; E_value=0.054; Accession=PF02744.8; Description =Galactose-1-phosphate uridyl transferase, C-terminal domain
  Pfam annotation: Domain name=GalP_UDP_transf; Domain location=9-233; Score=-52.7; E_value=0.012; Accession=PF01087.13; Description =Galactose-1-phosphate uridyl transferase, N-terminal domain
  Pfam module annotation: Pfam domain module=GalP_UDP_tr_C::GalP_UDP _transf; Domain location=244-389::9-233
  Subcellular localization annotation: CTP_CleavageSite=60; ConfidenceScore=5.04e-01
MAAAEASRTSEARRDAVFGRWVVFSPARSRRPTDLKSHNPTNPSPGPGADAPPKPSCPFCAGRESECAPQIFRVPPDGSLPWRIRVIQNLYPALRRDVDPPPVPEAEGDVSSDEPGERAVPGFGFHDVVIETPRHDVRLWDLDAEGVRDVLLAYAERVRQLGEHPAVQYVQPIAMLVIMVCAGGLSVLCRYVVWCSSRVYRKDIGVVFKNHGASAGASMAHSHSQMLGTPFVPPSVTTRLNCMKEIFDRSGNCSLCEIRPKDILISETPNFSAIVPFAASYPFEIWIIPRQHISYFHEIDQDKALDLGSLLKTMLQKLSKQLNDPPFNFMVHSAPFKISSSCLPYTHWFLQIVPQLSVVGGFELGSGCYINPVFPEDAAKILRELDCSV

SEQ ID NO: 78281 - protein, 301 aa, Zea mays
  Coding DNA Sequence Number=SeqID_34906
  Gene Ontology: Mol. function=protein binding
  Homolog annotation: Hit_ID=A2YIK9; Match level="QueryCoverage=68%, HitCoverage=73%, E-value=8e-91, Identity=70%"; Hit description =Putative uncharacterized protein
  Subcellular localization annotation: CTP_CleavageSite=66; ConfidenceScore=5.85e-01
MALASQVAANQPPPPTLSSPARRLPRASSNALLLLQPAAAVLGGRTLRLRPPGARRRALDAVVVARASSEAKAETAEAGGGGGGAEEERPYEEYEVTIEKPYGLKFTKGRDGGTYVEAIQPGAAADLTGQFEVGDKVLATSSVFGEEIWPAAGYGQTMYCIRQRIGPLYMKMERRFGKWDGAGDLTEKEIIRFERNSGVVSGRVREIQLQNYQRKMEQKMQREEDLRMGLKLYKSVEAALSALEDALKSGYEDFKAVRTDPDLANLRKSEEFEPLLKNYDESFINENAINAIKSLFGLGNK

SEQ ID NO: 78282 - protein, 584 aa, Zea mays
  Coding DNA Sequence Number=SeqID_34907
MSFVLFDYFESIPENDGVHARVLTLEGSSSTLGIDDTFGEGLLRESGPSRRLGRSPRGLGQPSSKDVSPTRGLSWSTPASVPLTDDPARLRPTRFSFRANSASVHADTATPGLDSSKSGRGVPLTKLEKPRTTRSTEPRDSYASGIRIPHSSPLHGVRTTPLDGGPAEQQKTDERRAVARSSGGDDDDFCSGGPNSGSDDLRADAAARRPPPMPKLVRQGRAEGRRVGGRSVGGPGYLVGGRTSSSCRGRRRHRERLRSHSRPRARHAAAAGATDNNRPSPRSLREGAGRRPRRGWPQLSTLPSPALPGCMMKILEAERWLKGTNSHGVAFLQRRGEKTAGIPHPGAWKLSRAESSPTRSKVLLLRRGGWVPHVMQAGSEQKKPNRRARCVQPPNGYKRPSTFAQTSGRKGGQPCRRHATAPSGRTSPTPNTPGMGAQAHASCNRRVECFVHATAQPLAPPPRLLDCGTNVATRGDPAHDPAAPAWRDGIEKGDTLKRILPCEGTRLRASLLIRGSKAGPSEGFDSRLRSRGPYTHYWSEVRRPPPRKGSTTASGYSGSAPTTDQGFEGWPPKGSQPPQTQSEG

SEQ ID NO: 78283 - protein, 101 aa, Zea mays
  Coding DNA Sequence Number=SeqID_34908
MSGAPEDSNANLPPSGISRGDSAIIHRTVRCTPDSVRCAKEGRPQELASFGKLQRLVRYNSPDCPVLVVGRSSFKMSPIDDLVCFGKSIAVRASPCFEFDR

SEQ ID NO: 78284 - protein, 105 aa, Zea mays
  Coding DNA Sequence Number=SeqID_34909
MDITSKLDIAKVILGCVARRQLIKPRTEARRASRYQVHGRRSRRLRNPRPRVKKKACKVKGDRVENSYSTSRDVGAKKCQSRSSQADLMIYESNIKAQACEMLWM

SEQ ID NO: 78285 - protein, 97 aa, Zea mays
  Coding DNA Sequence Number=SeqID_34910
MDITSKLDIAKVILGCVARRQLIKPRTEARRASRYQVHGRRSRRLRNPRPRVKKKACKVKGDRVENSYSTSRDVGAKKCQSRSSQADLMIYESNIKA

SEQ ID NO: 78286 - protein, 138 aa, Zea mays
  Coding DNA Sequence Number=SeqID_34911
MSHLMALLEATKITLDNREELVVDLSTEMVEKDLQVEQLSNDIQELEELVGTRENTIEPIKRSSFGFNKGAKRQPKAPLVWGTGLSGVHRTVSGAPPDSVRCTRGLQLELATFGNSSGRRAIIHRTVRCTPDSVRCSK

SEQ ID NO: 78287 - protein, 247 aa, Zea mays
  Coding DNA Sequence Number=SeqID_34912
  Subcellular localization annotation: CTP_CleavageSite=53; ConfidenceScore=5.44e-01
MGKPVPSLLMLLLSRGPPSQQNPPEGLPTLTTPLLPLPLSGKRRGSVLTLMLRLSQRPDPTALRKRYTTASNSGVLVHQHSVPRPPAPHPRPGETTSHGAEEAAATSARFHNSEPRRLIPQTRPWQFRRRWPARYNKMGWMHEGIAALGVYTRDDFVTAREEVKIRSVERAMRTASVTGSKRRRRSRWWCGNLARGSALPETAHELGVLVGRAGEESRYGPKWVCAAHDQGLSFSFIFPALFHPLYL

SEQ ID NO: 78288 - protein, 196 aa, Zea mays
  Coding DNA Sequence Number=SeqID_34913
  Pfam annotation: Domain name=RVP_2; Domain location=113-195; Score= -45.4; E_value=0.0036; Accession=PF08284.2; Description=Retroviral aspartyl protease
MATCIDLSYGRAVSTTLAVEAKYAGSRKSKGNGGDWPNQGSEKRQRMVIRPFIQNHSSSRPPSYPFKQPVFIRPTAAPPLQISRVPLALVFPFSQALQQAKGNAAINTAGKSTRKTRQIYYTQVATTPEGEPITMGTFLVANHPAVILFDSSASHTFISKKFVENIAFYIPNQGKGLLFIRPGDKYLLKKWLTKCP

SEQ ID NO: 78289 - protein, 179 aa, Zea mays
  Coding DNA Sequence Number=SeqID_34914
MAADNPPTGGGIDDVFPTWRKNNIRVCPVASPANGGGGGATKAKQEVAPHRLSSESTACNTSGHICHGNSRMRDSPRCQEKTHAGFLPRFTRLRLGVSCGTRAEEKLHVFDALCMRQSRPARAPRRANGQPTPWPTPAPIKPTQASTTLFRARSNLTGAQLTVVCPCAACPRPPEPLPP

SEQ ID NO: 78290 - protein, 72 aa, Zea mays
  Coding DNA Sequence Number=SeqID_34915
MVSQFGYGGYKCGHCTTAVGVSEALYAKAPCLWHNFTGSLEDMVAGVTWPSILPPGWTVEWDPTSAEEEHEE

SEQ ID NO: 78291 - protein, 72 aa, Zea mays
  Coding DNA Sequence Number=SeqID_34916
MARVACALRGKRLDGESLIIDKPYLDSLKASTSLRVLLLCWVKKQQTFVASVQRWYQRKRTKTKAAGGKALC

SEQ ID NO: 78292 - protein, 103 aa, Zea mays
  Coding DNA Sequence Number=SeqID_34917
MASQGPGADVGVQPRRRPEPSFSHSLSLSCDEALCSLRYPWRLPVGVDEGGGIGTRSIGMRSHQVGVRRLEKALTKRTSRVSDVGELEGVGNVGKRLTSWPHQ

SEQ ID NO: 78293 - protein, 876 aa, Zea mays
  Coding DNA Sequence Number=SeqID_34918
  Pfam annotation: Domain name=MAP7; Domain location=464-608; Score= -83.7; E_value=0.092; Accession=PF05672.2; Description=MAP7 (E-MAP -115) family
MEVVELVPCARNKWGNWYEFWFYVAEGTVEDHPGLPVAEMCSHYYSAYPQFEVAEEDADEGALWCAAGLSSRRDLVEVFVAYGVWPLAHGWALGEVCPRQMPSRGGMLVRSPAFALDLHSRDPAAFVHEAEDGAVRIVGRYVPKTEGQRSWDIRGSNDRLNRVFELNRLPYGSYLGQDDVDRRGKKPTAEIGDDPAPAAAPSSKKRKLGIATGGLGVSNGFARELMRTCVAPGRRMSSPELRESSARMLKVTGGWWPKNVPIPHAAGEDFFTSRMVRDWRVFPYGRNIAAVVSAVMDKDRQGAAQKRQAVVRLPEARPKRSRGTAKAAAPGGSQPTLAAKSAAPGSSRVPEAVKAASTGGTKPAPAVAAKARELPPPGKRVADFATDISVEDYLVGSGEGQLVVVPPAVATAAAAVVPRARGSAVSAGGEIPALTAVKDEAGGVSRRLKEALSQAADFTDRVASGALTAVVSTEVKRLRAQHADAVREKSATDSKCRKLAEKVAALEGERTDLRRQLAEERREANEAFAKAQSAQVEANLAWVEGSLARQRAEEWEERFNALQTRVERAEASTRTKAERTRKQLMDSYHEMGARTADFEVPEQEPGLRCLEWLQKELLALPAIVEGFMSYASLVTCEGAMNALSREGCRHYEVFDQSDEDFEREIYKVEDPVVKESAGALFDRMWGPHGREVVRERFDTARGQAARNEKVEDFGALNSAQPDSESNPVAAVSEVGPAPPPETVEGAPDAPAATATGGGSSPTAAPRAEDPMKMAAESAAEDPATAGSSQVQDFGPAHATATANFLAASTVDDGNESDESVSKFSDFGDSGSSVEWTEESSDEDLDYFAALDVAAVEASPRAVDAEVVPGPSVGRRR

SEQ ID NO: 78294 - protein, 445 aa, Zea mays
  Coding DNA Sequence Number=SeqID_34919
  Subcellular localization annotation: CTP_CleavageSite=61; ConfidenceScore=5.54e-01
MDWITRGPPFWTRSQDEMTSSQVFVRRRMRRRRVRRRPRAKGGVFVFAPTGSQTSLVGFPRDSRLRDEIGDALPAPAAPLLVPSAPRPSHARPCFTHTVTSGSSLFARLPTLSSLLLEWNWCRTAIPSPHCCIAPDLAGEAQPLASTSTSSSPCPPRVSSTDAKPLPYSSTTPLSPSMAATNANVRSSLHPPPKIAVISPFCAGSVRSPRIPLGRSASMRLGSWSSPTLRPGSRSSPTLSMEGDPVYREQTVVGRGCGIRSARTPSIDVGDMHGTQPLFPDLETPASAPGISAHLQTHDGISTQRCIKDLETLARMRRLPDFLSVVSLVVGPCCRGRGHGKGGSFPLVRVVKVSAIHAVGDKFSRKTLPSEPCGALGWEDCELLLVYEFMAKGSLENHLFSVHAKKSVAALQFVAWPLVRYKEGNYQLVFKLFSKLLDDEIENIV

SEQ ID NO: 78295 - protein, 226 aa, Zea mays
  Coding DNA Sequence Number=SeqID_34920
  Homolog annotation: Hit_ID=Q8SA86; Match level="QueryCoverage=48%, HitCoverage=12%, E-value=1e-06, Identity=29%"; Hit description =Putative retrotransposon protein
  Subcellular localization annotation: CTP_CleavageSite=48; ConfidenceScore=5.41e-01
MDWITRGPPFWMRSQDETTSSQRVRRRPRAKGGVFAFAPTFAPNGPVRLSHLVPKTSLDGGDAALARSGSTGTARCRRLYVAMPTSSSSASATPPADASSEETLSTVVAEELRAGDTVDFGVSRMSSVRVQDMQQLGYFGGGVARVPGTEEVPEPEGELVVFEAFFAAGLHLPTHRFVGEVLCRFNVQIDQLTLNAVVTLSKYVWATTSYGGQPSVEVFAKYYCLH

SEQ ID NO: 78296 - protein, 220 aa, Zea mays
  Coding DNA Sequence Number=SeqID_34921
MELLSKSYPTKEKTLKGMLVIWESRRRHYTETLFSCKSPARSQLNHLTPKGFKEGNQDQGRFPKSFGKRKRKRSNSAGPVLAQTAQVQGKTRPRWQLYRKGLGVFTICELVLSLFNRVTDTLQESPSSSIPLRFTVPDGVEHGRALASCLCRPIGARTSARLWIKLNSRPREDFPQHNCTNGDLLSSVRVNRECCGWVKVFPVIGGDIIQLSGSVSIADI

SEQ ID NO: 78297 - protein, 90 aa, Zea mays
  Coding DNA Sequence Number=SeqID_34922
MKPLKKCAKSHGMIKDEGLNIERFVKKLQSTMMDVLRDGSQECGSDLVFFSSTGNNHIVVEAEGYASHKLSGLPNKVSDCISFIPVHARP

SEQ ID NO: 78298 - protein, 261 aa, Zea mays
  Coding DNA Sequence Number=SeqID_34923
  Homolog annotation: Hit_ID=Q6QP51; Match level="QueryCoverage=42%, HitCoverage=50%, E-value=4e-41, Identity=74%"; Hit description =Putative growth-regulating factor 1
MQVACNRTAVTHPFGFVASSMEAQAHTSCATVDMAKSGPAVMAAADERKQWDRERGYFERDPSPRRKRAPSPPTDQGFEGWPLGSVRQPPQSTRTPRPLLIRGSKAGPSEGFDSRPKACKLRDDSGYVRYMAEARATLPSRQGRSDRSHFALSLTDLTGKQRRSPRSDCYATHQGEADNNQVQLRAQQETPPRPTLGIGLARRSPPRPTPRLGLNLSLRRWSPPRPTPGLGLNLGLRRSLRLARPWARTDRATGDTSLPYP

SEQ ID NO: 78299 - protein, 379 aa, Zea mays
  Coding DNA Sequence Number=SeqID_34924
MTTSLVVGRSKPGCGLCPALSFKDLHHPRCGGGPLLPSMLGGEGHPPAVRRRHPLVMRGKAHCYCLDRVQLSVLHPGRWSCHARVAAVTGLTEGANLDDAGLVGRERHQLQRAWHAGSAGSGAASDVASCRLVRAWLSVHRMGDYRAARRSGMSVALPASPTAPGDRPRRRMPLGRRSCSLIVLSSLQHDASALRSVPPPEAEVVIAAGAVVAGEPPGICRPVGPLNLRLLCDELEPEAAVSAWTEAESAREEASSAQEQVASQAKEVQQRRLELGQVIRKRDQPRGHAAEAVSRVEVLGGQLAEATERPTEVSARAGALAKILAAMAQAQCWRPPSRWRSFRLCRRPRPGQIPLKVETTPRVLLLPLPMSEPAGTVCL

SEQ ID NO: 78300 - protein, 67 aa, Zea mays
  Coding DNA Sequence Number=SeqID_34925
MAAAGVTGAVVCQHQGWGKRSGPLDGGATAGISDGQSDGSDSARPLDGDRAIRVWSIGLTSDLMVII

SEQ ID NO: 78301 - protein, 156 aa, Zea mays
  Coding DNA Sequence Number=SeqID_34926
MAMMGSTSEKMYLCQIWREPRLPSAKQRDRMVYPDISWPLDMKEAEVEMSLRTRAHDGAGTSRGWKDTPNPLLVPPTLAEAIAALVNAITDNTRFLREMAGNQFQQHGGRGQPQGPRDSTGSSDDSGGSNGEESERERRGRAWVERKREKLGVRFL

SEQ ID NO: 78302 - protein, 107 aa, Zea mays
  Coding DNA Sequence Number=SeqID_34927
  Homolog annotation: Hit_ID=Q6I642; Match level="QueryCoverage=49%, HitCoverage=53%, E-value=4e-18, Identity=81%"; Hit description =Putative uncharacterized protein OJ1126_D01.8
MGTRADQEQVATHIFWCSQQTSALSQETCNTQQEQIQTFQKQLAVATEKLKVPHVQQAFTWDYGLACVLMVLRTLGIDCCDGIADLERLCRTTRFSLGLELHNFKYN

SEQ ID NO: 78303 - protein, 43 aa, Zea mays
  Coding DNA Sequence Number=SeqID_34928
MAETLHVTISVAYGLKDRFRDQGLGGFGDGATVSTKGATASVF

SEQ ID NO: 78304 - protein, 127 aa, Zea mays
  Coding DNA Sequence Number=SeqID_34929
MGDSDFCARRGRIKCAAESRWRGDDRCSGGAPDSPVHTGQSAGEFLRPTSLGAPDTVRCTPDSPVNYSRVALEIPEGGEFESESPGAPDRYCLLSGGTPDSPVRQTRGAFGCPFAPLLNPKLGLFIG

SEQ ID NO: 78305 - protein, 204 aa, Zea mays
  Coding DNA Sequence Number=SeqID_34930
MADLTVSDSTHVIFSTRLARTAAPRRHACPTEHHRTDAQVHKPGFYQSYAIEEGEGEPLGRVFSATVERGQLFTACSSLAGMDKLRRAIIEASVHHFDRDDHDPIPRDVMKLQQTCVCLNRQRRRVPSATRESAAMAWPDEQFAGANVVPAPMTATTIIATPRRGFRATGQSGAGFYTEAQSAFKEAMAENLADVVARDPWRLH

SEQ ID NO: 78306 - protein, 277 aa, Zea mays
  Coding DNA Sequence Number=SeqID_34931
MGGARLAFVLLPLEERNFAGVGTFQPSLGFKDFHQAARLHPLTNASRIFIILAGEEGEASQGLPSRGLASRFFLRLQGVETILQLYGGGVLQPCRGRRTAAAQPGCSIPSSIRATVASRIRGSHNTSYAARAVLVFWDSPILVFVARTGVRTCWCGVGGQVDAVVGAEAAEEGFSVDETVNATHGLTPDSLALISGPRPPRGDANESLPAVASALGPLLLLQRSPVSHPELVVPQALRCGGCSYPREWNRSSVCNGTLSAGVCSLRLSRPEHLCIWA

SEQ ID NO: 78307 - protein, 194 aa, Zea mays
  Coding DNA Sequence Number=SeqID_34932
  Homolog annotation: Hit_ID=A7QL36; Match level="QueryCoverage=82%, HitCoverage=34%, E-value=4e-07, Identity=26%"; Hit description =Chromosome undetermined scaffold_116, whole genome shotgun sequence
MPGLNSEAPATSYAGWPVGIKKCDDACHFLFSVFYPNDVFWSFWKKNKEANGYRHKTFLYWDSINLVFGKDHATGEAAKTPADGARDMSMEEGTGKELTSLTTSGSLKRQRSSDSFTSMMAEQLDKFTEAIRDEAPKDPTSKEIFSTLEEIDGLDEDTFLDLFDILTGDARKYESLLALPLILRKRWLFKQLKK

SEQ ID NO: 78308 - protein, 143 aa, Zea mays
  Coding DNA Sequence Number=SeqID_34933
METARVQKNIEELRDSREKCYKVSMDCVRKLKDSFVKLRKFIIMLFINIGLSPPPEPYNPKADPIMKEALDVMKIANEVVDEVIDKLLHEATERILKGPFGKAPAPASLAPDPDPREELILLILLENQSHFENRLASKLILVC

SEQ ID NO: 78309 - protein, 145 aa, Zea mays
  Coding DNA Sequence Number=SeqID_34934
  Gene Ontology: Mol. function=serine-type peptidase activity; Cellular component=outer membrane-bounded periplasmic space; Biological process=proteolysis
  Homolog annotation: Hit_ID=Q8S3I8; Match level="QueryCoverage=52%, HitCoverage=17%, E-value=6e-31, Identity=89%"; Hit description=D1 protease-like protein precursor
  Pfam annotation: Domain name=Peptidase_S41; Domain location=2-92; Score=7.5; E_value=6.9e-06; Accession=PF03572.9; Description =Peptidase family S41B
MTPRKLNNYPRKDTLYVWTASASEIVASALHDNCKAVLVGERTFGKSRVMQGLIQSVFELHDGSGIVVTVGKYMTPNHKDINGNGIEPDYNRLPGTLRKRQISFVAIEFCNISMKPEVTFHDAEQIKRMLCLTTTRPSMSRALIR

SEQ ID NO: 78310 - protein, 139 aa, Zea mays
  Coding DNA Sequence Number=SeqID_34935
  Gene Ontology: Mol. function=metal ion binding; Cellular component =integral to membrane
  Homolog annotation: Hit_ID=Q6Z7F4; Match level="QueryCoverage=81%, HitCoverage=43%, E-value=4e-22, Identity=44%"; Hit description =Putative nucleic acid binding protein
  Pfam annotation: Domain name=C1_3; Domain location=83-114; Score =13.5; E_value=0.014; Accession=PF07649.3; Description=C1-like domain
  Pfam annotation: Domain name=PHD; Domain location=84-135; Score=50.4; E_value=6.3e-12; Accession=PF00628.20; Description=PHD-finger
  Pfam module annotation: Pfam domain module=C1_3::PHD; Domain location= 83-114::84-135
MARTHMIPFPSTEMIVIVLFASGYWVVVIGSGEKQPKAHNTNYETKSSSIKEPSSSSKLAEQPLPKKERQIIKEDGGDKDEAFLCGTCGGMYSENGVFWIGCDICDKWYHGDCVRITPAEAKHIDQYGCPACSNKRNIE

SEQ ID NO: 78311 - protein, 48 aa, Zea mays
  Coding DNA Sequence Number=SeqID_34936
MAQEIIRRSEKEPAEPSADPHVKGDDEIRKMAEAIMDKVVDQLLNEAA

SEQ ID NO: 78312 - protein, 128 aa, Zea mays
  Coding DNA Sequence Number=SeqID_34937
  Gene Ontology: Mol. function=catalytic activity
  Homolog annotation: Hit_ID=A3B342; Match level="QueryCoverage=45%, HitCoverage=18%, E-value=6e-13, Identity=65%"; Hit description =Putative uncharacterized protein
MVVANVDDSRVVLDTASDDDAITPSSSSSPEAQPATQGYYLADEPGVHFVWQLNQESSVLVMSRAFDDYYIEDCGVILAPEVTQRRIDNSDQFVILATVRDHPKDDEYSNVPLMHYMPMSKENGPRPI

SEQ ID NO: 78313 - protein, 248 aa, Zea mays
  Coding DNA Sequence Number=SeqID_34938
  Gene Ontology: Mol. function=binding; Cellular component=nucleus; Biological process=protein amino acid phosphorylation
  Homolog annotation: Hit_ID=Q69WY1; Match level="QueryCoverage=82%, HitCoverage=62%, E-value=6e-83, Identity=47%"; Hit description =Selenium-binding protein-like
  Pfam annotation: Domain name=PPR; Domain location=102-136; Score =49.5; E_value=1.2e-11; Accession=PF01535.11; Description=PPR repeat
  Pfam annotation: Domain name=PPR; Domain location=205-239; Score =27.9; E_value=3.8e-05; Accession=PF01535.11; Description=PPR repeat
  Pfam module annotation: Pfam domain module=PPR::PPR; Domain location =102-136::205-239
MLTARGLRRLAAAVCFARRSASAVAALPGAGAARFHDYDAAITECVGRRALREGRQVHARMVTAGYRPALYLATRLVIMYARCGALEDAHNVLDGMPERNVVSWTAMISGYSQNERPAEAWDLFIMMLRAGCEPNEFTLASVLTSCTGSQGIHQHQIKQVHAFAIKKNFELHMFVGSSLLDMYARSENIQEARRVFDMLPARDVVSYTTILSGYTRLGLDEEALNFFRQLYNEGMQCNFFPSQSFSMH

SEQ ID NO: 78314 - protein, 195 aa, Zea mays
  Coding DNA Sequence Number=SeqID_34939
  Gene Ontology: Mol. function=7S RNA binding; Cellular component =signal recognition particle, endoplasmic reticulum targeting; Biological process=SRP-dependent cotranslational protein targeting to membrane
  Homolog annotation: Hit_ID=P49964; Match level="QueryCoverage=36%, HitCoverage=50%, E-value=3e-17, Identity=61%"; Hit description =Signal recognition particle 19 kDa protein
  Subcellular localization annotation: CTP_CleavageSite=53; ConfidenceScore=5.32e-01
MEGQTPSILFTAPSTPRPPREAPPPPWRRGSRRCSPTPRSICFHILISLYEVRSRSIDYKCQKHDFDELRLKVDKVGRINGHGYSCGCPKCHSHSFFDNCCSHLKILHTIELDKSYPQDIFQAGRARVQLKKDDGSPINPAIKTSEQTAYLLSPKLNLEWDYIHIILYIFRSMIKYVMDWCLRQKFNLAGIIAYA

SEQ ID NO: 78315 - protein, 347 aa, Zea mays
  Coding DNA Sequence Number=SeqID_34940
  Gene Ontology: Mol. function=hydrolase activity, hydrolyzing O -glycosyl compounds; Biological process=carbohydrate metabolic process
  Homolog annotation: Hit_ID=Q84YR7; Match level="QueryCoverage=33%, HitCoverage=5%, E-value=1e-17, Identity=76%"; Hit description =Putative 1,4-beta-D xylan xylanohydrolase
MGEWETSLGSKGVQEINLWSEFQNPTSDVVSRATFRSSFSEGRRIVQLQIRAGTNTVNTTNMMHILAYSTDHMLSLATELPAAHSCGQVDDDGDQWYEIKAAFKLEKQPSKVTAYVQGPPAGVDLRVMMLEFFQFMMLVIVSLAVDKNQLVNCGQVDADGDQWYEIKAAFKLEKQPSNVTAYVQGPLAGVDLRVMDFYIYAVGENRQASIRRHDTFSGSSCHCSKGVIKIDYIYMGLTLLVLKEKEYFYRYIKKSVSFPQSSKAPYKDALIRGTPFCGMKTPHPYDTAQSHGKQHPTPPHGQGWEYRVARKDKTPQGASIGPDLRRRTPDPCTTGPELPRGHAGSLG

SEQ ID NO: 78316 - protein, 127 aa, Zea mays
  Coding DNA Sequence Number=SeqID_34941
  Homolog annotation: Hit_ID=A3B0G0; Match level="QueryCoverage=98%, HitCoverage=22%, E-value=1e-22, Identity=44%"; Hit description =Putative uncharacterized protein
  Subcellular localization annotation: CTP_CleavageSite=63; ConfidenceScore=5.32e-01
MHLWNEMDSFSSSFRNWVTAHKSYVEALNAWLQNSSAARSSTATSKTGPEAASSGNAGCWRTVASRRRQLSGSCAASAEGLQSRLTAVLDRLTKFLEASLKCYEELKQNYEMACADYRRVGPNARLA

SEQ ID NO: 78317 - protein, 117 aa, Zea mays
  Coding DNA Sequence Number=SeqID_34942
  Homolog annotation: Hit_ID=Q7XBD2; Match level="QueryCoverage=92%, HitCoverage=6%, E-value=1e-07, Identity=33%"; Hit description =Retrotransposon Opie-2
MYNQLKNIVNYLRSLRSKKKVTLEEVFGRIINKDILQEEAKYIMNLSMGIPTDKPQEVALKATKRQKAKVVKEESSSDDGEDEEKSNLNEKEMALFIQNFKKTMKDWKGRGKKTYKP

SEQ ID NO: 78318 - protein, 99 aa, Zea mays
  Coding DNA Sequence Number=SeqID_34943
MQESLAGPPSQQNPPEGLPRNPLQDRHHSEILPRASPGIPCRTAITAKSSRGPPYTDHSPTALAPFSDNKQIKSVIMNNVSSYPKPHKALASTTQKVQW

SEQ ID NO: 78319 - protein, 86 aa, Zea mays
  Coding DNA Sequence Number=SeqID_34944
MRVPPGSAPTGKEKEEEQSGLARWKSSIGPRRARIRPKVDTEGLCNHMMGKMLIVDITPQLIALNQRSTSDMYHKNKHSSIQNIFF

SEQ ID NO: 78320 - protein, 326 aa, Zea mays
  Coding DNA Sequence Number=SeqID_34945
  Subcellular localization annotation: CTP_CleavageSite=76; ConfidenceScore=5.32e-01
MPAGGSGPHQHTYAGNVTGDPPTATAAPSVSAPSPPSAAAEGIPAASAPTVQDDAGVEVAPSGPQDPPVTVEATPSGSQVPAGGPEVVALPTAIADPTTAIPSDAPPVVGVGARPALSPANSGGSGGYSWASTPEREDFKEDIRKVSDREEKEEDLAFKEEMWARRNKLLDELELEAEEKVKRQEGKVRTLEGQVCQFQVAQATQSAPGPQALEVLRKTLDDLRAEQRVGAQRITAWAGEASTSLVPLGMSPIQALVRPASISDALQYWIPLLTASDVWIRFLAPAWRPRAADSAVADTEDAAREGVQDAVDAVVGRFQRDPVDDE

SEQ ID NO: 78321 - protein, 126 aa, Zea mays
  Coding DNA Sequence Number=SeqID_34946
MARAHTSARGGGVNGVERATEGGKPTEARPPVKSRGGSLPWVRFCGGGEVARHGRGRGVRGWLGYSGGEVAEAGESVNGEATGREAVGGEPAGDGMGEMMVLTGGPGLPVGERRERERGGAADRWG

SEQ ID NO: 78322 - protein, 128 aa, Zea mays
  Coding DNA Sequence Number=SeqID_34947
MATLVCPDRYQTEVELDTFFVLVRSGKGKDHLGDYFQSRGFRRSTTILGYGQRSWPDCRPSMRVVWRSAKPVVGIPTGGSTFPVHRSAAPNQLMWLPEFLLQSPVPRTRARGPQAAPPLRTPPGGRRK

SEQ ID NO: 78323 - protein, 349 aa, Zea mays
  Coding DNA Sequence Number=SeqID_34948
  Subcellular localization annotation: CTP_CleavageSite=51; ConfidenceScore=5.16e-01
MSSCSLMHRVFPPSEPPDGGCPQSFCLVVGGTQLRGSWYLSVIVWLQRFSSCSPAAPLRRRSPKTVTTSAWVGRSKPGCDLGPTLSFKDVHHPRWGGGRAEPELYLPRGFVGQPLLHRSRERALIGPARGADFDNAGLVDCGRRQPRRVGLAGLAPGAPSCREGGCRAGRTGGPPKMSRAARAAFVFWGGPAFAPVRRLHAEESLGSVSLVVRGFSCLVKGTPRPLFDEPRPGVAVSARTEAELARKEDLVGRSLAGSSVSGTDAGVDLPRPRAGLMSSGDSWPRPRGDQPSRLLGPDSRRRPWRRWPGRGDDVVLQSGDPRTASPSEARSDLAEGVVDAEGSAAPFNR

SEQ ID NO: 78324 - protein, 247 aa, Zea mays
  Coding DNA Sequence Number=SeqID_34949
  Gene Ontology: Mol. function=transcription regulator activity; Cellular component=nucleus; Biological process=regulation of transcription
  Homolog annotation: Hit_ID=A3BDJ3; Match level="QueryCoverage=47%, HitCoverage=36%, E-value=3e-24, Identity=55%"; Hit description =Putative uncharacterized protein
  Pfam annotation: Domain name=HLH; Domain location=187-244; Score=9.1; E_value=0.017; Accession=PF00010.17; Description=Helix-loop-helix DNA- binding domain
  Subcellular localization annotation: CTP_CleavageSite=92; ConfidenceScore=5.51e-01
MAPLSPTPASASAPVSSSPRSLVPDASAAPMRPASPPQELPAAGGEIQAALAPANASTAGARGGGGSFTALLGLPTSQAMELLLPRTTPPALATAPAPTFPSDPHLVDRAARLSTFAPPSPSPSSTSPARPLPAAANAGKRKADPVDRASKGKAAKKGKTAEEKLAGGDGDDEKPAYVHVRARRGQATDSHSLAERARREKINARMELLKELVPGCSKVCLHYLTIYYPPSSLLLSASRTPHLQFEY

SEQ ID NO: 78325 - protein, 26 aa, Zea mays
  Coding DNA Sequence Number=SeqID_34950
MDTIMSYLSSKEQGYDDQAVTVYCRE

SEQ ID NO: 78326 - protein, 610 aa, Zea mays
  Coding DNA Sequence Number=SeqID_34951
  Homolog annotation: Hit_ID=Q7G648; Match level="QueryCoverage=38%, HitCoverage=24%, E-value=9e-07, Identity=27%"; Hit description =Putative uncharacterized protein OSJNAb0008A05.9
  Pfam annotation: Domain name=Rick_17kDa_Anti; Domain location=284 -325; Score=4.5; E_value=0.065; Accession=PF05433.6; Description =Rickettsia 17 kDa surface antigen
  Pfam annotation: Domain name=Transposase_28; Domain location=1-152; Score=-57.8; E_value=0.025; Accession=PF04195.3; Description =Putative gypsy type transposon
  Pfam module annotation: Pfam domain module=Rick_17kDa_Anti::Transposas e_28; Domain location=284-325::1-152
MPPTDASSEDTLSNVAAMELHPGYAAAGVFWQRSWACLGVEEVPEPEGELIVFEAFFTAGLCLPAHRFVAKVLQRFEVQVHQLAPNAVVALAKYVWAATSFGGQPSVEGEVEDHPGLPVAVMCSHYYVAYPQFEVAEDDENEGALRCAARMSSGRDLVEEFIGYGVWPLAHGWALGEVCPHEMPSLGGQRVRSPAFALDLHGWDPTAFVREAEDGAARIVGRYVPRTEALWSWDIRGSNVRLNRVFELNRLPYDGYPGDDAVDRRGKRPVAVTEKGPSQEAAPATKKRKLGTAAGGLGPWGKDVFARAPGVFGANAGGYWGSMAQECSDPPRGWRRLLYVSKASASVKAAASGGSKPPPCGPVKERRPPSPARRVADFGKDISVDDYFVGPGEGQLAVVPPPVSTTSPTAVAANFADHVASGALTADVAAEVESLQAQHADAVREKSAAESKSHRLSEKAEAKVARAEGGLARQRAEELEARFNALRSRVDKAEASTRVEVERTHAQFVDAYQELGARTADFEEELLVLPTIVTGFMSFASLVTCEGAVNALSREGCRHYEVFDQADENFEREIFKVEDPVLKQSAGVLFDRMWGLHGREAVREQSDRAI

SEQ ID NO: 78327 - protein, 151 aa, Zea mays
  Coding DNA Sequence Number=SeqID_34952
MRKTQDHTLLQSLSQALITKDHYLNYGTWTISIVLNDMNECLGCSNHLYAFEYVGWGGISSLQPPSSHYCRSGHLWTVSDKVYDGWYACIPERSAIHAKNQFTKLGTFGLIGLELVDDLPLVSDVPRIMAHERTTLRFIGPLGLSGGLLLL

SEQ ID NO: 78328 - protein, 98 aa, Zea mays
  Coding DNA Sequence Number=SeqID_34953
MGESGVCAGWVGEGVCRRRQGHDWPPPGPQHGPGLALATAAGADEEGGGGRVHGGRGSADERTGLSQARIDPYPFAGHFSKETPRKAVINPPSIADVG

SEQ ID NO: 78329 - protein, 36 aa, Zea mays
  Coding DNA Sequence Number=SeqID_34954
MADTRDIDRQEPVTEDPGEQQVEVAEQELIEGKLCP

SEQ ID NO: 78330 - protein, 726 aa, Zea mays
  Coding DNA Sequence Number=SeqID_34955
  Gene Ontology: Mol. function=protein binding; Cellular component =intracellular; Biological process=intracellular protein transport
  Homolog annotation: Hit_ID=Q6K7U3; Match level="QueryCoverage=93%, HitCoverage=94%, E-value=1e-169, Identity=53%"; Hit description =Putative VHS domain-containing protein
  Pfam annotation: Domain name=GAT; Domain location=252-355; Score =57.7; E_value=4e-14; Accession=PF03127.5; Description=GAT domain
  Pfam annotation: Domain name=VHS; Domain location=30-147; Score=49.9; E_value=9e-12; Accession=PF00790.10; Description=VHS domain
  Pfam module annotation: Pfam domain module=GAT::VHS; Domain location =252-355::30-147
  Subcellular localization annotation: CTP_CleavageSite=25; ConfidenceScore=5.13e-01
MNRLLPAIVLASSVLTPPATQPLVACGARNAFAAWFVQYRLAPRTGRQAKDVVKSLKKRIAHKNPKVQLLALTLLETMIKNCGDVVHMVVAERDILHEMVKIVKKRHDYHVKEKILTLIDTWQEVFGGARARYPQYYAAYEELLRAGVVFPQRLNGSVPIITPPQTQPLQNYPSSLHISQQEELELPVSDFPALSLGMTGENFELANWAWGHLGTGLFVLGSQCLVKKLRILWNVCELAVVIGLAYPAYKFEIQNARGIMDVLSEMLDALDPGNRECKISNQSTYRARFQGLRQDVIADLVDQCRSYKQRVVQLVNSTSNEELLNQGLSLNDDMQRVLAKHDAIDAGLAVRVEKPKSLQSQIGSSSTRKPDTMEETIQRPSASTTATSQSPFGILALPAPPSSSSKAPAIPASSIDLLSGDDYVKPEPANSLALVPVTEYSAADKNVLAFADMFEQNTANNSNHNLPYSFLSSTSNSTISTSQTYHAPVRPVLPQHSAAYPNGARSNAIVPYDQQAQSNSTGTGDQNGDIPPAPWGTKRSTNPFDDDQLGGMAVQPKGMQPQPVQPSQHGNKFMSAPPMPRGQPGRMQLQQVPGAQLGALQPTQATLNMQYRGMHPSMQMNHGMGMYSQPTFGGYYGMNQTQLYGVHMSGYGYGQQSGGYYIPNAAYAYTSANELAQRMNDLSVQNGDPNGAAANKQSRPEDALFGDLLSIAKMKQNKPAAGKVGG

SEQ ID NO: 78331 - protein, 98 aa, Zea mays
  Coding DNA Sequence Number=SeqID_34956
MGESGVCAGWVGEGVCRRRQGHDWPPPGPQHGPGLALATAAGADEEGGGGRVHGGRGSADERTGLRQARIDPYPFVGHFSKETPRKAVINPPSIADVG

SEQ ID NO: 78332 - protein, 108 aa, Zea mays
  Coding DNA Sequence Number=SeqID_34957
MDQKSLDDTRYDHSIIVRVIFELKVILGEAGSEPEPPVIGSTSFVAEGPSAMKQTPNRRVLSPLLVSRFVRTAPVVVVFFGGTMRLLVVVVSSPEVGANVGHFLLITI

SEQ ID NO: 78333 - protein, 38 aa, Zea mays
  Coding DNA Sequence Number=SeqID_34958
MASILIPMYGTDTFLRMEILKLKLGLGTGDVLPKLVKD

SEQ ID NO: 78334 - protein, 212 aa, Zea mays
  Coding DNA Sequence Number=SeqID_34959
MVVGGARQQGDTTSAGKAMLGEHQQQHKAQRGAKHGHSEMELSAFRDRGVPKPTSECAACPSPDGSSAWASAKGGEARWPEPSVREVEVPRPSCSSRAQVRCACSRGVTSVHAGEGSERPQESACPVLGPARPTSSEKALVLPFIVVRRGSRVYMGDVAECYVSSGGRASAPRYLPMWFPERSGHPAGVMSWLSEVRRSLMEGQLLERSSHW

SEQ ID NO: 78335 - protein, 101 aa, Zea mays
  Coding DNA Sequence Number=SeqID_34960
  Subcellular localization annotation: CTP_CleavageSite=21; ConfidenceScore=5.25e-01
RKSATEATIFLASFGAATKLSSAANSKRQRRQGLRRKVTILQLLLLRLASHRHLGHNLHLRHHYNLHIHERTWTSIHRKMTGGITRLASMEFSIISSSANF

SEQ ID NO: 78336 - protein, 185 aa, Zea mays
  Coding DNA Sequence Number=SeqID_34961
MVKKLNLIQKYDRTKSTSLQASKYYLMQSSVFFSAGVYQDNHQSHPLEGGVSWRAHRTFRCTPDIPDSLSRHHCRWILTVGASDLWARLGVRCTPDRYCLMSGVPAWAILTSARAEGALNARQRAVGAEMTIAPEAHRTVRCTPDSPVNFSGLAVGVSRTWRVPEADLPWRTGHCPVYTGQSGEL

SEQ ID NO: 78337 - protein, 287 aa, Zea mays
  Coding DNA Sequence Number=SeqID_34962
  Subcellular localization annotation: CTP_CleavageSite=24; ConfidenceScore=5.20e-01
MQTLHAYYRSTTSHQAPAPSSSVHASYVLSDCSEMFFKSSDPNLPVVHLPPPCPPASLYNFGRRHLKSSYPPLTARTPSRISFYSCQNRANLLNTDVGANGRDDSAASPEPGRDVAACDPGVRTLGAVAAPDNSEAPGQTKGRTLSATAPPCPWQNRHCSSLFLAEPQSCSGRCPLGWAGGRWGAPPKPEGRMPRRRRSRGATKGEQDWARARERETARSERRATPEAAGSLGLGLGGARTRAAGEAARRRPDEMTTASSSALAARAWTEGWSRACGVEREDARLGV

SEQ ID NO: 78338 - protein, 557 aa, Zea mays
  Coding DNA Sequence Number=SeqID_34963
  Gene Ontology: Mol. function=DNA-directed RNA polymerase activity; Cellular component=cytosol; Biological process=transcription
  Homolog annotation: Hit_ID=Q69X40; Match level="QueryCoverage=83%, HitCoverage=26%, E-value=0.0, Identity=74%"; Hit description=DNA -directed RNA polymerase
  Pfam annotation: Domain name=RNA_pol_Rpb1_1; Domain location=20-440; Score=15.0; E_value=1.1e-12; Accession=PF04997.3; Description=RNA polymerase Rpb1, domain 1
  Pfam annotation: Domain name=RNA_pol_Rpb1_2; Domain location=442-541; Score=-41.9; E_value=0.00015; Accession=PF00623.11; Description=RNA polymerase Rpb1, domain 2
  Pfam module annotation: Pfam domain module=RNA_pol_Rpb1_1::RNA_pol _Rpb1_2; Domain location=20-440::442-541
MAGPVPVNMHKGCRDDQAASEEVDSIHFSFYSDDEIKRISIKKITKSERLDAKNLPVPGGLLDPAMGPINDIDICKSCGQHSVRCPGHFGHIELAKPLFNPLLFMSLKNLLHVTCFHCHKFRLNKEQVDRYVNELELLVKGDIVCAKNLEDSVEEAYLSKEDENMNKTTSGDNSSSVKDKKTWTSIQLKEVLSIFSKIMKKRQKKCAKCDMKSPTISSPIFGWLVKDTKASAVRTNAIADFKLKGDGDIHNSGETGVSGLEEESSSPGMVSKDSINEVRGLSDDTIKELVASSGKKHLLPTEVESILKDLWKNEARFCMLLCDFQKNMSSEPEKRRGYEMFFLSSLLVAPNRFRPSTSSSLGIMEHPQSVLLSKVQESNLALQHNNASSNHMDVLQRWMDLQRSVNVLYDSSKGLARSEKNAHGIRQLLEKKEGILRQKMMGKRVNYACRSVISPDPYLAVNEIGIPPVFATRLTYPEVVLYALFNILYDSIWHNFVYVCVLTCFALCDRDDNGMGKAGGWGSKNLPYTHPQCDSRVQCRTHGCVNKKLIYIYTSIL

SEQ ID NO: 78339 - protein, 89 aa, Zea mays
  Coding DNA Sequence Number=SeqID_34964
MVAGAAPVHDGGVARDEAGTGFEGLRSPELTRTETTDQAKDRSKKSFEVPSAWEKVKETRNPRPGVKKKTCGIKVDRVKKSYGASRNTT

SEQ ID NO: 78340 - protein, 203 aa, Zea mays
  Coding DNA Sequence Number=SeqID_34965
MGVAAARESRSRGRRAIAGRGEEGEHAIGEEQQWEGWALFLLPSLKGGRPWELVPLRKRSLGGGSSQGGAATGRGARLASSLEEGARRRGRRDLGVPAGMELGQGTAPCACTREGGNRNSPVSVVSPHNRYVSEIPSSHVIKMTLSDSQFPEDCVTWSPGPSFGVFAPTFRIITVAVTEPKLCAGELQHDSRKGNRLKREKAI

SEQ ID NO: 78341 - protein, 89 aa, Zea mays
  Coding DNA Sequence Number=SeqID_34966
  Subcellular localization annotation: CTP_CleavageSite=50; ConfidenceScore=5.91e-01
MSSTPAVAPARSTLHSTAPSLPLPKRRPNSCSKPHPATPSGGMVLCLALACSTNRRSEPRPPTSFRSPVRDGAFVFTPHVQQPRLRFDM

SEQ ID NO: 78342 - protein, 169 aa, Zea mays
  Coding DNA Sequence Number=SeqID_34967
  Subcellular localization annotation: CTP_CleavageSite=8; ConfidenceScore=5.07e-01
MTTRTQVRVMMRLCRGEGGNCSRVTAPASNSQAPKSLCTHPYTHASSTSSRGGLRPVARAGINPHPRRSTAAASFNSPRTKPLVGEVQACGSGLNAGVRNQSLNSHRGRSSRGCCADLRGIRGGCFRRRRARWRTTLASLAHLLEARSAQVTACPWDPPDRDQGSVDEE

SEQ ID NO: 78343 - protein, 145 aa, Zea mays
  Coding DNA Sequence Number=SeqID_34968
MAPYTSHELPPLGILACTTIRKGGGIDLPANPHNWRILRQQQQAEMNPPNLPPAGTVPVVVAQMQMMQQMAYTMVCEPRLMKLGSRDATNLLVSGEPGLGCFEDRASLDLNLHAGNQTQSPHAHSLAHSNQTTTTRIPRCKHAQM

SEQ ID NO: 78344 - protein, 63 aa, Zea mays
  Coding DNA Sequence Number=SeqID_34969
MAGCERGCPMGPMRQPVPMRDGGWAVGPDCRRQWRSWAARDAASARGQWKSPFPLAVFLSKRQ

SEQ ID NO: 78345 - protein, 246 aa, Zea mays
  Coding DNA Sequence Number=SeqID_34970
MEHRPESERLLETTHLELDGKLFVNTQQAPTWRANCRRFDPGGSLDRRVGQGGVRRLPEPRLSPSPGVERGGVHRLPEPKAESEPWARARRSSSSSGAEAESEPWGQARRSSSSSGAKAESEPWARARRSSSSSGAEAESEPWGRARRSSSSSGVEAESEPWGQARRSSSSSGAKAESDPWAQTRRSSSSSGAEAESEPWGRARRSSSSSGAKAESEPWALARRSSSSSGAETGAEPWGRARGSFL

SEQ ID NO: 78346 - protein, 58 aa, Zea mays
  Coding DNA Sequence Number=SeqID_34971
MVITGNTQGILGYGMWIISWRMRMVLMVLKGCGECKGSRSQPRWHPWPSVQGTLPCTG

SEQ ID NO: 78347 - protein, 73 aa, Zea mays
  Coding DNA Sequence Number=SeqID_34972
MGKPVPSLLMLLLSRAENDLNGKLYLNGVYRGVSNFFTGSLEDMVAGVTWPSILPPGWTVKWDPTSAEEEHEE

SEQ ID NO: 78348 - protein, 154 aa, Zea mays
  Coding DNA Sequence Number=SeqID_34973
MDVPRVTVDGDRVVHRRLDAGRQGVGSRGHGLLSTVIDDDRVNEASHSRQRGCAWCWMAKTIMPNGGGGGANQDGRRRRIGGGGSKRVEWPQAITSGEWGPGGQILHKKTRGVKLNGTRVVDGEPTNGKKIMNDMRGYENIVEIEWPRENRGTY

SEQ ID NO: 78349 - protein, 56 aa, Zea mays
  Coding DNA Sequence Number=SeqID_34974
MDDQVTPATMSSREPVKNYATSSLEDMVAGVTWPSILPPGWTVEWDPTSAEEEHEE

SEQ ID NO: 78350 - protein, 158 aa, Zea mays
  Coding DNA Sequence Number=SeqID_34975
  Gene Ontology: Mol. function=nucleic acid binding
  Homolog annotation: Hit_ID=Q5NKQ1; Match level="QueryCoverage=51%, HitCoverage=9%, E-value=7e-20, Identity=46%"; Hit description =Putative uncharacterized protein 9C20.4a
MEMAGSGQSPAMLGYGGHLGPNTKGVVDGNLMVTPPPALLGPVIDASSMGDESQQRIRPPMSNISSREMDTPQILHSHVVAAKIELVNLEHNHEFITDEAEKQHLRCNKIRDAEFINFVDAIHDSRVPQHCIVDFISDLHDGPENVPEGNKETRKLRK

SEQ ID NO: 78351 - protein, 128 aa, Zea mays
  Coding DNA Sequence Number=SeqID_34976
GGESKGRPWLKAAIDGVHQWGEGLGAGQKCRSFLARGLGVAGVGLQLRRALGAARRGHEVGAGAIVFGPWRVWSGTRGSRSVVARPLRLLLAWGGARSAAGAGLGRVLGAVAGCSATWCDAQQRRERE

SEQ ID NO: 78352 - protein, 304 aa, Zea mays
  Coding DNA Sequence Number=SeqID_34977
  Homolog annotation: Hit_ID=Q6J9V9; Match level="QueryCoverage=29%, HitCoverage=31%, E-value=4e-35, Identity=82%"; Hit description =Putative uncharacterized protein
MATAQGIDPFLKAALPTRIPSITGKVSTDELQSSHPPTRGLGPTCHASGPETEEAKPLHAKQGPEKGVFRERILPSEGNGPRALLLIRGSKVAPSGVRRSPQSTRAPCPLLIRGSKAGPSEGFDSRPRARRVRDDSGYVRYMAEARAMLPSAARPAPTAVPTTRVRLTTAEFSLGRNRKLRLARPYASASGGSLRLARPWDSASASASGGIASSPDPSLGLRRRFRHFSDGHVITYTGLKHFSNNHVGMAFLREGGTGDEQTNRLTLSRDACNPYYEHPRVPRVRNADRHVADRCVVHLAESNP

SEQ ID NO: 78353 - protein, 398 aa, Zea mays
  Coding DNA Sequence Number=SeqID_34978
  Subcellular localization annotation: CTP_CleavageSite=47; ConfidenceScore=5.20e-01
MMTTSFAVGESKPGCGLPPALSFKDRPAPSLSDRGRRAFAACGAGSSAEEASSSHAGEGKLLLPRQGAAVRPPPGQRSCRARADHVQVLLALLAVLGGRTTRHTRVLGRSRSRSCGENGSEDLPVRFGAAAARWCGVGGQVAAVVGAKVVVAIGEAASAEAVASADEAISATCAPGLRLFGFNGWFSSPGSPASHLEFVVPQALWCGGCSYPQEWNRSPVCDGTLSMGNLRPLCDELKPEAAVSAWTEAASARIEASSARERVASQAEEVQQRRLELGRVIREWDQPQSHAAEAMSRAEVLGGQLTEATERPAEASARAGALAESLAVRAQARCWRSPSRWISFRPCHCLRPGQIPPRVEMTPRVLLLPLPMSEPAGTVCLKHNHLSERELLFAEGDE

SEQ ID NO: 78354 - protein, 209 aa, Zea mays
  Coding DNA Sequence Number=SeqID_34979
  Gene Ontology: Cellular component=endoplasmic reticulum
  Homolog annotation: Hit_ID=A2Y6G8; Match level="QueryCoverage=79%, HitCoverage=19%, E-value=2e-45, Identity=57%"; Hit description =Putative uncharacterized protein
MSDSGSHWVQADGKEVSFTEEILVAKWSSSESSDRGLIVAWNNPSSALHAGVLPSFLYGRGAQNWWLAHEVLSSEMRLFFDASSLVLGLYPESISSMQHVMASSKNGRLTSVSWEYDVNHHLATVYGSYCCQSPARRFPMLHRVVKQSEDYMLSKVDTLVSSDFFISKHCGENEKHRTYKATHFIVYTILKYSIEKLVYSASRKEEMRV

SEQ ID NO: 78355 - protein, 247 aa, Zea mays
  Coding DNA Sequence Number=SeqID_34980
MGSARVAFVLLSLEERNFAEVGSPAASPRRWSPKTVTTNLMVGRSKPGCGLCPALSFKYVHHPGWGGGRAESELYLSHGFVGHLLPQHSGERALTDLAEGADSDNAGLVGHERRQLQRVGLAGSAGPGSAPGAPSRRTSGRRAARTGGLPKTSRAARAAFVFLGCPAFAPMAAVVGAEVVAAGEVLVADEIAATIRAPGLWLFGFDSLSSPLEWGCGRGPYRSSVCHEALQCGGLFVPAGVEPEFRL

SEQ ID NO: 78356 - protein, 218 aa, Zea mays
  Coding DNA Sequence Number=SeqID_34981
  Subcellular localization annotation: CTP_CleavageSite=69; ConfidenceScore=5.31e-01
MGCPRGPSVLVLLHGFGLQAKRQWWCQVCSRPTLTTKPGSSAPARARRGHIMLLRFPRSRASPAVTAASASLVAPQPPNPYTIVCSPPFSSPRTPGEPSTTAILVCVPTFVGRQRSGSALIRFATRRARRSRRRTSSSPSSKATCPVRVRTVFSPPHQRCVSNERACHQGEARAGGGGDADCVRRRALGGIASSIHVIPDFPKPGGCHPDFHTQSLLF

SEQ ID NO: 78357 - protein, 241 aa, Zea mays
  Coding DNA Sequence Number=SeqID_34982
  Gene Ontology: Mol. function=kinase activity
  Homolog annotation: Hit_ID=Q6QP54; Match level="QueryCoverage=44%, HitCoverage=41%, E-value=1e-08, Identity=38%"; Hit description =Putative kinase
MAAGEVLAPCSCDVVAVGGVLEPCGSTAVGAVGSLLTSPCFRKGLRAAVVMEHAGCHHYLFTGGLGNDGLPCNVAGPSPRSGEAEAPPRSRSSLGPGAGRGGVRLPGSRLSPNLGRARRRPSSEAEAESEPWGRARRSPSSGVEAESEPWVGRGGDRLLRPRLSPSPGVGRGGVRLPGSRLSPSPGSGEAELPMAPEAGLSCCQPHSVEWHSSWSGVGGAVFLSGRSVERQSDCGHFGSVD

SEQ ID NO: 78358 - protein, 99 aa, Zea mays
  Coding DNA Sequence Number=SeqID_34983
MQAACNHTKGAHPFDSDASSVEAQAHTSCNRPPVTMCGKLHRYLRQYHAFSTAEPVPRLEATLRMAQQCQPSTSITGTGKGDTLKGILLREESRPRAPY

SEQ ID NO: 78359 - protein, 159 aa, Zea mays
  Coding DNA Sequence Number=SeqID_34984
  Homolog annotation: Hit_ID=A2YF24; Match level="QueryCoverage=24%, HitCoverage=46%, E-value=3e-12, Identity=84%"; Hit description =Putative uncharacterized protein
MAPPGSRRWAYVRVMAGTILGGVLGFYVMHRVETSYKARQIQPCPTPPPLWLWLALSPVSSGLAQHFSCRREWRRGCGDTRRICLPKPRSRSSCRTRHSGRIKPSSCPTRDTDILPLLRLLFSKLLVVLPNWATQQQDETFGSFNNRTTLPRVGMASVC

SEQ ID NO: 78360 - protein, 807 aa, Zea mays
  Coding DNA Sequence Number=SeqID_34985
MQVVELVPCARNKWGNWNEFWFYVAEGTVEGHEGLPVSEMCSHFYSVYPPFEVAEEDVDEGALRCTAGVSSGRDLVEEFVAYGVWPLAHGWALGEVCPRQMPFHGGRVVRSSAFALNLQSRDPAAFVREAEDGAVRLVGRYVPRTEGQRSFDIRESNDRLNRVFELNQLPYDGYPGQDEVDRRGKKPVVETGDDPAPAAASSSKKRKLGTAMGGLGVSDGFARELMRTCAAPGGRMSSPELRESSARMLRVTGGCWPRNVPIPRAGGEDFFTSRMVHEWRVFPYGRNIAAVVSAVMDKDRQGAAQKRQAVVRLVEARPKRHRGAAKAAAPGGGKPPLAAKSGAPASSKAPKATAGAGGSKSTKMVPPSSGVAEVVKAARALPLSGKRVADFATDINVDDYLVGSDEGQLAIVAPAAAATTAAVVPKTKVGALSAGGEVSALAAVRDEAGAASRRLKEVTEALSQVADFANRTTSGALTTAVSAEVERLRTQHADAVREKSAADSKCRKLTDKVAALEREKADLRRQLAGERRETNEALVKEQAAQAEAKLARAEGNIARERAEQLQERLTALESRVERAEAVSRAEAERTRKQLMDTYRELGAWTGDFEVPDREPGLRCLEWVQEELQALPTVVEGLMSYASLVTCEGAMNALSREGCRHFEVFDQADEDFERDIYKVEDLVVKESAGAIYDRLWGPYGGEVVRERAETAMAQAARGERVDDFGALNSALPDPEPTPETAEGAPDAPASAAPGGDLPPEVTEGAPDAPAAAAPSAEDPAAVAAETTAEAMAEPTAEAPATSGPSQVA

SEQ ID NO: 78361 - protein, 92 aa, Zea mays
  Coding DNA Sequence Number=SeqID_34986
MPAQKRPLPSSASPGSDADVEEAPGADADGCGGADQRSPKVTLNGVEERDGGPLQAKDQRHGTTGLSTTRGPPTRVIFSRCAYASRGAASLR

SEQ ID NO: 78362 - protein, 108 aa, Zea mays
  Coding DNA Sequence Number=SeqID_34987
  Gene Ontology: Mol. function=transferase activity, transferring glycosyl groups; Cellular component=integral to membrane; Biological process=cell wall organization and biogenesis
  Homolog annotation: Hit_ID=A3ABA8; Match level="QueryCoverage=100%, HitCoverage=32%, E-value=2e-42, Identity=62%"; Hit description =Putative uncharacterized protein
MRHAYVRACEFVAMFDADFQPPPDFLVRTVSFLVHNPSLALMQTRWKFGTAGVWRTQAIVESGGWEDQTTAEDMDLALRAWLMGWEFVYVGSIKVKSELPSTLKAYQS

SEQ ID NO: 78363 - protein, 333 aa, Zea mays
  Coding DNA Sequence Number=SeqID_34988
  Gene Ontology: Mol. function=protein methyltransferase activity; Cellular component=cytoplasm; Biological process=protein amino acid methylation
  Homolog annotation: Hit_ID=Q6L4V6; Match level="QueryCoverage=85%, HitCoverage=30%, E-value=1e-70, Identity=53%"; Hit description =Putative zinc finger protein
NNECPACRTHCASRRSLRDDPNYDALILALYPDIDKYEEEELAFSEEERTRNKRIQESIAETFRRQTEALVKKRSTVKATDAASTRKTRRNMRPRRRGRISSPDIAPTDFDDDDREENGDDGSKESSSVDDHSPDVRPKRSRRWPMPRRSPAKAIGNTDNSIEDNDDSGGARDFMTASPLRGEMLAWGKNGTRSQTRHGNSSGSSGRMGRSGRVAKLVDQFRNADDFDNENVRNTNMPMDTFVRKVTELNLYLVLLPLDGQSVPKLEKPYLSCLPTLSVRHLCQLLRRFHMYPGIVILSESTRTGVDQIFTINSTSRLNATVCKDLQLVEACT

SEQ ID NO: 78364 - protein, 77 aa, Zea mays
  Coding DNA Sequence Number=SeqID_34989
MVVFATLLRTSLRPVPAPKAPSVHAPSSPADSATDSNEAAAGDNEQFEVSECVAGDFPEQQLGEGKCPLTHYVLLTL

SEQ ID NO: 78365 - protein, 381 aa, Zea mays
  Coding DNA Sequence Number=SeqID_34990
MTSHGSSDDGNALTHTDGLAREGFPRILWEVLQGAGYTTPPQYAVQQFEKHRVPRCRVRMTLEPHPLQPGWRSLDSESFGYRAEDTIEAIALHGLTTFCGFHPLELATHPIGLFPAEKEDDPMWKDRVEHAKDIWAIYPGQTAHLTVRCMNALYRLQVMRGEAMSHLMALLEATKITLDNREELVVDLSQEMVEKDLQVEQLSTDIQELEELVGTRENTIEVLEDQLINTQQQLAEANEHLDMHHQEIQDQEANEDVDIEGGDEPASSVDTAGSGRPPSPESSVASWLNVSHHPSIMVVETTNVTPRQPPIRNSSAPSLHCSQGRRTHLTQMYGCEWWNPNSHYSMEFAQRSPRSGSPPSSFADLQGLGGITFLLCSQRTE

SEQ ID NO: 78366 - protein, 275 aa, Zea mays
  Coding DNA Sequence Number=SeqID_34991
MQESLAGPPSQQNPPEGLPTLTTPLLPLPLSDNKSVIMNNVSSYPKPHKALASTTQKVQCHWTKHTNTEKTGVIGVKFPKTQDAVSLDGGLKHCKHKGSITKRHREAVSWIWGHPINTGRSRLNRQGFKSVGKTYCPPRRADHGGSNGADEQLNVPQCDRELKHLVLHSMEIMRTFEEVLPRSGDAENSIHAETWLGGGSGFGEQFLWTQQGTSSIAHPLPPQRSQYELRVATIEDEPHWGWLSAAAAGSLRVERGGAGVGVEWDSEERGRRGDT

SEQ ID NO: 78367 - protein, 106 aa, Zea mays
  Coding DNA Sequence Number=SeqID_34992
MEIMRTFGEVLPRSGDAENSIHVETWLGGGSGFGEQFLWTQQGTSSIAHPLPPQRSQYELRVATIEDEPHWGWLSAAAAGSLRVERGGAGVGVEWDSEERGRRGDT

SEQ ID NO: 78368 - protein, 68 aa, Zea mays
  Coding DNA Sequence Number=SeqID_34993
MGSARRRLLPAAAVLRQPGVWARVARTRGRECVCKEDDIRRAVNERNWSIRKSNTPSYLSSTPLEDSA

SEQ ID NO: 78369 - protein, 137 aa, Zea mays
  Coding DNA Sequence Number=SeqID_34994
MEHGHGRCDRRTEQRITRARRTEAEGRKRDHRRRSQAPFSNNGGSSSSSDAHSPAPSRQCSQAREIWMRKVRQVQRDELGRHRAPPHLYSGTLLGSRWQSRDSRMPLRSDGVRRWGLAAAAGFVEDPNLPPKPRSPI

SEQ ID NO: 78370 - protein, 217 aa, Zea mays
  Coding DNA Sequence Number=SeqID_34995
MPPRTRKTARKHTGPIGVPRHQLAPREEDSSSGSNDPIGDLEARMNQLQAELHRRTNLWVADGDRINDLRSYIRTLQDQLADRDLALDWAVQSCSVALAKEAKARARVDELSVAIDNLQMPTRTRGQDAAGTSGGRDVTPNPPLVPPTLAEAIAALVNATADNTRFLREMAGQQLQQQGGRGYQQGPRETTYLDFSETRPPLFVKAEDPLEADEWIR

SEQ ID NO: 78371 - protein, 807 aa, Zea mays
  Coding DNA Sequence Number=SeqID_34996
  Gene Ontology: Mol. function=molecular_function; Cellular component =cytoplasm; Biological process=cell differentiation
  Homolog annotation: Hit_ID=A2X9Z9; Match level="QueryCoverage=100%, HitCoverage=100%, E-value=0.0, Identity=75%"; Hit description =Putative uncharacterized protein
MAAAPTADAMDVDAPARTLTTSPATKLRSPHDLLAETRASIEKVAARILAIKKDGAPKSELRELVTQMSLHLVTLRQVNREILMEEDKVKAETEAAKAPVDSTTLQLHNLLYEKNHYVKAIRACLDFQTKYPGIELVPEEEFQRSAPADILEKTLAADASHDLMLKRLNFELVQRKELCKLHEKLGQQRGSLLETIANQKKFLSSLPSHLKSLKKASLPVQQQLGMQHTKKLKQHHAAELLPTPLYIAYTQLLGQKEAFGENIEVEIAGSTKDAQIFAQQQAKKENSTLSSGDNRMDDDVIDDEEDAQRRRSRSKKNVVKEANNPAVAYQLHPLKIILHVYDTEDSGSKRRKLITLRFEYLAKLNVVCVGIEDSEGLDSNILSNLFPDDTGLDLPHQMAKIYVGEVPNFSDKDSRPYKWAQHLGGIDFLPEVPPSVGDDSSRALNTADLSSGLALYRQQNRAQTILQRIRLRKVAQMALIIPLKFSSLFDYRWQLDYLTKLKWPRIEHKNAPWASRNPLCSLHSWSLTSYPESSRSILMLSGAASNVDSDVERSVTNWEETESIREDGELPVVIPAENEPNGSTILQPEVSAEIRSHSRGLSLISKSATPSKLSISRSFGRNEDDLDLLMYSDSELEDQPCILDETEKATSPIRDRFWEEYASKEFTMVLSKTMKNGLKVMLEAKVKISMEYPLRPPLFRLRLLSEKSEILKWHNDLRAMEAEVNLHILRSIPLSYEDYILTHQVMCLAMLFDMHFDEENEKRKVTSVIDVGLCKPVSGTMLTRSVRGRDRRQTIYWRGADCSSSYL

SEQ ID NO: 78372 - protein, 268 aa, Zea mays
  Coding DNA Sequence Number=SeqID_34997
  Gene Ontology: Mol. function=oxidoreductase activity, acting on single donors with incorporation of molecular oxygen, incorporation of two atoms of oxygen; Cellular component=cytoplasm; Biological process=flavonoid biosynthetic process
  Homolog annotation: Hit_ID=A2XA01; Match level="QueryCoverage=62%, HitCoverage=98%, E-value=7e-22, Identity=66%"; Hit description =Putative uncharacterized protein
MGGETHLSVQELAASLGALPPEFVRSEQDQPGATTYRGAAVPDAPVIDMSEPGFGARMGRSRQGVGAVPAGAHARRRAAHRHEHAHRPRAQRGAGAPGLQRWSMIFSNGAYKAVLHRTTVNKEKTRMSWPMFVEPPGELVVGPHPKLVTEESPAKYKAKKYKDYQHCKINKLPMLHYQKRALCRVPEALDKALKTLGKGFAECRTRQRKLGKQYIGKAFFAEYFFSGTRQKGLPSAREHSTKKSGRYGDEVTETASLPSVKDDTRQRS

SEQ ID NO: 78373 - protein, 57 aa, Zea mays
  Coding DNA Sequence Number=SeqID_34998
MGSSSLRAERESRLVGGYEIDGFDYDYGAGCQHCNHCSGEDEAVEGDFQEFQDYDEF

SEQ ID NO: 78374 - protein, 630 aa, Zea mays
  Coding DNA Sequence Number=SeqID_34999
  Gene Ontology: Mol. function=binding; Cellular component=integral to membrane; Biological process=transport
  Homolog annotation: Hit_ID=O80414; Match level="QueryCoverage=55%, HitCoverage=94%, E-value=1e-161, Identity=83%"; Hit description =Mitochondrial phosphate transporter
  Pfam annotation: Domain name=Mito_carr; Domain location=164-252; Score=88.3; E_value=2.4e-23; Accession=PF00153.18; Description =Mitochondrial carrier protein
  Pfam annotation: Domain name=Mito_carr; Domain location=265-348; Score=1.5; E_value=0.0022; Accession=PF00153.18; Description =Mitochondrial carrier protein
  Pfam annotation: Domain name=Mito_carr; Domain location=67-155; Score= 99.4; E_value=1.1e-26; Accession=PF00153.18; Description =Mitochondrial carrier protein
  Pfam module annotation: Pfam domain module=Mito_carr::Mito_carr::Mito_ carr; Domain location=164-252::265-348::67-155
  Subcellular localization annotation: CTP_CleavageSite=40; ConfidenceScore=5.15e-01
MALSDRSRESLLPSFLYGSSARSFAATGAAARLPVSSPAPAAAGAGGGVPFSIQAPKEKIEMYSPAFYAACTAGGIASCGLTHMAVTPLDLVKCNMQIDPAKYKSISSGFGILLKEQGARGFFRGWVPTLLGYSAQGACKFGFYEFFKKYYSDIAGPEYAQKYKTLIYLAGSASAEVIADVALCPFEAVKVRVQTQPGFARGLSDGLPKFVRSEGVLGLYKGIVPLWGRQIPYTMMKFASFETIVELIYKHAVPVPKSECSKTTQLGISFAGGYVAGVFCAIVSHPADNLVSFLNNAKGATVGDAVKKLGLWGLFTRGLPLRIVMIGTLTGAQWGIYDAFKVMVGLRTQFVVHGSATADVLSATHARAEPSNCALHRDLRASSLSLSSRVRSPMEGNSSPRSARAPFLSPLLLSPLSRSSQWEVRHLRLAPPSMEGPSLSPPCPRPRVPAPALRSRARRHRHSAPGPPRDLQPPPRSPSSNPSAARHRADTTTSCAVVKEVVLNRLATKATSWVVSRNSTNRPASAESERAHSSVMRSTMPHLPQAPRRLHPRELATPSSPLFMYAKTSRLELVLQVLGEMPSRNVVSRTMLAASLASLTLKGSSEVFEDLSDRHGLWTSLPPCRYPHDY

SEQ ID NO: 78375 - protein, 105 aa, Zea mays
  Coding DNA Sequence Number=SeqID_35000
MSSRPLPQTETSTLKGPWRMRSWTSRSWCLVVAMDLLGDGAAKDEVMDLKVMMPVSWEQRLGLLVDQVHHALGEAGSGHWWNQRHRAAGCSIIAEQEHQVKVAPK

SEQ ID NO: 78376 - protein, 139 aa, Zea mays
  Coding DNA Sequence Number=SeqID_35001
MKRASLCEGEVILLSKSLKLNLVTRISYLCFKGGGSLSLFEIRKGANGSTQTNKKNELGFKRKEQKGNRSVPWSGAPDCVRCTRVNQLKLRTFGFPRRSSAIIHRTVRCASRATIICAQQSTLTDEQCNTVPRQKSEQQ

SEQ ID NO: 78377 - protein, 197 aa, Zea mays
  Coding DNA Sequence Number=SeqID_35002
VEMLEKQKNEVITSHFEEAAFASVTCYTLFWFITGSELGPGEDETASWANGKENLSAEDIDRSMILQPEIGKVLAGEPASPFRASSVVLAGRVAFVVLDWKGISECLQSYDGTDVCMVPTRAVSEESVRPVGRLGPCNASKNPELKASHGARGIGPEDACCIPLIVRQVLDQGQSSAVQQTAPSIAALLAIANVICH

SEQ ID NO: 78378 - protein, 448 aa, Zea mays
  Coding DNA Sequence Number=SeqID_35003
MEGQAITGARVPARTGQDQDLGNRWSDVDARGWIQRGLGTDLSWEELELLVKGITGLRTAILATLPTLDESGVAVHQTGRWDPHRGIRISDAPAGGPQRDIVAPSAPVVAPRPLDKGKGTASSSSALGGTGESEEERRRWLRQADGSFVSDPPEASEDYWWGRGGWLPCPGRAEACQSSATTTIGSAATITTTTQGHLLGVVPALTDGYRSLNDGDAVEYTTEAAILREWEALGSKHQRLNDWCTQLEECTKAASHQFAFERSELARDRKDYKRTSRRAPGQAESPGPDPGGPANPAGGAGGTRPQVVEATRKALEDLQAEHRVGVQRIAAWAGEASKALVPLGMSPIPVSELPTSISDALPVLDSVADRLRRLNQIIGARLEAEGSRLCQAVTEYILTCFWSHDPAISLELVIAGPVADTEDAAREGVQDVVELVAERFQRDPADDE

SEQ ID NO: 78379 - protein, 355 aa, Zea mays
  Coding DNA Sequence Number=SeqID_35004
  Gene Ontology: Mol. function=oxidoreductase activity, acting on single donors with incorporation of molecular oxygen, incorporation of two atoms of oxygen; Cellular component=cytoplasm; Biological process=flavonoid biosynthetic process
  Homolog annotation: Hit_ID=A2XA01; Match level="QueryCoverage=98%, HitCoverage=98%, E-value=1e-136, Identity=68%"; Hit description =Putative uncharacterized protein
  Pfam annotation: Domain name=2OG-FeII_Oxy; Domain location=195-316; Score=98.4; E_value=2.3e-26; Accession=PF03171.11; Description=2OG -Fe(II) oxygenase superfamily
MGGETHLSVQELAASLGALPPEFVRSEQDQPGATTYRGAAVPDAPVIDISEPGFGARMAAAAREWGLFQVVNHGVPSAAVAELQRVGRAFFALPTEEKERYAMDPASGKIEGYGTKLQRDLEGKKTWNDFFFHVVAPPEKVDHAVWPRSLAGYREANEEYCRHMQRLTRELFEHLSLGLGLHGGAMAEAFGGDGLVFLQKINFYPPCPQPELTLGVAPHTDMSTLTVLVPNEVQGLQVFKDGQWYEAKYVPDALIVHIGDQIEASDLRSIFFFSFYCVVMILLPQIFSNGAYKAVLHRTTVNKEKTRMSWPMFVEPPGELVVGPHPKLVTEESPAKYKAKKYKDYQHCKINKLPM

SEQ ID NO: 78380 - protein, 348 aa, Zea mays
  Coding DNA Sequence Number=SeqID_35005
  Gene Ontology: Mol. function=binding; Cellular component=integral to membrane; Biological process=transport
  Homolog annotation: Hit_ID=O80414; Match level="QueryCoverage=96%, HitCoverage=96%, E-value=1e-151, Identity=79%"; Hit description =Mitochondrial phosphate transporter
  Pfam annotation: Domain name=Mito_carr; Domain location=164-234; Score=24.6; E_value=1.6e-05; Accession=PF00153.18; Description =Mitochondrial carrier protein
  Pfam annotation: Domain name=Mito_carr; Domain location=247-330; Score=1.2; E_value=0.0024; Accession=PF00153.18; Description =Mitochondrial carrier protein
  Pfam annotation: Domain name=Mito_carr; Domain location=67-155; Score= 99.4; E_value=1.1e-26; Accession=PF00153.18; Description =Mitochondrial carrier protein
  Pfam module annotation: Pfam domain module=Mito_carr::Mito_carr::Mito_ carr; Domain location=164-234::247-330::67-155
  Subcellular localization annotation: CTP_CleavageSite=40; ConfidenceScore=5.21e-01
MALSDRSRESLLPSFLYASSARSFAATGAAARLPVSSPAPATAGAGGGVPFSIQAPKEKIEMYSPAFYAACTAGGIASCGLTHMAVTPLDLVKCNMQIDPAKYKSISSGFGILLKEQGARGFFRGWVPTLLGYSAQGACKFGFYEFFKKYYSDIAGPEYAQKYKTLIYLAGSASAETQPGFARGLSDGLPKFVRSEGVLGLYKGIVPLWGRQIPYTMMKFASFETIVELIYKHAVPVPKSECSKTTQLGISFAGGYIAGVFCAIVSHPADNLVSFLNNAKGATVGDAVKKLGLWGLFTRGLPLRIVMIGTLTGAQWGIYDAFKVMVGLPTTGGVTPAPAAEAELKASA

SEQ ID NO: 78381 - protein, 261 aa, Zea mays
  Coding DNA Sequence Number=SeqID_35006
  Subcellular localization annotation: CTP_CleavageSite=37; ConfidenceScore=5.17e-01
MGLNISLYKPNTPLSISTGSSRITASGNDDFHWPLVLAALKNVSANVSRTTTIEPLYTSARPFGRVETGRLWASDACTEEEERDHPELRSEILRLQGEVSSLRVECDGACGDVDRLRDESSRLGETLRGVKSHTELADHPHGRWRALQDARLIMGCESCDKQVLLVERPQELPDHVERSVAKGVCRGGGVALGQMVSHFDEIDTAVIVEGYAAGQSDEELDTIENQVRPFAQSIASWIDVRSLLTDPLTKKPSASDPSSSV

SEQ ID NO: 78382 - protein, 126 aa, Zea mays
  Coding DNA Sequence Number=SeqID_35007
  Homolog annotation: Hit_ID=Q8IEA3; Match level="QueryCoverage=62%, HitCoverage=2%, E-value=9e-07, Identity=35%"; Hit description =Putative uncharacterized protein MAL13P1.114
MSKNTRDKRFILRFGHTTKVPCFLVEAPTKSWVSFNHNPPFANHKAEVKFNSAEETFNSAEVKFNLAEEKVNSAKVKFNSAEEKLNSAEVKFNSAEEKLNSTKVKFNFSERKFSCFSIRRLSISQT

SEQ ID NO: 78383 - protein, 88 aa, Zea mays
  Coding DNA Sequence Number=SeqID_35008
MRPWPACQRPCPLALGPLDNEQSEVPECVVGDLPEQQPGEGGSGLFPEYLSAGKGSRLMGKVCNLCRVLGTGISAELTVKSSLGILFD

SEQ ID NO: 78384 - protein, 131 aa, Zea mays
  Coding DNA Sequence Number=SeqID_35009
MEDFEEFQEYDEFYFTLVANPQLYGCLRHLDVIKYLSAIYVEHCVMMSNYVIAVYMSSDPGTYASSDAAGTSRDAPRKAGCERRNEARKDGTTAISTNASTTTTSSTPGQAPGVHEPQDTDIRQLFGSSTS

SEQ ID NO: 78385 - protein, 28 aa, Zea mays
  Coding DNA Sequence Number=SeqID_35010
MYDTPPPVVQHSELLDGSKLLDRRLQTR

SEQ ID NO: 78386 - protein, 117 aa, Zea mays
  Coding DNA Sequence Number=SeqID_35011
MPMRFIKKRNCQPLLLSMREEKDEEEEVQHHDEEIAASDVGVQGHDEEEVAGIDAEADDDTIEAPAVRWRGTRKGHFVLPPSAPAQSEARVLIIPVGDSQWDDTSFDGRCHCWGYAS

SEQ ID NO: 78387 - protein, 96 aa, Zea mays
  Coding DNA Sequence Number=SeqID_35012
MGSGDERRARECEEWERAQVGRMGERRGCWIYRVEGGARNGKGNDGWVARAPGESLDRAMLGVVIGRGLGSGASGAGVATARAVGQELAPWRVVFL

SEQ ID NO: 78388 - protein, 394 aa, Zea mays
  Coding DNA Sequence Number=SeqID_35013
MACLGLGGRRKHTLQDNPILQARISIVEGSSSTLGVNYTFGEVRPSLGRRRGPRISTLKDDVIITPGPSSPGSSPRIRLEQAARLVTPRPRSAVPRRHQPGPRPRQINSGVGPDSHNEQKTGIQGAITNGTPVPPPQVRTTPHDWGGAYGATKGRRTAHRRPLQQQRQQPPLRVAELQPRWPQGERSCNLALAHADARGAKTSTKSRRPEARMVAVIPSATGTSRAASASAPTTGAVSPPADPHSDPPGRAEHRPPRGGAVPVQRQDRPRTQSRPGSARHLGRSSRAHGATTALAARGGVGSQASEPNALKLTTPAVDQPRVVEVRPSRRASERPLPRTLKERLTHEPAREVELRLSPASAPARMMNILEAKGGTKIAARLASPHPGAGDHRLG

SEQ ID NO: 78389 - protein, 223 aa, Zea mays
  Coding DNA Sequence Number=SeqID_35014
MTASPPEVGLDESILCPPPRVDLGRVVVEVPRVLVHLIMVPNRVVLPPGLEGTSSSASGVMGTMVLVGGPLCHGDAATSSNVSAEVGGPTMDPALIVAPAVNIVIAATSLGGALLQFRGAIPQAILLPCGNGVVISCGGSSEVGQPAPGSFGLQEQSIAAMVAGGVTLLAPLVEGGDAEAEEWRRLESAPLRADATLETTDCMLSGFGDVISISRASVTGNLH

SEQ ID NO: 78390 - protein, 144 aa, Zea mays
  Coding DNA Sequence Number=SeqID_35015
MASTVCGRHFYWRFSMTTASRNGLHSLWKAFLLAVLNDNRRSMSSPIKDQGLGPDHMDKSVAQEQSSSEGYEMPSDPFPTTSIYRAAARGLVSISCDARKSCGTMPRRTGTDPRRTGTDPRRTGIDQDNHREVKEKEAERSEQR

SEQ ID NO: 78391 - protein, 114 aa, Zea mays
  Coding DNA Sequence Number=SeqID_35016
MDTRDRFYEGRPHRVQNNCAMDSRDPRFMRADLTDWIIGVEGGAWLVVDDGNLIRHVARLMIIVVDHVDLGATLPTPSAPDVGESPGILSEWTGRGLPVVVRKSREPNLIVLLR

SEQ ID NO: 78392 - protein, 159 aa, Zea mays
  Coding DNA Sequence Number=SeqID_35017
MGHGRPLGLPRQQLTGDTMFGALRGQHGGFPPLLLAERRRRGSQSDRSHFAAPLTGLTEGQRCLRRSDCCATRQSEADRRPGPASGTIGNSAPEDSELRSARPRARTRAQPRKTANCAPPDPGLGLGLSPGRRRTPLRPTQGSDLGSAPEDGELRSARP

SEQ ID NO: 78393 - protein, 474 aa, Zea mays
  Coding DNA Sequence Number=SeqID_35018
  Gene Ontology: Mol. function=phosphoinositide phospholipase C activity; Cellular component=endoplasmic reticulum; Biological process=intracellular signaling cascade
  Homolog annotation: Hit_ID=Q6QJ78; Match level="QueryCoverage=100%, HitCoverage=81%, E-value=0.0, Identity=91%"; Hit description =Phospholipase C
  Pfam annotation: Domain name=C2; Domain location=347-439; Score=81.4; E_value=3e-21; Accession=PF00168.21; Description=C2 domain
  Pfam annotation: Domain name=PI-PLC-X; Domain location=1-144; Score =140.0; E_value=6.7e-39; Accession=PF00388.10; Description =Phosphatidylinositol-specific phospholipase C, X domain
  Pfam annotation: Domain name=PI-PLC-Y; Domain location=211-326; Score= 18.3; E_value=1.1e-06; Accession=PF00387.10; Description =Phosphatidylinositol-specific phospholipase C, Y domain
  Pfam module annotation: Pfam domain module=C2::PI-PLC-X::PI-PLC-Y; Domain location=347-439::1-144::211-326
MSAPFSHYFVFTGHNSYLTGNQLNSDSSDVPIVKALQGGVRVIELDMWPNPSKDNVDILHGGTLTAPVEMIKCLKSIKEYAFCASNYPLVITLEDHLTPDLQAKVATMLTETFGDLLFVPNPDPMKEFPSPASLMKRIIISTKPPQEYKEFLKAENNRSGSGNIAELPDQGSLRRIDSNADESDGKDELDEQDEEDSDSDDPKFQQDTACEYRKLITIQAGKPKGHLRDALKVDPDKVRRLSLSETQLAKATISHGAEVIRRIYSVCIQRARGLILSNYDPMNAWTHGAQMVAFNMQGHDKALRLMQGFFRANGGCGYVKKPDFLLRTGPNGEVFDPKASLPVKKTLKVKVYMGDGWRMDFSKTHFDAFSPPDFYTRVGIAGVKADSVMKKTRVIEDQWVPMWDEEFTFLLTVPELALLRVEVQEYDMSEKHDFGGQTVLPVWELKQGIRAVPLHDRKGVRYKSVRLLMRFDFV

SEQ ID NO: 78394 - protein, 50 aa, Zea mays
  Coding DNA Sequence Number=SeqID_35019
MVTFMMMINNGDYNPDLWALKLAEHEGQGGVGTFLLSDNSLIIDILLERG

SEQ ID NO: 78395 - protein, 628 aa, Zea mays
  Coding DNA Sequence Number=SeqID_35020
  Homolog annotation: Hit_ID=A7QYN2; Match level="QueryCoverage=39%, HitCoverage=45%, E-value=2e-76, Identity=60%"; Hit description =Chromosome undetermined scaffold_252, whole genome shotgun sequence
  Subcellular localization annotation: CTP_CleavageSite=52; ConfidenceScore=5.80e-01
MAASSSPSSRSLLATRPLFLPLRTRRSLPPTSIPPRLSCLRSPSASSSPSASASAYNGWADLAAAPDTPFPFPLSFPLQPTTHGLLVLLPAAAIALSLSLARLPPLPLLAAAFTAGFAARHLSSSAQAQSPGRLSALLADLDAHARALREQLVSDAHPGLLVQAVDRLRDAVADAATVAAEQGDTGRTMSDALGPLGEVADYLGAWARHAVRDLSLSPPRKKPAKGNNSSDVQAAANPNNRAAQQQQEIGSNKPVDSTLQQQPFAFDPSAVDDANGRPLGMLQFDEDDNGSKDAGTGAQATLERLVSKHRHRRDPDGPPFEGRFSDESSSLLERTLEIRDRSYRLKIGVMSEAHPPVYGDDESAASAADSDGEEFSRNVKEAAEILRKARASMADEETADALLYKSARLLSTAVALRPTSLVAVGQLGNTYLLHGELKLKVSRELRTLLASSGAFLNGRERAPRSRKVDRRMVSRESISSALVDVCEECESLLVEAGRSYRMALSIDSGDAKALYNWGLALIFRAQLLADIGPEAAADADRVYLAAIDKFDAMLSRSNTYAPEALYRWGTALQQRSHLRPRSNGEKIRLLEQAKSLFEDVLYVEADNKMVREALSSCISELNYHGRWL

SEQ ID NO: 78396 - protein, 278 aa, Zea mays
  Coding DNA Sequence Number=SeqID_35021
  Gene Ontology: Mol. function=aspartic-type endopeptidase activity; Cellular component=integral to membrane; Biological process =cytochrome complex assembly
  Homolog annotation: Hit_ID=Q5Z413; Match level="QueryCoverage=86%, HitCoverage=57%, E-value=1e-105, Identity=66%"; Hit description =Putative growth-on protein GRO10
  Pfam annotation: Domain name=Peptidase_A22B; Domain location=28-241; Score=233.0; E_value=6.8e-67; Accession=PF04258.4; Description =Signal peptide peptidase
MASTKNNVLTNALIVKDGHEDLLNVEARGSSGMVDINVASAIMFVVVASCFLIMLYKLMSYWFVELLVVIFCIGGVEGLQTCLVALLSSSPFAWIGQDILGIALIVTVIQIVRVPNLKVGSVLLGCAFLYDIFWVFISKRWFHESVMIVVARGDKTDEDGVPMLLKIPRMFDPWGGYSIIGFGDILLPGLLVAFSLRYDFSAKKGLRSGYFLWAMVAYGSGTLIALGWKRGELQNLWARGEPERFKRRHCFLETAKSDCELTAAQCAAMHATNIQERR

SEQ ID NO: 78397 - protein, 113 aa, Zea mays
  Coding DNA Sequence Number=SeqID_35022
  Gene Ontology: Mol. function=metal ion binding; Cellular component =nucleus; Biological process=transcription from RNA polymerase II promoter
  Homolog annotation: Hit_ID=Q5Z405; Match level="QueryCoverage=88%, HitCoverage=24%, E-value=3e-40, Identity=76%"; Hit description=RB -binding protein-like
  Pfam annotation: Domain name=PHD; Domain location=51-96; Score=45.8; E_value=1.5e-10; Accession=PF00628.20; Description=PHD-finger
MENDTIVVIQVACDSGELALDLVYGLIAEGENLSVDFEKELKLLRDRSVLYCICCKPDDNRAMIACDQCDEWYHFDCINLLGPPPESFFCPACHPNNGEESVSLARSEDDEDR

SEQ ID NO: 78398 - protein, 1104 aa, Zea mays
  Coding DNA Sequence Number=SeqID_35023
  Gene Ontology: Mol. function=metal ion binding; Cellular component =nucleus
  Homolog annotation: Hit_ID=A2YH92; Match level="QueryCoverage=88%, HitCoverage=61%, E-value=0.0, Identity=53%"; Hit description =Putative uncharacterized protein
  Pfam annotation: Domain name=PLU-1; Domain location=199-593; Score= -45.9; E_value=2.8e-06; Accession=PF08429.2; Description=PLU-1-like protein
  Pfam annotation: Domain name=zf-C5HC2; Domain location=64-117; Score =81.9; E_value=2.1e-21; Accession=PF02928.7; Description=C5HC2 zinc finger
  Pfam module annotation: Pfam domain module=PLU-1::zf-C5HC2; Domain location=199-593::64-117
MSISRLENGVDAESLTHLKGEIKRLFINERRRRVELWINGTVKSSLMLPRINPNFIGSEEDPTCIICRQYLYLSAVSCNCRLSSYVCLEHWKHLCECSPKKHCLLYRHTLAELGDLVCEVSLVSPQRDNVMQNPHLLNDVYVPSKKVKDHYILYRQLAEDWVSNSEHILQMPFVERSYATALEEAEQFLWGDHAMDSVRNITVRLTKAMKWALGVRKCLSKIQDFLKDGCSEKVNYVEIEELVATKCAPCCEPSLTKLQAYAEEAKLLINEVNNALSSFLTVDKLETLYSRVSEFPVKLTESSTLFWELSSAKSWLKKASDCLEQNKLGIIDIDVLNKLKSEIIQLRVLLPEIDLISKLWKDVESWQTRCQLYLQDFPDLKELEGFLLAADGANFSIPELNILKQHYSNCCSWLLSYAVDELPIVEKELKRSLCRKQASEALATVMPMEVVEEILKEASILHIEEEQPFDDLSRMLKEATSWEEKARLILERSASLSEFEDHMRCSEGIRVILPSKLHMKAEVDIAKLWIDKCQAYLRPGCNKLAFGDFLKVDDIKDLINQPANLKVILDTSELNSVLNNIEKWEHSSLSLLNNFRALLHLNSIGSTVDTLQRKLEELQGKMNTEIEVGLSLGFEFKVLWELKDSSLMLRWILNALSLCCMIPLLQDVDRLIEEAVHLPASLADCSLVTLLMRALSCLRKSLILLPGSGTSAKSKLEDVENILAEFKEVDVPYPIMTAKLEDAVNNHNSWIEQCNTFFMLSDGQSWAMLQNLRDNGQSVAFDCPEMDKVVDEVKNVEEWLNQCHCTLLLDGNNSSLLSILVKIRGLLDDVCTLYAEDCMKLRLCASEDQLKNQLSVKMSKGNCPALAALDELISSAKGLYTGIEEINLLKEIVDKARNLNAYLMQILDDSDCYHGEDLTVIFKSLLVALKATSASGLYDDNVSCRIESVLSRYLWKKQIHKLLYGGKKSSIQEVLCLDEEHFKTATPLHLFNHPSCSKTATMSAAVSRRRAKNPCQDFPYVETEEWLAWAHVRMDLLSMILRGVSSRTWVTPLMQQGLTKEHKTYSELFKTTINDVHLSALAAIFGWRTDKMDDPCASGALVGH

SEQ ID NO: 78399 - protein, 514 aa, Zea mays
  Coding DNA Sequence Number=SeqID_35024
  Gene Ontology: Mol. function=metal ion binding; Cellular component =intracellular; Biological process=regulation of transcription, DNA -dependent
  Homolog annotation: Hit_ID=A2YH92; Match level="QueryCoverage=90%, HitCoverage=27%, E-value=1e-162, Identity=60%"; Hit description =Putative uncharacterized protein
  Pfam annotation: Domain name=ARID; Domain location=82-185; Score= -24.6; E_value=0.041; Accession=PF02928.7; Description=ARIDBRIGHT DNA binding domain
  Pfam annotation: Domain name=JmjN; Domain location=19-63; Score=93.7; E_value=5.8e-25; Accession=PF02375.8; Description=jmjN domain
  Pfam annotation: Domain name=PHD; Domain location=268-316; Score =52.3; E_value=1.7e-12; Accession=PF00628.20; Description=PHD-finger
  Pfam module annotation: Pfam domain module=ARID::JmjN::PHD; Domain location=82-185::19-63::268-316
MGKGAPPAVATATSVPEAPVFHPTDEEFADPLAYVARIRPLAEPYGICRIVPPSSWSPPYALDFKALSFPTKRQPIHRLLARPAPADPDTFLLDYRRFLGASSAHRRGRRKGLPKSPSLSDGRPLDLCRLFHAVKRFGGYYGACEGKRWGDVVRLVDDKAPMHISECAKHDEESNISVTGEMVEEVTGRKRRNFSRKELGRGTSHGRYGRVVNITGNNVASAVAQKRTRRNSDAVVTTVDEVSAGVRKRKRRKSDAASTVFNDEVDQVCEQCSSGLHGDVMLLCDRCDKGWHLYCLSPPLERVPPGNWYCSDCLNSDRDCFGFIQRRKSCLLETFRRFDDRVRKRWFGQRNPSRIQIEKQFWEIVEGKAGELEVMYGSDLDTSIYGSGFPRLGDTVPSSMDLETWQKYCSSPWNLNNFPNLPGSVLRTVKDKIPGVSQNVGYGVPGAKANAFEQRVVELDTITENRVHDLIEGHKRALKKLIVVKGGTHMGGDRNLATGEGGDTGRGRRFRRFG

SEQ ID NO: 78400 - protein, 136 aa, Zea mays
  Coding DNA Sequence Number=SeqID_35025
  Subcellular localization annotation: CTP_CleavageSite=79; ConfidenceScore=5.05e-01
MGGRGEDFGCMKSINGETKRRGGSVAWSGAVATAAVGRRLAGLRRAKSVQGAGSSRRVAGRHGARSAESRAGAERLGVAAASAGKPGSAGCARACLGAAGRRSGQGQPLAGATQCRVVRGRSRGAAGAPSTRRSDR

SEQ ID NO: 78401 - protein, 364 aa, Zea mays
  Coding DNA Sequence Number=SeqID_35026
  Homolog annotation: Hit_ID=A2XFR6; Match level="QueryCoverage=51%, HitCoverage=53%, E-value=6e-31, Identity=41%"; Hit description =Putative uncharacterized protein
MGTYSCLRYLTQGATTIVFRNLSGLLRIKMVRTLQTTRINTSYAPQPQQIPVYPVVVEEVPTDLPPIRVENVVILEDSSEEQLPTPTPLPESLAFAAGSSTSAPSAPAFQAPAPGGDNPDDSGDDDDKDDDDDEGGDEHVHEEADYAQQDNFMGFGPVVEHYTSMFETGHFPNLLQEVLHALGTYVRPLYETRRVSEPLRACYYITRIHVRVMDAGDRGFRTLSAHESLTPLSTYAASVSDAARWTLWSLSHTYQQQLQNTRFRHLPQRLRGGSQTSIVPGEAGEDRLNTLAGVVADLNTDLDSATLDLSRVHLELENAHARIAALEAQLQGLDPPEAQVPAMALSPPRKRLRYGEPGSVTRLL

SEQ ID NO: 78402 - protein, 256 aa, Zea mays
  Coding DNA Sequence Number=SeqID_35027
  Homolog annotation: Hit_ID=Q6J9V9; Match level="QueryCoverage=26%, HitCoverage=23%, E-value=4e-07, Identity=50%"; Hit description =Putative uncharacterized protein
  Subcellular localization annotation: CTP_CleavageSite=2; ConfidenceScore=5.29e-01
MGASHRRSRGKTTGAATPCLKTQGWRGCTIVHAPASTGGCSHRPAPPCGLSFPLSSRKKAPRRRDGSTDPSGVNPQKPFANRREDGCLRDRVGVEIVQLHPLEMQNRPHETACRHSEPPLMERDETQHVPRRQGRGGSARRDHPLRLRVTEEGTKQAIGNKGLQVVRRDGGERPWVARWNDGTGKGDTPKGILLHEGSGPQALLLIKGSKAGPSEGFDSRLRALGLRALLLIRGSKAGPSEGFDGRLRPLGLRAHY

SEQ ID NO: 78403 - protein, 104 aa, Zea mays
  Coding DNA Sequence Number=SeqID_35028
MISGVQKPSQSTILSLRGILPRQPCKMQHNEHFPSIARCSAGAGGVIVLPVAEGNLKLSSMVNLVVVLNTELDHTLDELGKVRAEVAELHAECAARHYLGGGSP

SEQ ID NO: 78404 - protein, 144 aa, Zea mays
  Coding DNA Sequence Number=SeqID_35029
  Subcellular localization annotation: CTP_CleavageSite=72; ConfidenceScore=5.05e-01
MLVDYTTILDRPSVSVKGPTQQGIESVVEATPASGVTSDGSSDLSLRLRLLRELRVVARTATGVVVVSVSVRGKEASQTPPLTEMRGKSPVAPGPAPSVGAPAPRAGDDAVSPAGWTGLTPYDAGDAPPVEKAKRGSQTYMQCT

SEQ ID NO: 78405 - protein, 94 aa, Zea mays
  Coding DNA Sequence Number=SeqID_35030
  Gene Ontology: Mol. function=protein serine/threonine kinase activity; Biological process=protein amino acid phosphorylation
  Homolog annotation: Hit_ID=Q5SN53; Match level="QueryCoverage=46%, HitCoverage=8%, E-value=5e-12, Identity=72%"; Hit description =Mitogen-activated protein kinase 8
MAGKATNPRAERGEWRCEDLERAGATPKEILYPKIRVLHEPITKVEFEFERTKVTKEGVKELILREILENHMNGTEKTNFIYPRYMFASDKNGA

SEQ ID NO: 78406 - protein, 65 aa, Zea mays
  Coding DNA Sequence Number=SeqID_35031
MSMCTLVRLRFVVPTGPNSCNIHRVPTFEREIGLHNGTVMAMVFKKEKGDMTPARDRGRQQWIRG

SEQ ID NO: 78407 - protein, 200 aa, Zea mays
  Coding DNA Sequence Number=SeqID_35032
MNNMNQLPNIKRLTRTHKNTRYNPRFGNHHKGVLLLVEEPTKGRVFSTLILHKPTKKVKAISSQISSKSGLVSQEFVGEAEVNERESVRGYIKDPPKAGSRWEKRSKNRLNRFSDRLNRFLPGGSRSTELLSRRLDRFQNRLSREKIRLNRFLKNICCDFSDSSDCQTDQSRGGRISVYMLGANLLESQFVLSLITKTLN

SEQ ID NO: 78408 - protein, 21 aa, Zea mays
  Coding DNA Sequence Number=SeqID_35033
MNICEEQVYPEEDYYDEFDEV

SEQ ID NO: 78409 - protein, 67 aa, Zea mays
  Coding DNA Sequence Number=SeqID_35034
  Subcellular localization annotation: CTP_CleavageSite=9; ConfidenceScore=5.02e-01
MEPPAPTCVCVLAPGRGSPAPAPKPSTEPRPGQSHPSPCVVAFEEWSGGTWKVEERTTNKAVCDFQM

SEQ ID NO: 78410 - protein, 67 aa, Zea mays
  Coding DNA Sequence Number=SeqID_35035
  Subcellular localization annotation: CTP_CleavageSite=9; ConfidenceScore=5.07e-01
MEPPAPTCVCVLAPGRGSPTPAPKPSTEPRPGQSHPSPCVVAFEEWSGGTWKVEERTTNKAVCDFQM

SEQ ID NO: 78411 - protein, 123 aa, Zea mays
  Coding DNA Sequence Number=SeqID_35036
  Homolog annotation: Hit_ID=A2WSQ0; Match level="QueryCoverage=64%, HitCoverage=25%, E-value=1e-36, Identity=92%"; Hit description =Putative uncharacterized protein
MKIILNIIRCLQQQQADNQVTAYSDGQVKVYELLDSLELDKWQLQAEFQNITDPISRFGKPACTSASIAWNPRRGGSQQASFAIGFNSDSPHFNSCKQDFNTLKMNRFGSLKKLISAGFHLLS

SEQ ID NO: 78412 - protein, 57 aa, Zea mays
  Coding DNA Sequence Number=SeqID_35037
MALWGREITAGSASQRKFTSDSVNGMERDCESGMGTERLRPVDFLERIGSGSEENIL

SEQ ID NO: 78413 - protein, 222 aa, Zea mays
  Coding DNA Sequence Number=SeqID_35038
MTSQSHPAQEQGLLPVEEAHDIRVATSELSDTMGLLREGAAAGPVGAACAIEGAASAQLGHRGEQSGAKVGAESAEPCSAAAAGPQGVTAPECLVHVAAQWWCQKNLQGQHIMAGTDTGLEQSSKKIKRSPGGASGILKGERGLLKDHMAQHDDSVCLTIKAKLYHSGQRCRGKTCGDEYHVTGRTGAEVIELAAIIVLNYLNGDIKLCVNIRKEVVKGPLA

SEQ ID NO: 78414 - protein, 214 aa, Zea mays
  Coding DNA Sequence Number=SeqID_35039
  Gene Ontology: Mol. function=identical protein binding; Biological process=negative regulation of catalytic activity
  Homolog annotation: Hit_ID=A2YTY3; Match level="QueryCoverage=46%, HitCoverage=22%, E-value=8e-24, Identity=54%"; Hit description =Putative uncharacterized protein
MTNVYGVTVAIGGAMMFVTCIFKTLVKIVRPRPKDSDDHMPAHGKGSYQDSVKHDVACNRKLIDARFFNRDMWLINPAVDVPLADDAKSLFHKLVTLGHLHTAIHSVSIVCSTDNSGSYDDTVFDAAPWVTTIAATTIDRDFPNILTLGNDVRLRRISLESTTLHSSAFYPMVDTARASPWGCSRCHRTGPHKASGPPPIKSILRTLNPAAYRD

SEQ ID NO: 78415 - protein, 112 aa, Zea mays
  Coding DNA Sequence Number=SeqID_35040
  Subcellular localization annotation: CTP_CleavageSite=43; ConfidenceScore=5.02e-01
MASAAWLRSWSHSLVIWPSSSCRCCISSAREATYSQADEAFVRADAASIRAAASTDFSSSQSSRRSAASAFCWARRSLASNSEIQTLSQRSGMFTLIPNSNPNGPINKNVPN

SEQ ID NO: 78416 - protein, 249 aa, Zea mays
  Coding DNA Sequence Number=SeqID_35041
MAWDRERRHFEGVLLGKGNGPRALLLIRGSKDDDTIHPVQTTVPTIRVRLTTGERQGSRQTTSTFSHGHPSGTAHDHDGELTRDEGSRGSRGPRVVEVVYGGWGGFDEFSGEAQTVVGALEGQGKFLTSRRDSGSPQLGGGNVMVAAWNDDSGFGTAPGKRLSKDRAERPGKGKTEAGSRGKGWGKQTERVQMRSGGGAGGPGSSLEAQTRRVGRGRGVRAAVYPLGTHDVGADTIERVVVGSGTGADG

SEQ ID NO: 78417 - protein, 181 aa, Zea mays
  Coding DNA Sequence Number=SeqID_35042
MEGKPPRERKSELKRESPPLAGVGEFICGRESKAGMLVGGAESGLVTARESNWMGQRAPRVAREDVGARNWSETHWIARSTRGGGRPKFGEVDLGPPVKSGWVRGLGELHGLLAELAEALARLGGGWSGLATVAEALAAMAGGIKLAGAKERGLAGEEIWSQEIRSVSLLKPEANPGFCRV

SEQ ID NO: 78418 - protein, 55 aa, Zea mays
  Coding DNA Sequence Number=SeqID_35043
  Subcellular localization annotation: CTP_CleavageSite=13; ConfidenceScore=5.33e-01
MAGSAAPCPCAPAGSAARPPQARLLGTGLTALAPVTTSPVRIAKSLTSSDRENIT

SEQ ID NO: 78419 - protein, 220 aa, Zea mays
  Coding DNA Sequence Number=SeqID_35044
  Gene Ontology: Mol. function=nicotinate-nucleotide diphosphorylase (carboxylating) activity; Cellular component=chloroplast; Biological process=pyridine nucleotide biosynthetic process
  Homolog annotation: Hit_ID=A3C1B7; Match level="QueryCoverage=80%, HitCoverage=39%, E-value=7e-60, Identity=68%"; Hit description =Putative uncharacterized protein
  Pfam annotation: Domain name=QRPTase_C; Domain location=54-220; Score= 76.9; E_value=6.4e-20; Accession=PF01729.10; Description=Quinolinate phosphoribosyl transferase, C-t
MALTQYLIDLLAILIIDSLHRSSATSIHYCNNKYDSFCWSFYVSVMYMSRMCGIATLTKAISDAARPACILETRKTAPGLRRIDKWAVLIGGGKNHRLGLFDMAMIKDNHISVAGGIANAMRSVDQFLQKEKLNSCRGRYFFTDAHVDKDKPMCLGIDISVVETRTIEEMEDLLKYAAENKTSLTRIMLDNMVVPLANGDVDVSMLKDAVQLINDRFETE

SEQ ID NO: 78420 - protein, 215 aa, Zea mays
  Coding DNA Sequence Number=SeqID_35045
  Gene Ontology: Mol. function=hydrolase activity; Cellular component =chloroplast; Biological process=isoprenoid biosynthetic process
  Homolog annotation: Hit_ID=A3C1B5; Match level="QueryCoverage=72%, HitCoverage=52%, E-value=1e-73, Identity=69%"; Hit description =Putative uncharacterized protein
  Pfam annotation: Domain name=NUDIX; Domain location=103-210; Score =34.2; E_value=4.9e-07; Accession=PF00293.19; Description=NUDIX domain
  Pfam annotation: Domain name=zf-NADH-PPase; Domain location=65-100; Score=21.2; E_value=0.00064; Accession=PF09297.2; Description=NADH pyrophosphatase zinc ribbon domain
  Pfam module annotation: Pfam domain module=NUDIX::zf-NADH-PPase; Domain location=103-210::65-100
  Subcellular localization annotation: CTP_CleavageSite=58; ConfidenceScore=5.31e-01
MLLPLLRSHPLLHHAARLSSPRTRLLLRRDAIPLARSPPIRMAASSGSGASSPASAPPAAVVHKSKIKFCPACGSPTKLAIPDGDEKMRAVCSSCGRVHYENPKMVVGCLVEHDNKVLLCRRKIEPAYGLWTLPAGYLEVGESTAEGASRETLEEACADVEIVSPFAQLDIPLIGQYTEDVRSGSIKFHYCTINKRLGASPSDLRSFDIDNHIAV

SEQ ID NO: 78421 - protein, 465 aa, Zea mays
  Coding DNA Sequence Number=SeqID_35046
  Homolog annotation: Hit_ID=Q6J9V9; Match level="QueryCoverage=28%, HitCoverage=46%, E-value=2e-52, Identity=79%"; Hit description =Putative uncharacterized protein
MAWADRPDPTATDRPSARGKGYYEKALAPSPYEGREQAIKAKEPEVRLQVALTVSSAEATPSAVGSLTCGGHHLSTDDNGHLRTNAAPANGDRLSAHKEVLTPVLAIGARTRLSKNADTAPAAYDVLYDPPFASSVRLVNALLPQMLEEEAGRQPMRKAGQQLGLPSSPARMMNILEVEGREEATTWLALPHHKVGGHHSRDRERGYFERILLSEENGPRALLLIRGSKVAPCGVRQPPQSTRDPSPLLIRGSKAGPSEGFDSRPRACRFRDDPGYVRYMAEARDTLPRYPKTFLRPAGMICNGIPPKGGTEPSDPIKWVWVQQITRRKATKGHTIKVETVLDRPHAPSRGSEAALALGYGQIVDQGNNTVRPVPTTVPTTRVRLTTLSHGLPRVQPRAQQGAPPRPTPGLGLGGRSPSRPTSASASGGVTVSPDLGLGLRRSHRLARPRPRTDYATGDTSLPYP

SEQ ID NO: 78422 - protein, 537 aa, Zea mays
  Coding DNA Sequence Number=SeqID_35047
  Gene Ontology: Mol. function=UTP:glucose-1-phosphate uridylyltransfera se activity; Cellular component=cytoplasm; Biological process =metabolic process
  Homolog annotation: Hit_ID=Q43772; Match level="QueryCoverage=83%, HitCoverage=93%, E-value=1e-180, Identity=70%"; Hit description=UTP-- glucose-1-phosphate uridylyltransferase
  Pfam annotation: Domain name=UDPGP; Domain location=84-505; Score =712.2; E_value=3.7e-211; Accession=PF01704.9; Description=UTP- -glucose-1-phosphate uridylyltransferase
MIISLFGRPCPCPQKHRKVSPLLAFAFTFTFTFKCDSAWRKGNELQETGAAGSADHQSAAGQERSAVHRCLEMQERRRRYSENEKSGFISLVSRYLSGEAEQIEWSKIQTPTDEVVVPYDTVASPPEDLEETKKLLDKLVVLKLNGGLGTTMGCTGPNGAFNVYGLEEYGILKLYLSSAHTVVPFHYIAVPIGLDLLPFFENEWIDEWLSVIEVRNGFTFLDLIVIQIESLNKKYGCNVPLLLMNSFNTHDDTQKIVEKYSNSNIEIHTFNQSQYPRIVTEDFLPLPSKGKSGKDGCTEILNHLINNQNEYCMEVTPKTLADVKGGTLISYEGRVQLLEIAQVPDEHVNEFKSIEKFKIFNTNNLWVNLKAIKRLVEAEALKMEIIPNPKEVDGVKVLQLETAAGAAIRFFDKAIGINVPRSRFLPVKATSDLLLVQSDLYTLVDGFVIRNPSRANPANPSIELGPEFKKVANFLARFKSIPSIVELDSLKVSGDVWFGSGITLKGKVTIIAKPGVKLEIPDGDVLENKVHVVLRYA

SEQ ID NO: 78423 - protein, 140 aa, Zea mays
  Coding DNA Sequence Number=SeqID_35048
  Subcellular localization annotation: CTP_CleavageSite=49; ConfidenceScore=5.10e-01
MGTSSEDLIEAADGSEVDLASASSRPSPWQRLPGRGPGFPGNVVGVNMPASSAPTTATLAPEDTGKMTKIAAAIMSLLTMHIATNLSLSKYQDHYVPIVSGQLYYAATIFQRVGFSRAFDATHVSILLITEVEKDMPRAG

SEQ ID NO: 78424 - protein, 168 aa, Zea mays
  Coding DNA Sequence Number=SeqID_35049
MARAEEGATAEGGVRASARVARVGLTIGRGRGDTDGDLVSSCGAPGSSPPTADLRTGLGAQRASSPTTSSWDKDLAARGDDGDDGVVGCQIIVDLGRCRGDDDNLEVARCRHCRGHTAKGRSRGRKPSTMAGFGRREERSRAVEGSIWGPRTSDLEKLTTLYATANMN

SEQ ID NO: 78425 - protein, 90 aa, Zea mays
  Coding DNA Sequence Number=SeqID_35050
MKIIFPTQTIRSRVITKRLCKPFKKIWAYLAREICSSVLWHSKFDSRPGGYEIDGFGYDYGAGCQHCNHCSGEDEAVEGDFQEFQDYDEF

SEQ ID NO: 78426 - protein, 66 aa, Zea mays
  Coding DNA Sequence Number=SeqID_35051
MASGLYVEGKKIDKHKCFVLTITRIRIVIPMPGPFGKAPAPASLAPDPDPREELILLILLENQNHF

SEQ ID NO: 78427 - protein, 206 aa, Zea mays
  Coding DNA Sequence Number=SeqID_35052
  Gene Ontology: Mol. function=protein binding; Cellular component=RCAF complex; Biological process=female meiosis chromosome segregation
  Homolog annotation: Hit_ID=P59259; Match level="QueryCoverage=39%, HitCoverage=79%, E-value=8e-39, Identity=100%"; Hit description =Histone H4
  Pfam annotation: Domain name=CBFD_NFYB_HMF; Domain location=131-194; Score=5.0; E_value=0.055; Accession=PF00808.14; Description=Histone -like transcription factor (CBFNF-Y) and archaeal histone
  Pfam annotation: Domain name=Histone; Domain location=128-197; Score =68.8; E_value=1.8e-17; Accession=PF00125.15; Description=Core histone H2AH2BH3H4
  Pfam annotation: Domain name=TAF; Domain location=131-195; Score= -6.7; E_value=0.024; Accession=PF02969.8; Description=TATA box binding protein associated factor (TAF)
  Pfam module annotation: Pfam domain module=CBFD_NFYB_HMF::Histone::TAF ; Domain location=131-194::128-197::131-195
MDPFKIRQRRHILTKETHPRSPPRHVTDPHIRTFSIFCHPSHIQRHKALITRIVPQSAPKDPAYIAQPHMPAIPTSALVSSSHERNTIHPPVRSGGDRQPAAEMSGRGKGGKGLGKGGAKRHRKVLRDNIQGITKPAIRRLARRGGVKRISGLIYEETRGVLKIFLENVIRDAVTYTEHARRKTVTAMDVVYALKRQGRTLYGFGG

SEQ ID NO: 78428 - protein, 43 aa, Zea mays
  Coding DNA Sequence Number=SeqID_35053
MDDGISEAFLHRATEQENPDGASGTIICYQSTATPVLLELGNP

SEQ ID NO: 78429 - protein, 316 aa, Zea mays
  Coding DNA Sequence Number=SeqID_35054
  Gene Ontology: Mol. function=DNA binding; Cellular component=nucleus; Biological process=regulation of transcription
  Homolog annotation: Hit_ID=A7QK01; Match level="QueryCoverage=46%, HitCoverage=61%, E-value=9e-72, Identity=82%"; Hit description =Chromosome undetermined scaffold_109, whole genome shotgun sequence
  Pfam annotation: Domain name=NAM; Domain location=6-134; Score=297.2; E_value=3.2e-86; Accession=PF02365.6; Description=No apical meristem (NAM) protein
MAPADLPPGFRFHPTDEELVNYYLKRKVHGLSIELDIIPEVDLYKCEPWELAEKSFLPGRDSEWYFFGPRDRKYPNGCRTNRATQAGYWKSTGKDRQISYQNRSIGMKKTLVYYKGRAPQGLRTSWVMHEYRIEESECENTMGIQYSPRSPKQRTGIHGYEDGDEFVPVKLNGAETGNGFWGTGQGRGLVPRPGPVALSSSVETFPTACTPCKTGKPRRLGLLANTPSTTPKPGYVELSVRPCLDLVALAVVTYVLPLLIKDLQHLPTDIVDRSIGEHESSYKVLEQQPGMPLNLNLGSSWQTDIEVVGDPTKGHP

SEQ ID NO: 78430 - protein, 245 aa, Zea mays
  Coding DNA Sequence Number=SeqID_35055
  Gene Ontology: Mol. function=DNA binding; Cellular component=nucleus; Biological process=regulation of transcription
  Homolog annotation: Hit_ID=A2Z3V5; Match level="QueryCoverage=99%, HitCoverage=69%, E-value=1e-127, Identity=87%"; Hit description =Putative uncharacterized protein
  Pfam annotation: Domain name=NAM; Domain location=6-135; Score=295.3; E_value=1.2e-85; Accession=PF02365.6; Description=No apical meristem (NAM) protein
MAPVGLPPGFRFHPTDEELVNYYLKRKIHGLKIELDIIPEVDLYKCEPWELADKSFLPSRDPEWYFFGPRDRKYPNGFRTNRATRAGYWKSTGKDRRVLHHGGRSIGMKKTLVYYRGRAPQGVRTDWVMHEYRLDDKDAEDTLPIQDTYALCRVFKKNAICTEVDGLQAQCSMALLEGACQQLLTSGSQEYQTSSPDVPVASTSGGADDDAEKDESWMQFISDDAWCSSTADGAEESTSRVALAS

SEQ ID NO: 78431 - protein, 156 aa, Zea mays
  Coding DNA Sequence Number=SeqID_35056
MEQPRGKTQSKSAGDRNIQCAYIPHAELQVNRSNKTAVLSRFTDYDDACDHCSCTLLAHYHWDTQYDKSAGWPSGANSASLEVDFGLGQNSASREPGLDTCSSRILQEATPSTVHRVNHYDMGNLLGRGARVRDRTLGPGLGSQQKSSGHKSTAST

SEQ ID NO: 78432 - protein, 260 aa, Zea mays
  Coding DNA Sequence Number=SeqID_35057
MYETGEQEETRMLPPAGFLGELEHVEDTKSFWAASGRQKLKLKPNAQILARLLGEALGSDTSALTPSRRFRLEANGAPSVRTERIAAGVRRLSYQVEVKVFGSKFNWDSRVFSIDCQPEYLYDCSCNPNFVEYLNGSDSIADKAIGRMQEIADKIFSVARETIRPGRGLSSFEATKLRVALEDIACMLEQDSLVLQENLDNVNNVVNNPADSSYEPSAVSSPPPADEFLSPDWDFADHFANFWGLEYDSDQMPSFSDNEV

SEQ ID NO: 78433 - protein, 655 aa, Zea mays
  Coding DNA Sequence Number=SeqID_35058
  Gene Ontology: Mol. function=ubiquitin-protein ligase activity; Cellular component=ubiquitin ligase complex; Biological process =protein ubiquitination
  Homolog annotation: Hit_ID=Q2QU09; Match level="QueryCoverage=99%, HitCoverage=78%, E-value=0.0, Identity=71%"; Hit description=U-box domain containing protein, expressed
  Pfam annotation: Domain name=Arm; Domain location=17-57; Score=6.7; E_ value=1.6; Accession=PF00514.14; Description=Armadillobeta-catenin -like repeat
  Pfam annotation: Domain name=Arm; Domain location=170-215; Score =12.0; E_value=0.33; Accession=PF00514.14; Description=Armadillobeta -catenin-like repeat
  Pfam annotation: Domain name=Arm; Domain location=416-457; Score=5.7; E_value=2.1; Accession=PF00514.14; Description=Armadillobeta-catenin -like repeat
  Pfam annotation: Domain name=Arm; Domain location=497-537; Score =14.2; E_value=0.18; Accession=PF00514.14; Description=Armadillobeta -catenin-like repeat
  Pfam annotation: Domain name=Arm; Domain location=542-583; Score=1.2; E_value=7.8; Accession=PF00514.14; Description=Armadillobeta-catenin -like repeat
  Pfam annotation: Domain name=Arm; Domain location=89-129; Score=6.7; E_value=1.6; Accession=PF00514.14; Description=Armadillobeta-catenin- like repeat
  Pfam annotation: Domain name=HEAT; Domain location=230-266; Score =5.9; E_value=3.5; Accession=PF02985.13; Description=HEAT repeat
  Pfam annotation: Domain name=HEAT; Domain location=274-311; Score =2.8; E_value=10; Accession=PF02985.13; Description=HEAT repeat
  Pfam annotation: Domain name=HEAT; Domain location=502-539; Score =16.6; E_value=0.088; Accession=PF02985.13; Description=HEAT repeat
  Pfam annotation: Domain name=HEAT; Domain location=591-627; Score =3.4; E_value=8.4; Accession=PF02985.13; Description=HEAT repeat
  Pfam module annotation: Pfam domain module=Arm::Arm::Arm::Arm::Arm::Ar m::HEAT::HEAT::HEAT::HEAT; Domain location=17-57::170-215::416 -457::497-537::542-583::89-129::230-266::274-311::502-539::591-627
MVRLKALEAIQEFARETDQDREAVSQGDTIRTIIKFIDCEDCQERELAVSALCDLSKSELVCGKVCGSKADNPTIAEKAEKTLENLDRCEKNAVQMAENGRLEPLLNLLIEGSPETQLLMASSLEKIVLSNDLKILVARRVGSLFGGIVEKGSLEAKEVAFKVLEHVSANADSAKVLIEENVLLPLFRVLSINRTSLLPPRLQEAAAAVLANLVASGVDFGTVPLDGDRTLVSEDIVHSLLLLISNTSPPIQCKLLEFFGTLSSSTGTVLSIVSAIKSSGAITNLVQFVESDHQESRTASIKLIHKISFHMEYEIAQVFRASPTLLGCLVKVAFVNDGNAAADEQDAALQILANLPKRDKHLTRELMEQGAFKVAASKVLSIYRRDAGTGSDIYDNAVLEGLAKVLARITYALRDEPRCVSLAREYNLAALFASLLRLNGLDEVQVVSAKALMNLSLESKYLTSTPKFDAEQRSKLALFGRKPTNIQLCRVHSGVCSIRDNFCILEGRAVERLIHCLNHSNKKVVEAALAAICTLLEDGVEAAEGVLVLHRSNGVAPIFDILKENPTGSLQHRVTWAVERILRAEDIAQAASTDRSLGSALVHAFQHGDSRTRRIAEAALKHVQKLPVFSLIIDKRPSIRGSSMGSMERFIKFDR

SEQ ID NO: 78434 - protein, 116 aa, Zea mays
  Coding DNA Sequence Number=SeqID_35059
  Gene Ontology: Mol. function=asparaginase activity; Biological process=glycoprotein catabolic process
  Homolog annotation: Hit_ID=Q2PW34; Match level="QueryCoverage=46%, HitCoverage=19%, E-value=2e-11, Identity=56%"; Hit description=L -asparaginase 2
MGGGIPYLRTPAAMRSVRTDGAPFASRRNLRDGVRAEVAHQCVRIGDVWVYDGNVHRRLMSKMLGRIGDSPLIRFGTYTCGACAVSCTLKWDVTTVMEYKGLPLQQTVDYYVRDTM

SEQ ID NO: 78435 - protein, 281 aa, Zea mays
  Coding DNA Sequence Number=SeqID_35060
  Homolog annotation: Hit_ID=Q6JAD6; Match level="QueryCoverage=53%, HitCoverage=70%, E-value=5e-17, Identity=46%"; Hit description =Putative uncharacterized protein
MRLGQRQAPSKPFSAVLDLLGASLEHALMFEDSTETNDLISASESHLEHTPHALDFSWSSESLRLVTLGDRHHLDGFGGVGSKVITLEDLLVSDSRFRQVMMVRTKNVSTPGGGDDEDSPCPFRQIKGKTVYLEQQEGRKKRHMDRVAREALAAAAAVEQTERGGQLQISSDQIAYRGTLEASRLQFGSYRLAPEDPVPVPDPVPDIQAEDEAFRQFETQGTTDNDDVDFGIPPPPLVPPRSHDHEAGSSSAAPAAPPAIDPALAAILHSLTQQQAHLAAK

SEQ ID NO: 78436 - protein, 162 aa, Zea mays
  Coding DNA Sequence Number=SeqID_35061
  Gene Ontology: Mol. function=transferase activity, transferring phosphorus-containing groups; Cellular component=integral to membrane; Biological process=two-component signal transduction system (phosphorelay)
  Homolog annotation: Hit_ID=P77510; Match level="QueryCoverage=99%, HitCoverage=29%, E-value=2e-86, Identity=100%"; Hit description =Sensor kinase dpiB
MLQLNENKQFAFFQRLAFPLRIFLLILVFSIFVIAALAQYFTASFEDYLTLHVRDMAMNQAKIIASNDSVISAVKTRDYKRLATIANKLQRDTDFDYVVIGDRHSIRLYHPNPEKIGYPMQFTKQGALEKGESYFITGKGSMGMAMRAKTPIFDDDGKVIGR

SEQ ID NO: 78437 - protein, 193 aa, Zea mays
  Coding DNA Sequence Number=SeqID_35062
  Gene Ontology: Mol. function=[citrate (pro-3S)-lyase] ligase activity; Biological process=biosynthetic process
  Homolog annotation: Hit_ID=P77390; Match level="QueryCoverage=89%, HitCoverage=48%, E-value=2e-93, Identity=98%"; Hit description =[Citrate [pro-3S]-lyase] ligase
  Pfam annotation: Domain name=Citrate_ly_lig; Domain location=22-174; Score=303.8; E_value=3.2e-88; Accession=PF08218.2; Description =Citrate lyase ligase C-terminal domain
MAEIAQFLHENDLSVDTTVEFKEDSSRFPYENWLDLVLKGTADIPRLTVHRGSEYIISRATFPCYFIKEQSVINHCYTEIDLKIFRQYLAPALGVTHRFVGTEPFCRVTAQYNQDMRYWLETPTISAPPIELVEIERLRYQEMPISASRVRQLLAKNDLTAIAPLVPAVTLHYLQNLLEHSRQDAAARQKTPA

SEQ ID NO: 78438 - protein, 90 aa, Zea mays
  Coding DNA Sequence Number=SeqID_35063
  Subcellular localization annotation: CTP_CleavageSite=51; ConfidenceScore=5.04e-01
MDESLPAAASVLGPSLLLQRSLASRLEFVVPQALRCGGCSYPREWNRSSVCNGTLSAGGDPPTVSPSEAGLDSAEGGVDAEGAAAPPTDV

SEQ ID NO: 78439 - protein, 167 aa, Zea mays
  Coding DNA Sequence Number=SeqID_35064
  Homolog annotation: Hit_ID=Q6QP51; Match level="QueryCoverage=29%, HitCoverage=22%, E-value=8e-15, Identity=77%"; Hit description =Putative growth-regulating factor 1
  Subcellular localization annotation: CTP_CleavageSite=48; ConfidenceScore=5.25e-01
MQAACNCTKGTHPFDFDTSSMGPRPTRHVTGAPVTTCEKLHRHLRQYRAFSTAEPVPRLEATLRMAQQCQLSTSVTGQSAAGEGATVDMAKSGDRERGYSERDPSPRRKRAPSPPTDKRFEGWPLERVRQPPQSTRAPRPLLVRGSKAGPSEGFDSRLRPLGLRAYY

SEQ ID NO: 78440 - protein, 732 aa, Zea mays
  Coding DNA Sequence Number=SeqID_35065
  Gene Ontology: Mol. function=protein binding; Cellular component =nucleus; Biological process=regulation of transcription
  Homolog annotation: Hit_ID=A2XJ79; Match level="QueryCoverage=90%, HitCoverage=82%, E-value=0.0, Identity=55%"; Hit description =Putative uncharacterized protein
  Pfam annotation: Domain name=GRAS; Domain location=326-633; Score =390.7; E_value=2.3e-114; Accession=PF03514.5; Description=GRAS family transcription factor
MDFNDKPSSNFDEDFQSNMSATSGFYSFIHPANESNELELFLDQPRSAHHYPPVSNASNDSGHITSTTSCSTEICGPQFCDLSSNATPDWYGTSVTDSSNNSWINSDITISYLNKLLTDEDSDDKVKPHHGECALRAMEEPFYRILAQNNPAYPESPSLCSRGHLNNLGDNINKSLGQPCSSCSVAIDWSNSHSNHILQAFEAPWSLSDVVKETSRSAECTRNMELGVRIDGLSIAEKRSRDNQSLQVNVADASKHTSSELPSGNYSRQEDSYLIEARSSKQVAFSFNGPIRDEMFDRVLLFSEHKPTYEAIVLQEMMANKSTGHPQNEQGRTPARRKMRGKKQQKKEVVDLRTILIHCAQAVSVNNHTLANDMLNIIRQHSSITGDDTQRLAFCLVNCLEARLAGTGSQLYRNLIATCSDVAAILKVFQLSLAVIPLLRVSHYFSNKTILDVLKGKSKVHIVDFGICFGFQWPSLLEQLAKREGGPPKVRITGIDLPKQGFRPDRMNKQNTGQRLADYASMFNVPFEYQAISSKWETIRIEDLNIDEDDVLIVNCIDRMKNLGDETVSINSARNRVLNTIRMMKPKVFVHGIVNGSFGTPFFLTRFKEVMYHYSAFFDILDKTVPRDNETRMLIERGIFLCQLLNVIACEGSERIERPENYKKWKSRNLNAGLEQLQLNPDIVKVTRDMMGKYHKDYVINEDDHWLLMGWKGRILNAISTWKPSESYDGDY

SEQ ID NO: 78441 - protein, 238 aa, Zea mays
  Coding DNA Sequence Number=SeqID_35066
  Subcellular localization annotation: CTP_CleavageSite=29; ConfidenceScore=5.13e-01
MRLGVPSIAPRQLGAVESKFRRPSLPSVVWRTGQSGAHRTLSGARFLSLNGEADRWQIWSRWRTGHVRCTPDSPVPPSSRWLGHVSHADRAADRWLGRPMAHRTVRCTPDSPVGVLRGNDARLRLGREVNARRVPRWGASAVDSLDSRRGAASCLAMAAPPLPLLAGKVTGQTRMLLFRHVGKTSSILPPTGGLTAAIVVVARQRKEYHVVAAVEGHELKTPEMEQRPELERLLELDG

SEQ ID NO: 78442 - protein, 273 aa, Zea mays
  Coding DNA Sequence Number=SeqID_35067
MSSSSRFRRRLPRESLPLLPTTELFQGVPSPHPLAGPGLLRVLLFLLLRGNASCCSVHRILRDPWQGRLVPPYLLKTDGNPDHKNQGQPDARGRKERTLTRVTHPWSGRIKGWEKAVGSDFPNATATRPWRTSKGTGSEDIREPSKSASGIISQSGNRRSAKGSTLRRWMAAITPAAGPGKGDTPKRILPREGSRLRASLLIRGSKAGPSEGLDSRLRSRGLYTHCWSEVRRLAPWKGSTTASGYSGSAPTTDQGFEGWPPKGSQPPQTQSKG

SEQ ID NO: 78443 - protein, 921 aa, Zea mays
  Coding DNA Sequence Number=SeqID_35068
  Gene Ontology: Mol. function=protein binding; Cellular component =nucleolus; Biological process=ribosomal small subunit biogenesis and assembly
  Homolog annotation: Hit_ID=A2XJ82; Match level="QueryCoverage=95%, HitCoverage=94%, E-value=0.0, Identity=64%"; Hit description =Putative uncharacterized protein
  Pfam annotation: Domain name=Nop14; Domain location=25-906; Score =704.9; E_value=6e-209; Accession=PF04147.3; Description=Nop14-like family
MAKTKPMAAAGEKKKSKGKKKGKNGPAKVAMKARGAAAEERNNPFEAIWSRRKFDVLGKKRKGEERRVSRSRSEAIRKRENTLLKEFVESAKSSVFHDRRIGERDDTLPEFDKAILRQQRERLAKLKRESKYNLSDDDEDEINIHNVLLSENDDFDEEVPLDDGSDEEGKMVLSKKRLSLQSDDHPSITDLPQETHGQKSKKEVMTEIISKSKFYKAQRAKEREEDEHLVDKLDSDFASLAQTRALLSLTESAKGQAFYQNILIASEAVFCILAAKADTYEKLVKEMVMDQRARPSDRTKTPEEIAQEEKERLEKLEEERQKRMLGTADTSDEDDGNENDNHMKLGNSKPISGDDLGDSFSLDESTVKKKGWVDEIYEREGRKIGDDAAASDDGESDDENAGDDEADDEDSDSSDNDFGNMSARDWEQSDDDEVDVGDDEMEDFKEKGQEINDKVVNKDAHNLKGESNVKPQVKDGSIPFVIDAPNDLKDLSSLLDGRSEAEIIEIISRIRACNSIRLAAENRRKMQVFYGVLLQYFAVLATQSPVKFRIIDILVKPLIEMSGETPYFAAICARERLIHTRTRLCEDIKVPGKSSWPNLKTLLLLRLWSLIFPCSDFRHVVTTPLLLLMCEYLMRCPIQSGRDVAVGSFLSSMVLVVTKESKKFCPEAIGFLQSLLVTSLKGKVETHLHNQINDQFMELKTLKLWLSIHDHVHEVNPVNILEIVGMDPDAPYFSSDNFKAGVLLSVAECLRGFVIIHEGLSSFPEIFLPISSLLQEILDRSELPGSLQDIFHEVIDLIKKRSDEHYASREPLRMRKKKPEPIKQLNPKFEENYIKGLDYDPDRERAQMKKLRKRVKSEMKGAKRELQKDNYFLSAVKEKERRKRDEERAEMYGKAMAFLQEQESAFKSGQLGKGKGRKRMR

SEQ ID NO: 78444 - protein, 136 aa, Zea mays
  Coding DNA Sequence Number=SeqID_35069
MGKNNKRKREPTPPSEEFGDSEYSEEEFSSEPEGSPAPVSPPASSDDSDDSQGIAAEVWTYIRAVERAGLEGSDESECSSDEEDSDGGDEGEDDDDDDGGDDSGRGGGDGGRDSTKGDSSRGSTKGGGGGRGRASG

SEQ ID NO: 78445 - protein, 158 aa, Zea mays
  Coding DNA Sequence Number=SeqID_35070
  Homolog annotation: Hit_ID=A2XJ83; Match level="QueryCoverage=44%, HitCoverage=26%, E-value=7e-09, Identity=48%"; Hit description =Putative uncharacterized protein
  Subcellular localization annotation: CTP_CleavageSite=74; ConfidenceScore=5.66e-01
MGRRLPAAAALCGSARAAATRVRKKRVQRRAPPSSSSKLPAAPPSGGGKAGSAGGGACYVNGNGNGELMVEVVVGSGKGGGGGRRVMVLADGRAEAAGALQWALSQAVRSDDTVVLLAVAKPPVARDAVSDSCVRMLGTKSQQHLAALRTVCESTRPE

SEQ ID NO: 78446 - protein, 115 aa, Zea mays
  Coding DNA Sequence Number=SeqID_35071
  Subcellular localization annotation: CTP_CleavageSite=53; ConfidenceScore=5.16e-01
MGRPLNPSAATPSPFLPPVAGGLYRSPVVPRMVAVGLSSLIGLPDDDGDQTPRVADVGAEWHGDHVSAARVTHSDNDCGNGHPVSDTVSHMARRCPVPCAQSEGVAGDAAMRLLR

SEQ ID NO: 78447 - protein, 73 aa, Zea mays
  Coding DNA Sequence Number=SeqID_35072
MPPWKISGSAIARSGQFSSCFGIDWMFAVECRARRGRLRLDWALTSSLVEYVPLIYDLTVVMRAGLGSRANFT

SEQ ID NO: 78448 - protein, 302 aa, Zea mays
  Coding DNA Sequence Number=SeqID_35073
  Homolog annotation: Hit_ID=Q6J9V9; Match level="QueryCoverage=44%, HitCoverage=46%, E-value=2e-58, Identity=84%"; Hit description =Putative uncharacterized protein
MTVSKKGSRKGIFRKGTLPSEGNGSRALLLIRGSKVAPCEVRQPPHSTRAPSPLLIRGSKAGPSEGFDSRPRARRVRDDPGYVCYMAEARTTLPRYPRTFPRPAGTVCNGIPPEGGIEPSDPVEWVRVQQITYRVKLSHDLPRVQPRAQQGAPLHPTSGLGLRRRSPPRPTPGLGLSLGLGRRHILARPQPRPQEKYPPRPTSASDRLRYRGYIITLPLASHPLLRRNKTGVTSNYSDSSSSLTPYFFVNLKCKGERLQVVEIPRKRDIERQSKTPWYSSWSLDRLRGVDCNPRPLGRHNVE

SEQ ID NO: 78449 - protein, 79 aa, Zea mays
  Coding DNA Sequence Number=SeqID_35074
  Subcellular localization annotation: CTP_CleavageSite=27; ConfidenceScore=5.10e-01
MPAPALPSPLCLALVTLPLPNLLRPVRVDVVPRRPCLADSLLHPTGRPWGPHPRRLPVVLTSSLQRLLPISLHGMDLEL

SEQ ID NO: 78450 - protein, 219 aa, Zea mays
  Coding DNA Sequence Number=SeqID_35075
  Homolog annotation: Hit_ID=Q9SXG0; Match level="QueryCoverage=33%, HitCoverage=58%, E-value=5e-23, Identity=76%"; Hit description=F1F0 -ATPase inhibitor protein
MATRAASRFLQRRLLSSGGKVLSEEEKAAEKVYIKVQICPLFLSPFLPCSVQVEPSVPDRDAIVVLRWRGKDSFVFKNRGVKSQLPTKGIITIVPFFRLPYADECGYVWFKSRHLGHANELGMTPPTAKLLGVTQEKMEQEKLEKLARKGPSSGEQPSSTTVSAASDVKTGAGPTESASANVSTDKNRNYAVLAGTIAALSGLGWYLLSKPKKSEEVVD

SEQ ID NO: 78451 - protein, 153 aa, Zea mays
  Coding DNA Sequence Number=SeqID_35076
  Gene Ontology: Mol. function=7S RNA binding; Cellular component =signal recognition particle; Biological process=SRP-dependent cotranslational protein targeting to membrane
  Homolog annotation: Hit_ID=A2YY40; Match level="QueryCoverage=24%, HitCoverage=28%, E-value=2e-12, Identity=97%"; Hit description =Putative uncharacterized protein
  Pfam annotation: Domain name=Ribosomal_S25; Domain location=46-123; Score=108.1; E_value=2.6e-29; Accession=PF03297.6; Description=S25 ribosomal protein
MYTFSAAFSSSLRTLPPEDRSLRCRNLDAALVAIAADRETLENDDAPKKDKAPPPSSKPAKSGGGKQKKKKWSKGKQKEKVNNAVLFDQATYDKLLSEVPKYKQITPSVLSERLRSARYGRSGAPCQGPYEAEVNSAPPQPPCSSNTVHVFNS

SEQ ID NO: 78452 - protein, 426 aa, Zea mays
  Coding DNA Sequence Number=SeqID_35077
  Gene Ontology: Mol. function=pectate lyase activity; Cellular component=anchored to membrane; Biological process=pathogenesis
  Homolog annotation: Hit_ID=A2YTH5; Match level="QueryCoverage=82%, HitCoverage=91%, E-value=1e-136, Identity=67%"; Hit description =Putative uncharacterized protein
  Pfam annotation: Domain name=Pec_lyase_C; Domain location=125-317; Score=275.9; E_value=8e-80; Accession=PF00544.10; Description =Pectate lyase
MARSRRLGDLGQVPSMASKEFLLAFLVIILHGAAATTTVHAANIIDRCWRRQPNWAANRQRLAACSVGFAGKMRQNRGPGVTAYTVTDPGDDPVRPRPGTLRYGATVLGGKVWITFERGMHIRLAQPLFVRSFTAIDGRGADVHIAGGAGIVLHEVSGVIIHGLHIHDIRSQPEGPAVRPGGAVRPAGGGGGSGSGTDGDAIRVVASSKVWIDHNSLSRCEDGLVDVTVGSNDVTVSNNWFFNHDKVMLLGHDDGHAADSRMRVTVAFNRFGPNVNQRMPRIRHGYAHVVNNVYLGWRDYAIGGSMGPSVKSEGNLFVASGTAENRKVTRRMPFAGRDWDWASVGDSFENGAFFKQTGSRVQPNYNKHQAFAAASSNQVRSLTKDAGALSCSVGVRGARWLWRSAVYFGLVGALAGGAAAAIAGTL

SEQ ID NO: 78453 - protein, 103 aa, Zea mays
  Coding DNA Sequence Number=SeqID_35078
  Homolog annotation: Hit_ID=A2WVX8; Match level="QueryCoverage=66%, HitCoverage=66%, E-value=1e-10, Identity=58%"; Hit description =Putative uncharacterized protein
MGNCLRLRRAATWADGDEWEEEAEPCSKAKAAPAAVEDKVEVKIRVTRRQLQELLEKASRRQVEEVLAELMTSGTVYYPRQRDEIRRHWRPALYSIPEGVEES

SEQ ID NO: 78454 - protein, 127 aa, Zea mays
  Coding DNA Sequence Number=SeqID_35079
  Gene Ontology: Mol. function=actin binding; Cellular component =cytoskeleton; Biological process=cytoskeleton organization and biogenesis
  Homolog annotation: Hit_ID=Q6Z3N3; Match level="QueryCoverage=38%, HitCoverage=5%, E-value=2e-15, Identity=79%"; Hit description =Putative villin
  Subcellular localization annotation: CTP_CleavageSite=55; ConfidenceScore=5.56e-01
MATPSLSHGGCTPCLLALALSSQAWSSPKLRLPALSLTAALSSTCSSPPSPPLPMAAPPESLPYTYPGDDKEECLIGTWFGKKSIKEDRLITVSLASKMVEFAKFQAVQDTLKDSVLYIFCVSSNVP

SEQ ID NO: 78455 - protein, 143 aa, Zea mays
  Coding DNA Sequence Number=SeqID_35080
DGTYLDLALDLFEVVELAAGDMEKFPPFLRGRVAHELRDEGGTGAGRENRRQGRASSAGAAGGHGRGSAHREGFRGSRHGERRRWGRAAGGGERGCEGERWETELGRAPCLGAEGECKQAGSAPAMAEGGGGHGSSDGGCGVE

SEQ ID NO: 78456 - protein, 113 aa, Zea mays
  Coding DNA Sequence Number=SeqID_35081
  Subcellular localization annotation: CTP_CleavageSite=49; ConfidenceScore=5.48e-01
MEARTPNPQSSEGSNLISSRARVINGRKPNLLARSPRKVRPFTSFHAVNGSQISKPAVLATSMEGTPQQPKIIPGALHTSTAARAIHLPALALGRVNLQEKRVRAVLAHAFRF

SEQ ID NO: 78457 - protein, 125 aa, Zea mays
  Coding DNA Sequence Number=SeqID_35082
MADATARAWDRWAGIAVVWDLLIPRRAYKSVTDWRGKLANIQNQNNHLYVPYLGLLPSDEGERVQIRFLADYQRHQQEDKTKRLAYLVILLADEGPKEDLGIWCMAAATKSTIDVVPQRISTVGI

SEQ ID NO: 78458 - protein, 98 aa, Zea mays
  Coding DNA Sequence Number=SeqID_35083
MEVATMFLRDPVEATTVLLPDLVEAATVLLPDLVEVAAVLLLDPMEATEGRGAWAATNAVASRAGCFHGGAPSGAEMKASEAGWGSEPIHAAGEKVLW

SEQ ID NO: 78459 - protein, 597 aa, Zea mays
  Coding DNA Sequence Number=SeqID_35084
  Gene Ontology: Mol. function=monophenol monooxygenase activity; Cellular component=chloroplast; Biological process=metabolic process
  Homolog annotation: Hit_ID=A2WVW9; Match level="QueryCoverage=97%, HitCoverage=97%, E-value=0.0, Identity=61%"; Hit description =Putative uncharacterized protein
  Pfam annotation: Domain name=Tyrosinase; Domain location=104-425; Score=474.5; E_value=1.4e-139; Accession=PF00264.11; Description =Common central domain of tyrosinase
  Subcellular localization annotation: CTP_CleavageSite=39; ConfidenceScore=5.63e-01
MASMSHLIAKPAPAATFPLSLPRTSSGFRPRRVTVQRVSCASPRGERYELDARKHDRRDVLLGLGALGASATATLASARRAGADPVATPDISSCGQANLPVSANVLTCCPPPSSALPVDFILPDATSLPLRTRPAAHSVTTDYVAKFNAGIAAMKALPADDPRSFAAQASVHCAYCDGSYSPEGFPGVELQVHNSWLFFPFHRCYLYFFERILGSLIGDPGFAVPFWNWDAPDGMRMPAMYADRSSQLFDPRRDSRHAPPKLINLDYNANVREPRFTYKQQVDHNLRVMYRQMVSLSPTPSLFFGSAYRAGDDPNQGPGPVESIPHGPVHIWCGDPNQPDGEDMGNFYSAGFDPLFYAHHANIDRMWSVWKGLDVRRHTDLTDPDWLDASFLLYDETPKLVRIRVRDVLDTDRLRYRYQDVPLHWTAARPTVTAGTRRADSFLAPAAQAAPAAARKAGEFPITLDEATIVTVKRPVAGKRSKAEKDSKEEVLVIDGIEVDRDVAAKFDVFVNTEDHGAVGSGGRELAGSFVNVPHRHGHGHGHAKKGRGIKTKLRLALNEQLEDLEAEGDESVVVTLVPRQGKGRVKIGGVKIELMH

SEQ ID NO: 78460 - protein, 224 aa, Zea mays
  Coding DNA Sequence Number=SeqID_35085
  Homolog annotation: Hit_ID=A2X6T6; Match level="QueryCoverage=25%, HitCoverage=5%, E-value=6e-09, Identity=52%"; Hit description =Putative uncharacterized protein
MEKEPLDMVESSVRVIETHVDIIRSLVTNGVVDTSESESVYTLKTTLFQIGDVCDMLEKCALSIKKYADSKRAKIIQDEALQYAEDDEAADALEELPSPDLLTQADILEKYFGIEYDIRQRRHGCDVIMLKDPNKRLRPVIHHCPLFVGFTDGWKHLVISNDLRAEDVCELVKEPDDAHIREEKRTHEAGASLNFVTTHPDRVHRLTIVWPLNKLADIPNPKVV

SEQ ID NO: 78461 - protein, 267 aa, Zea mays
  Coding DNA Sequence Number=SeqID_35086
MWRIPDVRYPGEGSGSRGGEKSGGAVVPSLATSLHLGEGASRRCSSAAPAKLGSKRPCSSGSRGGLLSVAGGKEVDADDSSKIQGAGASVGVRRRRTAIAKKLRRSTAPTKEVGDKRKRISTPPSSSSSIRSGGPDPKKTSIVDIGIETLDSENAKLRRALAHLIRVVEQRCADIVDVVHGAFQPVSGPVLNEMNRALVQIEDLAKDLDHLALEKDWEMEHMAPSPIAESSETEDELLLDYDSELNPDDIVGYDDGRDYSTDDTYPY

SEQ ID NO: 78462 - protein, 151 aa, Zea mays
  Coding DNA Sequence Number=SeqID_35087
MGKNNKRKREPTPPSEEFGDSEYSEEEFSSESEGSPAPIPLRESSDDSDDSQGLAAEVWTYIRAVERSGLEGSDESEFSSDEEDSDGGEGEDDDDDDGDDDDGDDDDGGDGDGDGGNGGGGSGGKGGTKGGSSVGSTGGGGGKGSGSRASG

SEQ ID NO: 78463 - protein, 330 aa, Zea mays
  Coding DNA Sequence Number=SeqID_35088
  Gene Ontology: Mol. function=copper ion binding; Cellular component =ribonucleoprotein complex; Biological process=pantothenate biosynthetic process
  Homolog annotation: Hit_ID=Q6YSV0; Match level="QueryCoverage=99%, HitCoverage=45%, E-value=1e-126, Identity=70%"; Hit description =Putative uncharacterized protein P0680C01.9
  Pfam annotation: Domain name=Rsm22; Domain location=1-329; Score= -16.9; E_value=2.3e-11; Accession=PF09243.1; Description =Mitochondrial small ribosomal subunit R
MRAVWPKSIERVNLVEPSKEMQRAGQSLLDNLKGLPLIHSYDSIQELNRKIEKHERGHDLVVSSYALGEIPSLSDRITIVRQLWDLTSDVLVLLEPGTPQGAKIISQMRSYILWMEKRKCRKIEKSSSRPPSSMKSIVAQKVSLKNGSFVVAPCPHDGRCPLENSDKYCHFVQRLERTSSQRAFKRSKGKLGPLDDLNFETLKERNAKRKPEDLVIDYDDQFPSEEDEEVHVDGGDSLVPYASDEHELSLFHDSEEAEAEQTVRADLGGGWGRIIYSPMRRGRQVQMDVCRSTKRDASEGTFERVVVTRSKNPTLHFQARKSLWGDLWPF

SEQ ID NO: 78464 - protein, 54 aa, Zea mays
  Coding DNA Sequence Number=SeqID_35089
MDSQAPTNSDGDQGSYPLIGDGDPLGTRNPNGYGYGMSFAPMMGMGMGMGTDQT

SEQ ID NO: 78465 - protein, 22 aa, Zea mays
  Coding DNA Sequence Number=SeqID_35090
MDKSGVVRQLVFCFQKKKEEIG

SEQ ID NO: 78466 - protein, 110 aa, Zea mays
  Coding DNA Sequence Number=SeqID_35091
MGGEGEGEWGSGHKWPRARWGESHARRGRGEGGREQLGGGYAGTTGLTSRAHNAEREKKAGAGAREAGLTGWAHGQRESEGAGARGEVAAPTGMKWATFVKRSTTTQMES

SEQ ID NO: 78467 - protein, 95 aa, Zea mays
  Coding DNA Sequence Number=SeqID_35092
MTGKKTTASSDGGTPKKAKVVVEDEEEAGLEDEEEATVTLSVEKDALECDICCLPFQSEVFMASQITMHCKNGHSGCAKCCIRTDESRVKLHDMS

SEQ ID NO: 78468 - protein, 95 aa, Zea mays
  Coding DNA Sequence Number=SeqID_35093
MTGKKTTTSSDGGTPKKAKVVVEDEEEAGLEDEEEATVTLSVEKDALECDICCLPFQSEVFMASQITMHCKNGHSGCAKCCIRTDESRVKLHDMS

SEQ ID NO: 78469 - protein, 91 aa, Zea mays
  Coding DNA Sequence Number=SeqID_35094
MPKLPYAQLRLCSILRSLCVSSYKDFDLSEESMFEVNCMLAANFHWRRFWRSRFHKNIRGEVLVFISWKKVDKKGTFWLQHFAHPECPFLH

SEQ ID NO: 78470 - protein, 230 aa, Zea mays
  Coding DNA Sequence Number=SeqID_35095
  Subcellular localization annotation: CTP_CleavageSite=35; ConfidenceScore=5.04e-01
MARARAYKTLPDFDCTLPCTLEPHRSLARRRLPVRSVSAAAQSLCHRRPANKAIPNPVQPSEKTAHPSVKLPERGIGVCFAGEASPRSPELSTPPEYVDRVIHSTILQFLVHTVATLPREAHRAFGLNQFAVVWPVHSPPTRTPACARGPGDSGHPRHQAVPRRDRQSLPEPTPPFVGPPSPPDCNLADGEYILVPEQGAAQEVAPDPAPEPAPEDLSATALEGKPRFYA

SEQ ID NO: 78471 - protein, 241 aa, Zea mays
  Coding DNA Sequence Number=SeqID_35096
MTSHGSSDDGNALTHTDGLAREGFPRILWEVLQGGGYATPPQYAVQQFEKHRVPRCRVRMTLEPHPLQPGWRSLDSESFGYRAEDTIEAIALHGLTTFCGFHPLELATHPIGLFPAEREDDPMWKDRVEHAKDIWAIYPGQTAHLTVRCMNALYRLQVMRGEAISHLMALLEATKITLDNREELVVDLSQEMVEKDLQEIQDLEVNEDVDIEVGDEPASSVDTAGSGRPPSPESSVASFAH

SEQ ID NO: 78472 - protein, 79 aa, Zea mays
  Coding DNA Sequence Number=SeqID_35097
MASTCKNIFIGSMVGSYCKVPYNALFILGTQTILRMEVLKSGLGLGTGEEPMELCYFCAKVVPKQEEEPKIAVCCCGWC

SEQ ID NO: 78473 - protein, 114 aa, Zea mays
  Coding DNA Sequence Number=SeqID_35098
MANRRAKTRSSEGKRVQRLDDKREHARNPMYESGCTAETTSRHATVDASRGDGVKEARTASPSGIGELQRAEQGESAAMAGTTRSGSRAQSELGVMGDGEERSMGEGATGRRRR

SEQ ID NO: 78474 - protein, 108 aa, Zea mays
  Coding DNA Sequence Number=SeqID_35099
MSITQGSRRTRDVQAATSVASEVDNKAGAAAHTTRRRTTTTGEVDDVMGIKAEQRKFACATRRNWEATALEELHGAQTQENKTAARVQREERRPGRARDDGAEGMCSG

SEQ ID NO: 78475 - protein, 51 aa, Zea mays
  Coding DNA Sequence Number=SeqID_35100
MAESDNHYRSRRFVTAIGTVMSRLQGKINCASVLKSMICFRSLIIVIGVVC

SEQ ID NO: 78476 - protein, 254 aa, Zea mays
  Coding DNA Sequence Number=SeqID_35101
  Homolog annotation: Hit_ID=Q8SA97; Match level="QueryCoverage=40%, HitCoverage=18%, E-value=6e-07, Identity=43%"; Hit description =Ornithine carbamoyltransferase
GDVGVPPKLRLSLPSVAVAEPEPWGRARRKSFGRGQGEPESEPWGQAERSFVVFRVLARVRALGSGGAEFAVFRVLARVRALGSGGAEFAVFRVLARVRALGSGGAEFAVFRVLARVRALGSGGAEFAVFRVLARVRALGSGGAEFAVFRVLARVRALGSGGAEFAVAALSFCQTGQWSGGVTAVTSALPGARVRMKLYADGGYQLRIRRLEGFSPGKKTLAGAEEKSVDCRRFGDPIDEPNALRRRPRRDERS

SEQ ID NO: 78477 - protein, 97 aa, Zea mays
  Coding DNA Sequence Number=SeqID_35102
MESALHFSSVYPEPKAFAGEGLQTRIFLAEGSFGCNRSDSKVRKLSKICKRPETTFVANPVNTANLAIAKMVPRFVRSTSTNTRQFKICCGGCRIFF

SEQ ID NO: 78478 - protein, 99 aa, Zea mays
  Coding DNA Sequence Number=SeqID_35103
MAERTRLRKPKQEASSRVKNHCRSLLRGKRHLWQAKQASFHLRHDDRVKKGIRKGDISKGILLREGSGPRALLLIRGSKAGPSEGFDSRSRALGLQAHY

SEQ ID NO: 78479 - protein, 114 aa, Zea mays
  Coding DNA Sequence Number=SeqID_35104
MAGRRDGRVAAGVSALHRGGLIRSKEVFAGRCSPPDHLDPVANRGAERSSAVSTCAGGLITNRALYHGRVAFRQPDSQFWSPILSQFLMTTHVKLCRKIVDQCTIYHVAIWCCH

SEQ ID NO: 78480 - protein, 337 aa, Zea mays
  Coding DNA Sequence Number=SeqID_35105
  Pfam annotation: Domain name=SlyX; Domain location=247-307; Score= -9.6; E_value=0.079; Accession=PF04102.3; Description=SlyX
MVGTSAVTARRQPGSVEHCTIQEMVDGVTWPTTLPPGWTVEWDVAPMNLPTPASGGDTRFSSDFLSRDGFPSILWEVLNSAGYPTRPLYTVQLYVEHRVPRCRVWLTLEAHPLQPGWRSLDSETIGLRTDDTVEAAAMKTLTTLCGYHPLEMVMHPLGLFPAEKKDDPMWCNRVSHVKDVWAMYPDLVGRVTIQCMGALYRFQALQSDAMTHLANIAQTTKLTLDSREDFVVDLSSELVEKDLQVERLSQRIATLEQQVEIRDNTIDVLENQLHDVQRELEEANDHLDMHHLEMEANEAGSEGEEAPGELGPAPGAHGTTSAMPPSPVSSVASTTQG

SEQ ID NO: 78481 - protein, 168 aa, Zea mays
  Coding DNA Sequence Number=SeqID_35106
MGSGRGGSRSAEARAESEPWGRARRSFVVFRPESEPWGRGGAEFAVFRGLSPSPSPGGRAEREFAVFRVLARVRALGSGGAEFAVFRVLARVRALGSGGAEFAVFRVLARVRALGSGGAEFAVAALSFCQTGQWSGGVTAVTSALPGARVRMKLYADGGYQLRIRRLE

SEQ ID NO: 78482 - protein, 66 aa, Zea mays
  Coding DNA Sequence Number=SeqID_35107
MAMMDSTLEKMYLCQVPSFWVEMIKLRPGRIHFSKHFCKTESLIIEKPYLDSHITSIPLRVFSLVG

SEQ ID NO: 78483 - protein, 172 aa, Zea mays
  Coding DNA Sequence Number=SeqID_35108
MAWHGWALLLRSCGLAHAHAGSERPRPGSMWVAQAWLRRSLGGLGRAQRPGRLRSGLRARAGCWARKGGAGKEMGRARRPAGEGRAGLPSRPRETGPREEEGVWAGREGLIRAANPLNRSVDMHLVKALPTLIFTDLEELEVAKWTGATGKNSEKRCKISIMVKIKGLQGLR

SEQ ID NO: 78484 - protein, 166 aa, Zea mays
  Coding DNA Sequence Number=SeqID_35109
MTVPKLLVKGRARRRLLLRPRPGSGEDAIPPEVEVEAEPWGRARRRPPSEAEVEAEPWGRARRRPPSEAEAGAEPWGRARRRPPPEAEAQGRARRRPPPEAEAQGRARRSFLLRLRLNLAVVSLTLAGGTAVGEGRAALFSCQVGQWKGEVTVVTSTLPTKARVSG

SEQ ID NO: 78485 - protein, 878 aa, Zea mays
  Coding DNA Sequence Number=SeqID_35110
  Gene Ontology: Mol. function=signal transducer activity; Cellular component=membrane; Biological process=signal transduction
  Homolog annotation: Hit_ID=Q8H3G8; Match level="QueryCoverage=87%, HitCoverage=95%, E-value=0.0, Identity=60%"; Hit description=Myosin heavy chain-like protein
  Pfam annotation: Domain name=DUF869; Domain location=157-845; Score =245.9; E_value=8.7e-71; Accession=PF05911.2; Description=Plant protein of unknown function (DUF869)
  Pfam annotation: Domain name=Filament; Domain location=511-774; Score= -196.5; E_value=0.097; Accession=PF00038.12; Description=Intermediate filament protein
  Pfam annotation: Domain name=Pox_A_type_inc; Domain location=543-565; Score=9.8; E_value=3.1; Accession=PF04508.3; Description=Viral A-type inclusion protein repeat
  Pfam annotation: Domain name=Pox_A_type_inc; Domain location=616-636; Score=0.8; E_value=66; Accession=PF04508.3; Description=Viral A-type inclusion protein repeat
  Pfam annotation: Domain name=Pox_A_type_inc; Domain location=648-670; Score=1.7; E_value=47; Accession=PF04508.3; Description=Viral A-type inclusion protein repeat
  Pfam annotation: Domain name=Pox_A_type_inc; Domain location=697-719; Score=6.8; E_value=8.6; Accession=PF04508.3; Description=Viral A-type inclusion protein repeat
  Pfam module annotation: Pfam domain module=DUF869::Filament::Pox_A _type_inc::Pox_A_type_inc::Pox_A_type_inc::Pox_A_type_inc; Domain location=157-845::511-774::543-565::616-636::648-670::697-719
MDRRSWLWRRKSTDKSPAETETSASSASERITDEQLHCMPVGRVVVAQPKWLARPVAAARTGTGTEYLAPLLLIFDRKSSASGGRSLLHHWHFKSLNHLTVSVITNTAPSVMDTAKSSPNSTQSPEVTSKELEDGDNVKVKVLSERLSSVVLDIRAKDDLVKQHSKVAEEAVLGWEKAETEIASLKAQLNAAAAKNSALEDRLVHLDGALKECVRQLRRAKDEQDQTVQGALAQQARQWESHKADLELRVVELTARLEAKSERSVAAADCDTGSRLAALEKENSALRTQLLAKTEELELRTIEKELNRRAAETASKQQLEGIKKVAKLQVECRRLQAAAQRRPSVNVELRRSPSSACAESVTDCQSDCSDSWASVLVAELDQFRIDRSGASSRAASLATADIGVMDDFLEMEKLASASKGDAVEDASGQVLRLEEKVKKLAAEKAEREKALHEAQRELRTSRQRVMVAEERSAELQRQLNLANGEKHAMGAEVKAAEAKRGELEGLLELARAEIAGLLDKGRILEERLESEKALTLELAAKYQDMEALRAEKRELSAQLETSRSEAKKLGDKIALMERKLEVEKALSIRLATKCHGIDALEAKKKGVELELETAREEIASLQNKASSLELRRVEEEKASSAALALRCQELDDLRSQLESSNSRIVELNEKVKTLEDVVEEQRPVTVELESQLRSRRAEISSLKEDISLLQKKLESQKNLSSAYISALGASETEKKELASRFELGEKEAEELRGKMSLLEEQIRKEKARSSEFAVKCQKMEEQISCRSLLGHQPVKSSAAIKDLQLRKETELAKAAEKLADCQKTIASLSSQLKSLADFDEFPPETETSGADSDDAWDSDLKLLQPASYPTQIGCLAVT

SEQ ID NO: 78486 - protein, 111 aa, Zea mays
  Coding DNA Sequence Number=SeqID_35111
  Subcellular localization annotation: CTP_CleavageSite=72; ConfidenceScore=5.15e-01
MSGAPGGLRLKLATFGNFQRHSHYNSPDCPVYTGQCPVRQGGAASGTRQLRESPTASPLKITGLSGVHRTVRCDSGATATSAPTALCGAINARAARADGRLAHTGTPDKEQ

SEQ ID NO: 78487 - protein, 694 aa, Zea mays
  Coding DNA Sequence Number=SeqID_35112
  Gene Ontology: Mol. function=nucleic acid binding
  Homolog annotation: Hit_ID=A2YLN7; Match level="QueryCoverage=100%, HitCoverage=96%, E-value=0.0, Identity=53%"; Hit description =Putative uncharacterized protein
  Pfam annotation: Domain name=TPX2; Domain location=627-683; Score =59.4; E_value=1.2e-14; Accession=PF06886.2; Description=Targeting protein for Xklp2 (TPX2)
MALDTGTVAAGAIDEAYEFSAPRFFDFITEETEEAVRAAESWFEAARSHAPSPFNPRIKESRAEAKVAVLCDFAEAEEPAPEAVPVEVAAGSVSVHGADAIDGQVCVPYVLVSAQCPEAISESPPASHPAQEEKDKSPQSFEFLSATDLSVKSDGGAASTPKMQTRPPSPSTKIAPPISTCDSSSVNTGARTPKTQANMCRAATMAASTNAKGSVIKGGCDLVGTGKAATAGAEIAQANQAVKRQKLDDGRARQILNVKTKVLPHKRRTDLAVSNEVRRSREDMCSLKEATTYVSTAELVKKFESGTRKLSITHSRSRSRDDAALQGRPKLVLTRPKEPEFQTSQRIRAVKVKSSAEIEEEMLAKIPKFRARPFNKKIAEAPSFPPLPRKPPQISEFSEFHLKTMERASRYADTCSEVSCADTIRSRNKPLKSTQRKPPQLHTANRARPPSVKSSQELELEELEKAPKFRAKPLNKKILESKGDIGVFVHPKSQVTAPKEFRFCTDVRLGPPSVADLFDKLSLHSECSSNSNRQGVPRCTIPNPFSLQTEVPPKPEPKPCTRPEGFQLESLVRHELEQQRLMEERQRMEREEAQRRIVKAQPVLKEDPIPLPEKERKPLTEVQQFVLHVDERAVHRSEFDSMIKEKEKTYKRLREENEFAQKIEEEKALKQLRRTMVPHARQVPKFDKPFRPQK

SEQ ID NO: 78488 - protein, 199 aa, Zea mays
  Coding DNA Sequence Number=SeqID_35113
MKADYVVKEGSCYRGYCVRMSQGNEWTRGISVPHKPPIFGLILRYSAQRSQVQLAGKNNKRKREPTPPSEDFGDSEYSEEEFSSEFEGSPAPIPLRESSDDSDDSQGLAAEVWTYIRAVERSGLEGSDESEYSSDEEDSSEEDGGGDGEDDDDDDDDDEGGGGGDGDGGARGGSSGSDDDSSRGSNRGGSGRGSNRASG

SEQ ID NO: 78489 - protein, 109 aa, Zea mays
  Coding DNA Sequence Number=SeqID_35114
MTREADFDMLSIRREHSRSRKVLLLMKNLSINLTSPNFEEHLADPVSLVENAICCSLDSDPYWAPLSTAEEVALFGCLKHGSKVGLFPGSSPVHVILTRSRYFVDLTPP

SEQ ID NO: 78490 - protein, 102 aa, Zea mays
  Coding DNA Sequence Number=SeqID_35115
  Homolog annotation: Hit_ID=Q9SZZ4; Match level="QueryCoverage=92%, HitCoverage=38%, E-value=7e-33, Identity=65%"; Hit description =Putative uncharacterized protein L73G19.40
  Pfam annotation: Domain name=DUF862; Domain location=3-99; Score=6.6; E_value=8.1e-05; Accession=PF05903.5; Description=Eukaryotic protein of unknown function (DUF862)
MGQDVVAHVYDVATAGSDTTVLHINRFFKDAIGLGGIFHTAIQVYGDEEWSFGYCERGTGVFSCPPCKNPMYTYRESIVLGKTNCCILKVGSIALQMRVTLL

SEQ ID NO: 78491 - protein, 109 aa, Zea mays
  Coding DNA Sequence Number=SeqID_35116
MGKDKKGRDDSQGIATELWTYIRSIERVGLEGSDESEVSSDEENFSNSSEEGSDSDDDDEGDGSGDDSGGGGGGDDGNDGGGGGSGDGRGDNGGGSGSKASGKHHWLKH

SEQ ID NO: 78492 - protein, 223 aa, Zea mays
  Coding DNA Sequence Number=SeqID_35117
  Gene Ontology: Mol. function=catalytic activity
  Homolog annotation: Hit_ID=A2ZBF6; Match level="QueryCoverage=57%, HitCoverage=22%, E-value=2e-37, Identity=60%"; Hit description =Putative uncharacterized protein
MVNREPYPLDIRGELDDTTAFKNFKKWGGIEFPLPFGRVLSPTESFIHELDEKVLFHEQVQALEKSGDCSGLTMTFVPIDNDTNDRFHKIDSMVATEDTDIAVELYRLSVSTLDLLKLASKEEQGAYVGAWYNMLLSCAQELKHGVALWQEFYHANVCDRVVSEGGHYLIALGEIYRVAQILYLSLQRLKTWVLADPGMLSKMLSCLDSCTYIRKPNKSFRQE

SEQ ID NO: 78493 - protein, 355 aa, Zea mays
  Coding DNA Sequence Number=SeqID_35118
  Subcellular localization annotation: CTP_CleavageSite=9; ConfidenceScore=5.16e-01
MAAPPPPPSAGKVTGQTRMLLFHHVVKTSSIPPPAGGLTAAIVVVARRRKEYHVVAAVEGHELKTPETEHRPGLERLLETTHLELDGKLFVNTQQAPTWRANCRRFDPGGADALAVGGYKRSRGRESLCVSPSSRAATFSYESPGPSFYRCKERAQAILALNAPAIQSVGVAIWPRLLLREACPSWASGESKVCPLLEGTLGRDVNPPGSAVPARGWARARRDPEIRSLGGTPNYGPRQYAPCDKDGQTKEANNDQEEEGSSLMRTLVAKRLKSNNCSVSASKSELEKYLAKENEEHTTKFNIMEWWKDWMRRASPITNGEDIEELAKLEEALLAEMNSLNTAKASRDKETVNCG

SEQ ID NO: 78494 - protein, 243 aa, Zea mays
  Coding DNA Sequence Number=SeqID_35119
  Gene Ontology: Mol. function=double-stranded RNA binding; Cellular component=intracellular
  Homolog annotation: Hit_ID=Q5N890; Match level="QueryCoverage=25%, HitCoverage=8%, E-value=6e-21, Identity=81%"; Hit description=C -terminal domain phosphatase-like protein
MSGYGSCSGDKCDLDLRGEFDENLLRKVFELYYENELLDLSYAPDVGDYLVCEDTSFVPGNKDQAPEGMMETEVEKRLNGQTIAYYLVLKQCLNQNTQFNVAGTLKKVMIGQMMIMRNFVSNAWSKINNIVCIECRPFLECNHPITLFAATISGRGNVPSESRQRRTLRIDSAHTREEAIPTCHGRGGGDGMRLTGAWTLSPIPPVVADILVQVHGQISKREAFDSTKGLGKTVPLSSDGQSV

SEQ ID NO: 78495 - protein, 82 aa, Zea mays
  Coding DNA Sequence Number=SeqID_35120
  Subcellular localization annotation: CTP_CleavageSite=24; ConfidenceScore=5.53e-01
MGAIQVKALSTQGTRSRLARAQPRAGTADPGGFTSRPRVPSSNGHTFDSPEAQLGQASRRSNLGQIATPTDCIAGAFNARIA

SEQ ID NO: 78496 - protein, 561 aa, Zea mays
  Coding DNA Sequence Number=SeqID_35121
  Gene Ontology: Mol. function=tRNA-pseudouridine synthase activity; Cellular component=nucleus; Biological process=tRNA pseudouridine synthesis
  Homolog annotation: Hit_ID=A2Y6D6; Match level="QueryCoverage=95%, HitCoverage=90%, E-value=0.0, Identity=62%"; Hit description =Putative uncharacterized protein
  Pfam annotation: Domain name=TruD; Domain location=128-551; Score =27.7; E_value=2.4e-11; Accession=PF01142.9; Description=tRNA pseudouridine synthase D (TruD)
MALSSSSPRSTSPPRYQSVGVNEEDKAAPSAEADHSQALESFRSLCGDADCNALRGLLEKVSGEGGGDVSPVILSPDADKAHRSEVHNFFKKTFKFLVTDTVEHSDGVQKCIRVRFGSEAGVGRGAGGRGRGRKRKNMGSSDWRDGRPFDSRGSSNWPDNVGKFLRFHLYKENKDTQEALGVIGKMLGLQVTVFKVQASKLLALNKRLFGIKVGNFWGVTAESEDMIKIAVDGLGKNGFINYYGLQRFGSGSIPTHLVGAALLRGEWKVARDDINEVRKRYKEHGDIDMALRNFPRHLVAERAILQCLKKCPGNHLQALKGISQVVEGDLVYNKECPSEESTSVDILETDDDHTNSIEIDLCSEAQPEESIQSAKIVDSGDFTKGIYTFDDVVLPLPGSQALFPGNEIAEIYHEMARKDGISLTENAHGVKEFSITSMKGGYRRVFQRPIGFEWELITYTDDTSSLAETDLDVLSRTKPKEANELISKQESQDKLEKAPDTSVPTNGNSSQEKLIGSPDIRPKKLALKLAFTLPTSCYATMAIRELLKTSTSVAYQKTLSC

SEQ ID NO: 78497 - protein, 246 aa, Zea mays
  Coding DNA Sequence Number=SeqID_35122
MAVAGGRKQRSSRQPSSWTGKGDTPKGILLREGNEPRAPLLIRGSKAGSLEGFNSRLRALGLRARYWSEVRRSAPRKGSTAASGHSGSAPTTDQGFVGWPSKAPEDDELRLARPEGSGSAPKDDELRLARPQGSDSGSAPEDDELRLARSQGSDSGSAPEDDELRLARPQGSDSGSTDGLRLARPRGSDSTSASEDRLDLDLDLGGASASPNPGLGPTTSQEAPSLPYPKLTQATGNKTGVPSGSP

SEQ ID NO: 78498 - protein, 296 aa, Zea mays
  Coding DNA Sequence Number=SeqID_35123
MGRRETEREGGKKPEGGRRKRGNPRPSCLSRAQVGRKERVQGNDGASCDVVGPSPGLGEAEAPPRSRSRSSLSSEAEVESEPLGQARRRSSVEPESEPWGRARRSSSSSGAEPESEPWDRARRSSSSSGAEPESEPWGRVRRSSSSSGAEPESEPWDRVRRSSSSSGAEPKSEPWGRVRRSFLWRLRPDLAAVSLTLSSGTAVGATRTALSSCQTGQWSGEATFALNAPAIRSVVVAIWPRLLLGEDRASGEPKLCADEGYQLRLGVLGVPLIMVPDKPRQGTTGSAVKIHAPKRE

SEQ ID NO: 78499 - protein, 245 aa, Zea mays
  Coding DNA Sequence Number=SeqID_35124
  Gene Ontology: Mol. function=ubiquitin thiolesterase activity; Biological process=ubiquitin-dependent protein catabolic process
  Homolog annotation: Hit_ID=A3A6Q7; Match level="QueryCoverage=18%, HitCoverage=9%, E-value=6e-11, Identity=63%"; Hit description =Putative uncharacterized protein
  Subcellular localization annotation: CTP_CleavageSite=73; ConfidenceScore=5.48e-01
MPLKNGKTASGPLIKPIHFKNSAAEKVMSNGKVNLTSKNNPEVNGTAKSSESNRCKTGQFVGPSKNNADNTISCGERGQQSERIHDANGNGQSIHHSQYFGEISNGNAMPTSAQQETSHGNATPARQETNNSNGTPAQQETSNGKASHAEHYSERSSHQEEHANFSGNKRRLEEDKFQEILWSGNKYAQELRHSNKWVIKSIDKIRRGFLWKGRKEVNGDSCLVPWEIVTRPLSYGSMADLVSPT

SEQ ID NO: 78500 - protein, 182 aa, Zea mays
  Coding DNA Sequence Number=SeqID_35125
  Homolog annotation: Hit_ID=Q337X2; Match level="QueryCoverage=46%, HitCoverage=19%, E-value=2e-08, Identity=67%"; Hit description =Retrotransposon protein, putative, unclassified, expressed
MKESCDTGAAGDVLVAAAALEVTGMGLVAGGTEGHGLLFHLTEDSPVLAVDRSNVAAIKTWQINDGKDRHTGDVIGTGRRRKSSPRLYILNTLRLPSYHTSTPHVLAASGPTTSFAQWHPRLECVFLGYNPEHKGYRCYDPSTRRIRISRDGYRLRDRGTIEPPDRYGFPRADVAIVEPTTY

SEQ ID NO: 78501 - protein, 400 aa, Zea mays
  Coding DNA Sequence Number=SeqID_35126
  Homolog annotation: Hit_ID=Q6QP51; Match level="QueryCoverage=15%, HitCoverage=30%, E-value=3e-14, Identity=62%"; Hit description =Putative growth-regulating factor 1
MQAACNRTKGAHPLDFDVSSMEAQAHTSCNRRAGYYVQETAPSLAPVPRLLDCGTGASTRGDPAHDPTVPTEHIDHGDRERGYSERDPSPRRKRAPSPPTDQRFEGWPLGRVQQPPQSTRAPHPLLIRGSKAGPSEGFNHRLRALGLHAHYWSEVRRLAPRNGSTAASGHSGSAPTTDQGFVGWPPKGSDSRLRARRARDDPRYIRYITKARATLPRLGGCSRKPGSGQTVDSINIPARELGTRLCTRPTARLGHNLGLGRRSPPRPTLRLGLNLDAGRRTLPRPTQGSDTASASEDGLRLARPRARTQPRPWRRSPPRPTRGSDTASASEDGLRLARPRARTQPQSRKTVSASPDPGLELNLDLGRWTPPRPTPGVGLRLDLGRRTRPRPRRSLRFAPT

SEQ ID NO: 78502 - protein, 221 aa, Zea mays
  Coding DNA Sequence Number=SeqID_35127
  Gene Ontology: Mol. function=RNA polymerase II transcription factor activity; Cellular component=transcription factor TFIIF complex; Biological process=transcription initiation from RNA polymerase II promoter
  Homolog annotation: Hit_ID=Q6L4V9; Match level="QueryCoverage=100%, HitCoverage=100%, E-value=6e-78, Identity=60%"; Hit description =Putative transcription initiation factor
  Pfam annotation: Domain name=TFIIF_beta; Domain location=5-221; Score= -8.0; E_value=2e-09; Accession=PF02270.6; Description=Transcription initiation factor IIF, beta subunit
MDEEAEYLETARADRSVWLMKCPPVVSRAWQAASASSSDAANANPVVAKVVLSLDLLRQEERPEEPTLQARKLSCEGKVEHKFDMEPHSDNLANYGKLCRERTQKYMVLDNDHGMSMRPMPGIVGLISSSSKEKKKQAPVKPSDAKRTRRDRTEMENVIFKLFERQPNWALKALVQETDQPEQFLKEILNDLCVYNKRGPNQGTHELKPEYKKSTGDTDTA

SEQ ID NO: 78503 - protein, 273 aa, Zea mays
  Coding DNA Sequence Number=SeqID_35128
  Gene Ontology: Mol. function=ubiquitin thiolesterase activity; Cellular component=nucleus; Biological process=ubiquitin-dependent protein catabolic process
  Homolog annotation: Hit_ID=A7QK71; Match level="QueryCoverage=76%, HitCoverage=35%, E-value=4e-52, Identity=51%"; Hit description =Ubiquitin carboxyl-terminal hydrolase
  Pfam annotation: Domain name=UCH; Domain location=19-267; Score=3.6; E_value=1.5e-07; Accession=PF00443.20; Description=Ubiquitin carboxyl-terminal hydrolase
  Subcellular localization annotation: CTP_CleavageSite=51; ConfidenceScore=5.34e-01
MAPTAEPSSRPPQWRPRTGPPPGLKNLGNTCYLNSVLQCLASTPPLATFCLASRHSNQCKKVFPNRDNDCALCVLERQIARLLRADAGALDSPAKVIRCMPLFAEHFRWGRQEDAHEFLRYVVDACHTADLRMRKGLRAAAASGNCGEDVRGQGVCLVMRETFGGALLSQVKCLECKGESNKTDEIMDISLDLPGSSSVADALSRFFHPETLDGANKYCCERYAVLYLKRNKWFLDEGSMYCKNFHCLLAKDAKAVLRCFRVDNNIFSGNKIM

SEQ ID NO: 78504 - protein, 136 aa, Zea mays
  Coding DNA Sequence Number=SeqID_35129
MGQRFTRSTFTGDRAKSGDCTGFSSEAKSDSLLGELHRGVHSLFQGSGVAGKCSVGQSTVAGARVAAGTPCTGQTPVVSGSGEVERARRNLSVASRQQQAMRYDDGGGERRIEDVGELGNTGFTVRVDELCRGIVE

SEQ ID NO: 78505 - protein, 334 aa, Zea mays
  Coding DNA Sequence Number=SeqID_35130
  Homolog annotation: Hit_ID=A2YGC2; Match level="QueryCoverage=38%, HitCoverage=54%, E-value=6e-10, Identity=34%"; Hit description =Putative uncharacterized protein
MRSRNVDDRSSRAPLSCSNRSRDENGTDTAGYRVIPYPTLMYLSRIQDWIRVVKIRDGYRTGPGNNTGGQETDNRYYSVQGTPVFVLVGAARLLCCARCAVHLWPVRVCGDGREHGTVGSRKDGLFDPSLATLLTGVTSTMRSTPCYVGHLTGVLGPSSIAVWSTSIVAGVYLDRWEATCLVRRPENSLWGAEVCSEHYSISERDTAEAAMQDAARRVLSHYCSVLGGVADSLNMKYYPRRPSGSTGGVIVSPVGEDNPRLSSTVNLAVVLNMELDHALDELSRARAEIAQLRAERAERRHLDDGSPAPIGTQHPYAHLGVDTSLMAIPTARQR

SEQ ID NO: 78506 - protein, 75 aa, Zea mays
  Coding DNA Sequence Number=SeqID_35131
MAWPCARSRRILGENDPVEEPEELAGEALEQQSVAMRLMVLGIGSCNGCQHCNHCSGEDEAVEGDFQEFQDYDEF

SEQ ID NO: 78507 - protein, 289 aa, Zea mays
  Coding DNA Sequence Number=SeqID_35132
MTSHGSSDEGNAQSHTDGLAREGFPRILWEVLQGAGYTTPPQYAVQQFEKHRVPRCRVRMTLEPHPLQRGWRSLDSESFGYRAEDTIEAIALHGLTTFCGFHPLELSTDPIGLFPAEREDDPMWKDRVEHAKDIWAIYPGLTAHLTVRCMNALYRLLVMRGEAMSHLMALLEATKITLDNREEFVVDLSTEMVEKDLQVEQLSNEIQELEELVGTRENTIEVLEDQLINTQQQLAEANEHLDMHHQEIQDMEANEDVDIEGGEEPASSLDTTGSGRPPSPESSVASFAH

SEQ ID NO: 78508 - protein, 101 aa, Zea mays
  Coding DNA Sequence Number=SeqID_35133
MPAGVTEMLAWRDGWRSSSVQAKRTDIESTIQICILVFNIQLVKIHKSSDYRFHPQHCVRDNAGLAHLLALGPNYAATNVGFLYLVAVMHQVSPSLHLYLY

SEQ ID NO: 78509 - protein, 118 aa, Zea mays
  Coding DNA Sequence Number=SeqID_35134
  Gene Ontology: Mol. function=catalytic activity
  Homolog annotation: Hit_ID=Q2HW33; Match level="QueryCoverage=88%, HitCoverage=30%, E-value=2e-10, Identity=38%"; Hit description =Protein phosphatase 2C-like
MSTCFADCPSPGPRKNDLTIYWALGPFVRSFTLPVDPGDICPPHAPDLWVDFEVINPNIPGPACRYYLTDETGVHFVWQPNQESSVFVMSRAFDDYYIENCGVILAPEVTQRRIDNSD

SEQ ID NO: 78510 - protein, 86 aa, Zea mays
  Coding DNA Sequence Number=SeqID_35135
MVVQGASLAEVQGKEASQTPPPAEARGKSPAALGPAPTPGVGAPAPRACDDAVSQGDSTDLAPCDAMDAPSGEKAKRGSQTYVQCT

SEQ ID NO: 78511 - protein, 78 aa, Zea mays
  Coding DNA Sequence Number=SeqID_35136
MEGTAELAAAELLSLGNDSPNGLVPHSGNTHDFLLALALLGCSDAGIDFLLAGSSDGTVAAAEETAYSTADAGAGDLA

SEQ ID NO: 78512 - protein, 208 aa, Zea mays
  Coding DNA Sequence Number=SeqID_35137
  Gene Ontology: Mol. function=hydrolase activity; Cellular component =cytoplasm; Biological process=embryonic development ending in birth or egg hatching
  Homolog annotation: Hit_ID=Q108Z7; Match level="QueryCoverage=30%, HitCoverage=2%, E-value=3e-21, Identity=78%"; Hit description =Transcriptional regulator, putative, expressed
MAMDTKGRYIILNAIANQLRYPNSHTHYIILYLFAEATQEIGQEQITRVLLEKLIVNRPHPRGTDKGECLCVATEVTIELKTDGECKHHYNIQNPDKYIASVHSKSHIKLMNKISSKKYDTSRNKIARKLDYIYFNKGSSEYSVLAAGSVIKVILHLTAIRGLYGGMRMRMDFAGTIDIKSVFDLNFEIFFLEKAEAKPKKLNFSTAI

SEQ ID NO: 78513 - protein, 77 aa, Zea mays
  Coding DNA Sequence Number=SeqID_35138
  Homolog annotation: Hit_ID=A3AYT6; Match level="QueryCoverage=76%, HitCoverage=19%, E-value=6e-08, Identity=52%"; Hit description =Putative uncharacterized protein
MSCLIPSSSWPCAPSRTLPLLSAWRSPLPTTATPHDSEKLREKLRQECLRKGTELAHGVADALFAVPHTEDKGIEEH

SEQ ID NO: 78514 - protein, 371 aa, Zea mays
  Coding DNA Sequence Number=SeqID_35139
  Gene Ontology: Mol. function=sequence-specific DNA binding; Cellular component=nucleus; Biological process=regulation of transcription, DNA-dependent
  Homolog annotation: Hit_ID=A3C783; Match level="QueryCoverage=100%, HitCoverage=99%, E-value=2e-42, Identity=64%"; Hit description =Putative uncharacterized protein
  Pfam annotation: Domain name=GATA; Domain location=275-310; Score =66.6; E_value=8.4e-17; Accession=PF00320.18; Description=GATA zinc finger
MASEWEMAMGVELGMGMGGTYHHNASSITTAPMMMSSHPHSHSGGAASYSTPHHHHYYGGMPPMGDAMRVDDLLDLSTPGAGAHEFFPTAAPATDKGHHSSGAMGEPSPTANSSDHRTSALSFADEFYIPTEEAAELEWLSKFVDDSYSDMPNYSSATHAAMAAAAAAAANAAGNGGGTTSAGQDSGVAAAPGRGARSRRSRATAAAAAVWHSLVPRPPSQSSPSSSSCSSSDFPSSNKPARPNGGSRGKKVPGPPGGGPAGGEAGLEGGGVRRCTHCASEKTPQWRTGPLGPKTLCNACGVRFKSGRLMPEYRPAASPTFVLTQHSNSHRKVMELRRQKELILIRGSHRDAAAGSAAGGPRPELMFRDYG

SEQ ID NO: 78515 - protein, 152 aa, Zea mays
  Coding DNA Sequence Number=SeqID_35140
  Gene Ontology: Mol. function=transferase activity, transferring pentosyl groups; Cellular component=imidazoleglycerol-phosphate synthase complex; Biological process=histidine biosynthetic process
  Homolog annotation: Hit_ID=Q10NW0; Match level="QueryCoverage=92%, HitCoverage=27%, E-value=1e-63, Identity=76%"; Hit description =Imidazole glycerol phosphate synthase hisHF, chloroplast, putative, expressed
  Pfam annotation: Domain name=GATase; Domain location=2-136; Score =24.5; E_value=1.3e-07; Accession=PF00117.19; Description=Glutamine amidotransferase class-I
MDVLNRTGMADALREYIQRDRPFLGICLGLQLLFDSSEENGPVSGLGVIPHIGWNALQITKDTPLLQGADGQHVYFVHSYRVLPSDANRDWISSICNYGDNFISSISMGNIQAVQFHPEKSGATGLSILKEFLRPNSLGTKARELFYYLKGE

SEQ ID NO: 78516 - protein, 58 aa, Zea mays
  Coding DNA Sequence Number=SeqID_35141
MDERISTCQTTEGKGGIIGHEQGVEYDDIGTSPLYTFSSFALPNPGAADILGILSLIL

SEQ ID NO: 78517 - protein, 120 aa, Zea mays
  Coding DNA Sequence Number=SeqID_35142
MGTTWGGVVCKERPRLYRPDLHYQGEWPRIHYVAFTKTPLVHSCLLGFANRTNAVHLPKSEHYAPAPIDGPPAKTTTPPGSSNYSAKGVPLMVALLSRGGHSTNRALRRGTQEKGPQPPK

SEQ ID NO: 78518 - protein, 216 aa, Zea mays
  Coding DNA Sequence Number=SeqID_35143
MSKPDKTFPLLILLVLPSLLNPGVGPHEFGLSDCPHSLEWLYYKGVQVVKMTSRSLYEGTILLLTPKPGKDGLAFVEAFLAQKIYFREIRLRPFFRGYGIRIRAQLRPTCEGDGAGAGSDGVTAGPPVSESGGGGTALRSDGAGEPAERGRKAGRRWARRRFAAGGPVLGPRGGGLARAEAGDSRGRLNLARGGWEGAVRGEGAELRGGDRRRWAL

SEQ ID NO: 78519 - protein, 852 aa, Zea mays
  Coding DNA Sequence Number=SeqID_35144
  Gene Ontology: Mol. function=RNA binding
  Homolog annotation: Hit_ID=Q7XC74; Match level="QueryCoverage=88%, HitCoverage=35%, E-value=1e-137, Identity=40%"; Hit description =Agenet domain containing protein, expressed
MDHDDTDFQSQNFQLAGVGSSKFPSGLRPFALPKLDIEDQLQGHLRFDNLIDSEAFFSVQGHENSWIEVLSTGSSVVDFSSSAAESCSISKTNNVWSEATSTESVEMLLKSVGGNETTGNMDSNAHLQLIGMDSQTDQSSVHPKSSTSPTDSTVVPTEKDQSWSTHSRMTADLSNTESQLEHFVPFLLDKKAAQAADSVAEKCLTGEKLSSSNNTPGSCPTVGNYFGAGHDDNSLDKFNVPSAEVDSKKLNNESFPELAPLQNIYTDSYHFKKDIKESEAVVTPQDSKFCHINENKVEGGLQELQNLSCAGQSLGAVNLSSPPSNETLLSKSSDGLLEAITNPVKMLHRSDDTCHKVNITLQPSFLAVQHGTEGLKSSVHRSNELVVKEFSIGSNSLISHQSEADPRNSNPHPVSSVSPKSKITDATCVPEETNNTETNSTNTCYTYDESKHVVLEYNQGSVDKLKSGDMGEKATGEEIPAVSGSIEQMIENYHEENATGTSNNKVGLSDSIAPENCAADTLNASEEPNSPSLNHERSFEEHELPALGEEPKSTNLLLSTSGFQEKISASVISSSSGVMPTIVTDNVATSEDNNGCSIGVSSVDSSVLLDEKDLRTSTVNNEEPFKEGTKSALGDQENDGISPGSEQGGEMPAVPMDSNIAVYSDTVSATEKEKYKDHPNSLGSLTTGGTQDKSGNHPDALSLKCQTGRSSIHTDLIDPTTAPMLGIPTGKVAEKIVKTPLNASDDLNAHMQACQVHNRSCARLILVIMVPPMLYYHLFDLSNVHVGLQERKKLMFVYSNMVSKPEVSSSNPDKGFICASTYLFSRLRLSLWLHVSGGVEVYKWKNYLLPPA

SEQ ID NO: 78520 - protein, 74 aa, Zea mays
  Coding DNA Sequence Number=SeqID_35145
  Subcellular localization annotation: CTP_CleavageSite=57; ConfidenceScore=5.27e-01
MWLKITGLSGEPTTPTANGQLRNLRATRVLLQRSVGYTGLSGVLRTVSAEENIRMVRENLKAAQSRQRSYVKVA

SEQ ID NO: 78521 - protein, 110 aa, Zea mays
  Coding DNA Sequence Number=SeqID_35146
  Subcellular localization annotation: CTP_CleavageSite=41; ConfidenceScore=5.41e-01
DFGGGSGRAVSDGLVGATGHRAQAFIGSTSPNGRANFVEVVAARTVDSARLSRGRRRHRTGESDEWAQVIGERREGKRGLHRAVPGVSGMAKARAVCDGAADALAPPARD

SEQ ID NO: 78522 - protein, 47 aa, Zea mays
  Coding DNA Sequence Number=SeqID_35147
MEVNLRKPRAHHKGLMGTPLTELIRKKCKTGILAELTVMSSSGLSDD

SEQ ID NO: 78523 - protein, 398 aa, Zea mays
  Coding DNA Sequence Number=SeqID_35148
  Homolog annotation: Hit_ID=A2YGC2; Match level="QueryCoverage=30%, HitCoverage=54%, E-value=2e-09, Identity=34%"; Hit description =Putative uncharacterized protein
  Subcellular localization annotation: CTP_CleavageSite=13; ConfidenceScore=5.21e-01
DRAPPRTWTRALRVALGMRPHATTLAPSRPRQAPHSQAGPRPLPPASPSPAACAPFPASPPLGASHAASRPRVAPPRRVPPRPSPSPHRALPAEPLPGRAPRPRSGRAPSRAPPAVPPARTLARPCPLPCLGDSRPARLHENDLVEEPEELTGEAPEQHLELEQQGSSFSLQQDIESVRSCSPVLPLEAPPTPPLSAPAPGVAARGDPDDGGGDNSSSHDTDFSADQEPEGWVARPITRDAARGCHFHDALDTLLRRELDRLTWSIEYRCVVFQHSRRVYPDRWEATCLVRRPENSLWGAEVCSEHYSISERDSAEAAMQDAAWRALSHYCSLLGGVADGFNLKYYPRRPSGSTGGVIVSPVGEDNPRLSSTVNLAAVLNTELDHALDELSRARDEIA

SEQ ID NO: 78524 - protein, 279 aa, Zea mays
  Coding DNA Sequence Number=SeqID_35149
MVPAGGSGSQQRTPAEDVAGDLSAATASSTSASVRNPPLAVAEEVPIILASTALGGAGAGVAPSAPQDLPVTVVAAPSGPRVLAEGPEVTLLPTAAEGLAARIPSDAPSAEHTKAVSCYFASERAEFEQEREDFKEDIRKVFDREDEVIQKEKSLARKEVRLDQREETVTALQAKLKAYNTVLEKQRVKQAATEVKLQKLQQELADRASNTARAEGSLKAGEASLAKRAAGLTRQEEDLAFREEMWARWNKLLDELELEAEERRKRLEEKVQALEEQVC

SEQ ID NO: 78525 - protein, 194 aa, Zea mays
  Coding DNA Sequence Number=SeqID_35150
  Subcellular localization annotation: CTP_CleavageSite=27; ConfidenceScore=5.14e-01
MVQRLTRSTFTGDRVKSGDRGLASPVRQSPIPCSGSFTEACTVYSEGRARLGKALLAGLRWRGIGWSLARRARGNASDLVLRVFQRYFGATLSIGPSGFKFGIKGIKCTTSCIIGPRHDQVVFITFWSYLPIVLQLSTWGALGFWAISPPLMYMRVCAEGIRFIPVRTECPYFQSSVACTTGTIEDQTYSSGYR

SEQ ID NO: 78526 - protein, 97 aa, Zea mays
  Coding DNA Sequence Number=SeqID_35151
MSALRNNEDPLLEEVLTTTCGVPPVTRKRRCAKSLVGTVNGPPSRNINRLGGRGALDVRSRPGPTAWKALDPVPSERTSGTDPGPFQMWFGRFTTGS

SEQ ID NO: 78527 - protein, 26 aa, Zea mays
  Coding DNA Sequence Number=SeqID_35152
MPSLGYPNWHPVEDSEQELTEGKLCP

SEQ ID NO: 78528 - protein, 90 aa, Zea mays
  Coding DNA Sequence Number=SeqID_35153
MPNHRAPCEHARAALRAMSDIGAMPRPTAWGRALPSLRPRALGPPCRFLGRAGLALLDRTGFLLEYAIPPAVILISALIMECFGNHQKGD

SEQ ID NO: 78529 - protein, 40 aa, Zea mays
  Coding DNA Sequence Number=SeqID_35154
MALLSTVETCSVSDLSWCCLIVLLDTAFGTAAAEVDAGSA

SEQ ID NO: 78530 - protein, 567 aa, Zea mays
  Coding DNA Sequence Number=SeqID_35155
  Gene Ontology: Mol. function=amino acid binding; Biological process =metabolic process
  Homolog annotation: Hit_ID=A9PH33; Match level="QueryCoverage=82%, HitCoverage=91%, E-value=1e-107, Identity=51%"; Hit description =Putative uncharacterized protein
  Pfam annotation: Domain name=ACT; Domain location=100-167; Score =24.2; E_value=0.00049; Accession=PF01842.16; Description=ACT domain
  Pfam annotation: Domain name=ACT; Domain location=192-260; Score =45.9; E_value=1.4e-10; Accession=PF01842.16; Description=ACT domain
  Pfam annotation: Domain name=ACT; Domain location=339-407; Score =14.9; E_value=0.22; Accession=PF01842.16; Description=ACT domain
  Pfam annotation: Domain name=ACT; Domain location=448-515; Score =49.4; E_value=1.2e-11; Accession=PF01842.16; Description=ACT domain
  Pfam module annotation: Pfam domain module=ACT::ACT::ACT::ACT; Domain location=100-167::192-260::339-407::448-515
MACGSRSRRTSETVDEYEKLVLRMNPPRLFFFPPTPFLLLCRRPLLTVPASWPFGTPQGHRGQRLRHDCHLGEGKRRRSSAELFLLFLLLSLSGCSFDLCLLQVDSANKYGTLLEVVQVLTDLKLTINRAYISSDGEWFMDVFHVVDQDGNKLYDGQVIDRIEQSLGAGSLSFRGPPERLVAVEAEAEEAQTTIELVGRDRPGLLSEVFAVLADLRCNVVASEVWTHDGRVAALVHVTDADTLGAIDDPARLDTVKRLLRHVLRGSSRDKKAARAAVSSARVEHAPRRLHQMMQADRSARREGGGDGDGEEERERGEASGNGNGVPVVAVEDCAERGYTLVNVRCRDRPKLLFDTVCTLTDMQYVVFHGTVIAEGSEAYQEYYIRHLDDSSGEDRDRLCRGLEAAIQRRCTEVHVHAAPVHTLAFLSLTPGSSQLCLNARGPLLVQGLRLELCCEDRVGLLSDVTRIFREHGLSVTHAEVETRGARAANVFYVVDASGEPVQAQAAVDAVRAEIGEQVLLLVREQQQDAAGGPKSPAGAGGRRSLGNMIRSRSEKFLYNLGLIRSCS

SEQ ID NO: 78531 - protein, 147 aa, Zea mays
  Coding DNA Sequence Number=SeqID_35156
MTHSARGSAMNNPHPKAVSAPAASEDNRNPPGFAPPEGADATEDGEVIGVSAEEQLQLRALRIKNRNLQKQKKILEAKRQRVSAQAKVRQMIRDEEQKAQELEQEIALMQSEGQLGLQQGPPLQQRAPFEDLFIPQRGPVIPHAAAF

SEQ ID NO: 78532 - protein, 289 aa, Zea mays
  Coding DNA Sequence Number=SeqID_35157
MNVLSREGCRHYEVFDQSDESFEREIFKAEDPVVKQSVGPLFDRMWGAHGREAVRERSDRAREQMERAEDVKDLGGLVGALPEAAEGNPVLPSDAGEGLSAVPVPAMAGEDPASAPEPTVEGAPEVVAEPVQRFLGLRTQPLLTMLILWRLRPVVAKNDSDDSVSKFFESDVSGSSVVWTEESSDEDLDYFVALDVAAAEASPRVMDAEVLPGPSAGRRRRRAVAKRRVSEVEGGRLRVDGASKRELLSSPVGASVGEGELRNLFEGKELRIMLFNYREMGIIPKVEPM

SEQ ID NO: 78533 - protein, 203 aa, Zea mays
  Coding DNA Sequence Number=SeqID_35158
MAGSKDHTKISTTNIIKPAMEALPADDQRPFEDLVMRDEKEVMRQWNEQRDKEEAELLHKLSERRKEAADKYLSHFTVDRHQKIIHQGEIDMESLLPPLQGPASRELRNMHSFHIHRSNIMVPHQQHIIIIPYHLMDIGLKTVRPQESLRGIGQELVTLIGHLTHTSNIPGRKADRVMSGNLRFPPTNSMDGRETWQRGSETK

SEQ ID NO: 78534 - protein, 91 aa, Zea mays
  Coding DNA Sequence Number=SeqID_35159
MVKDFGSKTVQIAVNVVCRRGSESFLDNELREGVFETFGAPKLKKLFSWIKLVTKNDLAPRKGLLLGLCFVAEGLQGRSSKDTKVDTAPKL

SEQ ID NO: 78535 - protein, 133 aa, Zea mays
  Coding DNA Sequence Number=SeqID_35160
MEGSLLPLPSPLQSMSVDGRVATAPALASAIHGRPRPETCPPREPLAHLATRPTPVSFSSSSRRSYYSPPWRAGKSSVGSLCYVGDESARALSVGEELMAKRPCRWVYRIDGLPYLCGCHISPLFPLAFSIRD

SEQ ID NO: 78536 - protein, 394 aa, Zea mays
  Coding DNA Sequence Number=SeqID_35161
  Gene Ontology: Mol. function=sugar binding
  Homolog annotation: Hit_ID=Q10M12; Match level="QueryCoverage=85%, HitCoverage=100%, E-value=1e-150, Identity=71%"; Hit description =Expressed protein
MSWFGHHHHNQPAPPASGPNQVFKIFCRANENYCLAVRDGAVVLAPVNPKDDHQHWYKDMRFSTRVKDEEGMPAFALVNKATGLAIKHSLGQSHPVKLAPFSPDQEDASVLWTESKDVGKGFRCIRMVNNTRLNFDAFHGDKDHGGVHDGTAVVLWEWCKGENQSWKILPWGPEANSSAAHAGGPHAVRVFCKAGGEDYSLTVRNGTACLAPTNPRDEYQHWVKDMRHSTRVRDEEGYPAFALVNKVTGEALKHSTGQGHPVKLVPYNPDYQDESVLWTESRDVGNGFRCVRMVNNIYLNFDAFHGDKAHGGVHDGTEIVLWKWCEGDNQRWKILPWCKSTTHCAFAERTKETTSWYPNNNSAGCGDPKIKEAGCDASRTSRVVFASDSQPLWG

SEQ ID NO: 78537 - protein, 159 aa, Zea mays
  Coding DNA Sequence Number=SeqID_35162
  Homolog annotation: Hit_ID=O48967; Match level="QueryCoverage=54%, HitCoverage=18%, E-value=2e-22, Identity=64%"; Hit description =Putative uncharacterized protein
  Subcellular localization annotation: CTP_CleavageSite=38; ConfidenceScore=5.51e-01
MKQWRDDVDRLLGMAHSTSTRSRPRSSRRQREATASVRSTSVRGAQTDDLRAELNRRRTGEDARISLERAREHRQNIESRNLDQDFAAATMPFLSSFLHNYVLCSFILKNGPEPRRHHHWRRGNAQRRQYHWRQLFLRDRRCGKSQGVDVIDLGADPLA

SEQ ID NO: 78538 - protein, 516 aa, Zea mays
  Coding DNA Sequence Number=SeqID_35163
  Homolog annotation: Hit_ID=Q5GAU8; Match level="QueryCoverage=28%, HitCoverage=96%, E-value=4e-50, Identity=68%"; Hit description =Putative uncharacterized protein
  Pfam annotation: Domain name=zf-GRF; Domain location=34-78; Score =12.5; E_value=0.00096; Accession=PF06839.3; Description=GRF zinc finger
MYREALWQKRGRPRELYPDVSSKDAPVPPELPVPNCDCGRLAWVHQSQHPDTAARCYYLCGTLDGHQKCFFFQWIDGPDKFDPRYLLFVNWLSGKTSHERFKRWVPPPPNPPPMTDEEKEVATERRMDSPPRCDCGDRAVIDEDYDKQFCCPNIDYPYGWRKCRFREWLYGPLSHWPEPEVKEKRYMGWAAEEVKFDPVLCKCGIEAKYGLVPSELGVGYFCGHMVDYDEETRKCSWESYDDKGEVMRTIESKRIMGQKMRCGSRLVDSYINDRIRDMRREAKSAFYDSPKRAEYRRLKAADEKRAQDAREWEAAQAEKQMLDNLADRLKGKIGSGVNYLADEAHARYVQDKMATVELMEEEDDDTSRLSELIALAEAGLHEEEEDDMSRLSELIALAEAGLRAQEEEDEFMSQAAAEVEAAYYKKKSDEAETEDELFSQAADEAEANYSIAFYRGLNGLFIFKSVPLSANMPKLSCFTASALCQPSYLLSFSLSDSSPKIPVHTLYSRNIVKSCF

SEQ ID NO: 78539 - protein, 337 aa, Zea mays
  Coding DNA Sequence Number=SeqID_35164
  Subcellular localization annotation: CTP_CleavageSite=75; ConfidenceScore=5.63e-01
MQAACNRAKWTRFSDSQRAQPGGPGPRVTQPARRMLHASNCTTTCAIIAPLRLRNQYRDSRRPSARPSGASLERRSMRPKGQQENPLSRREDDAPVIRSSNGSRTRDDRPANHSPRRINSAAGQATLLAGEAGDASPSPNRAPSPPTDQRFEGWPPEGFNSRLRSRGPYTHYWSEVRRPAPRRAPRPPQATRAPRPLLIRGSKAGPRRVHSRLRRQARDDQGYIRYITKARAALPRARTRAKSRKTANSAPPDPGLGLGLSPGRRRTPLRPTQGSDSGSAPEDDELRFARPQGSDSALASAEQPPPRPTQGLGLGLGHGRQTRPRLRRSLHVARPKA

SEQ ID NO: 78540 - protein, 64 aa, Zea mays
  Coding DNA Sequence Number=SeqID_35165
MGEGDGGDQGGSIAIGHGAGKAGATCGGRRRKGPEWRETRMVGVWRRRERGEERGLCSGCALCL

SEQ ID NO: 78541 - protein, 611 aa, Zea mays
  Coding DNA Sequence Number=SeqID_35166
  Gene Ontology: Mol. function=helicase activity; Cellular component =nucleus; Biological process=viral genome replication
  Homolog annotation: Hit_ID=Q851V4; Match level="QueryCoverage=99%, HitCoverage=50%, E-value=1e-161, Identity=59%"; Hit description =Putative helicase
  Pfam annotation: Domain name=DUF889; Domain location=289-512; Score =247.2; E_value=3.5e-71; Accession=PF05970.5; Description=Eukaryotic protein of unknown function (DUF889)
CRDDDRKEKVRGCELDNRWVVPYNPYLLRLFNCHINVEACGSIKAVKYLFKYIYKGHDRASVVMRDASKADDDVDEIKQYRDARWVTPPEALWRIYGFELSQISPPVMQLQLHLPNMHMVAFHERQMVERVVNRPGADRLMLTAYFEANRLHEEARGILYRDFPEWSQNKTHVEQMVLIDIRNMLQSMGKDIKTFPLPPIIDAAAYDKIMSVVDTDQGGLFFVDGPGGTGKTYLYRVLLAMLRNQGKIAVATATSGVAASIMPRGRTAHSRFKIPLTIDDGAVCSFTKQSGTAELLRKASLIIWDEASMTKRQVVEALDNSMRDIMGRPALPFGGGGTKETNIDSDIRLPDDVCVPYSGSDNDLDNLIDFAFPNLNENMSDSTYITSRAILSTWNDWVDMINVKMIDRFQGEHMVYHSFDSAMDDPHNYYPPEFLNTLTPNGLPPHVLKLKIGCPVILLRNIDPANGLCNGTRLVVRGFQRNSIDAEIVLGQHVEKRIFLPRIPLCPSDEEMFPFQFKRKQFPVRLSFAMTVNKAQGQTIPNVGVYLPEPVFSHGQLYVALSRATARSNIKILVIPAVDGRKKSRKGVKKLPTVDCGTYTKNIVYKEVLTN

SEQ ID NO: 78542 - protein, 242 aa, Zea mays
  Coding DNA Sequence Number=SeqID_35167
  Gene Ontology: Mol. function=hydrolase activity, acting on ester bonds; Biological process=lipid metabolic process
  Homolog annotation: Hit_ID=A3B3V1; Match level="QueryCoverage=24%, HitCoverage=16%, E-value=3e-19, Identity=77%"; Hit description =Putative uncharacterized protein
MVAQLYSGLVKVPHDVTGCMITARKRMPVTAGDMHSRYIPQQDYFSEGLYTFDIGQNDLAGEFYSRTEDQVIVSIPTILLEFENGLKAVISSRRLSNYLSTLEHHSSELNASADLLNHHFKRYTKVFARISSLAQKPDALQKGISPSDAAFTLGIAPALAKEHLLNAENKGKNPMGCTTRGSPLRWHLTEKFDWGILRHWLIKLDNDAIIVSGTIIRGTLKAPNSQLVTPISIKLQRPDGCD

SEQ ID NO: 78543 - protein, 389 aa, Zea mays
  Coding DNA Sequence Number=SeqID_35168
  Homolog annotation: Hit_ID=Q2QQ41; Match level="QueryCoverage=50%, HitCoverage=68%, E-value=1e-15, Identity=29%"; Hit description =Putative uncharacterized protein
MAVVLAVLLGELSQIRTVPYPYSNDYSQFGWTILPPPCSPTERSIIFHVALKTTSQGVEEGRDKAFGLPGPDNRTPSGVRCNASTASASSQAKLARVWRKEGIRRLVYPDRTTGHRRGFAATHRRLPHLLRPRLFDDYHDEDFYGLPRKYSIVARVEVKFPIEPCFRDRQHFILSDINGAKIEAITYMYETVKHFDNLLHEKHVYKMHNVKFSLHPGEFNFRHLNGHMELCLDQQTIVEPYTVPIQMVPFPKQILLNLDDIAELPNRTLVDIMAIVVHLDTIHRTMWCPFRKIVIMDARGYLHIIKVWGDLLNKNALRWALAKEDYGIIIGTMFRRFRRQECLESSDHTAIHFNPLHHNTHHFGPIQKALVARNNRQFAVTFLEEQRRR

SEQ ID NO: 78544 - protein, 195 aa, Zea mays
  Coding DNA Sequence Number=SeqID_35169
  Gene Ontology: Mol. function=two-component sensor activity; Cellular component=membrane; Biological process=signal transduction
  Homolog annotation: Hit_ID=Q2QTI4; Match level="QueryCoverage=72%, HitCoverage=28%, E-value=2e-17, Identity=44%"; Hit description=ATP -binding region, ATPase-like domain-containing protein, putative, expressed
MLYAHLHLRRPCSPFAYCPYSKLSVSIPTLNPLPRGPLSRRACACAHRYLRHVASPADEEEAGYGEGSVEGDDLGPASAAAVAATIRRASSASPVRFRCVLGEAVEEPRGEEGLADPSPDFRRLCAEQLEIFRVLISRDAVLSQLSLLHLKPFKEKKKGPKNKTGHTSKTRTLRQGTPGTLTTADLKPPHSTEIK

SEQ ID NO: 78545 - protein, 135 aa, Zea mays
  Coding DNA Sequence Number=SeqID_35170
  Subcellular localization annotation: CTP_CleavageSite=50; ConfidenceScore=5.48e-01
MAGSARPARPLPGRLGQPPAVPPAGAPPGRPAVRPPGPLAAWPPWPARPLAALAARSSGRLAGSAAWPARPPRALAWPPVQPGRLSRPAAQPAGGYEIDGSGYDYGAGCQHCNHCSGEDEAVEGDFQEFQDYNEF

SEQ ID NO: 78546 - protein, 317 aa, Zea mays
  Coding DNA Sequence Number=SeqID_35171
  Homolog annotation: Hit_ID=Q6QP51; Match level="QueryCoverage=18%, HitCoverage=31%, E-value=6e-12, Identity=59%"; Hit description =Putative growth-regulating factor 1
MRKKHGSAPKIHTCSGPDSPNEQKTGIQSAITNGTPVPSPRDGCGHRKALVRVPAQGTRTRHQSQRAGGRPVGGTDGLDGGEASPGCHHVSTDNGVRLSTNVAPANAGRSKAHRQDASSAELGDGFRHQKLEEEVASRPVREVEPRLASLSAPARMQGCMMKILEAERWLKGTNFHEVAFLQRQGGRIAGVPIWGLGRWKDKPSWAESSPTRSKVLPLRHGGWAPRVMQTGPGQKKPNRRARCMGSKRRFAFAIMTASKKAPSLPTDQRFKGWPLGGVQQPPQSAWVPRPLLVRGSKAGPSEGFNGRLRPLGLRAHY

SEQ ID NO: 78547 - protein, 444 aa, Zea mays
  Coding DNA Sequence Number=SeqID_35172
  Subcellular localization annotation: CTP_CleavageSite=43; ConfidenceScore=5.40e-01
MWRLLRGRGRVCLPRPRSSPSPWVGRGGDRRLRPGLSPSPGVRRSGVRRLPGLSPSPSPGVGRSGVRRLPGLSPSPSPGVGRSGVRRLLGLSPSPSPGVGRSGVRRLLGAEPESEPWGRAKRSSSSSGAEPESEPWGRAKRSSSSSGAEPESEPWGRAKRSSSSSGAEPESEPWGRAKQSSSSSGAEPESEPWGRAKRSSSSSGAEPESEPWGRAKRSFLWRLRPGLAAVSLTLSSGSAVGVAQAALSSCQTDHWSGEATFALNAPAIWSVGVAIWPRLLLGEDWASGEPKLCADGGYQLRFRSLEAGLVVPSCELAVARVHGRVPSSRAGMLTLSTVWPEPGLREQPPSLYTGREDGQGQTRLLYIRPCVAFPQGGGGKAPCCPRRVPNMVSPVSCWRVIRVDARAPFVRGRLEARRRAQKYLRVICQTRSPFDGVRGLDASL

SEQ ID NO: 78548 - protein, 287 aa, Zea mays
  Coding DNA Sequence Number=SeqID_35173
MHPLRRTWTQPEKDRALGDRNHLSPGGTHWDGWGPYHVRRTEVAEACQWARRRGDKDRRRGLGFESSQVRKDGRAVGGARSEPNRAMRRRRISSANTHSGMGRNLPRAAADGDLGLGVAHLARQPPPLSFLSPSSHATGAVGRGAVIWAWGRRESRRGREHRPGQRMMVLDELPWIEERVGMRTALIADKLAGCITGRTGASVAVFSFGELRAGDARRVRRCEEDDIVGGQGGLRRCRLQLRGRRGGEGGRANERCSGREGDARRTDGLDWLKAERKGQPTPCSLNR

SEQ ID NO: 78549 - protein, 300 aa, Zea mays
  Coding DNA Sequence Number=SeqID_35174
  Gene Ontology: Mol. function=peroxidase activity; Cellular component =cytoplasm; Biological process=response to oxidative stress
  Homolog annotation: Hit_ID=O23983; Match level="QueryCoverage=42%, HitCoverage=50%, E-value=7e-64, Identity=92%"; Hit description =Ascorbate peroxidase
  Pfam annotation: Domain name=peroxidase; Domain location=2-130; Score= 3.1; E_value=5.8e-07; Accession=PF00141.14; Description=Peroxidase
MSAESAYSGWLVSRNLPDVFAVQDKPQPPPEGRLPDATKGSNHLRQVFGKQMGLSDQDIVALSGGHTLGRCHKERSGFEGAWTTNPLVFDNSYFKELLSGDKEGLLQLPSDKALLSDPVFRPLVEKYAADEKAFFDDYKEAHLKLSELGILTGLLSFMMDDALTTGSIKTSDAEKRRLAKASLAYNCESKNCPHFRKLFPEYVEKYNQQLQLENTTAEPVPQENPAPAPSPAAQQAPTVANRAQPLAEARRDKNQKKAVPFWMVLCWRAASFLKYTELNRRESLALASDGLNYECNEAPS

SEQ ID NO: 78550 - protein, 355 aa, Zea mays
  Coding DNA Sequence Number=SeqID_35175
  Gene Ontology: Mol. function=phosphatidylinositol phosphate kinase activity; Cellular component=plasma membrane; Biological process =phosphatidylinositol metabolic process
  Homolog annotation: Hit_ID=A2YPJ4; Match level="QueryCoverage=89%, HitCoverage=41%, E-value=1e-163, Identity=88%"; Hit description =Putative uncharacterized protein
  Pfam annotation: Domain name=PIP5K; Domain location=34-334; Score =462.1; E_value=7.5e-136; Accession=PF01504.9; Description =Phosphatidylinositol-4-phosphate 5-Kinase
MFLCNHSYQRTICSELDHRTLRKLFKVDAGDYMLSLCGNEALRELSSPGKSGSFFYLTNDDRYMIKTMKKSEVKMLLKMLPAYYNHVRAFENTLVTKFFGLHCVKLAGANQKKVRFVIMGNLFCSEYPIHRRFDLKGSSLGRTTDKPHTEIDQYTTLKDLDLNFIFRLKKQWFHEFQRQVDRDCEFLEQEKIMDYSLLVGVHFRDNTEKLLTEGSIDFDIINNVPTPRLSKGNTDRFLAGPNRSPKIKLGANMPSRAELTARKSDCEPRMIGEPTGECYDVILYFGIIDILQDYDISKRLEHAYKSFQHDPTSMSAVDPRQYSRRFKEFVYRVFQEDGCAAADALRLWRCRSLHV

SEQ ID NO: 78551 - protein, 517 aa, Zea mays
  Coding DNA Sequence Number=SeqID_35176
  Gene Ontology: Mol. function=aspartic-type endopeptidase activity; Cellular component=extracellular region; Biological process =proteolysis
  Homolog annotation: Hit_ID=Q8GSB5; Match level="QueryCoverage=80%, HitCoverage=93%, E-value=0.0, Identity=79%"; Hit description =Nucleoid DNA-binding-like protein
  Pfam annotation: Domain name=Asp; Domain location=178-512; Score= -112.1; E_value=5.7e-07; Accession=PF00026.14; Description=Eukaryotic aspartyl protease
  Subcellular localization annotation: CTP_CleavageSite=38; ConfidenceScore=5.06e-01
MSQVYYLLAPAPANPVHATWVAPRQDKPPLLVPGEPCSAADAAGSLASSSPGLSNCAAVALHPAHAEMRRVGTGVRMLCGAALSVLLLLAGGAAASHSRSSCPATPPDAGNTLQVSHAFGPCSPLGPGTAAPSWAGFLADQASRDASRLLYLDSLAVRGRARAYAPIASGRQLLQTPTYVVRASLGTPPQQLLLAVDTSNDASWIPCAGCAGCPTSSAAPFDPASSASYRTVPCGSPLCAQAPNAACPPGGKACGFSLTYADSSLQAALSQDSLAVAGNAVKAYTFGCLQRATGTAAPPQGLLGLGRGPLSFLSQTKDMYEATFSYCLPSFKSLNFSGTLRLGRNGQPQRIKTTPLLANPHRSSLYYVNMTGIRVGRKVVPIPAFDPATGAGTVLDSGTMFTRLVAPAYVAVRDEVRRRVGAPVSSLGGFDTCFNTTAVAWPPVTLLFDGMQVTLPEENVVIHSTYGTISCLAMAAAPDGVNTVLNVIASMQQQNHRVLFDVPNGRVGFARERCTAA

SEQ ID NO: 78552 - protein, 776 aa, Zea mays
  Coding DNA Sequence Number=SeqID_35177
  Gene Ontology: Mol. function=glutamate synthase (ferredoxin) activity; Cellular component=chloroplast; Biological process =nitrogen compound metabolic process
  Homolog annotation: Hit_ID=P23225; Match level="QueryCoverage=88%, HitCoverage=41%, E-value=0.0, Identity=95%"; Hit description =Ferredoxin-dependent glutamate synthase, chloroplast precursor
  Pfam annotation: Domain name=GATase_2; Domain location=98-470; Score =759.4; E_value=2.3e-225; Accession=PF00310.12; Description=Glutamine amidotransferases class-II
  Pfam annotation: Domain name=Glu_syn_central; Domain location=556 -776; Score=364.5; E_value=1.8e-106; Accession=PF04898.5; Description= Glutamate synthase central domain
  Pfam module annotation: Pfam domain module=GATase_2::Glu_syn_central; Domain location=98-470::556-776
  Subcellular localization annotation: CTP_CleavageSite=54; ConfidenceScore=5.76e-01
MATLPRAAPPTPAALLPLPRAAPPLLLAGRAAAARRSRLRARGPSAAARRSWVVASAASSSSRAVVGGVARREAPPAPQKPTQQAADLNHILSERGACGVGFVANLKNMSSFDIVRDALMALGCMEHRGGCGADSDSGDGAGLMSAVPWDLFDDWASKQGLALFDRRNTGVGMVFLPQDEKSMEEAKAATEKVFVDEGLEVLGWRPVPFNVSVVGRNAKETMPNIQQIFVKVAKEDNADDIERELYISRKLIERAAKSFSWADELYFCSLSSRTIVYKGMLRSEVLGQFYLDLQNELYKSPFAIYHRRFSTNTSPRWPLAQPMRLLGHNGEINTIQGNLNWMRSRETTLKSPVWRGREHEICPFGDPKASDSANLDSTAELLLRSGRSPAEALMILVPEAYKNHPTLSIKYPEVTDFYDYYKGQMEAWDGPALLLFSDGRTVGATLDRNGLRPARYWRTSDDFVYVASEVGLSCYFLLYEIVGVIPMDESKVVMKGRLGPGMMITVDLQTGQVLENTEVKKTVASASPYGTWLQECTRLIKPVNFLSSTIMDNETVLRHQQAFGYSSEDVQMVIESMASQGKEPTFCMGDDIPLAVLSQRPHLLYDYFKQRFAQVTNPAIDPLREGLVMSLEVNIGKRGNILEVGPENADQVALSSPVLNEGELETLLNDSKLKPKVLSTYFDIRKGLDGSLDKTIQALCEEADAAVRSGSQLLVLSDRSEAPEPTRPAIPILLAVGAIHQHLIQNGLRMSASIVADTAQCFSTHHFACLIGYGAR

SEQ ID NO: 78553 - protein, 57 aa, Zea mays
  Coding DNA Sequence Number=SeqID_35178
MAASREDEGREVFVQDRSKSRSGGVGEPCGWCGNGVAVCAGAAVPRYAGEKEMTPGR

SEQ ID NO: 78554 - protein, 803 aa, Zea mays
  Coding DNA Sequence Number=SeqID_35179
  Gene Ontology: Mol. function=glutamate synthase (ferredoxin) activity; Cellular component=chloroplast; Biological process =nitrogen compound metabolic process
  Homolog annotation: Hit_ID=P23225; Match level="QueryCoverage=100%, HitCoverage=50%, E-value=0.0, Identity=92%"; Hit description =Ferredoxin-dependent glutamate synthase, chloroplast precursor
  Pfam annotation: Domain name=GXGXG; Domain location=529-724; Score =360.4; E_value=3e-105; Accession=PF01493.10; Description=GXGXG motif
  Pfam annotation: Domain name=Glu_synthase; Domain location=106-484; Score=823.6; E_value=1.1e-244; Accession=PF01645.8; Description =Conserved region in glutamate synthase
  Pfam module annotation: Pfam domain module=GXGXG::Glu_synthase; Domain location=529-724::106-484
MPTVTIEQAQRNFIKAVKSGLLKILSKMGISLLSSYCGAQIFEIYGLGQEVVDLAFCGSVSKIGGLTLDELGRETLSFWVKAFSEDTAKRLENFGFIQSRPGGEYHANNPEMSKLLHKAIREKRDNAYTVYQQHLASRPVNVLRDLLELKSDRAPIPIGKVESATSIVERFCTGGMSLGAISRETHEAIAIAMNRIGGKSNSGEGGEDPIRWNPLTDVVDGYSPTLPHLKGLQNGDTATSAIKQVASGRFGVTPTFLVNADQIEIKIAQGAKPGEGGQLPGKKVSAYIARLRNSKPGVPLISPPPHHDIYSIEDLAQLIYDLHQINPKAKVSVKLVSEAGIGTVASGVSKANADIIQISGHDGGTGASPISSIKHAGVNFLQTLIQNGLRERVVLRVDGGFRSGQDVLIAAAMGADEYGFGSVAMIATGCVMARICHTNNCPVGVASQREELRARFPGVPGDLVNYFLFVAEEVRAALAQLGYEKLDDIIGRTDLLKPKHISLVKTQHIDLGYLLSIADAIENEKEVSKAFQIYNVDRAVCGRVAGVIAKKYGDTGFAGQLNITFNGSAGQSFGCFLTPGMNIRLVGEANDYVGKGMAGGELVVVPVDKTGFVPEDATIVGNTCLYGATGGQVFVRGKAGERFAVRNSLCQAVVEGTGDHCCEYMTGGCVVVLGKAGRNVAAGMTGGLAYILDEDDTLVPKVNKEIVKMQRVNAPAGQMQLKGLIEAYVLCIEYRAFPYFCYFYVFQKDKTGSEKGIAILREWEAYLPLFWQLVPPSEEDSPEACAEFERVLAKQATTQLSAK

SEQ ID NO: 78555 - protein, 859 aa, Zea mays
  Coding DNA Sequence Number=SeqID_35180
  Gene Ontology: Mol. function=nucleotide binding; Cellular component =intracellular; Biological process=signal transduction
  Homolog annotation: Hit_ID=Q69RJ1; Match level="QueryCoverage=74%, HitCoverage=75%, E-value=0.0, Identity=76%"; Hit description =Pleckstrin homology (PH) domain-containing protein-like
  Pfam annotation: Domain name=RhoGAP; Domain location=276-423; Score =156.0; E_value=1e-43; Accession=PF00620.18; Description=RhoGAP domain
MTHPPTATQAELKGGGLPAGCGFRRKMPCGLRMTRKSIHLLSISLSIYFTPPRLHGCCQPDYSGLRRRATVDADDPRRTGRDGGFGGAWVGWEAGARSRGSGDRKRVSDGVWRAPSSVRPVARYPQIRLGVCGIGLGDVRYLRVALSSYHRKSTLPQRSEVNLTLGGIDLNNSGSVVVREDKRLLTVLFPDGRDGRAFTLKAESSEDLFEWKTALEEALAQAPNAALVMGHNGIFRNDTTDVYEGAIPNWGKKRPIKSIVVGRPILLALEDIDGSPSFLEKALCFLEKHGMKVEGILRQAADVEEVDRRLQEYEQGRTEFAPEEDAHVVGDCVKHVLRELPSSPVPASCCTALLEAFRLETKESQIKSMRAAISETFPEPNRRLLQRLLKMMHTIASHTAENRMTPSAVAACMAPLLLRPLLAGECEMEDDLDMNGDSAAQLIAAANAANSAQGIVTTLLEEYKSIFNDEHFRCSLSPDSQTGDSGSEESTDDETVDTKGNGFHDAENDVDQELDDAERMLSGKFTETSASACADLYDHKEVNGNSSDTELFVEDHTFESNVDLNDAPLSRLTENGKGPSNLMSAHETPLSVGEILLSLDAGIPLPCRAAEYSSKPNGTQQHVKRTNLWGWSNVRKGQRSELVDPSGEEELAIQRLEVMKNDLQIRIAKEARGNAILQASLERRKQALHERRVALEQDVSRLQEQLQAERDLRAALEVGLSMSSSQFSSSLSMDSKTKSELEEIALAEADVARLKQKVAELHFQLNQQRQHQYGSSVDANDHPQHLLNHLSQMLVSLFVSIRGKTLTLIASRSGHGERRREAATGKEELTADGTAGAWREAAAGKEELAWVRSGDAVGV

SEQ ID NO: 78556 - protein, 216 aa, Zea mays
  Coding DNA Sequence Number=SeqID_35181
MGLFVSASDSFWPPKAIADCQTLSFSPYSLYSQIFKKAGQKKVNQTDLMYPWRTSMGRNGGGEDREDPDNGAVEEEQEHGVRVERGCESSEHGGYNGASVDKMTTKSKNFIFNLYRFKELEQANKEGMVILNVRSMIIMVNVPLRKEWVVVDLMLINLTSSHSSLDPLLEDSKSGASLRCPGCQGSGMKVTIRQLRPSYRDCISSQDVVDFVHKQL

SEQ ID NO: 78557 - protein, 201 aa, Zea mays
  Coding DNA Sequence Number=SeqID_35182
  Gene Ontology: Mol. function=carboxyl- or carbamoyltransferase activity; Cellular component=ornithine carbamoyltransferase complex; Biological process=amino acid metabolic process
  Homolog annotation: Hit_ID=Q8SA97; Match level="QueryCoverage=60%, HitCoverage=21%, E-value=2e-20, Identity=50%"; Hit description =Ornithine carbamoyltransferase
MAPPVDVAGLRPRLGDVEAPPKPRSSLSSMAEAEPLGRARRRSSAEARAESEPWGRAKRSSSSSRAEPESEPWVGRSGPESEPWVGRSGVRRLLGLSPSPSPGSGGAEFAVFRDLARVRALGRAERSSPSSGTEPESEPWVGRSGVRRLPRLSPSPSPGSGGAEFAVFRDLARVRALGRAERSFLWCLWQGLTACQSHSVK

SEQ ID NO: 78558 - protein, 191 aa, Zea mays
  Coding DNA Sequence Number=SeqID_35183
  Homolog annotation: Hit_ID=A9P7U0; Match level="QueryCoverage=96%, HitCoverage=65%, E-value=6e-16, Identity=28%"; Hit description =Putative uncharacterized protein
MSLSPADGAAYWLRWQVLVCGALIALPTVAAAALLPRLRSSAPPLRAADLWVPCWARLHPGWLLAYRAVALAAAVALLARLVVARGITVFYFYTQKSLRKADESRGLLNADVENRDVSNSVSGERKTDETNMMMSYYEQIVNERRAGFWGRCMEIIYQTSAGATMLTDVTYWGLLVPFFYRDKFGLALLPS

SEQ ID NO: 78559 - protein, 175 aa, Zea mays
  Coding DNA Sequence Number=SeqID_35184
MGVLPMCTSSSSEGKEHTEAQSTRPCSQVTVNLCDSLINMPVLACSQVSYPSQRGCKFTRLYRCTLKPGSMWEHPLEISVLRLDDQPIQEEAGDMSDGHAEVLLHLSRSVHNLLTQMSFVPMSHVGTSTFQIFRWSWLGHNRDQTELDLPPKGFSWKMGSMKFRNNSTTAIAYVR

SEQ ID NO: 78560 - protein, 180 aa, Zea mays
  Coding DNA Sequence Number=SeqID_35185
MGKWLINLDQTLSRQSRPSVSIKDRTVDWPVVVETLQLATYPGMGQGKLEPGYSIREETIAHWEWRDGGSSMYPPGIVARLVGKFLKLLGVKNSLVLDPNKDQVSAKQTRRGGVDDQVPAEELCETERTTKSLVRTPCDGADEQVPAEQTLRGGANDQVPTKQPREEKRTTKSMSSNLVR

SEQ ID NO: 78561 - protein, 523 aa, Zea mays
  Coding DNA Sequence Number=SeqID_35186
  Gene Ontology: Mol. function=thioredoxin-disulfide reductase activity; Cellular component=cytoplasm; Biological process=removal of superoxide radicals
  Homolog annotation: Hit_ID=Q70G58; Match level="QueryCoverage=88%, HitCoverage=95%, E-value=0.0, Identity=85%"; Hit description=NADPH thioredoxin reductase
  Pfam annotation: Domain name=DAO; Domain location=79-389; Score= -53.6; E_value=0.035; Accession=PF01266.15; Description=FAD dependent oxidoreductase
  Pfam annotation: Domain name=GIDA; Domain location=79-389; Score= -242.2; E_value=0.043; Accession=PF01134.13; Description=Glucose inhibited division protein A
  Pfam annotation: Domain name=Glutaredoxin; Domain location=440-502; Score=25.8; E_value=0.00016; Accession=PF00462.15; Description =Glutaredoxin
  Pfam annotation: Domain name=HI0933_like; Domain location=78-380; Score=-256.1; E_value=0.0065; Accession=PF03486.5; Description =HI0933-like protein
  Pfam annotation: Domain name=Pyr_redox; Domain location=225-319; Score=87.7; E_value=3.8e-23; Accession=PF00070.18; Description =Pyridine nucleotide-disulphide oxidor
  Pfam annotation: Domain name=Pyr_redox_2; Domain location=79-364; Score=172.5; E_value=1.1e-48; Accession=PF07992.5; Description =Pyridine nucleotide-disulphide oxidore
  Pfam annotation: Domain name=Thioredoxin; Domain location=402-522; Score=13.3; E_value=1.7e-05; Accession=PF00085.11; Description =Thioredoxin
  Pfam module annotation: Pfam domain module=DAO::GIDA::Glutaredoxin::HI 0933_like::Pyr_redox::Pyr_redox_2::Thioredoxin; Domain location=79 -389::79-389::440-502::78-380::225-319::79-364::402-522
  Subcellular localization annotation: CTP_CleavageSite=49; ConfidenceScore=5.64e-01
MAVTRVAVAAALSAAPLSSRRHRVALPSACRLLPASATCCNSRAPMSLQAAAAAPAAGAVDEETPASSPPSDASKGVENLVIIGSGPAGYTAAIYAARANLKPVVFEGCQMGGVPGGQLMTTTEVENFPGFPDGITGPDLMDRMRKQAERWGAELYQEDVEFVNVKSSPFVIRSSDREVKCHSLIIATGATAKRLRLPREDEFWSRGISACAICDGASPLFKGQVLAVVGGGDVATEEAVYLTKYARHVHLLVRKDQLRASKAMQDRVLNNPNITVHFNTEAMDVVSNDKGQMSGVHLKRRDTGEESVLTVKGLFYGIGHTPNSQLLQGQIELDSAGYILVKEGSAKTSVDGVFAAGDVQDHEWRQAITAAGSGCIAALSVERYLVANDLLVEFHQPVQEETKKDITDKDVQMGFDISHRKHKGQYALRKLYHESPRLICVLYTSPTCGPCRTLKPILSKVIDEYGEFVHLVEIDIEEDPEIAEAAGIMGTPCVQFFKNKEMLRTVSGVKRKKEYREFIEANK

SEQ ID NO: 78562 - protein, 213 aa, Zea mays
  Coding DNA Sequence Number=SeqID_35187
  Homolog annotation: Hit_ID=A2Y6D7; Match level="QueryCoverage=79%, HitCoverage=42%, E-value=2e-70, Identity=75%"; Hit description =Putative uncharacterized protein
MKSTSGRCSPFFFFNSTKERLQLQEIKLPEEILRLLPGFILFSDGIIADDSKRYLYTGADLDHSEGEHDFVVERSPRLQSPMSKESSFHQTPPHLRASSRDAHVFPQAVSQWQALPRSWHCSNKRNGNDRAMDDSSANGNYKSSSHDWQMSKLEDGYSISRCVQILNGMVELSQVEKSVAPDVFLLPGNREIFVSLGGDVRAMWLKRKIQHLA

SEQ ID NO: 78563 - protein, 552 aa, Zea mays
  Coding DNA Sequence Number=SeqID_35188
  Gene Ontology: Mol. function=tRNA-pseudouridine synthase activity; Cellular component=nucleus; Biological process=tRNA pseudouridine synthesis
  Homolog annotation: Hit_ID=A2Y6D6; Match level="QueryCoverage=98%, HitCoverage=80%, E-value=0.0, Identity=68%"; Hit description =Putative uncharacterized protein
  Pfam annotation: Domain name=TruD; Domain location=44-542; Score =102.2; E_value=1.6e-27; Accession=PF01142.9; Description=tRNA pseudouridine synthase D (TruD)
EVHNFFKKTFKFLVTDTVEHSDGVQKCIRVRFGSEAGVGRGAGGRGRGRKRKNMGSSDWRDGRPFDSRGSSNWPDNVGKFLRFHLYKENKDTQEALGVIGKMLGLQPRSFGFAGTKDKRAVTTQQACIPQVYNSRVTVFKVQASKLLALNKRLFGIKVGNFCYVKEGLVLGQLTGNRFTITLRGVTAESEDMIKIAVDGLGKNGFINYYGLQEFVFSLASFCLNITKSVQRDDINEVRKRYKEHGDIDMALRNFPRHLVAERAILQCLKKCPGNHLQALKGIPRTLRMIYSVTAYTCTSVLVSHHIAMLALLYAKVVEGDLVYNKECPSEESTSVDILETDDDHTNSIEIDLCSEAQPEESIQSAKIVDSGDFTKGIYTFDDVVLPLPGSQALFPGNEIAEIYHEMARKDGISLTENAHGVKEFSITSMKGGYRRVFQRPIGFEWELITYTDDTSSLAETDLDVLSRTKPKEANELISKQESQDKLEKAPDTSVPTNGNSSQEKLIGSPDIRPKKLALKLAFTLPTSCYATMAIRELLKTSTSVAYQKTLSC

SEQ ID NO: 78564 - protein, 97 aa, Zea mays
  Coding DNA Sequence Number=SeqID_35189
MGGEDPQWLQLSAEFMRRHIRSYACSVSGVGDDSMARGPRTRGSGRHAQVIARNRKGGRLELGRWAILSGFHARAARVLLRYTRVWFQEEDAPDTIA

SEQ ID NO: 78565 - protein, 534 aa, Zea mays
  Coding DNA Sequence Number=SeqID_35190
MAVAGGQEQRPCRQPSSRPVRGQRENPLSRREDNAPEKRTTLRLRHNDASKKGPGKGDTPKRILPREGTRLRVSLLIRGSKASPPEGFDSRLRSRGLYTHYWSEVRRPAPRKGSTAASGYSGSAPTTDQGFEGWPPKGSQPPQMPRISPYEGLDHASPEPSLGQGQPTPEVLRLARGPPPAANVFPARPRPYLRQEATLTKSPHRPTKSQEHLMQRWSDTFILTRAPQSRSDRHHFAASLTGLAERQRRLRRSDCGTIGKLRSARPRARTQAKPRKTANSTPPDPGLGLGLSPGRQRTPLRPTQGLGLGLSPGRRRTPLRPTQGSDLGSAPEDDELRFARPQGSDSAPASADGLRLARPRGSDSTSATEDRLDLGFGGASTSPNLGRRPATSTGGAIITLPRTDSALCYTPHCTPGSSPYAYKRKDQGPLREGWPRGDEDETRARLKPLAPSPAWTLVTPYCKRTRPGRGTNTKAAGFPPLSRWSPATSLPPFALGLALDPSGLGHAATFTRRPGDPPVSKRRQYLSRLVLIKS

SEQ ID NO: 78566 - protein, 164 aa, Zea mays
  Coding DNA Sequence Number=SeqID_35191
MEHKNRSSQAHSKIPLQRFEMGEARDVCEGEGGVSWVRNGVQIVLTALGREAWQPVCQSDWQTDAQTDRRLVKVDQHRLNRPGGAVEPPLTAPGDLFASLTGRLQIRGQRGQRPAELPLRTSSTGLDHSKAQLQLKKLNSAEVKFSWKAQLQLKKFSCFSARTL

SEQ ID NO: 78567 - protein, 148 aa, Zea mays
  Coding DNA Sequence Number=SeqID_35192
MAGSKDSSEVSTSNIIKPTWETLPAEEQLLSEERQEQLIQEAKAKFLADFKVDRNNKVVRQRATDLASLRSTTNTPNMTVAPPGPVGAPDSPVPLPTVGAGHASPADCAADRCAGDRWLTGQSGAPPDSPPGAPDSVRCTTGQSGVPD

SEQ ID NO: 78568 - protein, 65 aa, Zea mays
  Coding DNA Sequence Number=SeqID_35193
MEQMETLLAVLCANCVPPPPTEVVMNTMVLAIVEEAISDRGVFDLCGLGMDRGLPLFARGSYSLF

SEQ ID NO: 78569 - protein, 58 aa, Zea mays
  Coding DNA Sequence Number=SeqID_35194
MAGGNELAGAKERWLAGEGLEISNNKIGVRKRVLLAMSCSINADDFGSKLKKIISKRT

SEQ ID NO: 78570 - protein, 418 aa, Zea mays
  Coding DNA Sequence Number=SeqID_35195
MTTSLVVGRSKPGCGLPPALSFNDVHHPCWGGGCRVIGSPAWAALVPPPALPPTAGAERGCPFHRTSDGRAVRGVGHIHRLLPRNQSHLEGRILFRIAVRVGASFLDGLVLTPTVRTRAKTSSCALVQLLPIGAEVVAAVGGAVRSQLPARLPLVQCSPFLQKWSWGPTCSRYGTRLSDYMASGPPRRQDFGYGTRLTGHTGSGSPYGTDIRSLEPAPRPSPIFVKLDVLRLDTSVSEKVVNNPREATSSGAVERAGPRYGTGLSGCMGSGPLQETNVRSLAPVPRIWLSGYTGSGPPYGTGSRSLESAPRLSDLPNFVSGALNCEPSCSIRMSPCQTDGNRTGGLAERLIVWVHGGRPYRVVGPSQLGESCGAPLGMALAAGLSPDPGFPSDPWGIQKGPPKEDVLHLLRPGNTGSL

SEQ ID NO: 78571 - protein, 485 aa, Zea mays
  Coding DNA Sequence Number=SeqID_35196
  Gene Ontology: Mol. function=oxidoreductase activity; Biological process=negative regulation of transcription
  Homolog annotation: Hit_ID=A3BRY9; Match level="QueryCoverage=60%, HitCoverage=89%, E-value=8e-64, Identity=46%"; Hit description =Putative uncharacterized protein
  Pfam annotation: Domain name=ENT; Domain location=120-193; Score =119.3; E_value=1.1e-32; Accession=PF03735.5; Description=ENT domain
MEGGAVARLEQRHRGKRWPGAVALSYARFPGLGRSLHRRRAPTRRAGAWIRRKCCGFRRFVSLVVSGGVMKAVGYNLYDSSGTDDDLPPAQNRGLRGRVFSGNGRASAGAFPYMRANNDLESEIHRVEQDAYTGVLRAFKVQSDAISWEKESLITELRKELRVSDEEHRELLNKVNEDGSIRQMRELRQAGGIPSGLQSPMMPSHSVSSAKWGPLSARGKKAKMGEHELVYDMGTQAETWEWVRLCDMAPEDIRWEFDGHLSNHDGWGPSGPMLKRHMTNNGAMAGSIRGRGRLSINEPIKDYAPPQNDINRNFDYIDIPNTESVVTEVERVLANPNMPEIEKARKLLKEQSLLDAIARLDEASDSDSGNWVLNCSKLTKTVSMHGAQNELLGLAHFCRKWITEPKSTTHNSLQHTPPKSQTWIHYLCLHNHMLRFIPYHCSDINGSGDGTVESCSCRGAAYGREQQEAKNVEFMGCAKQLGPVW

SEQ ID NO: 78572 - protein, 72 aa, Zea mays
  Coding DNA Sequence Number=SeqID_35197
MADSMAFVQAIDSNQEEDVWSLYLPLDRAYLMERLGLSIEKERRKLKFDLCDHLSEERVERDQVLKDSSIEA

SEQ ID NO: 78573 - protein, 185 aa, Zea mays
  Coding DNA Sequence Number=SeqID_35198
  Gene Ontology: Mol. function=DNA binding; Cellular component =mitochondrion; Biological process=regulation of transcription, DNA -dependent
  Homolog annotation: Hit_ID=A1A6F0; Match level="QueryCoverage=80%, HitCoverage=39%, E-value=2e-46, Identity=68%"; Hit description=AT -hook motif nuclear localized protein 2
  Pfam annotation: Domain name=DUF296; Domain location=1-103; Score =137.6; E_value=3.5e-38; Accession=PF03479.6; Description=Domain of unknown function (DUF296)
  Subcellular localization annotation: CTP_CleavageSite=26; ConfidenceScore=5.22e-01
MSFPQNGTRAVCVLSANGIVSNVTLRQSATSGGTVTHEGRFEILSLSGSFLLSEDGGHRSRTGGLSVSLAGPDGRVLGGSVAGLLTAASPVQIVVGTFDADGEKKPKQQQQQLAPSPPDPSPAPLKLAPTGVAAGPSSPPSRGTLSLSESSGGAPSPPHAGASGGGGGGYGQQQQPVGFPGLSWK

SEQ ID NO: 78574 - protein, 148 aa, Zea mays
  Coding DNA Sequence Number=SeqID_35199
  Homolog annotation: Hit_ID=Q8L8N3; Match level="QueryCoverage=69%, HitCoverage=88%, E-value=3e-21, Identity=55%"; Hit description =Putative uncharacterized protein
MSVRIKAVVDRFVKELQEALDADIQDRVMKEREMQSYIEEREREVAEREAAWKAELSRREAEIARQEARLKMEKENLEKEKSVLMGTASSQDNQDGALEITISSMLALKYEFRVGINGQVLCNGLDGLSDFAVVRADWIELSTTFKHP

SEQ ID NO: 78575 - protein, 1080 aa, Zea mays
  Coding DNA Sequence Number=SeqID_35200
  Gene Ontology: Mol. function=nucleic acid binding; Cellular component= nucleus; Biological process=mRNA processing
  Homolog annotation: Hit_ID=Q67WF0; Match level="QueryCoverage=99%, HitCoverage=52%, E-value=0.0, Identity=57%"; Hit description=Zinc finger (CCCH-type) protein-like
  Pfam annotation: Domain name=zf-CCCH; Domain location=843-870; Score =19.6; E_value=0.0035; Accession=PF00642.15; Description=Zinc finger C-x8-C-x5-C-x3-H type (and similar)
  Pfam annotation: Domain name=zf-CCCH; Domain location=871-895; Score =2.2; E_value=0.71; Accession=PF00642.15; Description=Zinc finger C -x8-C-x5-C-x3-H type (and similar)
  Pfam annotation: Domain name=zf-CCCH; Domain location=898-922; Score =12.7; E_value=0.029; Accession=PF00642.15; Description=Zinc finger C- x8-C-x5-C-x3-H type (and similar)
  Pfam annotation: Domain name=zf-CCCH; Domain location=925-950; Score =18.1; E_value=0.0056; Accession=PF00642.15; Description=Zinc finger C-x8-C-x5-C-x3-H type (and similar)
  Pfam annotation: Domain name=zf-CCCH; Domain location=951-973; Score =14.8; E_value=0.015; Accession=PF00642.15; Description=Zinc finger C- x8-C-x5-C-x3-H type (and similar)
  Pfam module annotation: Pfam domain module=zf-CCCH::zf-CCCH::zf -CCCH::zf-CCCH::zf-CCCH; Domain location=843-870::871-895::898 -922::925-950::951-973
MKDSSGALNNGLGRSTSSQVTELTHLHRSHPPADYNPFSLHSHDSPSVSGNSEHSVPTALTLGNNIYFSSAESEGQPEENHNLLDVNLGFDVTTTEFGNVVKRKGESGNDLMNAGSQNWLTLPLTVSCLDNASAVSNGRIGLEQIVDEGVPVICQDHDIMLDIDQRGSIDVLSGQDHNLKLCGISIPQAVLLATEERNKDVDDEIVRPGSSINSVNVLDKYSYCTVGKPIDNLSRPILLSSQSADVPGRDLASQISVDSDHTYHGSTEDPVGMSSTTPDSVSSWIEAIVPEANKEHQSCKSSLLPICSSEKVSAPKEDSKKALSDSVVNSVVKSPPRINIASSTVLKVPTKQVALPGSLLEPPRLNQNARNRTWRRDNASSSNSSLHVSQTSGLPPKLPLKKNSKSQNSYIRKGNALIRNPANGNHLHSSSSLDSQNKLSKPVMRRSMNFVRNVDSKDAAHSHISVERPKTPPLPLHTKSISCAVNVLEPLSQNLQQQVLETEKEDSSGQVNSGADNLSIISLHKSEALDAGKAIYVRPKLNQLVAQGRHLGESSNISLDKVTLLQPSATSDLYFKKRKNQIILGPSTSDAPSSKDTFQAENIKSGESKVLMSSSSNNNITVAKDRLHKALQTTNTVRSFSHVWTLNGQNPRKKSYVGASHMKVLPRILPWKRKIFCQNFRGSYSSLLNTSSIGIMRKLLQTRKRSTIYTVSTDGFSLRKSGVLSIGGSSLKWSRSLEKHSRKVNEEATQAVAEVERKKREKRKRQSLRSKGRNDRYSASVAANQLTNRSRASSDSRVSSTCNEYVRVNKGNQLVRNPKKVIRMLASEKVRWSLHTVRTRLAKKRQYCQFFTRFGECKKSGGKCPYIHDRAKVVICTKFLKGLCSSTSCKLTHKVLPERMPDCSYFLQGLCTNTACPYRHVKVNSNAPVCEDFLKGYCADGDECRKKHSYVCLVFEATGECPQGSRCKLHHPKKKSKSKRSKVDTVQNNSWGRYFETNVGHGSGARIVYLEEDERQKPEQVSGEEFADFIELGAGIEVPEDADTSDDIQLMELDLGNLEVQADNNDAIIKPLRIMRTARV

SEQ ID NO: 78576 - protein, 125 aa, Zea mays
  Coding DNA Sequence Number=SeqID_35201
  Gene Ontology: Mol. function=copper uptake transmembrane transporter activity; Cellular component=chloroplast inner membrane; Biological process=protein import into chloroplast stroma
  Homolog annotation: Hit_ID=Q67WE9; Match level="QueryCoverage=38%, HitCoverage=16%, E-value=8e-15, Identity=81%"; Hit description =Putative uncharacterized protein P0523F01.19
MAAAVLGLQATVGALVGKALTTSLVPYYQGIPPGQSPVLALDIFLVQSRYFITDTRTLIVFLPFYSYHLQASANTILSHFLGLSSSLELLRSVTLSQTEAAPVPKPPLRSVTLSQTEAAPVPKTA

SEQ ID NO: 78577 - protein, 51 aa, Zea mays
  Coding DNA Sequence Number=SeqID_35202
MARHTRHYDTPKECTIVNGTERDCENGIGTERLRPVDFLEQNGSGSDENIP

SEQ ID NO: 78578 - protein, 395 aa, Zea mays
  Coding DNA Sequence Number=SeqID_35203
  Gene Ontology: Mol. function=3-oxoacyl-[acyl-carrier-protein] reductase activity; Cellular component=chloroplast; Biological process=fatty acid biosynthetic process
  Homolog annotation: Hit_ID=Q2QV59; Match level="QueryCoverage=66%, HitCoverage=90%, E-value=5e-97, Identity=69%"; Hit description=3 -oxoacyl-reductase, chloroplast, putative, expressed
  Pfam annotation: Domain name=KR; Domain location=143-315; Score=8.7; E_value=7.8e-08; Accession=PF08659.1; Description=KR domain
  Pfam annotation: Domain name=adh_short; Domain location=143-307; Score=135.2; E_value=1.9e-37; Accession=PF00106.16; Description =short chain dehydrogenase
  Pfam module annotation: Pfam domain module=KR::adh_short; Domain location=143-315::143-307
MTLPLSVDQELLLESSWGENAAGDASSGPAIAGYDSSLATKSSAHREPQTNGVVVVILCRSKRRLLCVSAPWQQLRQAAALWTAGGGGDGDPARVRRRPAEPIVRLLLSKSRAGRGERIRASDDAATIMDAGGWAARLEAPPPVAVVTGASRGIGRAIAVALGGAGCKVVVNYAKSGVEAEEIEASGGTAVSFAADVSCEADVESMMRAAIDAWGTLDVLVNNAGITRDALLMRMKRTQWQEVVDVNLTGVYLCSQAAATLMMKRKKGRIINIASVSGIIGNVGQANYCAAKAGVNAVAPGWVASDMTAGLGDGVERKALETIPLGRFGRPEEVAGLVGFLAVHPAASYVTGQASRTKRPGFPERDDVRDGVVSSRFHPVHSSLQVLTIDGGLSI

SEQ ID NO: 78579 - protein, 124 aa, Zea mays
  Coding DNA Sequence Number=SeqID_35204
  Gene Ontology: Mol. function=protein binding; Cellular component =cytosol; Biological process=meiotic chromosome segregation
  Homolog annotation: Hit_ID=A9NK50; Match level="QueryCoverage=50%, HitCoverage=43%, E-value=6e-27, Identity=87%"; Hit description =Putative uncharacterized protein
  Pfam annotation: Domain name=UPF0047; Domain location=33-118; Score =14.4; E_value=2.9e-08; Accession=PF01894.8; Description =Uncharacterised protein family UPF0047
MTVFFILESIFWHLCKKGRKTFVYEVSIFETQFSIFLALVKWPCSTVQHTSASLTINENYDSDVQVDTETFLSRIVPEGPSAPWRHTIEGPDDMPAHIKSSMFGCSLMVFGSVNIEIMLLLDRL

SEQ ID NO: 78580 - protein, 125 aa, Zea mays
  Coding DNA Sequence Number=SeqID_35205
MEPGYLSVTIDVIMTSIRQGPANSLGGNLMIPIPNMFSFWLQTELPTAPSDLSNAEVPDSDTGNSTSVAMTDLSNAKVPNGGGAGGDVGFEQHEILEALIDKNIVELIDSRTVYKIVLAAPSWWR

SEQ ID NO: 78581 - protein, 27 aa, Zea mays
  Coding DNA Sequence Number=SeqID_35206
MVEYEALIMRLQDTNMLKSPKLPEQPI

SEQ ID NO: 78582 - protein, 172 aa, Zea mays
  Coding DNA Sequence Number=SeqID_35207
MLAEHELKAEEKEKKLEERIRQFQAVLGPQAMEANRKALEDLQAEHRAGVQRIAAWAGKASTALVPLGMSPIPVLELPALIFDALPVLDSAADRLRRLDQILGARLEAEGGRLCRAVIEYILTCFRSHDPAISLEPVIAGPVAATEDAAREGVQDAVELVAERFQRDPADDL

SEQ ID NO: 78583 - protein, 165 aa, Zea mays
  Coding DNA Sequence Number=SeqID_35208
EEVSCNLGRTIANGRCRLDLSLGEPAADDRILSAAAAPLPALDDPMLSWGGRAWSTDRHLRESQLAPLPLHAEFVEMDAPTTEGMKALTSQDHAPASIAPREGRWLTARTHSQASKAHPSTHGERLTRGPQPSGLHGSPKRSLDGPVQWLVLLGRNERRPDHAQV

SEQ ID NO: 78584 - protein, 94 aa, Zea mays
  Coding DNA Sequence Number=SeqID_35209
  Subcellular localization annotation: CTP_CleavageSite=73; ConfidenceScore=5.59e-01
MGAIQENSAACPAPTVVPPARVRLTAAESSLRRHRKLRLGRPRGLSPRLGLRRRSPPRSTPGLGLNLDLGGVTASLDLGLGPTTPQGDTSLPYP

SEQ ID NO: 78585 - protein, 272 aa, Zea mays
  Coding DNA Sequence Number=SeqID_35210
  Gene Ontology: Mol. function=small conjugating protein ligase activity; Cellular component=cytoplasm; Biological process=ubiquitin- dependent protein catabolic process
  Homolog annotation: Hit_ID=A2YFV1; Match level="QueryCoverage=87%, HitCoverage=85%, E-value=1e-101, Identity=75%"; Hit description =Ubiquitin carrier protein
  Pfam annotation: Domain name=UQ_con; Domain location=49-186; Score =182.8; E_value=8.7e-52; Accession=PF00179.17; Description=Ubiquitin -conjugating enzyme
MAALDWEHCGSPALVTKKGWGSYGATELATARSDIVATNENLPPNVIKQLAKELKNLDESPPEGINVIVNDDDFTTIFADIEGPAGTPYENGVFRMKLLLSRDFPQSPPKGFFLTKIFHPNIATSGEICVNTLKKDWNPGLGLRHVLLVVRCLLIEPFPESALNEQAGKMLLENYEEYARHARLYTGIHALKPKNTSKTGAISESTTALNVDKSSTASSKNTPSMPPADQNPTVSDPAVGAAAARKKDGPMASKVPVDKKRLDARKKSLKRL

SEQ ID NO: 78586 - protein, 69 aa, Zea mays
  Coding DNA Sequence Number=SeqID_35211
MKIKTSPHVFCEIWTSKIASMEVGCEHTVHCRGKKRGGDKDDGYDYGNGKEEGVKANLQEFQDFDEFED

SEQ ID NO: 78587 - protein, 180 aa, Zea mays
  Coding DNA Sequence Number=SeqID_35212
SHGGEKGGGAYRRRDCSGEVVEDEGEVSGITTGGPRDAREAMSERNWAETYWIARSTRGGGRPKSGEVDLGPPVKSGRVRGLGKLHGLLAELAEALAGLEGGWSGMATVTEALAAMAGGIKLAGAKERWLAGEGGCGAKREIWSQEIWSVSLPKPEANPRNPNESPHEKLDLGFYLSYFG

SEQ ID NO: 78588 - protein, 170 aa, Zea mays
  Coding DNA Sequence Number=SeqID_35213
  Pfam annotation: Domain name=SlyX; Domain location=80-147; Score= -8.1; E_value=0.056; Accession=PF04102.3; Description=SlyX
MKTLTTFYGYHPLEMVMHPLGLFPAEKKDDPMWCNRALQSDAMTLLANTAQAAKLTLDSREDFVVDLSTELVEKDLQVERLSQRITTLEQQVEIRDNTIDVLENQLHDVQRELEEANDHLDMHHLEMEANEAGSEGEEAPEELGPAPGANGTTSAMPPSPVSSVASTAQG

SEQ ID NO: 78589 - protein, 207 aa, Zea mays
  Coding DNA Sequence Number=SeqID_35214
MAGGIKLAGAKERWLAGEGGCGAKRGSSATARRRPLPVPWPLSHPCPIQCHGELYLTVSCPGHPSVCPLPLCFARSVLTGAIFAQPKTCRCRPEAPSHPRRSPSVPEFALEVRILPMPLFRQVSSLRPRNCSPELAALPQKLSHCGLHSLVPPCQFYAHGWVHRVALNVSDPFPKPQEPHRGQPSRLRRTLAAGPSGAIAPKPAPSH

SEQ ID NO: 78590 - protein, 46 aa, Zea mays
  Coding DNA Sequence Number=SeqID_35215
MGRLEPRAERESRLVGKVCNLYRVLETGGEAGNMEDFEEFQDYDEF

SEQ ID NO: 78591 - protein, 213 aa, Zea mays
  Coding DNA Sequence Number=SeqID_35216
MPPTPPQSIMAAGGDPDGDDDDAGGSSSHDPERSKEQEPEGWIARPITRDAARRCHFHDALDTLLRRAFDRHTWPIKCRCVVYQHCHGLYPDQWEATCLVRRPDDDLRGIEAFLEHYSITERDTAKAAMQDAARRALCQYCSLFSGVADGLDLKYYPRRSTGSAGGVIVSPVGEGNPRLSSMVNLAAVLNTELDHALDELGKIRAKVAELRAE

SEQ ID NO: 78592 - protein, 33 aa, Zea mays
  Coding DNA Sequence Number=SeqID_35217
MPKLPCAQLRLYANLCILYTSSDCGSNPSPKIF

SEQ ID NO: 78593 - protein, 64 aa, Zea mays
  Coding DNA Sequence Number=SeqID_35218
MPKLPYAQLRLYANLRILCTSSDCGSDLSLKVMNKAYEMMKVMITSTQGFIYWRVKSKQQGKGA

SEQ ID NO: 78594 - protein, 397 aa, Zea mays
  Coding DNA Sequence Number=SeqID_35219
  Gene Ontology: Mol. function=molecular_function; Cellular component =membrane; Biological process=auxin mediated signaling pathway
  Homolog annotation: Hit_ID=A2Y8D9; Match level="QueryCoverage=97%, HitCoverage=96%, E-value=1e-119, Identity=60%"; Hit description =Putative uncharacterized protein
  Pfam annotation: Domain name=DUF6; Domain location=235-364; Score =26.2; E_value=0.00012; Accession=PF00892.11; Description=Integral membrane protein DUF6
  Pfam annotation: Domain name=DUF6; Domain location=24-188; Score=9.2; E_value=0.02; Accession=PF00892.11; Description=Integral membrane protein DUF6
  Pfam annotation: Domain name=DUF606; Domain location=224-361; Score= -50.9; E_value=0.048; Accession=PF04657.4; Description=Protein of unknown function, DUF606
  Pfam annotation: Domain name=UAA; Domain location=21-370; Score= -157.4; E_value=0.016; Accession=PF08449.2; Description=UAA transporter family
  Pfam module annotation: Pfam domain module=DUF6::DUF6::DUF606::UAA; Domain location=235-364::24-188::224-361::21-370
MVMMMRSCLGGGLLPVAVMLCLNVVAAVMVSLVKVAMDGGMKPLVIVTLQQLTAAVFLAPIAFFKERKSRPKLTLEIFAYIFVSAALGYLPFIPLHAMAESDTKLAYHIDVPACAIYCRAALRQYMIFVALRYTTATFVTAFSNIAPVLTFLLAVATRSEALDLKSRTGLAKLLGTLVSLAGAMVLTLYKGVALTHAAAASQDQQQHSHGRLPPSAADSRGKWTLGTVAILGNCVCLSCWFLLHGRLAKKYPHVYSCNALMSLLSFLQVAVVGLCTQRSISPWIVTSKFNILTVLYAGIVGCGVSFVLVTWCIEKRGAVFVAAFIPVVQIIVSVIDFSILHEQLYLGSVLGSVLVIGGLYLLLWGKRQEALHCPPPPPPKVAEEDPADKEQQQVQHN

SEQ ID NO: 78595 - protein, 250 aa, Zea mays
  Coding DNA Sequence Number=SeqID_35220
  Homolog annotation: Hit_ID=Q6ER71; Match level="QueryCoverage=64%, HitCoverage=44%, E-value=1e-42, Identity=60%"; Hit description=SEC14 cytosolic factor-like
  Subcellular localization annotation: CTP_CleavageSite=43; ConfidenceScore=5.01e-01
MVLWFLKDRKFSVDEAVSKLTKAIVSSNSLVPVKLTPNSFFTRSIISWYFFDEGAKPPISLRNRLPTILLLKDFGVAELSEESVKILYQTGKAYVHDSLDIYGRPVLIVVAAKHFPSTQDPVENQKLCAYLVEKAVNRLPPGAENILGIFDLRGFRVENGDLQFLKFLVVKPLLKSYASLVHINQLHFGRLNCNTTTSAITEKSGQQRRGSSDPHVQMPAWSFTWFQEEVIYAVFLVTSCRRFETGGSLS

SEQ ID NO: 78596 - protein, 143 aa, Zea mays
  Coding DNA Sequence Number=SeqID_35221
MLEVSTVSQGVAHIPVIRAPGTEDVVQCALTSSGCASGMRGEWSGGMDLFTGPLLPTLVGLLVRVALWCWWRRFRSPDEVLSPFVSSDVEVHFSKQLFGGGWCFLQYGSDEGRVIRSLVEVLNHCCPSDLGDVISHGLKPFEV

SEQ ID NO: 78597 - protein, 239 aa, Zea mays
  Coding DNA Sequence Number=SeqID_35222
  Subcellular localization annotation: CTP_CleavageSite=2; ConfidenceScore=5.59e-01
MQAGSEQKKPNRRARCVQPPSGYKRPSTLAQTSRRKGGQPCRQHATAPSGRTSPTPNTPGMEAQAHASCNWRAECFVHAAAPPPAPPPRLLDYGTNTATRGDPVHDLAAPAWRDGQYGQKWAGSNDGGGASGRRSGRRFAFAIMTASEKGPGKGDTPKRILPREGTRLRASLLIRGSKAGLSEGFNSRLRARGLHTHYWSEVRRPSPRKGSTAASGYSGSAPTTDQGFEGWPPKGSEST

SEQ ID NO: 78598 - protein, 303 aa, Zea mays
  Coding DNA Sequence Number=SeqID_35223
  Subcellular localization annotation: CTP_CleavageSite=56; ConfidenceScore=5.06e-01
MVTSSSTAGESKLGRGLCPSLSLKDFHHQSWGGDCRVPSSRTRVASEPLSAPAPATAAGRGSSADEIARAAHGPTSNSTAFCPSLPHEFGHGRGPPGSSIRPKVIAAAVWPPGAEVVVVAAAGAGDGVPFVGLLLLRRPPPSSGVESLGSVSLIVRGFPCLVRGTPRPLFNEPRPGVAVSARTKAELARKEDLVGRSLAGSSVGGIDAGNELPRPRGGLMSSEDSWPRPRGDRPSRLLGPDSRRRPWRRWPRLGDDVVLQSGDLRTASPSEARSDLAEGVVDAEGAAAPFKRQDPSLQDQIVL

SEQ ID NO: 78599 - protein, 235 aa, Zea mays
  Coding DNA Sequence Number=SeqID_35224
  Subcellular localization annotation: CTP_CleavageSite=30; ConfidenceScore=5.13e-01
MAPPVDVAGPRPGSGDVEAPPRSRSSPSSVAEAESEPPGRARRSSSSSGAEPESEPWVGRGGVRRLLGLSPSPSPGSGGAEFAVFRGLARVRALGRAERKFAVFRGLARVRALGRAELSMGLGRAGNAFAAGGGPQARRRSFGLYADGDYQLRIKSLEGEREEEGSRAGASQWWLSSSNDDDDDAERFPRSRRHVHRGGAIAMGPLAPLRCNPPPPFSKSPGSLLLLSKSLTLYC

SEQ ID NO: 78600 - protein, 426 aa, Zea mays
  Coding DNA Sequence Number=SeqID_35225
  Gene Ontology: Mol. function=transcription regulator activity; Cellular component=nucleus; Biological process=regulation of transcription
  Homolog annotation: Hit_ID=A2XMK4; Match level="QueryCoverage=48%, HitCoverage=54%, E-value=5e-21, Identity=33%"; Hit description =Putative uncharacterized protein
  Pfam annotation: Domain name=Auxin_inducible; Domain location=56-153; Score=62.8; E_value=1.2e-15; Accession=PF02519.5; Description=Auxin responsive protein
MPLAIEAPTRWLHQIQKTEVEKRSEPKQASFKNKVLDQQLLADSILEFVLIRSSLPTQRCPIRFHFVFLCAAVGEGEEEEAMRLPSDVPRDHFAVYVGEWWRRFVVPIALLDRPEFRSLLRCAEEEFGFAGAGGALVLPYEEVAFHSLTFALACARRGDVLHRVIGILTRWTAIRGSQQRVRRSPSCKDSVSPFTPTHKRSLLSCPLVDCACSLQCRPHRSPDDDLVELLWHNGSVVAQPQAHHRPAQPSDRDRPGTSGLTAEETAAWFLNTLDDPLEKDLYTQLWYNTIADAALQHEGTFPGPTSHPSSPPPPVGSSGVESSWVGDFCSTFCDSNQVPRTPTGIRGKDAALQSEVPSDAGAHDGTSSSGGSGSNYGGSGLPSDSVHGHKRKGMCRDESDSRSERRRDRIKEKMRALQELIPHCNK

SEQ ID NO: 78601 - protein, 244 aa, Zea mays
  Coding DNA Sequence Number=SeqID_35226
  Homolog annotation: Hit_ID=A7PJT3; Match level="QueryCoverage=36%, HitCoverage=12%, E-value=2e-17, Identity=54%"; Hit description =Chromosome chr12 scaffold_18, whole genome shotgun sequence
MPIFSIGARLERRALQPAEVCAGEAVRDLNDVHHVFVQNPLKSRHPRSDEEEGLKARCHYRSAKVDNVVYCLEDDVYVKLRQMGGAFRDGAAPDLCARKSFLSSLSIMRRPILRRRTTACLRVSKAPSSQGSLTADNYKHSSLLGVIKSDNAVLGLPYALANQSFCKSFNLDLLEASATLTLAELWLALGSSHAKKALSLVYQSLPMILGHGGLELRARAHVVLAKCHLSDLKFSSTLQHFVLH

SEQ ID NO: 78602 - protein, 197 aa, Zea mays
  Coding DNA Sequence Number=SeqID_35227
MGEYRTPGYTVQTSKVGPGPPRWVHSATWPEDVGLLIAAARDNSLVYDTRKTEGNILNHCSDNEVPRAWPDETTRRGGRGSVSHGDRYGSQRDRRLASSPEMGPGATVGTLKLGYPLLLYKDAVPTRLSLSRMDLHVCKPDPWNGIRTPRMGSGPPTMGSQGPRTEHTQALNRTQAGAETLCCHVAYCARLKPTGGT

SEQ ID NO: 78603 - protein, 464 aa, Zea mays
  Coding DNA Sequence Number=SeqID_35228
  Homolog annotation: Hit_ID=Q9AU61; Match level="QueryCoverage=18%, HitCoverage=17%, E-value=6e-07, Identity=42%"; Hit description =Violaxanthin de-epoxidase
MGNFLACLRLCLQVVNCLRLRAAGGMGAESIPPSPTDEFYCCSGSSSSYSAASTRSCVSESAQHGRPVDPLCVLSVHPLSLPSTSSNLRCASALLAEATSALFHTKAEKRRKGGSPTPPPHAMTSTTPPPRAISPGLPHPRAPSLLHQLSLQSLQLSLSCRLHSAHRGPASVAPDLVAQCWREIEAIGPTTPRFANTADPGASPSAFDSNTGSSLGHIGCLCSMYRAASLSSFVASVLGFLFRLPRDASPRHRPPASSRRPRLRQTWQWIGQYDSGLGVWLLFAVAIGGEQEDTVEALSRAVQRSGSRGGIKGHRWRQHAIAACGGETEVRPGKQDREGDVISMQENMSARTLTLSSSTQQTIVRFVKLPLVDKITAWIFLENATTARAKVLKEVRNIAVTISMEKGKKENLMLPGSSIKKKLARLMEVKHDFMDFLQGLSKEEMELLDQLNMEATEEDVATFI

SEQ ID NO: 78604 - protein, 257 aa, Zea mays
  Coding DNA Sequence Number=SeqID_35229
  Gene Ontology: Mol. function=binding
  Homolog annotation: Hit_ID=Q10N57; Match level="QueryCoverage=25%, HitCoverage=13%, E-value=8e-14, Identity=60%"; Hit description=HEAT repeat family protein, expressed
  Pfam annotation: Domain name=HEAT; Domain location=104-140; Score =9.4; E_value=1; Accession=PF02985.13; Description=HEAT repeat
  Pfam annotation: Domain name=HEAT; Domain location=40-76; Score=8.2; E_value=1.6; Accession=PF02985.13; Description=HEAT repeat
  Pfam annotation: Domain name=HEAT; Domain location=77-103; Score=8.5; E_value=1.5; Accession=PF02985.13; Description=HEAT repeat
  Pfam module annotation: Pfam domain module=HEAT::HEAT::HEAT; Domain location=104-140::40-76::77-103
MSYMRVAIRFAYGCWPTRMVVWPVTDWKAATDSSFSQRTYSAIKLLFLQLSSMARDMCTLVRMEAFTALGKIQRVSEGVLLQSLEKKVRRTACKSLGALAKFSTQYTEKALDLLMDMMNDDTEAIWLQALEALFRMATYGCLSVQEKHMHMVLTTNILRSQMHDWSFQIDNYHGSGMVPLADLFLMMFYSTDVLEDDRILCDWQDLPFKNYAPLENDVNVHPVTFCFVSCHLKIKDPKKQFLVYGSSRARSEHLQPF

SEQ ID NO: 78605 - protein, 151 aa, Zea mays
  Coding DNA Sequence Number=SeqID_35230
MGKSKKGGSSSHHSGDKQKREPSPPFKVFGDSEYSEEEFSSESEGSLAYASPPVSSDDSDDSHGIIAEVWTYIWAVERSGLEGSDESEISSDEEDSSYSSEEGSGDDGNDEGDDGDKDDGDGGKGDDDSGKGDDGSGKGDDGRDSGKAPLA

SEQ ID NO: 78606 - protein, 184 aa, Zea mays
  Coding DNA Sequence Number=SeqID_35231
  Homolog annotation: Hit_ID=Q8W0U0; Match level="QueryCoverage=36%, HitCoverage=6%, E-value=1e-07, Identity=45%"; Hit description =Putative copia polyprotein
MATKWLVAINTTPTGHFKERSPSNIPSHIVDISKPFQPLPFIDLSHTQDLGHHKQHKCHKREIKQKRATRLMDVVTAYLYGSLDSDIYMKVPDGINVKNLDAIECGVVGVFIAPATKIWSLEGCCSMAHQTVRCANPLAGRWVLTIGALTGGASRLSGGALYRSCRLSGAPTARALSSARADAH

SEQ ID NO: 78607 - protein, 269 aa, Zea mays
  Coding DNA Sequence Number=SeqID_35232
MTHPGHRMDDPRSAFNGRKEDTKSTRTDDLQVFGMEISPARGIRRHRGDAGTPASDSLDSEGHRGQAHARSQSTRSGDSPRPHHGYRVEAEMTDHGGGITNNFAMPTPARDLDVVVEELYARNPVHGANQEELLPPVTSIAIGVPAATVRPGSSMAGGFCCVTTGQTARENTECGGRWSRMPLPRPTRRDPEKDGASVPLVSRAALCAVLWATMGRRRRAPGLRLAADPPHHDVKPTCRIAHGETHLHDFTCLFFTFSMGLIGDLGIGA

SEQ ID NO: 78608 - protein, 340 aa, Zea mays
  Coding DNA Sequence Number=SeqID_35233
  Homolog annotation: Hit_ID=Q6QP54; Match level="QueryCoverage=24%, HitCoverage=29%, E-value=3e-07, Identity=42%"; Hit description =Putative kinase
MAQATSGGRGLEARQRWPGQGRWLWGRDERGLKARARLSGEGADCLASCGWPLCEGAGYGGVATRQRSLDGGGEDDGWGVVSAFRNPGVPGPMSKLSPRAPAQMGQRETQREGGRQPEGDGRERWNPAAFVRKERIQPESAWGRVMMAPSFNVVGPCPGLGDVEAPPRSRSSLSSEAEVESEPPGRARRRPSAEARAESEPWGRAKRSSSFFGAEPESEPWGRVERSSSSSGAELESEPWGRAKRSSSSSEAEPESEPWGRAEWTSPSSGAEPESEPWGRAKQSFPWRLGPGLAAVSLTLSSGTVVRAAQAALSFCQTGQWSDEVTAVTSALSTGGRAPG

SEQ ID NO: 78609 - protein, 182 aa, Zea mays
  Coding DNA Sequence Number=SeqID_35234
MTLEPHPLQPGWRSLDSESFGYRAEDTIEAIALHGLTTFCGFHPLELSTHPIGLFPAKREDDPMWKDWVEHAKDIWAIYPGQTAHLTVRCMNALYRLQVMRGEAMSHLMALLEATKTTLDNREELVVDLSTEMVEKDLQEIQDMEANEDVDIEGGEEPASSVDTAGSGRPPSPESSVASFAH

SEQ ID NO: 78610 - protein, 73 aa, Zea mays
  Coding DNA Sequence Number=SeqID_35235
MATDRIKYHNLTRCTMDQAVSLAARSRRFESSFYPCKYNGSSSLISCEKQTIRIEFLSLQGFNNIMLREEKLS

SEQ ID NO: 78611 - protein, 85 aa, Zea mays
  Coding DNA Sequence Number=SeqID_35236
MELKTKDGVVLAIEKLVTSPLLFSDGCAILAHRVIRAIPFFIYLIMTISESPYTINLLMPSDMAMFNPWIKASYSTALLDAENNN

SEQ ID NO: 78612 - protein, 278 aa, Zea mays
  Coding DNA Sequence Number=SeqID_35237
MAVVTDCRAIRGYRAARIGLGVNHRPWRMPLNRILRHWENREVEGVSRKNLSSAPPHSEREGEEVANYRVCSGPCCCPLVEPPRDWELQLRWDLWARVSHGQGESMVPIPLAIVVFPDENSHWALNNPRRPPPSKPRDLLWRSAPCSLPRRERERVVAVGQRRRRDSVMGVEGLAMPCRTLLVRFARHRPCVEQRGLADVAGNAGVVNPGRRLRHLWPSPPFSTLVRIPRNRRAVRDLGVSLSQGNLARLRTNCSPEQEGRRVITLLRGQGSRRVKPR

SEQ ID NO: 78613 - protein, 43 aa, Zea mays
  Coding DNA Sequence Number=SeqID_35238
MSSAYRGKETKEKGKEMDVVGEGKWAQGVGWAGFGPQHREIVF

SEQ ID NO: 78614 - protein, 230 aa, Zea mays
  Coding DNA Sequence Number=SeqID_35239
MSAQTIELQSVTPSYCKKHLEGQPQIHVLLWDHLICGKRRRDSTPHSRSAKEKTFLDNLRESRNETGNSATSSAPCEDHLLQAGSRKFIHPKNPVVHLIHIRVDTDYEEKRNKDPSGCPSGASALKGEQKEWNRPPSPTTNQLCLGKNHLNGKLVDEGTDAVMSGGIMKPENGTRHSLYHQMRSRRWEKLQTNESSRREEIPADVIIDKLKSKPSRRRDNVERIPSSNET

SEQ ID NO: 78615 - protein, 218 aa, Zea mays
  Coding DNA Sequence Number=SeqID_35240
  Gene Ontology: Mol. function=transcription factor activity; Cellular component=nucleus; Biological process=regulation of transcription, DNA-dependent
  Homolog annotation: Hit_ID=A2Z391; Match level="QueryCoverage=65%, HitCoverage=69%, E-value=1e-21, Identity=43%"; Hit description =Putative uncharacterized protein
  Pfam annotation: Domain name=AP2; Domain location=22-73; Score=78.3; E_value=2.5e-20; Accession=PF00847.11; Description=AP2 domain
  Subcellular localization annotation: CTP_CleavageSite=12; ConfidenceScore=5.25e-01
MATTQDSGRTASATALTTSRGRRFVGVRQRPSGRWVAEIKDSAQRVRLWLGTFDTADEAARAYDEAARALRGENTRTNFADRARHGGPAGAGSGAARARLSKNLQHVMARAAAAGRATACAGVGDQFALAAVFRHPVAAQQQVKHAVQPSFVVPRRTEAPPLSSVPAGGGEVWRVDDVDTADESLCAAEERSFKVSSSVIVPPSFSASSSESFGLDDL

SEQ ID NO: 78616 - protein, 118 aa, Zea mays
  Coding DNA Sequence Number=SeqID_35241
MAPGKLSTVSCGRRWKRSDGEESPSSPQPWERRLGSSTAPQRGIHHAQPPVESAVAPRRGRDKTGRSTASYKQARQKQGWSPTLGGEAVSEERDACGSCCERPAEKEEIATNGAILFR

SEQ ID NO: 78617 - protein, 244 aa, Zea mays
  Coding DNA Sequence Number=SeqID_35242
MAGIIRSTCAGGCSRRRRVCQPNHSDIVQSNGTVLGSSSCKVHGLSGKLSEGLDRAEEGGKGAGFCHGSTGDLSTLAACMATSELLLKDGYRSFLPPPSIHANAVAGSLVTSVSASPSPWGLLLRLCGVSVTPGVEIAPVLAPLDRFDYGISDQELKLGANLLSSLQLPPDVVDRPHPRYRAMGGVTRAQGGRKLETVDQRVNDLDHIRGLGVPQPWMPDLASRVIITPRPLYFPVNEAQSRIV

SEQ ID NO: 78618 - protein, 144 aa, Zea mays
  Coding DNA Sequence Number=SeqID_35243
  Subcellular localization annotation: CTP_CleavageSite=66; ConfidenceScore=5.16e-01
MSSPIVIRRSRAKHYLDLILALQLVNQRSGFNRSNSSLRQSDHSRKKGIQRSVPFSLPAHATGQVRAIRTAALPVSSPWIPPWLTHAILLPRECYTEGSPRRIDPQIPTKVIGTRNRAHRNMRHDGEGASPISDQGSISAPNEA

SEQ ID NO: 78619 - protein, 147 aa, Zea mays
  Coding DNA Sequence Number=SeqID_35244
MAGKTGPGVKVCRHRLQRPWTAGYLRKSTWVLYKDCHGEGVHASLTVRLEIYGLDQISERDGRRSARTTDVAMDGSDIKRLDLSTPVGSRSTALANPPNRYPFDLIATVALWINGHNPPGLSRAQNSGRRRRCTTKDGGTTVEPRQS

SEQ ID NO: 78620 - protein, 36 aa, Zea mays
  Coding DNA Sequence Number=SeqID_35245
MTEARAGAMFYGDGGGFLTFRFNSDDAGASGFHFYF

SEQ ID NO: 78621 - protein, 98 aa, Zea mays
  Coding DNA Sequence Number=SeqID_35246
MVEAEGRFAVLDDSAMTERVDGEFPGLPLLGEARTAFPRSGTPGWRRDGMRQWRGGEFAEANHRDNGVQQRRTLSPLGLAVELGHTGLGTTRQAPDIK

SEQ ID NO: 78622 - protein, 98 aa, Zea mays
  Coding DNA Sequence Number=SeqID_35247
MVEAEGRFAMLDDSAMTERVDGEFPGLPLLGEARTAFPRSSTPGWRRDGTRQWRSGEFAEANHHDNGIQWRRTLSPLGLAVELGRTGLGTARQAPGIK

SEQ ID NO: 78623 - protein, 36 aa, Zea mays
  Coding DNA Sequence Number=SeqID_35248
MTEARAGAMFYGDGGGFLTFHFNSDDAGASGFHFYF

SEQ ID NO: 78624 - protein, 144 aa, Zea mays
  Coding DNA Sequence Number=SeqID_35249
  Subcellular localization annotation: CTP_CleavageSite=69; ConfidenceScore=5.15e-01
MSSPIVIRRSRAKHYLDLILALQLVNQRSGFNRSNSSLRQSDHSRKKGIQRSVPFSLPAHATGQVRAIRTAALPASSPWIPPWLTHAILLPRECYTEGSPRRIDPQIPTKVIGTRNRAHRNMRHDGEGASPISDQGSISAPNEA

SEQ ID NO: 78625 - protein, 81 aa, Zea mays
  Coding DNA Sequence Number=SeqID_35250
MAPYTSHELSPLVSSCPLVSPQLVEVHSADVVAVDKGAPHQRTVQLLEKLTKPRCLALLSATAWYLALALEWETTSCRFED

SEQ ID NO: 78626 - protein, 142 aa, Zea mays
  Coding DNA Sequence Number=SeqID_35251
MVQRVTRSTCSGGFTNSGERDYTIPVGLVLGSSSGKLHGLLGKLSEGSDRVEVGGKGFGHDGCPRAALAGRGEVVGVVGELGRVRRGAGEAIGKMVVHEGGLYTRSQARFKGQVGVGFWITYRLLWAESRGSENVENPQSPT

SEQ ID NO: 78627 - protein, 138 aa, Zea mays
  Coding DNA Sequence Number=SeqID_35252
  Subcellular localization annotation: CTP_CleavageSite=65; ConfidenceScore=5.45e-01
MELEFLPWLPTSSTPLLSHPFSLKPAPSPTISPWPSSSSARPPLLLFPLVQQQEAPARGLGVQLRCAAVPIQNSGPRIPSALRASPDLRSPQHRRRSPRREPRVLRGEGKPLDARRCRSDAQIGIAIVLTNTNWVCLW

SEQ ID NO: 78628 - protein, 192 aa, Zea mays
  Coding DNA Sequence Number=SeqID_35253
MVWLEQEPLTTSAACARGQGSSDHLRRRPAHRHDRRDLPDVIDHPAGALLPPVSLTAVIFATVTVSASQGSQVRFRLSPGGFVQVFGSSALSLPVFDSACSAEDAFGMVAGSSAFCVGEWAPLGQQLKKLIGGGRSNKFGRSSSLPLLSPSSQRVAVVGLNQLTFARLGDSLLRHFPVLYKRPHSESYMLLH

SEQ ID NO: 78629 - protein, 152 aa, Zea mays
  Coding DNA Sequence Number=SeqID_35254
MGVGEGRLGKSNKRKREPTPPSEDFGDSEYSEEEFSSESEGSPAPVSPPALSDDSDDSQGIAAEVWTYIRAVERSGLEGSDESEFSSDEEDSDGGEDEDDDDDDGDDDDGGDGDGDGSGSGGGSGSKGSTRGGSSKGSTKGGGGGSSSKASG

SEQ ID NO: 78630 - protein, 28 aa, Zea mays
  Coding DNA Sequence Number=SeqID_35255
MGAYSNEDNFIRGNPEGVIEWISVICDA

SEQ ID NO: 78631 - protein, 253 aa, Zea mays
  Coding DNA Sequence Number=SeqID_35256
MEHRPGLERLLETTHLEPDGKLFVNTQQAPTWRANCWCFDPEGPWTDEADALEVGGYKCSRGRERESLFVSPSSRAATFSYEGPGPSFYRRKERAQRPSSEVEVESEPWGRARQSFLWRLRAGLGGCQPHPGGWHSSRSSAGGAVFLSGDPCIECSCDAVGWCGDLAKVASLRSLPELGLGRVEVSGGTDGASPLVSCATAPPEFPGITANDGEKNGGGAVHEGPRVGGAQERYQTRGPACRYPRPVSVWACS

SEQ ID NO: 78632 - protein, 63 aa, Zea mays
  Coding DNA Sequence Number=SeqID_35257
MAARRQAMCSRVGWRGGKVVLGQGALEESRGMGQILGLGPNTDPPQCEPVLATREHSTPSSNL

SEQ ID NO: 78633 - protein, 113 aa, Zea mays
  Coding DNA Sequence Number=SeqID_35258
MANGGALTGRWPVAKAEHNTLNSPTLRKEEPFASYDSARPEDRGQTGRGGATADAEAPVVPGFIEEGIPQPTPNNPSTAREIRKPVRIGARWMELEPGTHVFCSTGSSLLAVW

SEQ ID NO: 78634 - protein, 210 aa, Zea mays
  Coding DNA Sequence Number=SeqID_35259
  Subcellular localization annotation: CTP_CleavageSite=65; ConfidenceScore=5.16e-01
MEWGCSYLRRGNRSSVCNGTSNATSPVDYLNRFTKRESPRVKVTRTPRPLFDEPRPGVAISVRTEAELARKWEPGWPEPSRVAHQQGLTSESTTRGLGSGWRPWKMLGRGPRGNRPRRLLGPDSQRSPRTASPSEAGSGLAEGVVDVEGASGPSVGNRDVCVGESCFLRKVMSEKVMSEVSVSRRRRSPSARSALAAYVYSVVSRIRFSK

SEQ ID NO: 78635 - protein, 111 aa, Zea mays
  Coding DNA Sequence Number=SeqID_35260
MAEAIAALVNANADNTRFLRELAGNQYQQHGGTGTFELGMKLYTIRKAGSERRLNQRRSCTQGSFDSVPEKGTDLRRKRLSSPRQIVLKSIVNMKGMNVILHMLHSVPINR

SEQ ID NO: 78636 - protein, 280 aa, Zea mays
  Coding DNA Sequence Number=SeqID_35261
  Homolog annotation: Hit_ID=A2XR38; Match level="QueryCoverage=72%, HitCoverage=32%, E-value=9e-38, Identity=42%"; Hit description =Putative uncharacterized protein
MAGKNVFFDLPDKLTGEIWTLKFHCIGAQPGKEIVTVNIDKAYVAFYNVVYIKSKLGYSGRDFLFYKKRCGIDRSRLLALDYIHQEEAMLSDNMDERKISFVLTKDPPSDLEVSITPIKRPRQRTNVDEETIEVSIDAYKEWLAILQHDNPETDLMDDFREDTIKTYKEWLRHQGDLPDILLYERQSNDDLILSDEEIHGSSKPTTNWPSHARRHRKRDPDNDGVFKKEGRGTLKGIAAATKRIKNGPLGYSTNGFLVVKDVPYQKTSDYYDFVVVKVVT

SEQ ID NO: 78637 - protein, 67 aa, Zea mays
  Coding DNA Sequence Number=SeqID_35262
  Gene Ontology: Mol. function=catalytic activity
  Homolog annotation: Hit_ID=A3B342; Match level="QueryCoverage=82%, HitCoverage=16%, E-value=6e-10, Identity=61%"; Hit description =Putative uncharacterized protein
MSRAFDDYYIKDCGIVLASEVTQRRIYNSDQFVILATVRHVWNVLSNDETIQIVAYIEVCMILMVAI

SEQ ID NO: 78638 - protein, 179 aa, Zea mays
  Coding DNA Sequence Number=SeqID_35263
MSIVPAHKNSCPNNPRVVDVGDNHEAPLLNDGQRGAAALDRVQVVASREIVIHSGACDHVGLLLEVELTVAKLLLVIDERRQHECLLLMVFVWGFKRGLYGGMGMGMCFAGGGNEKDRIKNGNDRHENGNGGRMGMAEQEWWQNTGMAEYSCSLNSSRDLDIRRIIIIISQKYRQSLRL

SEQ ID NO: 78639 - protein, 218 aa, Zea mays
  Coding DNA Sequence Number=SeqID_35264
  Homolog annotation: Hit_ID=A2X4H7; Match level="QueryCoverage=22%, HitCoverage=4%, E-value=8e-08, Identity=56%"; Hit description =Putative uncharacterized protein
MSGVHRTVRCIGSATATSAPTVTCSGIKCALERAEVKHARDGAPDTLQSMSGSLRYGKSGTFRMGSFLSHCSLPRGTGGGSARPAQPQSHSSRQSERAPVGRSHADDVPCRRPTERYKYTVHQSIRSLGLIPWNKQRGQTPKAPVLHSIKQCTASMEDFAGQDVCVVLGIGDNIKGLLATLSRIDAIISYDSSPRSTCILSFPIPCRVPDSRLLCGSR

SEQ ID NO: 78640 - protein, 145 aa, Zea mays
  Coding DNA Sequence Number=SeqID_35265
KKEIGSQMEVRCQTNFCQNEDGFPKLLRACTVRLGIRNQPEYDEDAEKLNRKLHVDLTTAQARVAALESREVIAVEALKQAKDEHVQKLMEAYLVTITNVEPCGSKSLLHPTLFNPSKLKTPRFLKVTRSLSEEKRRLGNSRKDP

SEQ ID NO: 78641 - protein, 310 aa, Zea mays
  Coding DNA Sequence Number=SeqID_35266
  Subcellular localization annotation: CTP_CleavageSite=2; ConfidenceScore=5.35e-01
MSSFSLKRRVFPSSKPPDGGYPPPFRLLVGGTQLHGSWYLSAIVRLQGFSSCCPAAPLRRRSPEMATSGLMVGEKRAGLRPIPLPQPQGFSSPRLGRGECRVGVGPCVGGGPLLHSVMGEEAGIARGVRQLQRAWSSAASGFGATCGTGVSHGSWKRFFRWRGGRDRPRADLQLLRPSARPYLTSFGMGGGLLAAASTLRSVLPLFGPPGAEVVVVAAAGAGDGAPFVGLPSLRRPSPSEWGCSYLRRGNRSSVCNGTSNASVLRSLWLSRPERESLGPFGLVVWGSSSLVEETPRPPFGGPRPGVAISV

SEQ ID NO: 78642 - protein, 27 aa, Zea mays
  Coding DNA Sequence Number=SeqID_35267
MVLLSLFSEEAPLPARPCLLPFQGAEI

SEQ ID NO: 78643 - protein, 203 aa, Zea mays
  Coding DNA Sequence Number=SeqID_35268
MEALPADDQRPFEDLVMHDEKEVMRQWNEQRDKEEAELLHKLSERRKEAADKYLSHFTVDRHQKIVRQGEIDMESLLPPLQGPAVSTPDLSLTTFMDQRGDQLKRYVDESIKMHLRAYEKSWCKRKKQKEERPCLISGQWSEVMVQTDCRSAEGKRSCHLVVARNLSILVIVGSSPVMLQLNNGKVLNIGQPTGQHAQFPTAA

SEQ ID NO: 78644 - protein, 27 aa, Zea mays
  Coding DNA Sequence Number=SeqID_35269
GSLEMKVMEKVGCQKYSATQWGARRGA

SEQ ID NO: 78645 - protein, 370 aa, Zea mays
  Coding DNA Sequence Number=SeqID_35270
  Gene Ontology: Mol. function=transcription regulator activity; Cellular component=intracellular; Biological process=regulation of transcription
  Homolog annotation: Hit_ID=A2XNU3; Match level="QueryCoverage=100%, HitCoverage=81%, E-value=4e-74, Identity=45%"; Hit description =Putative uncharacterized protein
  Pfam annotation: Domain name=zf-C2H2; Domain location=147-169; Score =32.2; E_value=1.9e-06; Accession=PF00096.17; Description=Zinc finger, C2H2 type
  Pfam annotation: Domain name=zf-C2H2; Domain location=218-241; Score =13.6; E_value=0.38; Accession=PF00096.17; Description=Zinc finger, C2H2 type
  Pfam annotation: Domain name=zf-C2H2; Domain location=246-270; Score =13.6; E_value=0.39; Accession=PF00096.17; Description=Zinc finger, C2H2 type
  Pfam module annotation: Pfam domain module=zf-C2H2::zf-C2H2::zf-C2H2; Domain location=147-169::218-241::246-270
MEVCSPSDDVMEAQRRQREPTQAGGCSDDPRAVLTCLTFLEQKIAHLRGIISAAPRPPRQMVSAELSCIAVQLVSLSKSLAAAGGAADLDDGAARSPAPNDGGDSDSSDHDPFHADADADDDGRLPPAGSYEVIELGEEEILAPHVHSCKVCGKGFKRDANLRMHMRGHGEEYKTAAALAKPAAAAAATAQSSSSSSARCFYSCPFNHYRRSHCDKSYTCRRCNVKRFSVLADLRTHEKHCGRDRWVCSCGTSFSRKDKLFAHVAAFDGHAPALPPEDDAAAHNVANGGLGTDSYRRLTTMDTEAASLEFFSDTMLDALSCSDIEGFALMDGQGQCLDDDGRGSLSPWPVGLDSCDFDGFDLFGAPPIDF

SEQ ID NO: 78646 - protein, 123 aa, Zea mays
  Coding DNA Sequence Number=SeqID_35271
  Gene Ontology: Mol. function=metal ion binding
  Homolog annotation: Hit_ID=Q851N4; Match level="QueryCoverage=37%, HitCoverage=24%, E-value=8e-13, Identity=74%"; Hit description =Putative uncharacterized protein OSJNBa0042I09.10
MEVLEAPTGECIIRVWNYGPPVQACKCPICRRLINLLVPAALSGQEDGPQAQQVARPTLLHPKTVQRTNGPPADPPTRVQGADADDGMLGLFGFVDDLLILLIVFLHLAAVYRSLLLYRHGGQ

SEQ ID NO: 78647 - protein, 355 aa, Zea mays
  Coding DNA Sequence Number=SeqID_35272
MQAACNCTTGMHHFNFDASSMEAQAHTSCQSAAGEGATVDMAKSGPTVMAAAGGRKQQSNRLQTHVPSWSSRGALSHGVKTTRPCSVPRTARATAAPRTIRPVALTPRQGRRHLWQAKRTTLHLRHSNRVKKGTGKGDTPKGILLREGSRPRALLLIRAASEHSGSAPTTDQGFEGWPPEGFDSRPRTRRARDDSGVPLGHQPTLIERGTGVHSDHPLATHWRHHVRRPPRATWRFSPSSLRKGDEGENSAACPAPTAVPPAEVRLTAAESSLRRHRKLRLARSRGSAPASTSEDGLGLNLDLGRRSPPRPTPGLGLSLDLGGVTASPDLGLGPTTLQGGLKRSSNGHDITCTGH

SEQ ID NO: 78648 - protein, 156 aa, Zea mays
  Coding DNA Sequence Number=SeqID_35273
MVTQDGDHQFDGGEKQAGLRPLPRPQLQGSSSSLLGRGRAEPELYLPYGPAGHLFLQHSGEKALTGLAEGADFDNAGPISRRRRQLQHACFWCHLPPLGGVWLSARRMGGCCVARTGGPPKTSHAARAAFLFLGCPALAPVRRLRTEVGARLSERT

SEQ ID NO: 78649 - protein, 225 aa, Zea mays
  Coding DNA Sequence Number=SeqID_35274
  Homolog annotation: Hit_ID=Q6J9V9; Match level="QueryCoverage=28%, HitCoverage=33%, E-value=1e-07, Identity=45%"; Hit description =Putative uncharacterized protein
  Subcellular localization annotation: CTP_CleavageSite=15; ConfidenceScore=5.40e-01
MQVGSEQKKPNRRARCVQPPSGYKRLSTFAQTNGRKGGQPCRRHATAPSGRTSPTPNTPNVEAQAHASCNRRAKCFVHATAPPLAPLPRLLDCGTNTATRGDPARSSASLARRRSGRCFAFAIMTASKKGPRKGDTPKRILPQEGTRLRAPLLIRGSKAGPSEGFDSRLRSRGPYTHYWSEVRRPAPRKGSTAASGYSGSAPTTDQGFEGWPPKGSQPPQTPNEG

SEQ ID NO: 78650 - protein, 44 aa, Zea mays
  Coding DNA Sequence Number=SeqID_35275
MGVLYLLLTPMGVLLLLLTPMGVLHLLLTPMGRETYPCCFSQQS

SEQ ID NO: 78651 - protein, 406 aa, Zea mays
  Coding DNA Sequence Number=SeqID_35276
  Gene Ontology: Mol. function=thiamin-phosphate diphosphorylase activity; Cellular component=intracellular; Biological process =thiamin biosynthetic process
  Homolog annotation: Hit_ID=A2Y499; Match level="QueryCoverage=81%, HitCoverage=33%, E-value=1e-123, Identity=70%"; Hit description =Putative uncharacterized protein
MALHKLYDNGGPRLSYGSRTTTFFGVIHAPLKQPISCPKPSLSHHPHEKLGLRRSPSSPYSMVGFLQYVQQWKKKVVFILNKLDLYRNSNELEEATAFVKENAMKLLTAEDVTLFPVSSRSALEAKLSYSKNSDGKHSTEAMYNDPRWRSSKFFELEDYLLSFLDSSTENGKERVRLKLETPIGIADRLLTSCQRLVKLEYEKAVEDLASIKDLVYGANNYAIKLKSDSSSWQNQISSLTAQFIEWGLNMGMRMSKIERAKGRAVTLMESTLQLSNIDLIFAYTIKGKTGSSMRATSFVQNDILSPTLDDAVNLLGDYSTWLSSSNTREANVYLECFCERWDALVAPEERALLDPNGLVNEGEKLTIKALEGFNASAAAKDFEEEIRELVVKLPADSFLDDELLVP

SEQ ID NO: 78652 - protein, 198 aa, Zea mays
  Coding DNA Sequence Number=SeqID_35277
  Homolog annotation: Hit_ID=Q6QP51; Match level="QueryCoverage=68%, HitCoverage=66%, E-value=2e-33, Identity=58%"; Hit description =Putative growth-regulating factor 1
MMTASEKKGSTVAPEHTSFKLITDQGFEGWPLERVRQPPQSTRAPRPLLIKGSKAGLSEGFDSRLKAHRARDDSGYVCYMAEARATLPSLRRNRKLRLARPWASASGGGLRLARPQGSAPTSASEGGLRLARPQGSASTSASEGGLRLARPQGSASTSTSGGITSSPDLGLGLRRSLRLARPWARTDRATEDASLPYP

SEQ ID NO: 78653 - protein, 32 aa, Zea mays
  Coding DNA Sequence Number=SeqID_35278
MAHFAPLHPPLWAVAGGPYQSLMAPDHGTGSG

SEQ ID NO: 78654 - protein, 288 aa, Zea mays
  Coding DNA Sequence Number=SeqID_35279
MAERYPLPQSCVLQRRGGKTADIPHLGAWKGEKTRCIREREDMVASQGGHPPFKGDSPYLRSKPSRAESSPTHSKDLPCGAGAGSHTSCKPAQSRRSQTAVHGAYNRPAVTSDPPLLPRPAGERAGSHATAPSGHISPTPNTPGMGAQTHASCNRRAECFVHATAPPLAPLLRLLDCGTNTATRGDPTRDPAAPAWRDGQCGQNGLAVMAVAGGQEQRPRRQPNSHPIQGQQENPLSRREDNAPVLRPSNGSRTRNGRPSNHSARRINSAAGQAASLAGEAGDASPSP

SEQ ID NO: 78655 - protein, 58 aa, Zea mays
  Coding DNA Sequence Number=SeqID_35280
MVFFHGVSLLVTENPPRQREDRKIDGARRHQQSVRRGSIKISRGVKAEDHEQSRKTLP

SEQ ID NO: 78656 - protein, 111 aa, Zea mays
  Coding DNA Sequence Number=SeqID_35281
MPKREGELDFSKNQQQLNPKQNPNFTQLLALIEYYYKDNNTKTLLQLLAKLLNKQCMVINVGSKTFNMMGGGGIESAFIPFVSFGDLDNNTFKGLTSLLSVEQEIQYDEHT

SEQ ID NO: 78657 - protein, 156 aa, Zea mays
  Coding DNA Sequence Number=SeqID_35282
MKPRRSASQAGVQGQANRGLREPKGISAENSKQMEAPDRGGGQMMHRAPKLFDDVVLEVDSMTEPARRGADPLPALADGPGRRSAARPGRLSYRPALYYQFIIHIAFLDGSTGLPERARDENETYTAGYRVIPYPTLMYFSRIRNRIHVVKILGRI

SEQ ID NO: 78658 - protein, 16 aa, Zea mays
  Coding DNA Sequence Number=SeqID_35283
MARLGHAVANGDGTTT

SEQ ID NO: 78659 - protein, 487 aa, Zea mays
  Coding DNA Sequence Number=SeqID_35284
  Gene Ontology: Mol. function=racemase and epimerase activity, acting on carbohydrates and derivatives; Cellular component=integral to membrane; Biological process=carbohydrate metabolic process
  Homolog annotation: Hit_ID=Q2MJA8; Match level="QueryCoverage=93%, HitCoverage=95%, E-value=0.0, Identity=77%"; Hit description=UDP -glucuronic acid 4-epimerase isoform 3
  Pfam annotation: Domain name=3Beta_HSD; Domain location=126-415; Score=-90.5; E_value=0.00016; Accession=PF01073.10; Description=3 -beta hydroxysteroid dehydrogenaseisomerase family
  Pfam annotation: Domain name=Epimerase; Domain location=125-384; Score=188.1; E_value=2.3e-53; Accession=PF01370.12; Description=NAD dependent epimerasedehydratase family
  Pfam annotation: Domain name=NAD_binding_4; Domain location=127-354; Score=-58.1; E_value=5.1e-05; Accession=PF07993.3; Description=Male sterility protein
  Pfam annotation: Domain name=Polysacc_synt_2; Domain location=125 -391; Score=-197.0; E_value=0.097; Accession=PF02719.6; Description =Polysaccharide biosynthesis protein
  Pfam annotation: Domain name=RmlD_sub_bind; Domain location=123-454; Score=-173.2; E_value=0.012; Accession=PF04321.8; Description=RmlD substrate binding domain
  Pfam annotation: Domain name=adh_short; Domain location=123-294; Score=-36.0; E_value=0.0029; Accession=PF00106.16; Description=short chain dehydrogenase
  Pfam module annotation: Pfam domain module=3Beta_HSD::Epimerase::NAD _binding_4::Polysacc_synt_2::RmlD_sub_bind::adh_short; Domain location=126-415::125-384::127-354::125-391::123-454::123-294
  Subcellular localization annotation: CTP_CleavageSite=34; ConfidenceScore=5.20e-01
MPSSGITAVDAAAKGMKLERYASGGALLLRRATSAKLVSASSHLLFRATVLATLALVFLFTLHYPSLLSRSFHLSAGGGGGADDGARSSASHRSLLMSSASYGGAAWEKEVRRSARPSRDGGISVLVTGAAGFVGTHCSLALRARGDGVLGLDNFNSYYDPSLKRARQALLASRGVLVLDADINDAPLLERLFDVAAFTHVLHLAAQAGVRYAMEAPQTYVASNVAGLVSVLEVAAKHADPQPAVVWASSSSVYGLNTDAPFSEDHRTDRPASLYAATKKAGEAIAHAYNHIYGLSITGLRFFTVYGPWGRPDMAYFFFARSIVAGEPVTLFRAADGSDARRDFTYIDDVVKGCLGALDTAGKSTGSRSGRKSGPAPLRVYNLGNTSPVPVTRMVAILEKLLGRKANKRVVTMPSNGDVPFTHANVSHAAHDFGYRPTTSLEAGLRHFVDWFVSYYKLDAKIAKPAAADDDKPAKKKKKNKAMSASS

SEQ ID NO: 78660 - protein, 69 aa, Zea mays
  Coding DNA Sequence Number=SeqID_35285
  Subcellular localization annotation: CTP_CleavageSite=33; ConfidenceScore=5.52e-01
MKPVGYDTFSSTPFSIFNGRIGTSLSFAGRRRRASPVHSSPLLPDLSGEACSSAIVIHGGSVVWDLVLS

SEQ ID NO: 78661 - protein, 295 aa, Zea mays
  Coding DNA Sequence Number=SeqID_35286
  Gene Ontology: Mol. function=nucleic acid binding
  Homolog annotation: Hit_ID=Q6ZC35; Match level="QueryCoverage=46%, HitCoverage=24%, E-value=6e-33, Identity=52%"; Hit description =Putative Hec1 protein
MGHGPASDDDDDGDDGSSSKASHTQLMRTQGGRLQKHVLLKRDNGDVDLLKQVDAQPVNVKDVDRMRREMQAIEDDIANTEKGKAALEDKFWEVEAKLVTKLEELERHAHQFNQALKQLKPTVAFQYMIDSKGSSPAEMLGTGSKTVLKPALLAHAEENKRICLSNLENLNDLQKQLQGNAKLCCAVVGTFLGSGRSGDGLPRTDRDLTRRPTATHSTFEEMIFSISLAGTCIMEFRKYTKGTWRVPSVVNGVDEDSSQELECIRKAIFTSSVNVINVRFMQIRVNVRPLELRLA

SEQ ID NO: 78662 - protein, 150 aa, Zea mays
  Coding DNA Sequence Number=SeqID_35287
  Homolog annotation: Hit_ID=A3C1K0; Match level="QueryCoverage=18%, HitCoverage=7%, E-value=4e-07, Identity=89%"; Hit description =Putative uncharacterized protein
MRVSKRPYIGVEFHFIIHTRLSELRNLSEVAAYVKETNPSTYIQLGCCSLFQCLLRFSVKCRNYTYFFDQTSICKLPAPGFSFNHAQISVHKIRLLGWANNYWRYHGAVTAVKDQWQCGSCWAFSAVGAVSFPCLFYKIHFDGGRVVLAE

SEQ ID NO: 78663 - protein, 446 aa, Zea mays
  Coding DNA Sequence Number=SeqID_35288
MNKNTGIRSATTNGTLVPSPRDVSAAGLEGDCHHQKLGEEVARRPAQEVEPRLASLPAPARMTNTLDAEGGIEITARLASPHPGAGDQRVKGADSHAGGMQPRYVGTLLRLPTRPAWRPRPTRHATGAPDASCKKLHRHLRHRHASSIAEPIPRLEATQRTTQQRQPGAAVNAVKNGPAVMTLAGGREQRSRRQPSSRPIRGQQENPLSRREDNTPVTRSSNGSRTRNGCPANHSPRRINSAAPSLLTDQRFEGWPPEGFNSRLRSRGPYTHYWSERLGGCSRKPGSGRTVDSVNIPARELGTRPYTRATASSHEGTTRLAEALREALRPRRSETTPPRPRGLHPAGALARTHRNKMQPRKAGPIAKKCDESLQASANTPFEARGLLSGTIIRGTLKTPNSQLKDSAACAAPTAVPLDRVRLTGSQVLQKAPQETPLRPTQGSDSG

SEQ ID NO: 78664 - protein, 258 aa, Zea mays
  Coding DNA Sequence Number=SeqID_35289
  Homolog annotation: Hit_ID=Q6J9V9; Match level="QueryCoverage=36%, HitCoverage=33%, E-value=1e-43, Identity=90%"; Hit description =Putative uncharacterized protein
MEARAHMSCNRRTGYYVQRNHTTTCANAVSSRDYRTSATTRGSPAHDPTVPIKCDGHRSICRRDRRDSWGLKVAPCGVRQPPQSTRAPSPLLIRGSKAGPSEGFDSRPRACRVRDDPEYVRYMAEARATLPRYPRTFPRPAGTICNGIPPEGGTEPSDPIKWVRENSTIHPVPTTVPTTRVKLTTEAPSRLTSGLGLSLGLGRRSPPRPTLGLGLGRRSPPRSTSGLGLILGLKRNLRLARPCPRTDCATGDTSLPYP

SEQ ID NO: 78665 - protein, 103 aa, Zea mays
  Coding DNA Sequence Number=SeqID_35290
MEATAILREEQIVKNILGQINEQGVGRRLGEGSSPKRDGGSGVTLQADGTNPYANFFKDRRGPTGASKSAEVPPITENLLKSSGFAVNPRDNPVRITADKVML

SEQ ID NO: 78666 - protein, 92 aa, Zea mays
  Coding DNA Sequence Number=SeqID_35291
  Subcellular localization annotation: CTP_CleavageSite=24; ConfidenceScore=5.29e-01
MWSTLGLPRGQKRRCTPGYQQWVRTPMRKCRTPGCAALAFNVPLSTPQAVRRAAECTVLIITRTLPRKLPLHANATQTADIRAQGDCTGDQH

SEQ ID NO: 78667 - protein, 498 aa, Zea mays
  Coding DNA Sequence Number=SeqID_35292
  Gene Ontology: Mol. function=nucleic acid binding
  Homolog annotation: Hit_ID=A3BW69; Match level="QueryCoverage=16%, HitCoverage=41%, E-value=1e-09, Identity=35%"; Hit description =Putative uncharacterized protein
  Subcellular localization annotation: CTP_CleavageSite=22; ConfidenceScore=5.06e-01
MMVPASVVATSFAILLLFSLPSCLHLRAIPFSAEGMGAGTSSPYSSDTSPDTDPRSGHCTPTRKFHSMRAPSFLSSSDVSFVFPAFTLFFLPNLLPMPMTRSMAQYRLSTWSFPYHGVDSDVGYLFMVYSGFTEADHASPSPRLVAAISTPRPVPPISATPRPAATARGSGQLPVVAPAVDLVQSGRSAPFEARSYVQVVKNSPLPMAAFQGTPMPDLMGIAMTLNQSMWWKLWHRGWESETVGFRLRLEGILVHVWNEEVPTLIIGSHCATHFMEEESSFHRRTRTFDLWAWCSDPCFVPREAWLAIIDPDSKVVVHPVRPVGIKHGMLYKVLIHMEGDDDDDEQDGHGGRRHRSRSMWDRVSYCCGSINDCYSSSHCQGEWSHTPAQYRHQHDVHHLAWGRGAFMPNSKLVWRPKRLSNKKVSFAEPLVYFIEEKVAAHPYDISKQGSVSDFCMHFLGDAIFYVSDWADSMIDGVSCGLDAADSQAARVAKLVQVL

SEQ ID NO: 78668 - protein, 104 aa, Zea mays
  Coding DNA Sequence Number=SeqID_35293
MTGKRPWADRRNSDEAFRPQGGGLSRAKAWESFSRGRGDTGTYTGELDRAKLASHRASTADCNGRAPGMPKLPEHRVKLGKLSTGKGVSPRGGARGGLARSPAS

SEQ ID NO: 78669 - protein, 201 aa, Zea mays
  Coding DNA Sequence Number=SeqID_35294
  Subcellular localization annotation: CTP_CleavageSite=15; ConfidenceScore=5.04e-01
MAMVLNSTDSKASVRSQSNGPDPTTKQTLLKIARCPQAQSWIPDDVEVEVLCRRRSAPPGERSTVLRTDCALDLPVLLGFHIDVIGLSHGIACLEPLRSMSNPARMDLLQRGIRVRAYAVERKRGGRRHWISWTASERSGVGGRRVDEQAVGLRGGGTEADQWSTTANSLAREVGPRRASRFPTHGPAARSGKGRMRRATK

SEQ ID NO: 78670 - protein, 52 aa, Zea mays
  Coding DNA Sequence Number=SeqID_35295
MLDEVVGWDNLVIGLRPATRGTKARLAKASSEGWRLRLRPNNEQAIEDSSVQ

SEQ ID NO: 78671 - protein, 124 aa, Zea mays
  Coding DNA Sequence Number=SeqID_35296
MTSTGNRHRASDYRVELVRVISVSSFLAYIIYLVLFILVLIHVHRASHEVSSDSDKNHSVRSTNNTKVDAAPKLCARELRHDSRKGNQLKGEKAIYTSMDYLRVISKYKGHGCNFTWAVSRAYK

SEQ ID NO: 78672 - protein, 41 aa, Zea mays
  Coding DNA Sequence Number=SeqID_35297
ETEEAELKMLRKSLNFKATPMPSFYKEPPPPKVELKKIFYI

SEQ ID NO: 78673 - protein, 309 aa, Zea mays
  Coding DNA Sequence Number=SeqID_35298
  Homolog annotation: Hit_ID=Q6JAD6; Match level="QueryCoverage=79%, HitCoverage=69%, E-value=3e-15, Identity=65%"; Hit description =Putative uncharacterized protein
MSRTKNVSALGGGDDEDPPRPFRQVKGKTVYLEHQEGRKKRRLDRAARAALAAAAAAEQAERGDQLRISSDQIAYRVRRLASRPRSSAPTTPTTTTTPPPTSPTPVTPAPSTTSAIPTTSTTPASTAPSAPLSAPPIPPARFRERNETEVRPLATDPRLFDLQRATAAQLIRPPQFQGTLEASRLLFGSYRLAPDNPVPAPAPVIDTQAEDTAFHQFETQGAAVHDDDEDEDDFGVPPPRSHDHEAGSSSAVPATPPAVDPALAAILQALIQQQTLMASEQARQAAEQARQAVVQQQMSERMLSLFQTI

SEQ ID NO: 78674 - protein, 212 aa, Zea mays
  Coding DNA Sequence Number=SeqID_35299
  Subcellular localization annotation: CTP_CleavageSite=14; ConfidenceScore=5.05e-01
MSAPRPSHRRQGLLQEPGPSRRLGRPPRSLSQLSPEDTSPARGLGNSTPVLVLPVDDPVRTTPHIGGPAGRQNPWWLADARSGSSDNDLRSECPNSSSNDLRADAAATSSSPTSPLEGRGQAIKAKEPEARSVDGGGDLIGNEDFFSRHHLNVDDGSHLPTGRSPLGSSRTGEHRPPRKRCRTGAKAGQPKNTNAALAARDVLGGPPVRAAR

SEQ ID NO: 78675 - protein, 73 aa, Zea mays
  Coding DNA Sequence Number=SeqID_35300
MVRVRLADGKKNLVREDSIQGDVIVDITPQHIILNQRSKSDKYHKNKHSSIPISTKIVLLLSLRLGLLFLKSL

SEQ ID NO: 78676 - protein, 106 aa, Zea mays
  Coding DNA Sequence Number=SeqID_35301
MALVPGDEGESRDRRRDTTRLRRIGYPIGGCSNPGGGDLGSTRVDLPAAGSAGNSPRGEAHHRPGVAYRSIANEDRGHLNARAPVRTRAWRFRAAPWRAAPIAQNP

SEQ ID NO: 78677 - protein, 110 aa, Zea mays
  Coding DNA Sequence Number=SeqID_35302
  Gene Ontology: Mol. function=protein tyrosine/serine/threonine phosphatase activity; Biological process=protein amino acid dephosphorylation
  Homolog annotation: Hit_ID=A2Y9G0; Match level="QueryCoverage=57%, HitCoverage=37%, E-value=4e-21, Identity=57%"; Hit description =Putative uncharacterized protein
MAAEAGSRRGAAARRKAKEAAVGAAARVLFYPTLLYNVVRSKVQAEFRWWDEVDPSRGIDHLVIPTRDYMFAPSLVDINQATDFIHSGCGRADDGQKPLVEQTKQKMTRD

SEQ ID NO: 78678 - protein, 169 aa, Zea mays
  Coding DNA Sequence Number=SeqID_35303
  Subcellular localization annotation: CTP_CleavageSite=61; ConfidenceScore=5.02e-01
MRLGVPFIAPRQLGAVENKSGRPSLPSVVGGTGQSGTGKGDTPKGILLREGSGPRAPLLIRGSKAGPSEGFNSRLRALGLRAHYWSEVRRLAPRKGSTAASGHSGSAPTTDQGFVGWPPKGSTAASEHTERGMTLESHQREASSPRTPSKGDRVRRITRKYFWSAPPGH

SEQ ID NO: 78679 - protein, 100 aa, Zea mays
  Coding DNA Sequence Number=SeqID_35304
  Gene Ontology: Mol. function=nucleic acid binding; Cellular component= nuclear speck; Biological process=RNA splicing
  Homolog annotation: Hit_ID=Q6K4N0; Match level="QueryCoverage=79%, HitCoverage=38%, E-value=2e-17, Identity=63%"; Hit description =Putative Splicing factor, arginine/serine-rich 7
  Pfam annotation: Domain name=RRM_1; Domain location=4-69; Score=16.1; E_value=0.0048; Accession=PF00076.13; Description=RNA recognition motif. (a.k.a. RRM, RBD,
MARVYVGNLDSRVTSGELEDEFRMEVANCCSQCTVWVARKPPGCAFIDFDDRRDAEDAISDLDVVVVVVIGMVDLSRSAMNVVRLDTLHVNVICALPLEV

SEQ ID NO: 78680 - protein, 489 aa, Zea mays
  Coding DNA Sequence Number=SeqID_35305
  Homolog annotation: Hit_ID=A3BET3; Match level="QueryCoverage=100%, HitCoverage=83%, E-value=2e-99, Identity=52%"; Hit description =Putative uncharacterized protein
DCPPEFREAVSNLIFAVARYPDLPELCDLRHIFTERYGNFVEHFVSQEKLDSTEFTNEERFQVMQSVAEELSVSFDAKYASRMLHVDTNRTQKDVQKLNRITVRHLEKELMEAVELYLNGLPKNGFGAVRFPEAEGNKTVQLNVKPNEAVRDFHIEKENDEVLHCSCLPGGSEHNGGHADSGLRAQRLENQGRPVSPLSGNTSKKAPYTRLNVVNIKNSTEKQANNGFLHDKPQHLADLGYPVQKGQGDPERALTMLPPYVEPKSNIQPMNDDPEKQTPSGYRKPNIPGQTDHLENKNVLRPVSVRRRTAKLPASVDAYVEVPNNAKVTTQTPKSHRSHSSRRNGAKDDQNRKCNGTDDRMQPEAAETAIDCGNLFPRNANGQMRHNSGRGGDMDEEERMMDKLLMHYSKKGSDLTNNETHTDAAQKVSLHPTGRAMSLPPESVGPSKDAKVPARCTTLQPESPRSAHVHPKMPDFDELAARVKALRKA

SEQ ID NO: 78681 - protein, 175 aa, Zea mays
  Coding DNA Sequence Number=SeqID_35306
MCISMKPDCQGVGAHLKTNPNSHACLSRTELVSGSILAEDQARLKVHVMYIGMSLGRNQDEMDANGSILFLWDVDSENHLVFFDDVGMLKIVAKTCTCHSPKVSKSRHSPLVLAGAPAQGYRSPLVLARTKCLLRDDPLPLRRGGSLTTAYKLESGHQQDLHGDHKAPNATKPSR

SEQ ID NO: 78682 - protein, 82 aa, Zea mays
  Coding DNA Sequence Number=SeqID_35307
MSGTPGLMEGAGEEEDQGQEYNATCPAPTVVPLARVRSTAAKSSLGRHRKLRLARPQGSAPVSASEDGLRLARPQGSDSTMT

SEQ ID NO: 78683 - protein, 65 aa, Zea mays
  Coding DNA Sequence Number=SeqID_35308
MALVPGDEGESRDRRRDTTRLRRIGYPIGGCSNPRGGDLGSTRVDLPAAGSAGNSPVRLLLCSTT

SEQ ID NO: 78684 - protein, 374 aa, Zea mays
  Coding DNA Sequence Number=SeqID_35309
MRRKDGGFPPSGGLEGGKARRIREREDTVAFRKGPTRRATGAPDAACKQLHRLRHHRASSIAEPIPRLEATQQRQPDAAANAAKSGPAVMTVAGAREQRSRRQPSPRPIRGQQKNPLSRREDNAPVVRSSNGSCTRNGCPANYSPRRINSAAGQAALLAGAAGDASPSPKQRRQKRYAASFGFAPSLLTDEGFEGCPPEGFNSRLRSRGPYTHYWSEVRRPAPRRVPRPPQATRAPCPLLIRGSKAGPRRVHSRLRRRARDDQGYVRYITKARAALPSSPETPCSVPIEGNMALSPLLLAERRRRGVCKKAESVPDRPLALCGGSGAALTNPAPAEPLTASTYQPENLGPDRAPGLRPVRMREPPDQPKHYARH

SEQ ID NO: 78685 - protein, 345 aa, Zea mays
  Coding DNA Sequence Number=SeqID_35310
  Gene Ontology: Mol. function=transcription regulator activity
  Homolog annotation: Hit_ID=A2YP24; Match level="QueryCoverage=78%, HitCoverage=92%, E-value=1e-53, Identity=77%"; Hit description =Putative uncharacterized protein
  Pfam annotation: Domain name=DUF573; Domain location=78-179; Score =194.3; E_value=3e-55; Accession=PF04504.5; Description=Protein of unknown function, DUF573
MPPTGDDPSAAAGISFPDAGGGGDSEDGDFAGSHLLDPTDPGLPNPTTSSATGLPHAIPAAGSGGGPVTSGNGGERRPLFQRLWTEEDEIVILRGFAEFTAARGTAFASHQYDTDPFYEDMRRRLQLDFSKSQLVEKLRRLKRKYRNCVSRLRESGATFTFRSPHEQAIFEIARNIWRPANKHGRDPSADSDDEDAAAAARDTDTCQHQPQRRSQPPQPVPLSVSVPVKTDDSLPAQPQTPMPTMDGSEPVRLPVVSPQSGVSDAEKTCLTPLFREIIHAAMNVGANPFGAKLPEPPLGLPLPMEGEKWRRQRILELEVYLKRIELLQDQAKATLEELKSSTPGT

SEQ ID NO: 78686 - protein, 563 aa, Zea mays
  Coding DNA Sequence Number=SeqID_35311
  Gene Ontology: Mol. function=binding; Cellular component=nucleus; Biological process=thiamin biosynthetic process
  Homolog annotation: Hit_ID=A7R380; Match level="QueryCoverage=84%, HitCoverage=81%, E-value=1e-148, Identity=51%"; Hit description =Chromosome undetermined scaffold_490, whole genome shotgun sequence
  Pfam annotation: Domain name=PPR; Domain location=142-176; Score =19.6; E_value=0.012; Accession=PF01535.11; Description=PPR repeat
  Pfam annotation: Domain name=PPR; Domain location=204-238; Score =39.1; E_value=1.6e-08; Accession=PF01535.11; Description=PPR repeat
  Pfam annotation: Domain name=PPR; Domain location=239-273; Score=3.8; E_value=2.7; Accession=PF01535.11; Description=PPR repeat
  Pfam annotation: Domain name=PPR; Domain location=329-363; Score=9.4; E_value=0.59; Accession=PF01535.11; Description=PPR repeat
  Pfam annotation: Domain name=TPR_4; Domain location=110-135; Score =15.6; E_value=0.19; Accession=PF07721.5; Description=Tetratricopeptid e repeat
  Pfam annotation: Domain name=TPR_4; Domain location=328-353; Score =5.2; E_value=9.5; Accession=PF07721.5; Description=Tetratricopeptide repeat
  Pfam module annotation: Pfam domain module=PPR::PPR::PPR::PPR::TPR _4::TPR_4; Domain location=142-176::204-238::239-273::329-363::110 -135::328-353
MRSRGGGAAAWPEHLAAHARLLKSACPDAFLLTTAMRGYLRACLPLQALLLLRSVLPRAPRLLDNSFSLSLAMQASAALSASVPAMRDLGLGAASLHARALKSGFAAADLFVRTALVEAYAKAGRADLARAAFDEAPRRDVFLCNVMLAAYVTRGEVAEARRVFDGMRERDMVSWNTMIHGYAVNGEVDLAREVFNGMDDRDAFSWSSMMSAYTKGRRSKDALELWREMRAACVNPDCTTMVSVLSACSDMGALAVGAEVHQFVESNGVELDVKLGTALIDMMLSEGLQPNEVTFIGVLISCTHLGLVSDGKKYFSSMSVVHGVTPKVQHYGCMVDLLGRSGHIEEAKQLIRDMPFEPDAVIWRALLGACRIYKNVEVAEEAMAKLRVLDPHADGHYVLLSNIYAQANSWEGVAEMRRTLRRERIQRIPGRSSIEWQNTIHEFISGDRSHPRSKEIYKMLGEMMDRLRQAGYKPMTGLVLQDIDEQSKERALAEHSEKLAVAFGLLTTPAGSTLRITKNLRACEDCHSAIKLIALLYERKLIIRDRNRFHHFSEGRCSCKDYW

SEQ ID NO: 78687 - protein, 107 aa, Zea mays
  Coding DNA Sequence Number=SeqID_35312
MVEGGYGNRDAVRKACMVAINLASSWTASAMDSIVRAGVDEDGGGSAVVVVDTGTMEAGGRDGRRLGATTVGARAPSLQAEGRGRKDTQVKGAPDFLLRKRANTFLA

SEQ ID NO: 78688 - protein, 386 aa, Zea mays
  Coding DNA Sequence Number=SeqID_35313
  Gene Ontology: Mol. function=protein kinase activity; Cellular component=nucleus; Biological process=protein amino acid phosphorylation
  Homolog annotation: Hit_ID=Q8H5R5; Match level="QueryCoverage=33%, HitCoverage=53%, E-value=5e-33, Identity=72%"; Hit description =Haploid germ cell-specific nuclear protein kinase-like protein
  Subcellular localization annotation: CTP_CleavageSite=43; ConfidenceScore=5.01e-01
SFQTTPPLRLDPPLLPNPAPFHPPAESPARMASLEGDRWSEIVASGRARPPRVGVVYGRRLVEESSGRANMETRASFSGLRRPSFVPRKRTSWNRSLSIRFTDKQRTTPDPVQQHLQKKRLGGPPDLSKEKAYFEEIDAFDLMEESPSPKNFASWTKGMGQNLIIHDLPAILERWKISTLARRVSSEPLFDIVETPILPSVLSNSSTSNNGSETYTAGRAISVSYTDISLKSIAEDSLITSFGKVKIKEEPVEASIPWNGEALTAFDQLLMVCRQSAPVTLAEGPYDPFLISAWEDYDAKRGSENDHPKEFTREQCYIVFVLADGGTDLESFALVEYNEVHSLLVQVTASLAVAESACEFEHRDLHWYVLSTQLWLIHVFNLKPQS

SEQ ID NO: 78689 - protein, 126 aa, Zea mays
  Coding DNA Sequence Number=SeqID_35314
MVGPRRGEATRANPGSEYAGTTGVGEGAPRTCAEEGKDDEVCGRAWGEDGVDGRGVGAWCCLMDGGSEDGGEQAGRGWWDLPWRQSLDCVLPSIESGVDGGWGEYHGINGARARGCRGVDAYTADL

SEQ ID NO: 78690 - protein, 156 aa, Zea mays
  Coding DNA Sequence Number=SeqID_35315
  Subcellular localization annotation: CTP_CleavageSite=56; ConfidenceScore=5.30e-01
MGRLEVLTATDRLLPRSACRYQRLLGGGTSPPPPQPMSGSVVRARRPLRLRRRACKAAGRWWGASATTTTTASGKRLRPLRLVRLLLLLPARRVAALVAELVRRLAAAEAAADCPAIVFSSQWGLPVLSHSASCRSSRLRALYLDRNLSAGTGSPC

SEQ ID NO: 78691 - protein, 230 aa, Zea mays
  Coding DNA Sequence Number=SeqID_35316
MAERYQLPQSCVPPTTRRKDCGCPPSGGSEGGKTRCIREREDMVAFQGGHHPFKGDSPYLRPQPSWAESSPTPSKVPPIRRGGWVPRVMQAGPEQKKPNRRAWCMQPPSGYEHSSAFAQTSGRKGGQPCRRHATAPSGRAPPTSNAPSMGAHAHASSTLAPLPRLLDYGTSTATRGNPAYDPAVSARHDGQYGQKWAGSNGGGRRAGAAVTSSAKPTSHPGAVREPSLAA

SEQ ID NO: 78692 - protein, 35 aa, Zea mays
  Coding DNA Sequence Number=SeqID_35317
MTLMGLGVCGSLCQGKEEGVEADLQEFQDIDEFED

SEQ ID NO: 78693 - protein, 317 aa, Zea mays
  Coding DNA Sequence Number=SeqID_35318
MEEEDFSLCLWPDSLEWVFPELADLSPPVPISLLADAPDITSSETDGHDSGQGFVYPRGAISPRPSPASGGNCSPGRSYVLPEGLLRQWAHPRHARGPTRAGFVEKQPWPNRLSNRPYRRRIQCEDRLTPYPDTRASIGKVKAQQEAPPHPTLGLGLGRRSPPRPTLGLGLNLGLGSWSPPRPTLGLGLNLDLGRNRVLTRPRPRPQEKSPPRPTLGSDRPRHGGYIITLPLASSGYGGTRPASHLARPGLKHFSDGHVIAYAGLKHFSDSHVGMYTGLRHFPARHGPPGVETPTPGLELEIKLSPKERAKTNQPKK

SEQ ID NO: 78694 - protein, 117 aa, Zea mays
  Coding DNA Sequence Number=SeqID_35319
MGGLGARGAQAGAGRAGWAGLGADRPDQGREPFAVGRIGAMTRKWLVAINTTQPPPFNSPKHSNLSHSIQELAIHSKTQSKLPISPSSTTEISDCWGPSSFEGPQKHDLTMLLEYNT

SEQ ID NO: 78695 - protein, 204 aa, Zea mays
  Coding DNA Sequence Number=SeqID_35320
  Gene Ontology: Mol. function=DNA binding
  Homolog annotation: Hit_ID=Q3S4H7; Match level="QueryCoverage=94%, HitCoverage=97%, E-value=1e-73, Identity=66%"; Hit description =Putative wound responsive protein
  Subcellular localization annotation: CTP_CleavageSite=75; ConfidenceScore=5.21e-01
MELPVFCRPALQAKLLAAALINNSLTKSGQLGTALFGAISKYRNVSRFISPISQTSTKNIGPCCSFSSSFDVEVRSGSEGYVIKMRDGNNLRCVHSNFQGRNIPESAPQPAIVLRIEDGSRTLLPIIVLEMPSVILMAAIHNVHIVKLVRVNKRIQEAYCAELYLTKVNDPTDNITFDLQPSDAINIVVRCKVCLMDKDYIVMT

SEQ ID NO: 78696 - protein, 176 aa, Zea mays
  Coding DNA Sequence Number=SeqID_35321
MEDDVLKLFGMMSKRNSGHGRAPSLRCEVARLRGTRGGGGQSRGGGNLRDMVVEWRRAVEKVYVGASGGMTQRAVEKRQGTATTAREFHGSIGLDGKITLTFLYRPLRHPSTGSHVHLLDRAPPLHYHIPEIAPSTSRASQTGDLASRARCSTVARVSLRHHPEQLENVILHLITV

SEQ ID NO: 78697 - protein, 88 aa, Zea mays
  Coding DNA Sequence Number=SeqID_35322
MVGLQMMTRMVMIMLMVMVAFGAIYAQLGDVEAPPRSRSSLSSEAEVESEPLGRARRRPLAEARAESEPWGRAKRSSSSSGAELESEP

SEQ ID NO: 78698 - protein, 512 aa, Zea mays
  Coding DNA Sequence Number=SeqID_35323
MGGGPAEQQKTDERRAVARSSNGDDDDFCSGGPNSGSTDLRADAAAKRPPPMPKLVRQGRAEGRRVGGRSVGGPGYLVGGRTSSSCRGRRRRRERLRSHSCPRARHAAAAGATDDDLLSLRSLREGAGHCPRRDLPQLGTLPSPALVMKILEAEGGAEVAARLAFPHHQTGGRSSSHVVSQAHVPSGGSERTLSHGVKTTRPCSVPRTARARATAAPRTTRPVALTPRRDKRRLWQEKQATLRLCHNDRVKKGTGKGIPRKGSFPHEGTRLRASLLIRGLKAGPPEGFDSRLRSRGPYTHYWGSKAGPRRVHNRLRRRARDDHGYVRYITKARAALPRPGSGRTVDSVNIPARELGTRPYTRATASSHEGTTRPTEALRKALRPRRSETTPPRPRGLHPAGALARTHRNKTQPRKAGPLAKKCDESLQASANTPFEARGLLSGTIIRGTLKAPNSQLGSDSGSAPEDGELRSARPRARTRAKSRKTANSAPPDPGLGLGLSPGRRRTPLRPT

SEQ ID NO: 78699 - protein, 147 aa, Zea mays
  Coding DNA Sequence Number=SeqID_35324
  Subcellular localization annotation: CTP_CleavageSite=37; ConfidenceScore=5.69e-01
MVETRRSSAAATGKRTSPSSSSSSVPSRSAPRRALIPCSTLSPALALYMEGEANAQIDGIPAPALYMEGEASAQIDGITARTGLQPRSVLSRFAQIDGVRGALAQIDGICGLHMQVRGSLSVEGEERRRIGSRSALYMEGEADWGSV

SEQ ID NO: 78700 - protein, 27 aa, Zea mays
  Coding DNA Sequence Number=SeqID_35325
MVGLQMMTRMVMIMLMVMVAFGAIYAQ

SEQ ID NO: 78701 - protein, 169 aa, Zea mays
  Coding DNA Sequence Number=SeqID_35326
MEVSHRGRRPSPEPRRNPSIAGDSGIQSTNRTRCDKALDETNAAVPSDLADDARIGTANPLNKSIDTHLMKMLPTLILTGLEELEVAKRTDARGKNNEKGQDLQGVKEGGTVNGEIGKTLSSNKDGKEKAFKGRFKHNPWTESRQDSPNGKVEKTIKDKISEVPAEELR

SEQ ID NO: 78702 - protein, 146 aa, Zea mays
  Coding DNA Sequence Number=SeqID_35327
MEVKNTENRASRRVILVLGRLGGVEDTPTSNCRSRGALLPLRAARPSPTVVPPARVRLTTAKISLRRNRKLRLARPWASASGGGLRLARPQGSASTSTSGKIASSPDPGLGLRRSLRLARPWARTDHATGGLKRSSDGHDTAYTGL

SEQ ID NO: 78703 - protein, 298 aa, Zea mays
  Coding DNA Sequence Number=SeqID_35328
MRRLLLASPSPGAVNLNTKLLLVEISKLFDAQEAKWDELFSRRDARWKASSGAPYSFYIDIHHDAEIGHDASPVVAEESALHVVSGANYKEAPTTCSTPSLTEHAMAESAQRRPLYLTSARYVAGRGQGGDYHRATAQAVFDRVASRDVVSWTAMIMAYVQHGLGDGAPQMFPTKIVVCKLKFTGQINPESEDSSILVEDVDGTSVYQVSLGQHSIRNTDKNTEFPLAESWITEGDYISWSKSSNGSKLVNLKINRGGDFTNQISRTDIHLCYWLLEREMCPWAISKYFGDLVSNTSA

SEQ ID NO: 78704 - protein, 128 aa, Zea mays
  Coding DNA Sequence Number=SeqID_35329
MGRHRCPVLWALIVFQGIDREGVSGGRRRPHHAMSRDSPWSAVRRVHRSTPHVLSTYTGDAGGRSWVDSSPKSWVAATSPCPWGIPPPQAPVQALLRRPHLRTASDGARRRGICNRWLTCSSGIPHLQ

SEQ ID NO: 78705 - protein, 424 aa, Zea mays
  Coding DNA Sequence Number=SeqID_35330
  Gene Ontology: Mol. function=catalytic activity; Cellular component =nucleus; Biological process=regulation of transcription
  Homolog annotation: Hit_ID=Q6YUX6; Match level="QueryCoverage=72%, HitCoverage=79%, E-value=1e-66, Identity=49%"; Hit description =Putative TCP-domain protein
  Pfam annotation: Domain name=TCP; Domain location=46-243; Score =137.9; E_value=2.9e-38; Accession=PF03634.4; Description=TCP family transcription factor
MDVTGDAGGGRRPNFPLQLLEKKEEQPCSTSPAVAVGAGANGSGEMQMKKVAAPKRTSSKDRHTKVDGRGRRIRMPAICAARVFQLTRELGHKTDGETIEWLLQQAEPAVVAATGTGTIPANFTSLNISLRSSGSSFSIPAHLRAAGPRFGGARGDPWERVVGVGLGFGAAAEDPPSATSSASSPLLLSFHSGSVGLDVSPSPSSAAAGSDLSKKRRWEQEMQQQHQQQYHQQQQMAGYTTQSQMPGAVWMVPSASSNAQAAAAAGGGGSNANESIWTFPQPASGGGGGAATVYRGVPSGLHFMNFPAAPMALVPGGGQQLGLGGPVPVGGAGNDSSGSASGGGGGEGHMGILAALNAYRAHSAVPDAAPAQNGAEGGSRQRQQHGGGVFVNWLHCCGLLWLLHILARIIQSLRFMASGTGIDG

SEQ ID NO: 78706 - protein, 411 aa, Zea mays
  Coding DNA Sequence Number=SeqID_35331
  Gene Ontology: Mol. function=nucleic acid binding; Biological process= proteolysis
  Homolog annotation: Hit_ID=Q69SP9; Match level="QueryCoverage=15%, HitCoverage=14%, E-value=4e-15, Identity=67%"; Hit description =Putative uncharacterized protein OSJNBa0016O19.34
MKKSSGSGSVSLARSIPELYEERGASNLREFGFQELRAATSDFSRLLKVGEVASGAFTRASSAFLAGPPAARSSRLSHSGISHLPADEVKPLVKYDNDEDAHSPGGRGRGRGGRGRGRGRGRGGRGNGFNEYADAGWEDDHAPAYMGNGYARGRGRSFRGRGRRGDDDNQPEYQHVGGFKGMRVMRVKNLNLYAFGLYMQPTSIREKLGPKYASFPTDKLMENPDFYRNGFNEYDDAGWEDDHSPAYMGNGYARGRGRSFRGRGRRGGDNNQPEYQQVGGYYECSCSSFRFSPFVMELKPASHRSGNLFLVVNIYMVYPVVLCTSNFVHIEPVRMTSSLKVIEMLQSSNGIQHIPCAAISALISRAGNANWNRKGLLLIQSNWAPMVSQTVTYSTYSFFRDDSLRFFQSNR

SEQ ID NO: 78707 - protein, 96 aa, Zea mays
  Coding DNA Sequence Number=SeqID_35332
  Subcellular localization annotation: CTP_CleavageSite=56; ConfidenceScore=5.53e-01
MSAPPHVSYTALPPPPPAPTATSFSQLPPLPDVVGGCRVKAGAKPPGPGANPPDPFAALFDPKKQSMSPLAFCSPVLLYAPCLVSLLPFSFCETPI

SEQ ID NO: 78708 - protein, 101 aa, Zea mays
  Coding DNA Sequence Number=SeqID_35333
  Homolog annotation: Hit_ID=Q5NKP3; Match level="QueryCoverage=50%, HitCoverage=19%, E-value=8e-16, Identity=84%"; Hit description =Putative uncharacterized protein 9C20.7
MAAEMVKAAMSGKLKEMDWEKKIKICELVEQDPGHRIRQRRRHTVQLIIHLKLNLPPQPRASVLAMSCAFDDYYIKDYGVILALEVTQRRTDNNDHSPSSR

SEQ ID NO: 78709 - protein, 118 aa, Zea mays
  Coding DNA Sequence Number=SeqID_35334
  Homolog annotation: Hit_ID=Q6QP51; Match level="QueryCoverage=29%, HitCoverage=15%, E-value=3e-08, Identity=77%"; Hit description =Putative growth-regulating factor 1
MTVEKGHGSRGGMTDVLSAIAERKRWKRRGRGERAPFRLRHDDRLKKGSGKEIFRKSPSQQRKRAPSPPTDQGFEGCALWGSATAPEHSGSEPSTDQGFECWPLGRVRQPPQSMQSQG

SEQ ID NO: 78710 - protein, 182 aa, Zea mays
  Coding DNA Sequence Number=SeqID_35335
  Homolog annotation: Hit_ID=A2XN74; Match level="QueryCoverage=84%, HitCoverage=82%, E-value=2e-57, Identity=69%"; Hit description =Putative uncharacterized protein
  Pfam annotation: Domain name=Dirigent; Domain location=10-181; Score =166.5; E_value=7.1e-47; Accession=PF03018.5; Description=Dirigent -like protein
MPTPPVLLRLVAVLLAAISLRSTATAARHENTTQLHFFLHDTLSGKDPSAVLVGRGAGREPRPDDPVPFSSLYATDDVLTEGPQRQSKVVGNAQGLYVSSGRGKLSLVLGMDFELTDGPFNGSAFVVYSRNTVTRPVGRELAVVGGRGAFRMARGYALLRTHFLDNGNGDAIIEYNVTLFHH

SEQ ID NO: 78711 - protein, 100 aa, Zea mays
  Coding DNA Sequence Number=SeqID_35336
  Gene Ontology: Mol. function=tRNA (guanine-N2-)-methyltransferase activity; Biological process=tRNA processing
  Homolog annotation: Hit_ID=Q9LFU5; Match level="QueryCoverage=49%, HitCoverage=8%, E-value=4e-13, Identity=71%"; Hit description =Probable N(2),N(2)-dimethylguanosine tRNA methyltransferase (EC 2.1.1.32) (tRNA(guanine-26,...
  Homolog annotation: Hit description=N(2)-N(2)) methyltransferase) (tRNA 2,2-dimethylguanosine-26 methyltransferase) (tRNA(m(2 ,2)G26)dimethyltransferase)
MAEVDDKLKDYEIRKEGEAEILLHKRNAVFYNPVQALAATGLRSLRYAREVEGLGKIVALDNDKASVEDCKRNIKFNGASTTRCGTGGGGYHLYDYVSGY

SEQ ID NO: 78712 - protein, 219 aa, Zea mays
  Coding DNA Sequence Number=SeqID_35337
MALPVDVAGLCPRQGDVGAPPKPRSSMSSVAEAEPEPPGRARRRSFGRGQGGVRALGSGEAEFRRLPGLSPSPSPGGRAERTRVRALGSGGAEFVVFRVLARVRALGSGGAEFAVFRVSARVRALGSGEAEFAVFRVLARVRALGSGGAEFAMAPLARPDCLSDSLCRVALQSEWRRRCCPSVRLLYADGGYQLRIRRLEGTPNYGPRHKLILARANYQ

SEQ ID NO: 78713 - protein, 120 aa, Zea mays
  Coding DNA Sequence Number=SeqID_35338
  Subcellular localization annotation: CTP_CleavageSite=41; ConfidenceScore=5.06e-01
MPHSPHRTPHVPPPLVVARVHYPRQGRRSPEEAERRVTNTAASRKHSRSALDVAFHALEAEARDAKMEARIRLVRERRVAPPPTLSSRSRVKKGTRKRESVTIRAIPKAKVMFSSHTALL

SEQ ID NO: 78714 - protein, 248 aa, Zea mays
  Coding DNA Sequence Number=SeqID_35339
  Gene Ontology: Mol. function=transferase activity; Cellular component= integral to membrane; Biological process=vesicle-mediated transport
  Homolog annotation: Hit_ID=A2WXB1; Match level="QueryCoverage=68%, HitCoverage=51%, E-value=3e-62, Identity=70%"; Hit description =Histone H3
  Pfam annotation: Domain name=Synaptobrevin; Domain location=154-240; Score=28.1; E_value=3.1e-05; Accession=PF00957.12; Description =Synaptobrevin
  Subcellular localization annotation: CTP_CleavageSite=57; ConfidenceScore=5.13e-01
MAVCWAVKMGPVSDSSSHVGCDRIQQKSRRGKGRLLYIPSRLQSASIYPAVSGRRVRVDLSVEGMKITALLVLKPSTSGAGSSSSGGQSGPEAVVLANATDVSHFGYFQRSAAREFIVFVARTVAQRTQPGQRQSVQHEDVDMMDFMKVLDEYQKAFGDSWKSATADGTQQWAFLTDALARFQDPAEADKLMKIQRDLDETKIILHKTIDSVLARGERLDSLVEKSSDLSAASQSQYSVVLHPILMNL

SEQ ID NO: 78715 - protein, 131 aa, Zea mays
  Coding DNA Sequence Number=SeqID_35340
MGKNNKRKREPTPPSEDFGNSEYPEEEFSSESEGGLPRRYGLTSGSSSAPGLEGSDESEYSSDEEDSPEEDGEGDDDDDDGGDGSNDGDGSSRGGNGGSRSGDGGSRGGDGGSSRGSGGGGSSKGNNKASG

SEQ ID NO: 78716 - protein, 113 aa, Zea mays
  Coding DNA Sequence Number=SeqID_35341
MAERRSGRRFAFAVITAPKKGPGKGGYPEKGPSPRRNQAPSLPTDQRFEGWPPEGFNSCLRSREPYTHYWSEPSLGQGQPTPRGFRLARDPPFNGGHISGSPEALPSLRSNPD

SEQ ID NO: 78717 - protein, 716 aa, Zea mays
  Coding DNA Sequence Number=SeqID_35342
  Gene Ontology: Mol. function=structural molecule activity; Cellular component=lipid particle; Biological process=phagocytosis, engulfment
  Homolog annotation: Hit_ID=P53496; Match level="QueryCoverage=51%, HitCoverage=98%, E-value=0.0, Identity=91%"; Hit description=Actin-11
  Pfam annotation: Domain name=Actin; Domain location=3-377; Score =778.0; E_value=6e-231; Accession=PF00022.10; Description=Actin
  Pfam annotation: Domain name=MuDR; Domain location=590-710; Score =10.4; E_value=1.5e-06; Accession=PF03108.6; Description=MuDR family transposase
  Pfam module annotation: Pfam domain module=Actin::MuDR; Domain location=3-377::590-710
MAEEDVQPLVCDNGTGMVKAGFAGDDAPRAVFPSIVGRPRHTGVMVGMGQKDAYVGDEAQSKRGILTLKYPIEHGIVGNWDDMEKIWHHTFYNELRVAPEEHPILLTEAPLNPKANREKMTQIMFETFSCPAMYVSIQAVLSLYASGRTTGIVLDSGDGVSHTVPIYEGYTLPHAIIRLDLAGRDLTDNLMKILTERGYSFTTTAEREIVRDIKEKLAYVALDYEQELETARTSSTVEKSYELPDGQVITIGAERFRCPEVLFQPSFIGMESPGIHEATYNSIMKCDVDIRKDLYGNVVLSGGSTMFPGIGDRMSKEITALAPSSMKVKVVAPPERKYSVWIGGSILASLSTFQQVMWISKEEYDESGPGIVHMKVGPLQKNPHSTAGSSSSQSRTPSQPQPPVASWPPTHHARLARRGREQALRLLCGGAPPGGRIPVEVNPVCQQISPLGGQSWAAERNVVLEFEVLAEIAKARGKTVAQVFNLTTTQLPLYARRPGADDVFGLMPRAARREEDVAGTYCSVPPVGTRPTLRASSHRLLRGGAPPGGRKPPLGGTRCSVPPVGPCLVLSMPSAGAQFKETDKEEEEENIAMGVDEQGEGGDVPRNDYDRDNPSLKEGNTFASMTEFRNALDTYCIKGEYDYVIDKSEPTRMTVHCAFESCQWRIYASILEWATYNSCIGTTEPVKKIKEKYNILVPYMIVYYGKEMALDKIYGP

SEQ ID NO: 78718 - protein, 319 aa, Zea mays
  Coding DNA Sequence Number=SeqID_35343
  Gene Ontology: Mol. function=nucleic acid binding; Cellular component= lysosome; Biological process=lipid metabolic process
  Homolog annotation: Hit_ID=A2ZAR1; Match level="QueryCoverage=45%, HitCoverage=26%, E-value=9e-43, Identity=56%"; Hit description =Putative uncharacterized protein
  Pfam annotation: Domain name=SapB_1; Domain location=104-143; Score =28.5; E_value=2.5e-05; Accession=PF05184.6; Description=Saposin-like type B, region 1
  Pfam annotation: Domain name=SapB_2; Domain location=145-178; Score =18.4; E_value=0.025; Accession=PF03489.8; Description=Saposin-like type B, region 2
  Pfam module annotation: Pfam domain module=SapB_1::SapB_2; Domain location=104-143::145-178
MVYTPPKQQRELSEASIRSKCSVRSYPHTPAQFQAFHNNRINYKMQICVSDDVVAVQRSPAIQRSPYCFLTCSSSCTVELPHHGSALKEQISSTKIPARLKSGSGLCSACENFTSEAVTYLGKEQTQDRIMEFLHDACSQSFSFEQKCVELMDSYATLLFAKITEIRPEAFCKRYGLCRDTTLLSGVGSDSTSARFEIIQILVKECNKIEGHVQQVEQIVVERSEGWHCGYFCYLAWIPRQCEDGPEGRVLGGDPLSEKYVSSANELPCQAEEVFAQLPNPCQDLKHEKRCGREALVQHCCSIGINVLKVTWKTFTKNS

SEQ ID NO: 78719 - protein, 170 aa, Zea mays
  Coding DNA Sequence Number=SeqID_35344
MVITALSLLLCGLVVVLAVHAVVRCAFRVTRRVCYGQDEESPGGGGGGGADASAAAASFSCQAGPRRKRGPRTGLPPWILYSREVELTGCGAAECAICLTEFVRGDRLRLGTGGSEVRSNVLCFKPSSLRRTARKHEAAHCKHSAHELLLTNTTTIRNDMSMNRPKSTFS

SEQ ID NO: 78720 - protein, 120 aa, Zea mays
  Coding DNA Sequence Number=SeqID_35345
  Subcellular localization annotation: CTP_CleavageSite=69; ConfidenceScore=5.58e-01
MDFFPASQSGNNSHVDPDAIPSVSFPSSDTGTAACISAPAAAATPSSNTGCCTRVAVVIPVVEGPSCVRAVAILGANGGAAPRRVTDGSAPPGTSDDDAPEAGGQAVTALPKQTGGSGAP

SEQ ID NO: 78721 - protein, 153 aa, Zea mays
  Coding DNA Sequence Number=SeqID_35346
MEPGHPMGPGTEEPPPSLTNHEKKNTGEAKGEIGAPMVDTTTMTNTAISLGHEWMLVALLPTPPYVASTDTGTEALLCFILKYVGERRKRWWTEETNQDQDRKARALRASGWILLLMMWGGGGRPFSSSELAVDEGLTPPLGGLGSLWLDVGV

SEQ ID NO: 78722 - protein, 42 aa, Zea mays
  Coding DNA Sequence Number=SeqID_35347
MTKLISILLSWKNRNDIKLQMYLRLERRQKYKCDAKANVKSA

SEQ ID NO: 78723 - protein, 230 aa, Zea mays
  Coding DNA Sequence Number=SeqID_35348
  Homolog annotation: Hit_ID=A2Y2N2; Match level="QueryCoverage=20%, HitCoverage=5%, E-value=3e-10, Identity=75%"; Hit description =Putative uncharacterized protein
MGVPDFCALLARIECACSSPRAGNRSLVPLDSLLLHLTALAPAPRRSHQTPPPPLHSFLSPAAQALVLAISSHLLPTLVAFLASRRDELLRAMGESNLEISPNLSLNCLGEDLGRDIGHGELQTHLPRPLLHRRGLRPAQGRGHRRSPSPSLLWDEPFPSSVTATAAAAGGMGQLLLMCSFGGRIIPCSTGLRGSTIDEASPSPPASSPSKKVVRYHRHSHAFDGSKATA

SEQ ID NO: 78724 - protein, 87 aa, Zea mays
  Coding DNA Sequence Number=SeqID_35349
MQESLAGPPSQQNPPEGLPTLTTPLLPLPLSDNKSIIVNNVSSYPKPHKALASTTQKFSGKQEHEWVKEVIKGTTCLRLEIPGTGMK

SEQ ID NO: 78725 - protein, 70 aa, Zea mays
  Coding DNA Sequence Number=SeqID_35350
MERLGAGSAIAMVVGRGLRDGHASSPCSLPQLTRHPDACKGIIKQARKFAQSTLVLVKIVSTVQRSWGIE

SEQ ID NO: 78726 - protein, 329 aa, Zea mays
  Coding DNA Sequence Number=SeqID_35351
  Subcellular localization annotation: CTP_CleavageSite=30; ConfidenceScore=5.38e-01
MSSRSLMHRVFPPSKPPDGGYPPSFRLIVGGTQLRGSWYLSAIVRLQGFSSASPAVPPRRWSPKTVTTSSWVGRSKPGCDLGPTLSFKDVHHPRWGGGRAEPALYLPCGFVGHPLPRRSRERALTGPAGGPDFDNAGLVDGRRRHLQRVGLAGLAPGGPFCRRAAAVPYSPVDYLNRFTKHESPRVKVTSEHEQRRSWLENENLVGRSLAGLSVSGTDAGVDQPRPRVGLAPLGDGWPRPQGVAVDLALTVGQLVRSGLQNFGDDKRPFPGVRAAPGYPQQGLGVLRDGRGLLLVGFDAPFGDNELQDRALGRPEDPPFRVELDAFRFL

SEQ ID NO: 78727 - protein, 127 aa, Zea mays
  Coding DNA Sequence Number=SeqID_35352
  Gene Ontology: Mol. function=structural molecule activity; Cellular component=protein complex; Biological process=microtubule-based movement
  Homolog annotation: Hit_ID=P12457; Match level="QueryCoverage=39%, HitCoverage=11%, E-value=5e-14, Identity=74%"; Hit description =Tubulin beta chain
METSIPRRQWIWSAGPHHRGAVAQGDGHAGARAVVDLQPLPQSSPAFSAPPSLIHAHVATASSTPTAVARPVASVLMDLEPGTMDAFRIGPYGQIFRTDNFVFGQSGTGNNLAKVLYTECRSPRSTT

SEQ ID NO: 78728 - protein, 140 aa, Zea mays
  Coding DNA Sequence Number=SeqID_35353
  Subcellular localization annotation: CTP_CleavageSite=62; ConfidenceScore=5.62e-01
MSLGQNQCKNPSLHYGLSGGKAKTVRALARTVRLLARTVRTLLLLGFVGLNGSTTQTSSRPKMSYVSSPCSVEVIEFSARIWSTPPTQQAPMYLTSRCSRKFLAGGFDFTETSCSSILSTAPEDQPTLSDCLEWSHVVRH

SEQ ID NO: 78729 - protein, 438 aa, Zea mays
  Coding DNA Sequence Number=SeqID_35354
  Gene Ontology: Mol. function=lactate transmembrane transporter activity; Cellular component=integral to membrane; Biological process=lactate transport
  Homolog annotation: Hit_ID=P65254; Match level="QueryCoverage=97%, HitCoverage=93%, E-value=1e-165, Identity=62%"; Hit description=L -lactate permease
  Pfam annotation: Domain name=Lactate_perm; Domain location=25-438; Score=709.7; E_value=2.1e-210; Accession=PF02652.5; Description=L -lactate permease
MCVDSRRPAMNLWQQNYDPAGNIWLSSLIASLPILFFFFALIKLKLKGYVAASWTVAIALAVALLFYKMPVANALASVVYGFFYGLWPIAWIIIAAVFVYKISVTGIDSFEIGQMVGRQLPFMTIIVLFWIMAIMDGWRGIKETWPAVVVAGGSFAIAQYLSSNFIGPELPDIISSLVSLLCLTLFLKRWQPVRVFRFGDLGASQVDMTLAHTGYTAGQVLRAWTPFLFLTATVTLWSIPPFKALFASGGALYEWVINIPVPYLDKLVARMPPVVSEATAYAAVFKFDWFSATGTAILFAALLSIVWLKMKPSDAISTFGSTLKELALPIYSIGMVLAFAFISNYSGLSSTLALALAHTGHAFTFFSPFLGWLGVFLTGSDTSSNALFAALQATAAQQIGVSDLLLVAANTTGGVTGKMISPQSIAFACAAVGLVGKE

SEQ ID NO: 78730 - protein, 78 aa, Zea mays
  Coding DNA Sequence Number=SeqID_35355
YLDLFVGNRDECASESCFSRKVMNEPLYPNASYLSQKVMSEPKHQVAHLEVSGLDPSGVALVLGEPYSRSVGKTASAP

SEQ ID NO: 78731 - protein, 140 aa, Zea mays
  Coding DNA Sequence Number=SeqID_35356
MVFFLISAAVNHTLPWPALHRSAHTLFVPVLASVHAENEEEIEVTEEKTPPPFESQVFTMLSIALAKTKGFVLQKMIGKVGGMFSKIKLDGGSIRALMGSTSEKMYLCQVRKQQIFVAFVPRWFQMKKNKSEAAGGHGPP

SEQ ID NO: 78732 - protein, 112 aa, Zea mays
  Coding DNA Sequence Number=SeqID_35357
MAYRRARSTRGGGRPKSGEGDLGLPVKFCRVRGLGKLHGPMAKLTEALARLGRDWRELTMAAEALKAWRVVARRARGDFRACSREFGTTLIFGSPGFEFRKTENTVDPWKEV

SEQ ID NO: 78733 - protein, 432 aa, Zea mays
  Coding DNA Sequence Number=SeqID_35358
MERAPATRLFSPSRIPHILLWEASVGTSGEKGRRWMLAHLICADSTDVPREGPIEMVLLDLVVMKEAYQERKTAGDEGIQITTLNRRVIPERHGQGRKNGGGEWSGRENKSAEGLGAASEVQRIGPGVRGPVRGLNRVDSDTQNDCHPTTQGVHPENDLVEEPEELTGEAPEQQLVGGGKDVRITGGNENDGFGIDYGNGKWYSFRLEREQEQQGSSFSLQQEIESVRSCSPVLPLEAPPAPPLSAPTPGVATGGDPDDGGGNSSSSHDTDLSADQELEGWVARPITRDAARGTVTGSTRTAGRRPAWCTVRRTVFGVRSGVADGLNLKYYPRHPSGSTGGVIVSPISEDNPRLSSTFNLAAMLNTELDHALDELSRARAEIAQLRAKRVEHRHLDDGSPAPVGTQHPYRSPQRGHQSYGNPDCKTKINLEP

SEQ ID NO: 78734 - protein, 219 aa, Zea mays
  Coding DNA Sequence Number=SeqID_35359
  Pfam annotation: Domain name=zf-CCHC; Domain location=121-138; Score =9.7; E_value=0.051; Accession=PF00098.14; Description=Zinc knuckle
MEDLGNMTPTIVIGKIAAFEMSRKMCRGEEPTSSRPYAFSCDERMGKKKAPTPSSSSEEEEEEESDDDEDNQPCTSSSEDKETIRRVGKVMGMIRKINLMGVPLQVEDLLFNIDRKKQRKRGCFACGEKGHFRDYSRRPLLSSLWLMVHGGGFSGGSTGKKWASPAFIHRAIGVENVASDSGERGKKTALPAMVGIQLAVKMNTLTRGPGFPVSRAIGS

SEQ ID NO: 78735 - protein, 111 aa, Zea mays
  Coding DNA Sequence Number=SeqID_35360
MVHGGGFSGGSTGKKWVSPAFIHRAIGVENVASDSGERGKKTALPTMVGIQLAVKMNTLTRGPGFPQITKWVLQPGRVLSYMPKLDTSSVTKGNRVSLPGWYIGLWTKGCQ

SEQ ID NO: 78736 - protein, 160 aa, Zea mays
  Coding DNA Sequence Number=SeqID_35361
  Gene Ontology: Mol. function=ubiquitin protein ligase binding; Cellular component=cullin-RING ubiquitin ligase complex; Biological process=ubiquitin-dependent protein catabolic process
  Homolog annotation: Hit_ID=A2Y0F4; Match level="QueryCoverage=29%, HitCoverage=7%, E-value=7e-13, Identity=68%"; Hit description =Putative uncharacterized protein
MARQHPWLPVRVPFSVNKVEALYRLFKKISSTFIGDGLINKIRLDEVAISHMDTVSPPAVVGRSCLAPPPRDCHPSRLARRSAAPGEAAEIVTILHPARYGESHEALKCVDVFKEFHQTRTKHMKLTWMGTCNVSAKFDANPIELVVMTYQFTGCKIYLD

SEQ ID NO: 78737 - protein, 428 aa, Zea mays
  Coding DNA Sequence Number=SeqID_35362
  Gene Ontology: Mol. function=hydrolase activity; Cellular component =vacuole; Biological process=lipid catabolic process
  Homolog annotation: Hit_ID=Q84QY3; Match level="QueryCoverage=96%, HitCoverage=95%, E-value=1e-180, Identity=78%"; Hit description =Patatin-like protein
  Pfam annotation: Domain name=Patatin; Domain location=36-238; Score =253.6; E_value=4.2e-73; Accession=PF01734.13; Description=Patatin -like phospholipase
MASYSSRRPCNTCSTKAMAGSVVGEPVVLGQRVTVLTVDGGGVRGLIPGTILAFLEARLQELDGPEARLADYFDYIAGTSTGGLITAMLTAPGKDKRPLYAAKDINHFYMQNCPRIFPQKSRLAAAMSALRKPKYNGKCMRSLIRSILGETRVSETLTNVIIPAFDIRLLQPIIFSTYDAKSTPLKNALLSDVCIGTSAAPTYLPAHYFQTEDANGKEREYNLIDGGVAANNPTMVAMTQITKKMLASKDKAEELYPVKPSNCRRFLVLSIGTGSTSEQGLYTARQCSRWGICRWLRNNGMAPIIDIFMAASSDLVDIHVAAMFQSLHSDGDYLRIQDNSLRGAAATVDAATPENMRTLVGIGERMLAQRVSRVNVETGRYEPVTGEGSNADALGGLARQLSEERRTRLARRVSAINPRGSRCASYDI

SEQ ID NO: 78738 - protein, 220 aa, Zea mays
  Coding DNA Sequence Number=SeqID_35363
MAHAEEVKDLSDLDNTLPDISLPEASGMELALPSDAGKGPSSNPATTGDGKDPAPAPAPTGEDTLKMVVEPATEDPAAVAGPSQVPTFGPAHATATDNTIFVAASTVVPADDDSGASDEGLDYFAALDVDVAEPSPRVEGSGGLPGVNTRYRRRRAVAKQRVSELSQSGRRHRIGMERGRLRVDQTGLRLSLIFVEGLQGEDAVSVDEVFGRWFVYVGDG

SEQ ID NO: 78739 - protein, 251 aa, Zea mays
  Coding DNA Sequence Number=SeqID_35364
MKWKTGQCGLWGVMCRGLRLCGVGISVDPTKSLAGVKATASGAGKPPLGELAKGRRLPSPSRTDEAAARVADFDTDICVGDYLVGLDEGQLAVVPTPVVATLPTAAVGAKGASQDPWSAFRASGAIPSATIAKDVVGSMSRQLRQASQQLSQQLKHAADFADHVASGALTAEFAAEVERLRAQHADAVREKSAAESKNHRLTKRLAAMEAEKADLRCQLVEERREANKVVADTQAAQADAMLARAEGSLAC

SEQ ID NO: 78740 - protein, 36 aa, Zea mays
  Coding DNA Sequence Number=SeqID_35365
MGSHDPRAKRESRLMGKEEGVEVDLREFQDFGEFED

SEQ ID NO: 78741 - protein, 150 aa, Zea mays
  Coding DNA Sequence Number=SeqID_35366
  Subcellular localization annotation: CTP_CleavageSite=80; ConfidenceScore=5.29e-01
MGPMGVLLTLPSRSCVQVQVPVKAASWGPLPTLLGMLVSSLDTSSLYPRGARYQGGVGSATHNKDNSMTYSTSVGSRWKRAATISTAYNVLYDPPGGVLSSQASGQHWRRHRIHQSQRDGAAARLASHPKELGREGWSRNSVRCPPSRGW

SEQ ID NO: 78742 - protein, 491 aa, Zea mays
  Coding DNA Sequence Number=SeqID_35367
MAQRHISLSCAARGLTSGSARWLTLRALGHVEASGLRAEQGVGALAVWSGHVSAPDPRLTLIKAWVFFALESRDPIVSRGPDPVPGVWFVPAEVLNLARRSGLCIQGSGTFPWGFGPTVATLEYIVSFDHVAAPESPTWRGRVLFTAVLTVALGPASGEDMSLQMGPKLEPTPMEDDSWARAPVSETGLLVLAEVKRRTTADGGVLLTRWFAFSAHGGRRLRSMTRGPGPRVRGWAAAFGGGEEAHYRRRWRAPHVAVCLLRARRPTPKEYDSWARAPVPEAGSLLSAEVKRHTTADGGVLLTRRFAFSAHGGQRPRSMTRGPGPPCQRLAPVPEAGPPWHMSGEIFSGVSGRQWGNPSLKRDSPERATMALLDPPECLQPEVALNLVRNLLGWGVSAFAGKICVGASPHGDLAAGEFVFFVSNLPSGLALSIPSFFVLLLEGLGLQPLHITPCFILQAAIIAYLHRMSVGETLLPASSSSIRGEGCSPAS

SEQ ID NO: 78743 - protein, 117 aa, Zea mays
  Coding DNA Sequence Number=SeqID_35368
MGISRTPKAAVTPTTLGTSHYYPKLLYINGGVDNDPMSDDEPTLLGEEPRSVKLVAAGIVKATSKDTMPPEDRIQLNLFLGTRRPRMTKLPWSGDYVCKGTLIGVSPEPPKSVVTSW

SEQ ID NO: 78744 - protein, 336 aa, Zea mays
  Coding DNA Sequence Number=SeqID_35369
MYTYSHDANTHEIYVQHIARYDPILPYASFEVVSHDVDVSHQRENSFGYDCCKQCDLRVTNSKETKLLIMITAINMVMELSTSMAFSSDGVIVFHTSTRKINPYLGAITISAEVTRLGANINDIVVSNRYKMPQPPLDCTQQTRACGLSHKNRVATRRTATSPLGFATAHWRMHEARQIGGCHRACGVDGEPRPPLGSSRRRTYGKPSTSCLQAPDQGAAVIAPPDRGIVATVQPDRGAAVVVPSDRGIAAIAPSGTYRRRATRSRSNCRCAFGSKSHRCCAFGSGSRRYRASGFGIGRRSHDQRPPPRAPRWATVARVSWWGRKKLNHSGLGLFL

SEQ ID NO: 78745 - protein, 60 aa, Zea mays
  Coding DNA Sequence Number=SeqID_35370
MVECADCGNSKQCRSQKSELKSQNASDSPVCHRTVRCRKRTKDFNGQQLQTPTGLSDTCD

SEQ ID NO: 78746 - protein, 111 aa, Zea mays
  Coding DNA Sequence Number=SeqID_35371
  Gene Ontology: Mol. function=metal ion binding
  Homolog annotation: Hit_ID=A6N0E1; Match level="QueryCoverage=96%, HitCoverage=41%, E-value=1e-36, Identity=76%"; Hit description=S -ribonuclease binding protein sbp1
MKKKRSERLRQSILEKVQAKQFEALASVEDKILRKIRDKEAEVETINKRNSELEDQIKHLGVEVGAWQHRAKYNESMINALKYNLEQIMGKRFPAYIKDDGRPKNSSTARK

SEQ ID NO: 78747 - protein, 59 aa, Zea mays
  Coding DNA Sequence Number=SeqID_35372
MHFNPFNVGNASHFDGATTDGLYLIEVDRILHPREQKAIEAVVRSLFWKKIKEEGDIAI

SEQ ID NO: 78748 - protein, 146 aa, Zea mays
  Coding DNA Sequence Number=SeqID_35373
MGKSKKGGSSSHHSGDKRKRELSPPSEDFGDSEYSEEEFSFESEGSPAYASPPVSSDDSDNSQGIAAEVWTYIWAVERSGLEGLDELEISSDEEDSSDSSEEGSGDDGDDEGDNGDKGDSDVGKGDGGNGKDDGGSGRATGKAPLA

SEQ ID NO: 78749 - protein, 212 aa, Zea mays
  Coding DNA Sequence Number=SeqID_35374
  Gene Ontology: Mol. function=voltage-gated potassium channel activity; Cellular component=voltage-gated potassium channel complex; Biological process=potassium ion transport
  Homolog annotation: Hit_ID=A2XEU4; Match level="QueryCoverage=77%, HitCoverage=33%, E-value=9e-54, Identity=68%"; Hit description =Putative uncharacterized protein
  Pfam annotation: Domain name=K_tetra; Domain location=15-92; Score= -5.8; E_value=0.0021; Accession=PF02214.13; Description=K+ channel tetramerisation domain
  Subcellular localization annotation: CTP_CleavageSite=57; ConfidenceScore=5.32e-01
MGTIVHGGRSGMMKQLNVGGKLFSLEASSLSLPMSIGSPSPTPTFVDRDPALLSAVLAAIRSPSTAAPDFPARVLLDEANFYGLHAQLLAALSPPPLRGFSASLASTLCPSSEPFSTALAPHHDGSLCLAHGAGLVTYYSPALDHRATIRTHLHRVTSLLQLPSSLAVLGRLAGKVVVRLSHRHQVEWCTCRHLVWCLRHSLVPGHLATLAI

SEQ ID NO: 78750 - protein, 78 aa, Zea mays
  Coding DNA Sequence Number=SeqID_35375
  Homolog annotation: Hit_ID=Q5NKP3; Match level="QueryCoverage=78%, HitCoverage=24%, E-value=1e-22, Identity=85%"; Hit description =Putative uncharacterized protein 9C20.7
MGFKPVTSQANVLVATTTPHEALALASLIDDEKKLGDCQFDLWKQYYVATCVAVFGKLRRSHRLDAVQSGCIALSIFK

SEQ ID NO: 78751 - protein, 366 aa, Zea mays
  Coding DNA Sequence Number=SeqID_35376
MGSACVAFVLLLLEERDLAGDDDHQFGGGEKQAGLQPLPRPQLQGSSSSLLGRRAGQVGACLRVGRRPASSSGIRGRKASSSSAEEASSSHAGEGELLLPGQGATVRPPPGRRPCRARACYVQVLPAPSAAQHVVRCEGGTRVLGRSRSRSCGENGSEDLSVRFGAAVVRWCVVGGQVATVVGATCAPGLRLFGFNGWFSSPVRGHERGPSSGSVCPGAIAAAVLPSETEVAAALLVQRSPVSHPEFVVPQALCYRTFGRSAMSRSRRQRRRCGQKAELARKEASSAWEHMVSLAEELADATERPAEASALGRNPCGEPDCGGPSAVLASSSEVEILLPESLSEAGPGSAKGGNDAEGATAPSADV

SEQ ID NO: 78752 - protein, 325 aa, Zea mays
  Coding DNA Sequence Number=SeqID_35377
  Homolog annotation: Hit_ID=Q6QP51; Match level="QueryCoverage=54%, HitCoverage=77%, E-value=3e-28, Identity=46%"; Hit description =Putative growth-regulating factor 1
MSTARGIAPFLKAALPTRILERHGRSLHQHASGSSPYDTGAGSHTSCKLTRNRKAKPPHAERVTAPRLQALLHRRNQRSKGRTAIQVVCNRTAVTHPFGFVASGMEAQAHTSWIGKGDISEGILLREGSGPRALLLIRGSKAGPSEGGSKAGPSEGFDSCPRARIASDDSGYVRYMDEARATLPSRQGRSDHSHFALSLTDLTGKQRRSLRSDCCATHQDEADNSQVQHQAQQEAPPRPTPGLGLNLGLGRWSLPHPTPGLGLNLGLGRWSLPHPTPGLDLNLGLGRWSPPRPTSGLSLGRSLCLARPWARTDRAMGIHHYPTPS

SEQ ID NO: 78753 - protein, 201 aa, Zea mays
  Coding DNA Sequence Number=SeqID_35378
  Homolog annotation: Hit_ID=Q2QYD3; Match level="QueryCoverage=37%, HitCoverage=24%, E-value=1e-24, Identity=72%"; Hit description =Expressed protein
MDLSSRWAEPLKEAEGEVDQWMAYWCRISPACLLRVAVCAAAGAAALAGSADGNRDGLHPLGLSIDQQTHLVKICSQVDLCNFDGTHGVKFSSDDAKEVVHYQTISPKSLAKSVLEEGGWSNFMCSREDTQNNVDVAIVFIGSKLQSSDISKDKQVDPALADTLKPWSLEQKKGVAVFSRNMRPLSSGVNEGRRLWKSDIT

SEQ ID NO: 78754 - protein, 87 aa, Zea mays
  Coding DNA Sequence Number=SeqID_35379
MEHRPGPERLLKTAHLELDGKLFVNTQQAPTWRANCRRFETGGSLGRRVKCRRVPQPRWVGVRPSAKGKRKERIQVYNGGCSKALRV

SEQ ID NO: 78755 - protein, 155 aa, Zea mays
  Coding DNA Sequence Number=SeqID_35380
  Homolog annotation: Hit_ID=Q6J9V9; Match level="QueryCoverage=42%, HitCoverage=23%, E-value=2e-09, Identity=53%"; Hit description =Putative uncharacterized protein
MDGGNHSRSGESPLPQHFQGLEKGFEVLLSLVRGPMTLGVGGGGDYPLGERWEQLTVIPEGPGKADPPKGILPREGTRLRASLLIRGSKAGPRRVQQPPQIAWALHPLLVRGSKVGPPKGSTAASGYSGSVPITDQGFEGWPPKGSQSPQTPSEG

SEQ ID NO: 78756 - protein, 245 aa, Zea mays
  Coding DNA Sequence Number=SeqID_35381
  Homolog annotation: Hit_ID=Q5GAU8; Match level="QueryCoverage=13%, HitCoverage=23%, E-value=9e-10, Identity=90%"; Hit description =Putative uncharacterized protein
MTDAEKEVATERRMDSPPRCDCGDRAVIDEDYENQFCCPNIDYPYGWRKCRFREWLYGPLSHWPEPEVKEKRYNQWPEEEVKFDPVLCKCGIEAKYGLVPSELGVEYKREAKSAFYESPKRAEYRRLKAADEKRAQDAREWEATQAEKQMLDNLADRLKGTAAAGSGARGGRGGNWRGGRWPGRAGAVARRQARGELGSRCLARSVGGAGGAAMERRRGRSAMAKKNENDGSEWKEEETRLDSDA

SEQ ID NO: 78757 - protein, 190 aa, Zea mays
  Coding DNA Sequence Number=SeqID_35382
  Homolog annotation: Hit_ID=Q6J9V9; Match level="QueryCoverage=34%, HitCoverage=33%, E-value=9e-07, Identity=43%"; Hit description =Putative uncharacterized protein
MEAQAHASYNRRAGCYVRAIAPPLAPLPRLLDCGTSTATRGNPAYDPAVSARRDGQYGQKWAGSDGGGRRAEAAVTSSARLTRSERRFAFAIMTASKKGPGKGDTPKRILLREGNRSRASLLIRGSKAGPSEGFNGHLRALGFRAHYWSEVRRSAPRKGSTAASGHSGSTPTTDQGFVGWPSKGSQPPQT

SEQ ID NO: 78758 - protein, 270 aa, Zea mays
  Coding DNA Sequence Number=SeqID_35383
  Subcellular localization annotation: CTP_CleavageSite=38; ConfidenceScore=5.77e-01
MSSRSLMHRVFPPSKPPDGGYPPSFRLVVGGRNSVGVASPAVPPRRRSPKTVTTSPWVGRSKPGCDLGPTLSFKDVHHPRWGGCRAEPELYLPRGFVGHPLLRRSRERALAGPAGGSDFDNAGPVDGRRRLPQRVGLVGLAPSAPSCRKAAAAPCAREDRPRCRALLGQRSCSGAVLPLHRYGASAGRSVPCSSGRIRVGICWWADGPCCRCRGGGGSRSPRRRRDHRHHPRFGPPTLCTCPRPSSVGVGEGKVAAAFALRPSPLQFGHP

SEQ ID NO: 78759 - protein, 194 aa, Zea mays
  Coding DNA Sequence Number=SeqID_35384
  Homolog annotation: Hit_ID=Q6J9V9; Match level="QueryCoverage=33%, HitCoverage=33%, E-value=7e-07, Identity=43%"; Hit description =Putative uncharacterized protein
  Subcellular localization annotation: CTP_CleavageSite=94; ConfidenceScore=5.45e-01
MQAGLEQKKPNRRARCVQPPSGYKRLFAFSQTNGRKGRAAMQAACNRAKWAGRSSGRVVSQAHVPSGGSERTLSHGVKTTRSRSERRFAFAIMTASKKGPGKGDTPKRILPREGTRLRASLLIKGSKAGPSEGFDSRLRSRGPYTHYWSEVRRPAPQKGSTAASGYSGSAPITDQGFEGWPPKGSQPPQTPSEG

SEQ ID NO: 78760 - protein, 55 aa, Zea mays
  Coding DNA Sequence Number=SeqID_35385
MGSRHSACSAEAEWRGGDKDDGYDYGNGCPHCNHCSGEDEAVEGDFQEFQDYDEF

SEQ ID NO: 78761 - protein, 109 aa, Zea mays
  Coding DNA Sequence Number=SeqID_35386
MESALHFSSVYTEPKSPWSATVDLGYRRAFAATEESPEFALSPLAPPPSRFAVGRPPPVPLSRPSPHRKVPRALPNLPGHPGRPKDPQSPRAPHLRRVLRRGNRRCHLC

SEQ ID NO: 78762 - protein, 132 aa, Zea mays
  Coding DNA Sequence Number=SeqID_35387
  Gene Ontology: Mol. function=flavin-containing monooxygenase activity; Cellular component=intrinsic to endoplasmic reticulum membrane; Biological process=electron transport
  Homolog annotation: Hit_ID=Q9AV08; Match level="QueryCoverage=78%, HitCoverage=22%, E-value=1e-20, Identity=53%"; Hit description =Putative flavin-containing monooxygenase
MDTHWGNFHSQFQIRKAFSQQTADTRRFPRHQEVLRYIQAFARRFQLDGIIRLCTEVLAVSKDNDEGSSGGWMVRWRRNVVGDESEQEQEGEEVFDAVVVCNGHYTEPRTAADSIPGLDAWPPGKQMRGQRR

SEQ ID NO: 78763 - protein, 137 aa, Zea mays
  Coding DNA Sequence Number=SeqID_35388
  Subcellular localization annotation: CTP_CleavageSite=80; ConfidenceScore=5.09e-01
MQAACNRAKWTRFSDSRHASMEAQAHASRNRTGGASGGSSGQRFAFAVITATKKGPGKGDTPKRILPREGTRLRASLLIRGSKAGPPKGFNSRLRSRGTYTHYWSEVRRPAPRRVPRPPQATRAPRPLLIRGSKAGP

SEQ ID NO: 78764 - protein, 131 aa, Zea mays
  Coding DNA Sequence Number=SeqID_35389
MSGKKTTASSDDGTPKKAKVVVEDEEEAGLEDEEEATVTLSMEKDALECDIQSEVFMASQITMHVYIQYILIVQERTFWMCKVLHPHGRNNYMLRFVGAFLLIVRNDLFSIEDLCSMISKDPWVIFVTYLT

SEQ ID NO: 78765 - protein, 383 aa, Zea mays
  Coding DNA Sequence Number=SeqID_35390
MLTKESYGRVRVHVSDKADRAEGLLCLRDTDTSLVTFREKLRCRWRGSSSTLGVNSTFGEVRPSLGRQHGRRISEASGATPKDDVSTMPGPSPLGSPPRTRPEQTARPAAPKPQPAVPRGHQPGSWPRQPDSGAGPASGRPSQAPADEAPFFEPTSPLSVLAPLPPAPAHRRAAEGLDSHNEQTPALKVPLQTELRFRPRGYKQPPHRRACGTIDSGRLASNLHSSSHGPRTDAATGGLSFASPLKGCEPDIKAKEPKVGPRVALTVSSAERPTSLAATTSAPTAASTCPPTPHRRAPAAPKRTGRSSLPSLPRKRGQRTECCILAGQQQSALPGMARGRLLRRAGGQFPPPEAGRRGGPPTRTGGRAPAQPALRLSLDDENP

SEQ ID NO: 78766 - protein, 81 aa, Zea mays
  Coding DNA Sequence Number=SeqID_35391
MEGHATQHSSPAAASFAHTPAGSEYSEDGVGDEPSATVPPPEKLHGLPTRQIRAKTPPPLLSVRRHVACGVSGKGRSSIRR

SEQ ID NO: 78767 - protein, 119 aa, Zea mays
  Coding DNA Sequence Number=SeqID_35392
MTSARRTHKVTCVQFASSDDTVLSESVGRAIDMRLYPNRIRCTILGKTHKKRFTNKWLHFTVGRRRPFINQLHRGRGAEKVQFTIKCFSRYMRRSGFHPNRIRKDVRVQLGIQPMNFFM

SEQ ID NO: 78768 - protein, 458 aa, Zea mays
  Coding DNA Sequence Number=SeqID_35393
  Homolog annotation: Hit_ID=A3A7I9; Match level="QueryCoverage=33%, HitCoverage=36%, E-value=3e-30, Identity=51%"; Hit description =Putative uncharacterized protein
MGEKQAPDATAVAAAGAGDQDDGTAPPPPPPLDGIQYCSEHPYRPANAGAAAAVAGGGICAFCLQEKLGRLVSSSKSSPFFPLGGHPPPSGSPSSPPSFRRAAEPPPPPPPLHPSGASRKFMSFHRKKTLSSSSSSSAAASAGGGGLKRSKSVAPRPELEQFPYSSSASSLAAESPRKKSFWSFLSISSSSAYAQQAAAAAAASTPYATNMGAAASRRKSVSVASAAWASRGAGAQDHAAARRGRDSGGVRAGAVAGGQGQAREPQPEPVVDRCLLRAFSRSFSGDFLERLSFGFGDCTLRRVESHREPKPHRMRGGGGGGGGGLGNLHGAGADDADADDEDDDDVYEHQHRIKCAGFFGALGPASSSYWLSAAEAGASVTKRSSGRSHHRSWAWALASPMRALRPTSSSTSTKTITAVPPPSHVTVHGNGDSSASALSIPSPTPPPSSSTEVTAAEN

SEQ ID NO: 78769 - protein, 173 aa, Zea mays
  Coding DNA Sequence Number=SeqID_35394
MGDIRRLSASSLEERNSAGVGTFQPSFGFKDFHQPARPFPFAGGHPRRFKDVHHPRWGGGRAEPELYLPCGFVGRPLLRRSRERALTGPAGGSDFDNAGLVDGGHRQPQRVGLVGLAPGAPSCRKAAAAPCAWEDRPRYRALPGRRSCSGAVLPLHRYDASTRRSVPHSPRRI

SEQ ID NO: 78770 - protein, 162 aa, Zea mays
  Coding DNA Sequence Number=SeqID_35395
MVVAGGQEQRSRRQPSLRPIRGQRENPLPRREDNVPVFRSSNGSRTHNGCPANHSPRRINSAAGQAGPGKGDTPKRTLPREGTRPRASLLIRGSKAGPSEGFNSRLRARGPHTHYWSEVRGPAPRKGSTAASGYSGSAPTTDQGFEGWPPKGSQPPQTQSEG

SEQ ID NO: 78771 - protein, 192 aa, Zea mays
  Coding DNA Sequence Number=SeqID_35396
  Homolog annotation: Hit_ID=A2X5J3; Match level="QueryCoverage=92%, HitCoverage=79%, E-value=5e-47, Identity=58%"; Hit description =Putative uncharacterized protein
MPPHAPPADQKAWPRQRHAEKAAGAPAPREPLVQRRASFHARCTPEKEQQRDHLMRQKPRTHPDLLAGVRERGFRRAGVHGGNATAAAVPWGRRAAPSKALVTVAVHRSMWPLHVMARAEWRVADLVAAAVELYVKEGRRPPLPSADPSAFGLHYSQFSLESLDPGEKIMELGSRSFFLYRSSSCGSLYASS

SEQ ID NO: 78772 - protein, 339 aa, Zea mays
  Coding DNA Sequence Number=SeqID_35397
  Subcellular localization annotation: CTP_CleavageSite=9; ConfidenceScore=5.47e-01
MSSRSLMCRAFPPSKPPDGGKPPSFRLIVGGTQLRGSWYLSAIVRLQGFSSASPAAPPRRWSPKMVTTSSWVGRSKPGCDLGPTLSFKDAHHPRWGGCRAEPALYLSRGFVGHPLPRHLRERVLTGPAGGPDFDNAGLVDGRRRHLQRVGFVGLAPGGPFCRRAAAAPCTREDHPRCRALLGRRSCSGVVLPLHRDDAFTRRPESLGSVGLAVQGSSSLVKETPRPLFDEPRPGPGCPLAGPTSELISRGLRSGWRPREMVGRGPRGDRPNRLLGPDSRRSPWERLPGRGDDVVLRSGEPRTASPSEARSGLAEGVVDAEGVAAPFQRQDPSLQDQIVL

SEQ ID NO: 78773 - protein, 66 aa, Zea mays
  Coding DNA Sequence Number=SeqID_35398
MAGRKIRSPGAKERWLADEADGRQQGLDRSDSCPSAKLRCSSDSHDIMPAGCQDLSGCHIGMYLER

SEQ ID NO: 78774 - protein, 100 aa, Zea mays
  Coding DNA Sequence Number=SeqID_35399
MAAPAPSPSLGGGVTLSPGPTGGRDPCAGAQALHGPCADATPGLSPGPHHRRTWWHSWNMVEECGGIRGRHGRLDPSFPIPATDLSSPFSPPSSPCLPLA

SEQ ID NO: 78775 - protein, 447 aa, Zea mays
  Coding DNA Sequence Number=SeqID_35400
MMTTSSMVGRSKPGCGLCPTLSFKDLHHPCCGRGRAKPGFYLPHGPAGRLFLQHSGERALTGLAEGANFDNAGPVDRKCCQLQRAWLAGSVAASDGASCRLIRAWPSAHRTSGCCAVHTRGPSKTSHAARAVFVFLDCLVLTPARRLRAEVAAVVGAEVVVARGGFSADETIGATRGQTSGSLALMACPRPSSGDVGEGLVTAASALRSSLLLFSRPKRRSLSLLVQRSAASHLEFVVPLALWCGDCSYPREWNRSSVCNGTLSTDNPWLLCDELEPEAAVSAWTEAESARKEASLAQEQVASQAEEVQQRRLELGQVIRERDQPRSHAAEAVSRADVLRGQLAEATERPAEVSARVGTLEETLAAMAQARCWRPPSRWRSFRPCRRPRPGQIPPKVETTPRVLLPPLSMSEPAGTVCLYRIAYPSESYFSRKVMSEDSVIDIVEKA

SEQ ID NO: 78776 - protein, 54 aa, Zea mays
  Coding DNA Sequence Number=SeqID_35401
MAQQCQSSTSITGQSAAGGGVTVDMAKSGPAGPGKGIFRKGSFSVKEVGPEPSY

SEQ ID NO: 78777 - protein, 86 aa, Zea mays
  Coding DNA Sequence Number=SeqID_35402
MPLEIDRWSSDFWARLDVRWRTGHALFIVRCPGMGVSAFCARCARIKCPADMSGGTTGTVPVRQTQRSLRCSFAFLLNPTLGLFIG

SEQ ID NO: 78778 - protein, 85 aa, Zea mays
  Coding DNA Sequence Number=SeqID_35403
MTQPLGGAKSGLRRESGNPKEEAYLSSCPMERDIPMTQDPTTNLVEGALKGKTKVKGKPRVTSKRTTAHGFIWGGEASDSTLRGD

SEQ ID NO: 78779 - protein, 229 aa, Zea mays
  Coding DNA Sequence Number=SeqID_35404
  Gene Ontology: Mol. function=Rho GDP-dissociation inhibitor activity; Cellular component=cytoplasm; Biological process=negative regulation of cell adhesion
  Homolog annotation: Hit_ID=A2WY89; Match level="QueryCoverage=90%, HitCoverage=89%, E-value=2e-91, Identity=81%"; Hit description =Putative uncharacterized protein
  Pfam annotation: Domain name=Rho_GDI; Domain location=11-227; Score =14.6; E_value=7.9e-10; Accession=PF02115.8; Description=RHO protein GDP dissociation inhibitor
MDDTEREKEKEKEKHDCGTDVEDEEEDEEGNKRVVVLGPQVPLKEQLELDKDDESLRRWKEQLLGQVDTEQLGETAEPEVTVLDLTILSPGRPDLVLPIPFQADDKGYAFALKDGSPYSFRFSFVVSNNIVSGLKYTNTVWKTGVKVETQKMMLGTFSPQLEPYIYEGEEETTPAGIFARGSYSAKLKMLDQQSLYIMPRRSQFVDDDGKCFLEMSYYFEIRKEWPGGQ

SEQ ID NO: 78780 - protein, 75 aa, Zea mays
  Coding DNA Sequence Number=SeqID_35405
MGNQRKWEEAVKEKMNRTTWENLHASGPTYGSFPIEKQTHGVEIGVTAIDDEAHGILCLVMIFKSPLLLLLGGRI

SEQ ID NO: 78781 - protein, 120 aa, Zea mays
  Coding DNA Sequence Number=SeqID_35406
MEVAGGAMGGWGRCCSIAGSKRRRSLGQHPLKGEWRLTPVEQGSEERHGWGVWSREARIWAFPGRAGKSRGGRRHGKGASRTAWLLMAGEQEDDGWGKMASRGSSHRSRNHQQKTYSTSA

SEQ ID NO: 78782 - protein, 157 aa, Zea mays
  Coding DNA Sequence Number=SeqID_35407
MAPPPAAPRCACLASARQNAYERLGVVDSSVHDAVDPRLYKYILVDVVYIGVGISGGVRCLFEVCGYMPRCGYTRNEERCMYCDTTLRSLLYDRVKDAHDGCVIKGDVVAGEKGLIRVLSQPKNYGKQVAFISRSWLKLKNNPITYAPKCFRSFSSN

SEQ ID NO: 78783 - protein, 190 aa, Zea mays
  Coding DNA Sequence Number=SeqID_35408
MVVVVQPWADRQGKPGGLVFALLLLIGRQAFNNRLHDIVWVYIGVIFRIDHLSLVFSRSRHLIPSGVTKKCVGADLGAKHWKMNHLAVLSTEARMVQDSGSDGLRPGRKTDFFLCTFERSALGARMVHDDAKGRILRSRSRSCLLGGTPSGRRYHRVCLRVGRPPNMSLVDVEPERGEDSRLRKAKLGLN

SEQ ID NO: 78784 - protein, 132 aa, Zea mays
  Coding DNA Sequence Number=SeqID_35409
  Gene Ontology: Mol. function=phospho-N-acetylmuramoyl-pentapeptide -transferase activity; Cellular component=endoplasmic reticulum; Biological process=polysaccharide biosynthetic process
  Homolog annotation: Hit_ID=A3BN31; Match level="QueryCoverage=49%, HitCoverage=15%, E-value=8e-18, Identity=69%"; Hit description =Putative uncharacterized protein
MAVRRRTAAAAAGDPPPQAPPADEAAAVAPDEPVLRAPNLRVAAVAAALFLAPFSYLAFVHYSLTADLQRSILKCGAMSLVGFCVALKLIPIAARYHLRRRMFGYDINKKGLPTGQIKVKTCFADLLMQQYC

SEQ ID NO: 78785 - protein, 38 aa, Zea mays
  Coding DNA Sequence Number=SeqID_35410
MGSRLGRKNKAKVEKMNETSDDDENDDSFAQSLPPPFN

SEQ ID NO: 78786 - protein, 149 aa, Zea mays
  Coding DNA Sequence Number=SeqID_35411
  Gene Ontology: Mol. function=microtubule motor activity; Cellular component=microtubule associated complex; Biological process =microtubule-based movement
  Homolog annotation: Hit_ID=Q7XCW8; Match level="QueryCoverage=26%, HitCoverage=3%, E-value=4e-12, Identity=92%"; Hit description =Kinesin heavy chain, putative, expressed
MTGDKQRQKLKQKPSSKISNTYIKKVDKKAATPYLIKKKKNGKVIAIKANIQANKGKGAKRIWVPKEIISTMKSTKKEAKIEKMKYEHLTREAALAEKELLEEEYKKKFDEAKKELSLENDLAGMWVLVAKLKRGALDISDLNVDDRTK

SEQ ID NO: 78787 - protein, 182 aa, Zea mays
  Coding DNA Sequence Number=SeqID_35412
MNKTPALKVPLQTELRFHLRRYEQPPTSGGPAEQQKADGRLAAARSSSNDNDFYSERPNSSSDDLRADAAAIRPSPTSPLEGRGRAEGCRVGGSPPTTRGLGLTRHASWPRAEEAKPPRAVRATAQRLRAFLHFRPDQRVKGRTAMQAACNRTKGAHPFDFDASSMEAQAHTSCNRRAGCYV

SEQ ID NO: 78788 - protein, 158 aa, Zea mays
  Coding DNA Sequence Number=SeqID_35413
MEGAVDALMTVVVDCSCSSVQAAVEGDHAVYQRPWSGVGASPDLIVDGDQGRISGLGVAEALNEVKAGRRNSHHLPYVIVAVGEGDDDDVHGARPVLHREIEAQELADPVVLRDRGEALIEEVLQAVVVGFDDEAPPEIRAPMPYHLDEADELTPVGG

SEQ ID NO: 78789 - protein, 246 aa, Zea mays
  Coding DNA Sequence Number=SeqID_35414
  Homolog annotation: Hit_ID=Q5QLJ2; Match level="QueryCoverage=20%, HitCoverage=9%, E-value=1e-17, Identity=90%"; Hit description=STAM binding protein-like protein
MWRATPSTSHTTVTADERNHREGLTPATRSFSLCCYYSWGWPSASEGQWPPHPPPATQQPPVALMECFLRLAELNTAKNLETCGILAGTLKKRTFYVTTLIIPKQKSTSDSRGGNAENPNVTCSDMLADEVQVDLHVLRMLMLHEIGGEVDGADVVAVDKGGALKGTVELVEELAHPRGLRHTIGYNAVLGRCAGAVDDELPLGGLGDEVGAQEHGIAGSGPTRVGAADPVNIGVDHELRCWGWSE

SEQ ID NO: 78790 - protein, 94 aa, Zea mays
  Coding DNA Sequence Number=SeqID_35415
MTEDENAESLRDHGGALPLMFILEDDVVVASLRGGVQHPVDEGVILCGGKENRRGWRAYATPSNAASLPLDRHGPSVEVPDNWPLRAEDDVILG

SEQ ID NO: 78791 - protein, 125 aa, Zea mays
  Coding DNA Sequence Number=SeqID_35416
MYLVFWFLHLSESLCKNDVRCTVCVNQNIMDQESLDDTRYNHGIIVRIVFKVKIFLGEAGSELEPPVIGSTSFVTEGATAWLLYEAIVITVELRYISSYHICFHIVLPKIRDPIKKKANGSRTIV

SEQ ID NO: 78792 - protein, 176 aa, Zea mays
  Coding DNA Sequence Number=SeqID_35417
MSRCLDKADELLLIRGEATVLWRQCTAEVGHRSRLLVQDGSAPCARGIAFNCEHLPKVRESEDQCCLNKVCRFLHALTTHHWSDVKRILRYIKFTLEDGVKIIGPVILMIDALQEVLKYILVGMWCSSVIASSPQPQGLVLKLNIKLYPAALQIDVGAFTFTRVEDFLSSCCKDLV

SEQ ID NO: 78793 - protein, 250 aa, Zea mays
  Coding DNA Sequence Number=SeqID_35418
GTGGGRSTAKRLGGGAKGLRRAIKRDRRQYKGREGAGEVPYLKAGSGDSSVAAWRDGGPGRRWRTSAAARRTAGERGQREIGRGRGNWGASWVANVEAKLTVAEGTAELQRRRGNGLGRRWLMAAALWRARSVGEVEEGSAGALLKDCQGRRGMDGFWSLDLEATAQINTLYSVKRYALLTVDPEIHGFNPIRSLWDQRIGLLRETSSGAAAPYVGASPVVGPSPNTNPARGGTAAKVPAPVTNSGDIVA

SEQ ID NO: 78794 - protein, 102 aa, Zea mays
  Coding DNA Sequence Number=SeqID_35419
MALPVDVAGLCPRLGVMEAPPKPGSKARAESEPWGPAKWSSSSSGAEPESEPWVGRSGVRRLLGLSPSPSPGSGGAEFAVFRGLARVRALGRAERSLPSSGA

SEQ ID NO: 78795 - protein, 86 aa, Zea mays
  Coding DNA Sequence Number=SeqID_35420
  Subcellular localization annotation: CTP_CleavageSite=9; ConfidenceScore=5.14e-01
MKLWKETSRSSKTTTSSRRGLAATRSRLPVKAAFIYVSFPHFDLLGKLKEKGRMLHAKRRAAEGQGSRMRHAKRRSRSKTPAVSEC

SEQ ID NO: 78796 - protein, 138 aa, Zea mays
  Coding DNA Sequence Number=SeqID_35421
MRTNRSPPITFLRNRFKESKGYRRSNHRRPLRIQRLRTHLLSYFTIAQLPSGNGGGDSQYAAVASLVFKQSGDPGSIHAISSQKVERRSRRTIWEGSTLATNAVTVCHSASRHRDGEQENRMNEGAESSMDAFYTWSG

SEQ ID NO: 78797 - protein, 299 aa, Zea mays
  Coding DNA Sequence Number=SeqID_35422
MPVHATACASPVPPANPGVDTAKGREGDDHRDGPEPHAGDVRDGEEGIERVHDAARLGGDVSDAPLCLWLPHTAGRRQLHDLRASRRRSRAVLRGVFLVDDVERGIPEAVHPRADPVQWRCLSGERDPLVRDGVLLRLLHDDDALVLGVRGGSAQRVGRVPVVHVRPSFPADGSVGVGVVALAPGRCRLRWLQRNVCHHSFQLLDGSTCRDDRFFSRTRSVEHEDLKDVVGLKPLRAVVGLPGGWFFSRSLWERDLTGRSESDPGEGTDLVVSMLEQEHVSFGDSIGDMRPSDSRLERG

SEQ ID NO: 78798 - protein, 195 aa, Zea mays
  Coding DNA Sequence Number=SeqID_35423
MVLDLRVGCGARAGEDEARARTRIYSISRLGGRGGVGDRTTGRGHREAGELGVDDALGGERHGRGRYPRAGEDQPESAVAAKLALAVLERSAPWVRGGVEGAKAWLGGGGTAPHGTNTTVPMDGRAWWGRPSSLHGLRRPPWMEWGGGEVQIVGEGAVGEVIESSIGVVGAHLCDEEQQERITRQNLAHGCGRLR

SEQ ID NO: 78799 - protein, 125 aa, Zea mays
  Coding DNA Sequence Number=SeqID_35424
MGKEKMGSNKGAYAKKAASGGNDCPKVKPIEFVDMAATAIDDFVSRRGGSVHGSTCSSTFVVHAATELPRHATGENSDEAAVKNDSSSTGAGSPGYSRDGTRNGAKSTEPSSLGERELGLHLVPN

SEQ ID NO: 78800 - protein, 421 aa, Zea mays
  Coding DNA Sequence Number=SeqID_35425
  Gene Ontology: Mol. function=peroxidase activity; Cellular component =intracellular; Biological process=response to oxidative stress
  Homolog annotation: Hit_ID=A2ZK42; Match level="QueryCoverage=24%, HitCoverage=22%, E-value=2e-36, Identity=76%"; Hit description =Putative uncharacterized protein
  Pfam annotation: Domain name=An_peroxidase; Domain location=8-300; Score=-299.8; E_value=0.0001; Accession=PF03098.6; Description =Animal haem peroxidase
MANLSITNILEKMTRKDKDYRYMATSDLLSELNKESFKADQDLEPKLTITVLQQLEDASREMFLENGVALLGDVRNSWVGVWILQALFVKEHNAVCDAIKEEHPNLSDKELYRYARLVTSVVIAKVHTLDWTVELLKTKTMRARMRANCIDIGELVGLKGEEQLSKIGFEKKILSMGYQACGALELWNYPSFFTDLIPQNLDRTNRSERIDLAALEECVVVDRLPGVDIDRWKFDEPPSLYIFMNSSMHHLASIEKYVEKVCHICSGPLFNLDLDTLRYVSYIPNHCLLLYEVVTYAIHNVVLAGGLWGFPQKTIPVDPYIVNYTGVVFCQYSDYSNGHGIEDQTKELCKAIWLAKELLRVIGLQEEGSSLEFLRRGYKDATILQRNFVIDLLSYEDDSCRYVISANIQQRLINISTKGID

SEQ ID NO: 78801 - protein, 109 aa, Zea mays
  Coding DNA Sequence Number=SeqID_35426
MSGNDVGIARALGATKRFENSGNALSNEEKMNRAPEAQTPLTSESLDIIVSLHHLYFDPLEGGSMQPGSPQPIFTKALEVSGTVIWIPLVRYLLLSTEYSGDNLGWGGL

SEQ ID NO: 78802 - protein, 46 aa, Zea mays
  Coding DNA Sequence Number=SeqID_35427
MEFVVASKPLVRSSKYADVVLADYGTVDHWVKMTIAHGLTGQFGAH

SEQ ID NO: 78803 - protein, 145 aa, Zea mays
  Coding DNA Sequence Number=SeqID_35428
  Subcellular localization annotation: CTP_CleavageSite=43; ConfidenceScore=5.22e-01
MAPCAIILATSTPSFHSLGLGAVCHVVPRKRSPHSGLVRHAISAPQFEGQRSDFELDVALHRSQAEEAAEVEVELIRVQVVEADGCIVVALLMAEVCLGCNLQDLIGPPSSLSNEGLEDLLEGYDDLASHVVLRVFANDTVRAAR

SEQ ID NO: 78804 - protein, 83 aa, Zea mays
  Coding DNA Sequence Number=SeqID_35429
MKPARVGPRACRGFAHCLRMKGKCALGPFLSILVIECQLKCLKCEFMQWMNKVQIKSKAKGLFRSGAPDCPVGHRKVYGAFGC

SEQ ID NO: 78805 - protein, 118 aa, Zea mays
  Coding DNA Sequence Number=SeqID_35430
  Subcellular localization annotation: CTP_CleavageSite=48; ConfidenceScore=5.23e-01
MRLTTAKFSLRRNRKLRLARPQGSTSTSASEGGLCLARPRARPRKVVSASPDPGLGLNLGLGRWSSPHPTPGLGLNLGLGRWSPPRSTSGLGLGRSLRLARPWARTDRSMGDTSLPYP

SEQ ID NO: 78806 - protein, 269 aa, Zea mays
  Coding DNA Sequence Number=SeqID_35431
  Homolog annotation: Hit_ID=Q5JM77; Match level="QueryCoverage=34%, HitCoverage=29%, E-value=4e-31, Identity=77%"; Hit description =Putative uncharacterized protein OSJNBb0036G09.7
  Pfam annotation: Domain name=DUF623; Domain location=202-269; Score =48.4; E_value=2.6e-11; Accession=PF04844.4; Description=Protein of unknown function, DUF623
  Subcellular localization annotation: CTP_CleavageSite=64; ConfidenceScore=5.52e-01
MLLSVSRATGAAAGSAATARRAKPPPPLAFPSYSSLGSGKKQEVVVGSPTPPVPVAPLVHITIDCAGRRSVDAADPSLLLSLDAAGRRADRRWKQGRGSSRRPSSRRLASSSSSDDEYDEDSRNLFSSRSLSSDSSDFYSCPRRNASASRGRASVSGPCRALALAPAPAPPRRGASQSCRYSFELPRGSSATDGGFAVVKRSADPYEDFRKSMQEMIAEWPAGGAGGGGDDEGEHSAERLLETYLVLNSPRHYPAILAAFADVRETLFP

SEQ ID NO: 78807 - protein, 116 aa, Zea mays
  Coding DNA Sequence Number=SeqID_35432
  Gene Ontology: Mol. function=GTP binding; Cellular component =intracellular
  Homolog annotation: Hit_ID=Q5JM78; Match level="QueryCoverage=96%, HitCoverage=28%, E-value=2e-22, Identity=55%"; Hit description =Putative GTP-binding protein
MEADVRNTVTQAATKMKRKTQCINHFKSCPSISWRNRGGEQSVATANITGMDLATKSNTWSVQETSKNEARTNWDEFTRNYFLSRENLVSVFLLIDASIPAKKIDLDYASWLGQNK

SEQ ID NO: 78808 - protein, 197 aa, Zea mays
  Coding DNA Sequence Number=SeqID_35433
  Gene Ontology: Mol. function=carboxyl- or carbamoyltransferase activity; Cellular component=ornithine carbamoyltransferase complex; Biological process=amino acid metabolic process
  Homolog annotation: Hit_ID=Q8SA97; Match level="QueryCoverage=42%, HitCoverage=15%, E-value=6e-22, Identity=66%"; Hit description =Ornithine carbamoyltransferase
MAPPVDVVGPRPRLGDVEAPPRSRSSLSSVAVVESEPLGRARRRPSAEVRAESEPWGRAKRCSPSSGAELKSEPWVGRSGVRRLLGLSPSPSPGSGGAPESEPWVGRSGVRRLPGLSPSPSPGSGGAEFAVFRGLARVRALGRAKRSFLWCLRSGLTACQPHSVERHSSWSDAGGAVFLSGRSVERRSDGGHFGSVD

SEQ ID NO: 78809 - protein, 83 aa, Zea mays
  Coding DNA Sequence Number=SeqID_35434
MGVEGAGGGFIRCDGGEGGPGVAGDDGGGGCAAKVAWAAVVRCKGERGAVVVRMEAGTRGGARLVPGFKGKLPGNFLGKALFS

SEQ ID NO: 78810 - protein, 103 aa, Zea mays
  Coding DNA Sequence Number=SeqID_35435
MAVGSRFRGSEEEGGDGGGAGIGMRAATAGVGRRAKEDLRLGAFNIENAPRMNNTIVLETLDCNCIHVIIPKQAEDLFFMTFIQDLLYLKENNASKDKGMREQ

SEQ ID NO: 78811 - protein, 55 aa, Zea mays
  Coding DNA Sequence Number=SeqID_35436
MTKVAYPAMGKGESGWGRVVRGRGGPHWGGEPRQGACRLQVRPKAAVGQGAAPLK

SEQ ID NO: 78812 - protein, 270 aa, Zea mays
  Coding DNA Sequence Number=SeqID_35437
  Gene Ontology: Biological process=steroid metabolic process
  Homolog annotation: Hit_ID=Q2QTR4; Match level="QueryCoverage=99%, HitCoverage=37%, E-value=1e-101, Identity=69%"; Hit description =Oxysterol-binding protein, expressed
  Pfam annotation: Domain name=PH; Domain location=40-167; Score=54.7; E_value=3.1e-13; Accession=PF00169.20; Description=PH domain
MNPLCCIAPVSLEHAADQLHEHPQRILAGAPPATPAPKQDAVVGVLHKWVNYGKGWRSRWFVLEDGVLSYYKLRGAGAGGVAVSPAAAAARVIGDGSAVQQAREVAAGAGKLWKPFGVIHLKVSSIRASKSDDKRLYIFSGTKTLHLRCETEEDRNAWIDALLAAKDQFPRSQTSNDVGSMADIMLSSEKLRARLLQEGLCEAVVRECESIMMSELLELHNHIKSQQQQHSILIDRLRQLETEKVELERTVVHETKERETLGYANSRQSG

SEQ ID NO: 78813 - protein, 319 aa, Zea mays
  Coding DNA Sequence Number=SeqID_35438
MRDFAIALSSPPDEATSSEEWTTVVREIEGLECVALWGLPNFIKTAHSHVSMQRVGVARAKAFDQQLILSVDAEVQAGLYVFTVVFRGHPEWVVRTDRGGEARWGGRQGNDGASCDVVGPSLGLGEVEAPPRSRSSPSSEAEVESEPLGRARRRPSADARAESEPWGRAKRSSSSSGAEPESESEPWGRAKRSSSSSRAEPESEPWGRAMRSLSSSGAKPKAKPESEPWGRAKRNFLWRLKPDLAAVSLTLSSGTAVGAAQAATFALNAPAIRSAGVATWPRLLLGEDWASGEPKLCADGGYQLRFRSLEGTPNYGPRQ

SEQ ID NO: 78814 - protein, 71 aa, Zea mays
  Coding DNA Sequence Number=SeqID_35439
  Subcellular localization annotation: CTP_CleavageSite=48; ConfidenceScore=5.04e-01
MDPLRSAQELFTCAPRLSFSCCWGRFGRTRDGSPRTRGCQRTPGRSLEAQGEYGEVCEVLPSTQQSLYVFC

SEQ ID NO: 78815 - protein, 168 aa, Zea mays
  Coding DNA Sequence Number=SeqID_35440
MNKTPAFKVPSQTELRFRPRGYEQPPHRGACGATSSGRLTSDLCSSSYDGVDGLDGGEASPGCHHVSTDGGVCLSTNAAPVNAGRSKAHWQVLAPVLATKARRRTECCILAGQQQFAFPGMAGGCLLRRAGGWFPPPEAGRGGGQPTRAGGRAPTHLALRPSKDDEHP

SEQ ID NO: 78816 - protein, 225 aa, Zea mays
  Coding DNA Sequence Number=SeqID_35441
  Subcellular localization annotation: CTP_CleavageSite=28; ConfidenceScore=5.29e-01
MQSACDSAKWAHPFDSNAPSMEAQTHTSCSRRASCYVRAAAPPLAPLPRLLDCGTSTATRGNPAYDPTVPARRIITGQSAAGEGATVDAAKNGPAVMAVASGQKQRTGGAFGRRSERRFAFAIMTASKKGPGKGDTPKGILLREGNGPRAPLLIRGSKAGPSEGFNNRLRALGLRARYWSEVRGPAPRKGSTAASGHSGSAPTTDQGFVGWPSKGSQPPQTQSEG

SEQ ID NO: 78817 - protein, 114 aa, Zea mays
  Coding DNA Sequence Number=SeqID_35442
MEGGAVLEDGGEADEDLDVEAVPPLVSLGDDLPGGSYVSEMSMCTHGSDGAGSSQGEKFTPNPPPPIPPTLADAIAALVNATAENVRALREVINNQSNQHGACACGRTAQIIPV

SEQ ID NO: 78818 - protein, 98 aa, Zea mays
  Coding DNA Sequence Number=SeqID_35443
MVGLQVVTRMMVMIMLMVMFAFGLPSKIGCDNVAADLDTGPEAADCKMKLGLNRQNNLLGWELYLPSKLHPPLPLRADGLKELWCTPVDWELLCCTWL

SEQ ID NO: 78819 - protein, 48 aa, Zea mays
  Coding DNA Sequence Number=SeqID_35444
MPKLPCAQLRLCSILRSPCVSSYNDFDMSEGSMSEGACSGCGSWGLKD

SEQ ID NO: 78820 - protein, 282 aa, Zea mays
  Coding DNA Sequence Number=SeqID_35445
MSAPTLGPTATLLNAKTSQLEMAMGTRDPIPDGSINVCDAYGASQRSGDGGFGDASGDVAGRPRRCQARKRRRSTRRHGSSASDIPNDGRLSIASVNSSQTPHGILPPCIMGWSNMLAATEDDLRTDVVLTIISDSEIALAEIVALLAPRLDVPKTSLVIRRMSSSSLLLILPDIALIELLITRWSVIRATSFSVFCKRWSRLLGASGVSLPYLVEFETAGTPVHAWETSTMEHLLNPFASIHQVHQDTSALQDMSCFKCSTWCSGPSAIPNMRDLWIIQPI

SEQ ID NO: 78821 - protein, 119 aa, Zea mays
  Coding DNA Sequence Number=SeqID_35446
RKAVLLVPVARFRHSLPLGTRRVLCPRRLKELKEALSQAADFADRAASGALTTVVSAEVERLRTQHADAVREKSAADSKCRKLADKVAALEGERAGVRVFSLHGKSKPNPAITLEKIKV

SEQ ID NO: 78822 - protein, 184 aa, Zea mays
  Coding DNA Sequence Number=SeqID_35447
  Subcellular localization annotation: CTP_CleavageSite=18; ConfidenceScore=5.03e-01
MKLWKETSRSSKTTTSSRCGLAATPSRLPVKAAVIYVSFPHFDLLEVVLEEKPEPESFLEEPETCQTRPQIIHEEPFCQTICKNTGSCGGTTLGLVGRAPKPALALGGALPNGLKKRAPNKEHQEAGAIFIKRSRSPKQLAPSGYPSYSPSLALREAVLPNDLLKTLALIKELFLKRSQSRSHF

SEQ ID NO: 78823 - protein, 259 aa, Zea mays
  Coding DNA Sequence Number=SeqID_35448
ALVVLEGGQYLTTGKLEVLSQQEFVDCDHEVKNVEHVLHATVNTDGSEAKQQDLRQHAAPQLMVFSRRQVQKARLVEDKEREEESTHQVIETLVEEVGDTVERTVMSARQILVKLANCVDVGRPAPLSAGIALSPEQQQFLNQLTKQIYCILPAPVDLILKNNSTKTLAATPRCSRHIAGMGAEFDIHDLRLRFTQKIMKALKLIKDGEGISQQARNDYEKVFSETLSLAHIEALAALIRWSMPVDKMVGTSSPDIAAC

SEQ ID NO: 78824 - protein, 50 aa, Zea mays
  Coding DNA Sequence Number=SeqID_35449
MVGLQMMMRMVMIMLMVMVAFGAIYAQVKKKENGVEADLREFQDFDEFED

SEQ ID NO: 78825 - protein, 454 aa, Zea mays
  Coding DNA Sequence Number=SeqID_35450
MALGVFELNRLPYGGYPGQDDVDRRGKKPVVETGDDPAPAAAPSSKKRKLGIAMGGLGVSDGFARELMRTCAAPGGRMSSPELRESSARMLSVTGGWWPKNVPIPRAAGEDFLTSRMVRDWKVFPYGWNIAAVVSAVMDKDRQGAAQKRQAVVRLHEARPKRPRGTTKAAAPRRKPAATGGEVGCPCIRQGAGGCEGGGRRGPDAAKAARELPPPGKRVADFATDISVEDYLVGSDEGQLVVVPPAVATAAAAVVPRAKGSALSAGGEIPALAAVRDEAGAVSRRLKELKEALSQAADFADRAASGALTTVVSAEVERLRTQHADAVREKSAADSKCRKLADKVAALEGERTDLRCQLAEERKEANEALAKAQSAQAEANLARVEGSLARQRAEELEGRLNALQTHVERAEASTRSEAERTRKQLMDSYHELGARTADFEVPDREPGLRCLEWV

SEQ ID NO: 78826 - protein, 635 aa, Zea mays
  Coding DNA Sequence Number=SeqID_35451
  Homolog annotation: Hit_ID=A2WQE8; Match level="QueryCoverage=52%, HitCoverage=85%, E-value=3e-73, Identity=44%"; Hit description =Putative uncharacterized protein
  Pfam annotation: Domain name=Transposase_24; Domain location=383-518; Score=-24.6; E_value=0.081; Accession=PF03004.5; Description=Plant transposase (PttaEnSpm family)
MTTQGGLQPTSNEANMCTNDNGSQLGTRIVDEIMAGKNVFFDLPDKLTGEIWTLKFHCIGAQPGKEIVTVNIDKAYVAFYNVVYIKSKLGYSGRDFLFYKKRCGIDRSRLLALDYIHQEEAMLSDNMDERKISFVLTKDPPSDLEVSITPIKRPRQRTNVDEETIEVSIDAYKEWLAILQHDNPETVLYERQSNDDLILSDEEIHGSSKPTANWPSHARRHRKRDRDVIGIYVDNDGVFKKEGRGTLKGIAAATKRIKNGDHKLKIEFSSKLGGPVGPNARTFVDEIVLFTKKKAPLIGVKKWKDIELNVRSSIASDVLTINLLFISKLKQRRWEFLTNEDAHEKIWSIAKERYKGWRSTLSSTYKAYNSYAERMKNKSEDVDIVEWHYMVLYFGSEKFQKISSRNSENRQKQRTKHIMGSRTFSQISFQQRDPETSIEPTDLSLWMTTHCKNDEWSEEASRGIYENAAEKIAEKIYQTEKYHLTREEENAIFQTTFKETTGCKANRLHGHGYLSRYPTRSQVMESKFLEQARATVATNQKNIELESQSNRESTTPIDPSSIVPTKPPEFIPADSPAPAPSSANNVRTPDTNNKKDNMPANYISSYTLRNVVTRRVQARGNKRSECVWNANVLVL

SEQ ID NO: 78827 - protein, 160 aa, Zea mays
  Coding DNA Sequence Number=SeqID_35452
MEIVELVPCARNKWGNWHEFWFYVAEGTIEDHPGLPVAEMCSHYYSAYPQFEVAEDDANEGALRCAAGLSSGRDLVEEFVAYGVWPLAHGWALGEVCPRQMPSHGGNLWKTTTVVPTATATTTAQLLASSISSNHQQAASSNTQQAASSKQQQQHAAARS

SEQ ID NO: 78828 - protein, 168 aa, Zea mays
  Coding DNA Sequence Number=SeqID_35453
  Gene Ontology: Mol. function=unfolded protein binding; Cellular component=endoplasmic reticulum lumen; Biological process=protein folding
  Homolog annotation: Hit_ID=Q9SLY8; Match level="QueryCoverage=63%, HitCoverage=28%, E-value=8e-47, Identity=75%"; Hit description =Calreticulin precursor
  Pfam annotation: Domain name=Calreticulin; Domain location=1-122; Score=-164.3; E_value=5.2e-07; Accession=PF00262.9; Description =Calreticulin family
MTQDRLNSLAILCIEKKLLDEIDLYGIIDDFVSQNGYDGIPKEIPDPDAKKPEDWDNEEDGEWTTHLPKIKNPNYQGKWKAHMIDNLDFKDDPYIYAFDSLKYIGIEMWQVKSCTLFDNTISADDLALAKTFAEETWGKHKEPFIRVKYLLNKQNGWLNGHNQSPCGD

SEQ ID NO: 78829 - protein, 213 aa, Zea mays
  Coding DNA Sequence Number=SeqID_35454
MEVSHRGRRPSQKPKGNSSIAGDSGIQSTNRTRCDEALDETNAARGSRDAREDMRARNWTKTHRLALSTHGGERPKSGEVDLGPPVKSGLVRGLGKLHGPLAELAEALARHGGGWSGLATVAEALAAMAGGIELAGAKERWLAGEGRARRTPVRALAPGTASSTRQRRERSSSNADWAQIFEIKATIPLKDLFLSGLNFQNSENSEFPIKSPT

SEQ ID NO: 78830 - protein, 151 aa, Zea mays
  Coding DNA Sequence Number=SeqID_35455
  Homolog annotation: Hit_ID=Q8SA97; Match level="QueryCoverage=33%, HitCoverage=10%, E-value=6e-08, Identity=58%"; Hit description =Ornithine carbamoyltransferase
MVRLVRAQGRARRRLLLRPRPGSGEDAIPPEVEVKAEPWGRVRRRPPSEAEVGAEPWGRARRRPPSEVEVGAEPWGRARRSPPPEFEAQGRARRSFLLRVRLNLAVVSLTLVGGTAVGAGRAALFSCQVGQWKGKVTAVTSTLPTEAHVSG

SEQ ID NO: 78831 - protein, 130 aa, Zea mays
  Coding DNA Sequence Number=SeqID_35456
MVSHFGYGGYKCGHCTTAVGVSEALYAKAGAGYTTPPQYMVQLFEKHQVPCCRVRMTLEPHPLQPGWRSLDSESFGYRAEDTIEAIALHGLTTFCGFHPLELSTHPIGLFPAEKEDDPMWKDRVEHAKDI

SEQ ID NO: 78832 - protein, 165 aa, Zea mays
  Coding DNA Sequence Number=SeqID_35457
  Subcellular localization annotation: CTP_CleavageSite=9; ConfidenceScore=5.20e-01
MAPRKGSTAASEHSGSAPTTDQGFEGWPLGRENSAARPTPTAVPPTRVRLTTAKFSLTRNRKLRLARPWALTSGGGLRLARPQGSAPTSTSEGGLCLARPQGSAPTSASKGGLRLARPQGSASTSTSGGIASLPDPGLGLRRSLRLARPWARTDRATGDTSLPYP

SEQ ID NO: 78833 - protein, 119 aa, Zea mays
  Coding DNA Sequence Number=SeqID_35458
MSQLMALLEATKITLDNREELVVDLSTEMVEKDLQVEQMSNEIQELEELVGTRDNTIEVLEDQLINTQQQLAEANQHLDMHHQEIQKMEANEDVDIEGGAEPEPASILDTAGLGRPPSP

SEQ ID NO: 78834 - protein, 704 aa, Zea mays
  Coding DNA Sequence Number=SeqID_35459
  Gene Ontology: Mol. function=zinc ion binding; Cellular component =intracellular
  Homolog annotation: Hit_ID=A3BTQ6; Match level="QueryCoverage=33%, HitCoverage=32%, E-value=4e-62, Identity=54%"; Hit description =Putative uncharacterized protein
MEVKQKGLHDHTCNVEAAVRNIPVLLGGMAPPVFDEMPPYYSEEVIAFPRCFGGSGYSVFDETSAEKVVWDEEVLLGFDSLDFWQRLAHGVGNQMPNDCKQDVVPDAPWFFVGMSQQVSTYSMSSEMGLTVAWDGEMQAETHTHEGLLQQLAQGEEALKESAKKEGDIEDEASRPDPPSEATAVVMNGGNMDEFIPASVVSVLEDDPKKEKDAENVDATSAGGILSQELAPESINETNGVGEIVGVAGVDDHEEEVVGSDILEAMTDEVDEEEGCFEGFSAIRIHDEDVNLKFLFCGVPCTLDACLLGTLKDGLNALLNIEICASKLQNRASAHPPLQAEDLSHGVATMRCEITTCSSAHVAYLVSGSAQTCFGDQLLGSCIKNEIIEKRQLVCVLLNNEDIKPSSFEPWPSIGVACEASTFDVWITMQKWAAQVLKHLAPEIYYRSLVALGIAWINGIPVSSFGRQDADQFIFFCSNQCGDQAILNGSFAHVSNWATPFTKDSFMLVLYEACIGQEVRLECKNMLLFEGRQNKGSVRHGISELTQWWLNGFSPGNGAMAVQSQPYTQQKFMNKLMGLQFRMVYDRGKENIATDAFVQDLWPRVTIYIPYGNVFSVQKDKTRRLPQFWVGRSSTFSTKLIRTFHDSMVWECSVSAAKRSGSVCKLWWSSSESSVLNGIVDFVGAAWIQLKVADSFVIKEQLAWD

SEQ ID NO: 78835 - protein, 205 aa, Zea mays
  Coding DNA Sequence Number=SeqID_35460
MTLEPHPLQPGWRSLDSESFGYRAEDTIEAIALHGLTTFCGFHPLELSTHPIGLFPAEKEDDPMWKDRVEHAKDIWAIYPGQTAHLTVRCMNALYRLQVMRGEAMSHLMALLEATKITLDNREELVVDLSTEMVEKDLQVEQLSNEIQELEELVGTRENTIEEIQDMEANEDVDIEGGEEPVSSLDTAGSGRPPSPESSVALFAH

SEQ ID NO: 78836 - protein, 81 aa, Zea mays
  Coding DNA Sequence Number=SeqID_35461
MATSSGGMLSTGADRERGECEKEQARGRERGEGVSAGFYRGERREERDFHLRRNAIKYSKTNHAQSKIIPNNKHLKENSLS

SEQ ID NO: 78837 - protein, 177 aa, Zea mays
  Coding DNA Sequence Number=SeqID_35462
MQVRRLLGKELDTRSRDELLVKDEDLGRGDPRVNKRRGRGWVSTKPAMGSRGEGARTGEARGASSGCGIHGSRGARHGWSRSTPARRRREREGEAGRERRGEEPLGWGGVAAMELGEREPASSGEEQAADLSNAWEGEDPGALGHGKKTEGAPCVGEEEEACAWENIKRAARDKADG

SEQ ID NO: 78838 - protein, 325 aa, Zea mays
  Coding DNA Sequence Number=SeqID_35463
MRSQPEYDGREFVEHGTEKCVVTVYIGSSPHHVEWSVTAAGHRFKDTCQVVARKALRALCQIYEEEVADTPLRFFPPFQRNHPVWMARMRALEEQQLLEDDPTVVYLTAYLLILDAQYDFLARHHPQAPVSALESREVIVVEALKQAKDEHVQKLMKAYLVTHNQRRALRIQEPASSNPVQPRRAKDPQILDGHPVSTRGEKMAWELPKGAIVLEGIPVFPHAMNKQEHPESTQDPPLELFEPLTMKKIPAPFLEIKEEAASTPPAPLPSEELQAPVLLEEEFDPVLPSQSLPEEVINISSLLTHPGDVSDEVVRQPFQKRSYLV

SEQ ID NO: 78839 - protein, 232 aa, Zea mays
  Coding DNA Sequence Number=SeqID_35464
  Gene Ontology: Mol. function=kinase activity; Cellular component =ornithine carbamoyltransferase complex; Biological process=amino acid metabolic process
  Homolog annotation: Hit_ID=Q6QP54; Match level="QueryCoverage=39%, HitCoverage=32%, E-value=1e-30, Identity=77%"; Hit description =Putative kinase
MGRREAEREGGRKVAGDGRERGGNPAAFVFVPRPGRPESAWGRVMMVPPVDVVGPRPRLGDVEAPPRSRSSLSSVAMVESEPLGRARGRPSAEARAESEPWGRAKRCSSSSGAEPKSEPWVGRSGVRRLSGFSPSPSPGSGGAEFTVFRGLAQGLSPSPSPGSGGAEFAVFRGLARVRALGRAERCFLWCLTTCQPHSVERHNSRSGAGGAVLLSGRSVERRSDCGHFGSID

SEQ ID NO: 78840 - protein, 181 aa, Zea mays
  Coding DNA Sequence Number=SeqID_35465
MEVCDLRKVPDAAASGDPRPCRQSGDGGGSQVTEAILAFDLLQQRCEDEVLEVAQRDHELVMEPAQQPRALDLAPTGDPRRGLLSRITPHLELHRRLNLPGQGHAIRMLGVVQLHSLVITVEDYNSSYRRPASFFNYVDLELLHEHVVTALSVESYYSFSCVDLELLQEHVVTTLSVKSYY

SEQ ID NO: 78841 - protein, 141 aa, Zea mays
  Coding DNA Sequence Number=SeqID_35466
  Gene Ontology: Mol. function=DNA binding; Cellular component=nucleus; Biological process=regulation of transcription
  Homolog annotation: Hit_ID=A2YMR0; Match level="QueryCoverage=38%, HitCoverage=13%, E-value=2e-18, Identity=80%"; Hit description =Putative uncharacterized protein
  Pfam annotation: Domain name=NAM; Domain location=51-133; Score=5.3; E_value=5.7e-08; Accession=PF02365.6; Description=No apical meristem (NAM) protein
  Subcellular localization annotation: CTP_CleavageSite=34; ConfidenceScore=5.08e-01
MRSSPGQRHGSQALAACRHGQRHGCRAASSLPACAAKAQSTQKQPTLAPELPPGFRFHATDEELVVHYLKKKAASVPLPVAIVVNLYNFDAWELPAFNMTNNVLSILFMDNVTIDRDKTLLSSYSRWHNYHHHYKGFSDDA

SEQ ID NO: 78842 - protein, 54 aa, Zea mays
  Coding DNA Sequence Number=SeqID_35467
MQAACNRAKWTRFSDSRHASMEAQAHASRNRDRERGIPRKGSFPVKEPGSEPPY

SEQ ID NO: 78843 - protein, 211 aa, Zea mays
  Coding DNA Sequence Number=SeqID_35468
  Subcellular localization annotation: CTP_CleavageSite=51; ConfidenceScore=5.39e-01
MSSRSLMHRVLPPSKPPDGGYPPSFRLIVGGTQLRGNWYLSAIVRLQGFSSASPAVPPRRRSPETVTTSSWVGRSKPGYDLGPTLSFKDVHHPRWGGCRTEPELYLPRGFAGHPLLRRSRERALAGPVGGPDFDNAGLVDGGRRHPQRVELVGLAPGGPFCRKAAAAPCAWGDRPRCHALLGRRSCSGVVLPLHRDDAFTRRPVPHSSGRI

SEQ ID NO: 78844 - protein, 992 aa, Zea mays
  Coding DNA Sequence Number=SeqID_35469
  Gene Ontology: Mol. function=oxidoreductase activity, acting on single donors with incorporation of molecular oxygen, incorporation of two atoms of oxygen; Cellular component=chloroplast; Biological process=fatty acid biosynthetic process
  Homolog annotation: Hit_ID=A1XCI2; Match level="QueryCoverage=97%, HitCoverage=96%, E-value=0.0, Identity=82%"; Hit description =Lipoxygenase
  Pfam annotation: Domain name=Lipoxygenase; Domain location=223-976; Score=979.1; E_value=1.7e-291; Accession=PF00305.10; Description =Lipoxygenase
  Pfam annotation: Domain name=PLAT; Domain location=110-211; Score =73.7; E_value=6.1e-19; Accession=PF01477.14; Description=PLATLH2 domain
  Pfam module annotation: Pfam domain module=Lipoxygenase::PLAT; Domain location=223-976::110-211
  Subcellular localization annotation: CTP_CleavageSite=65; ConfidenceScore=5.43e-01
MELLGRSFAPGHAAAAPRRGGGPCFAAVGREGSGAHRRRSSSSSSLRSTAPVDALAERVVAPPERAEAVPPEPSVAARAVVTVRRSRKRDAKCRVAERLDACADWVGRSVLLELISTETDPRKGGPKKSRRSALVGWFGEKDVKAERVVYTADFNVDGSFGEPGAVAVLNRHQREFFVESIVVEGFPSGPAHFTCYSWVQPTRVHRDPRVFFTNKPYLPAQTPPGLRELRRLELSDLRGEGAGTGGERRTTDRVWEYDVYNDLGNPDMGAEFARPILGGDQQLPYPRRMRTGRPKTFTGKPPLLPPPPPPPPPQLTVQFLSPPPSAAPYIPRQEQYRPGMAEGVAVAVAVAVARRFRIEPTRSRATLTDANVSSSALADDRAESRVEYPEPIYVSRDEEFEEGKNEMLSEGALKALLHNFMPLLVSSVSPDFRDFAGFHDVDNLFKEGLRLKQALQDQLFQKIPFVRKVQENSEGLLRYDTPDIIKRDKFAWLRDDEFARQALAGINPVNIERLQAFPPMSKLDPAVYGPPESAITEEHIIGRLDGMSVQQALEDNRLYMLDYHDIFLPFLDRINAQDGRKAYGTRTLFFLTGAGTLKPIAIELRLPPMTDGCARAKRVLTPPADATSNWLWQLAKAHVCSNDAGVHQLINHWLRTHACMEPFIIAAHRQMSAMHPIFKLLKPHMRYTLKINALARQILINGDGVIESGFTPGRYCMEMSSFAYRELWRLDQEGLPADLIRRGMAVEDPTKPHGLRLLIEDYPYATDGLLLWSAITRWCGAYVATYYPSDESVQADTELQSWYTEAVQTGHADKRGAPWWPRLTTPGDLASLLTTLLWLTSAQHAALNFGQYPLGGYIPNRPPLMRRLVPAEGDPEHAHLVADPHRFFLSALPGLTQATTFMTVIDTLSTHSADEQYLGERPDEAWTADPAALAAEREFADEVRRAEEEIGRRNTDAGRRNRCGAGVLPYELMAPTSGPGITCRGVPNSVTI

SEQ ID NO: 78845 - protein, 320 aa, Zea mays
  Coding DNA Sequence Number=SeqID_35470
MWALPIRGLGRWKGAMHEESTKTWLPSKGVTLLLKATLPTCVLSRRGLSLHQHASKVFPLRHGGLGPTHHASWPRAEEAKPPRAERVTAQRLQALLHFRLDQRVKGRTAMQAACNRTKGAHPFDFDAPSMEAQAHTSCNRRAGYYVRETAPPLAPVPRLLDCGTGADRRHLWQAKQTTLHLRLNDRVKKGTGKGDTPKGILLREGSGPRALLLIRGSKAGPSEGFNSRLRALGLRAHYWSEVRRLAPRKGSTAASGPSGSAPTTSQRLAPEGFDSRLRARRARDDSRYVRYMAKARATLPRLGGCSRKPGSSQTVDSVNI

SEQ ID NO: 78846 - protein, 241 aa, Zea mays
  Coding DNA Sequence Number=SeqID_35471
MVGPSPGSGEAEAPPRSRSSLSSEVEVESEPLGQARRSSSSSGAEAESEPWGRARRSLSSSGAEAESEPWGRARRSSSSSGAEADSEPWGRARQSSSSSGVEAEFEPWGRSRRSSPSSGAEAESEPWGRARRSRSVERRSDYGHFGSVDRRARVRMRCQAILALNAPAIGSVGVAIWPRLLLGEGWASSEPKLCADGGYQLRLGVLGVPLIMVPDTPVPGYGEVTSLLKPVPRLLEAAAED

SEQ ID NO: 78847 - protein, 294 aa, Zea mays
  Coding DNA Sequence Number=SeqID_35472
  Homolog annotation: Hit_ID=O48967; Match level="QueryCoverage=41%, HitCoverage=26%, E-value=3e-34, Identity=64%"; Hit description =Putative uncharacterized protein
MQARADGPRAMKSKYWVLTDGPEQPGDQPRLECLGVVNGGCRYPESGLRGRRVTGKGGILQDTISRSGPPRESAGPLYSRPGSPSRVQGSHASKPDPLGEVQTSLSGVRATHSEVPRQGTPWPRQRSGDARAILQTACLSSPLSNSAPVLRGRVHSATRPENSLSDIWRASMMVQIIEHRAETSTDFLVEEEVVSSTPQVPNRPVPGTAAVHAAQQHTTAQTSRTPPRTAPGALSAARELLRHPPSSTASPGAMKQWRDDVDRLLGMEHSTSTRPTTSGQNSTAGVRERMPASL

SEQ ID NO: 78848 - protein, 223 aa, Zea mays
  Coding DNA Sequence Number=SeqID_35473
MEHKGKKGESRLVLSCAQGRCACSRGLQAFAREGEILFVSPSSRAATFSYEGPGPSFYRCKERAQVYNGGCSSMLTCPAERSQSPMYMPTWLLESPRSGEAETPPRSRLRASPGVGRGGDRLPRSRLSPSPRVGRGGDCLLRSRLSPSPGVGRGGDRLPRSRRGRAPGSGEAELPMAPEAGLGGCQPHPGGWHNSRSRAGGAIFLSGQSVEGRSDCGHFGPAD

SEQ ID NO: 78849 - protein, 129 aa, Zea mays
  Coding DNA Sequence Number=SeqID_35474
  Subcellular localization annotation: CTP_CleavageSite=65; ConfidenceScore=5.60e-01
MTPSLTVSLASRKPYPRPRFPSRLSVSSGGTVVFPHRLGDSRVPTSMLPAQWLWCSVLHSSSSFVHSSGARFVTLFISAPPDLDNIGSGSLTLKGPSLVCHAVLFGGLSNNIISAGALGITIAQLVRIN

SEQ ID NO: 78850 - protein, 78 aa, Zea mays
  Coding DNA Sequence Number=SeqID_35475
MEQHPGLKRLLETTHLELDGELFVNTQQAPTWRANYRRFDLGGSLDRRGAENRCRHGSMRGAIITCFTGASQMGLKVA

SEQ ID NO: 78851 - protein, 156 aa, Zea mays
  Coding DNA Sequence Number=SeqID_35476
  Homolog annotation: Hit_ID=Q6J9V9; Match level="QueryCoverage=50%, HitCoverage=31%, E-value=2e-14, Identity=52%"; Hit description =Putative uncharacterized protein
MMTASKKVRHIVYIRILFPFPFLSLVIGTGKGDTPKGILLREGSGPRALLPIRAASDHSGSTPTTDQGFEGWPPEGFDSRPRTRRARDDSGYVRYMAEARATLLRGSGAALANPAPTKPLTASTYQPENSEPDHAPGLRSDRMREQPDRPRRHERH

SEQ ID NO: 78852 - protein, 120 aa, Zea mays
  Coding DNA Sequence Number=SeqID_35477
  Homolog annotation: Hit_ID=A5B4P8; Match level="QueryCoverage=77%, HitCoverage=15%, E-value=8e-21, Identity=53%"; Hit description =Putative uncharacterized protein
MERRRAAPPAAQRVVLGAGGEWEMTLQYIAVLSVGLTIYLRFSTYEDSEDLEKDLKLLLSPVRVGADALSWAAKKIEPNKVGLPTSPSTTAVKDRVLQAAAKHESQPSDADESSVQTAEA

SEQ ID NO: 78853 - protein, 945 aa, Zea mays
  Coding DNA Sequence Number=SeqID_35478
  Gene Ontology: Mol. function=protein binding; Cellular component =nucleus; Biological process=regulation of transcription, DNA -dependent
  Homolog annotation: Hit_ID=A2WXW9; Match level="QueryCoverage=99%, HitCoverage=93%, E-value=0.0, Identity=63%"; Hit description =Putative uncharacterized protein
  Pfam annotation: Domain name=TolA; Domain location=237-562; Score= -119.4; E_value=0.0028; Accession=PF06519.2; Description=TolA protein
MESGAMVLGVVRPEESPDRNGGGPRDDLGPSQMQVDGPVVLNQSAELVSDDSMAVDDVPVQQPSGQPVEATQQSPATLIDTIMEVQKQLKRKRASNSPVIDAADKDALVAGCRQELEGLFQYYKEVSDRKMQLDGGNLSFNGMVGCLLEESSLGLTRLVDEIYQQLKGLEGVSVASVRSSVLLAGQRMMYGNSSLDADVLEDESESALWCWESLSNPFNTCHVSLNNWRKSGAYIQVNDLKKASLKLNKSLNLEGIRSMVERATQKNTERGVKDAVSAVKELMQETDKNDQNVRRLEDTSVSEPQNGNSLGNEKEIQKAQKQVEKEIKRQEKEEAQMRKLQKKQQEEALREQKRHEKEEAEAKKQQKKQEDEALKEQKRREKEEAEAKKQQKKQEEEVLKEQKRREKEEAEMKKQQKKQQDEAEKEQKRLEKEAAQLKKQLVIQKQASMMERFFKSKKDNGKHQKPGENNSAEDPCNDNKETIPATTSKIDSSLYQQEGWVLDDLRRLQVTGWKKLSSYNRSSRWGTRCKPKMEAFKELKLQKSSDDMVDEILSTPNEDGGRNPIQENEHDKLESDIDMIQASEMQCHGASNPKPLQTRLIRMKLLQFDKSNRPAYYGSWRKKSAAISPRCPFKMDPDLDYEVDSDDEWEEEDPGESLSDCEKDNDEFMEEDSKITDEEDEDSFVVPDGYLSDNEGIQIESLLDDKEEEANSSPNGQCTEVEEFRSLLRQQRVLNTLTEQALRKSQPLIICNLNHEKAELLTAEDLKGTEKIEQLCLQVLSMRICPGGAIVDVPLTDSSSATVEEINQPNVKNGSPEAASAIPETDLPEFVQVIRSCRDGIHKVVELLQHKFPNVPKTQLNRKVREISDFIDNHWKVKKEILDKLGLDSSPVKPKKNKSIAMYFSKRCLPPEEAVNALAASPELRLKSRNGGREAPQINLFPSEQ

SEQ ID NO: 78854 - protein, 667 aa, Zea mays
  Coding DNA Sequence Number=SeqID_35479
  Homolog annotation: Hit_ID=A7QAV2; Match level="QueryCoverage=45%, HitCoverage=52%, E-value=7e-48, Identity=37%"; Hit description =Chromosome chr5 scaffold_72, whole genome shotgun sequence
MEGERRRWKGMAGSRARMARDDTVDGCNTPSNPWTDGAAIVVVADSSGSRGSEEQLSSSSGSRGSGSGDRTAEATVSSSRAGEFVTGSPPHRCECAALPPAAVPPTAATSTPNGRRATASATPHADSLNTNLRNPGKIPNPASSSHRLHSSRINHLLGPQPQPHPPSRSPQPEPAPTQPEPARPGRRDRPPSSTRGNEAAGWEQQPDPDAMSPPAMLLPVCSAAPSCSPLCPVTASHVVARVARRVDVGAALRSYADSLVAQVPDRPPLADSSILSPYIAAPDDIARAFGAPASELPPLPSADPSPGLCCTGTDQPLAAVADLAATAVVNSAPTDAAERALSDAPFPSTFPSDASEVEDSVARLIDKVGKQVFQAEDALTEAYDKLRLSAYDALGAWRKTVRDAIGGLKASVDAGKQQAAGGVTDASGALHEKVAGAGTVAVDVLRKAIVAAEDSLGSAATFVVYSYGSAKESLPPNVRDLLSSSEEKASLVLRPIGNALQQVYVVVEGVEKNVGLDPSDPIVQLAVVLGGSVTIGGYSGDLSPESAFDLLKNDDKADLREKDGVPDLRLGARSKYASVASPEIKDPVKSMLKDEREFDDALLAVVIRNLKLVKRPYLVKGGFQAWSKNLRVKELKPETALTSINEDVEEILEQIKPTPTLVFGSLL

SEQ ID NO: 78855 - protein, 140 aa, Zea mays
  Coding DNA Sequence Number=SeqID_35480
MTMRSLSAPDSVRNREKKKRRENTKRKRLGWCSHDYAQPECIGLSGGTLDSVRTFLDRIFYSTATYSKGLLIPLCPSLRVELFAYSPPPSRRHPDLVPEQRELTDSDPVRKCRTPAYIIWASGYDPGPQHSPEWDLDPSK

SEQ ID NO: 78856 - protein, 160 aa, Zea mays
  Coding DNA Sequence Number=SeqID_35481
  Homolog annotation: Hit_ID=A5GXS3; Match level="QueryCoverage=90%, HitCoverage=41%, E-value=7e-60, Identity=83%"; Hit description =Faciata 1-like protein
  Subcellular localization annotation: CTP_CleavageSite=40; ConfidenceScore=5.09e-01
MSGGPRSQNSNGQIPTALVTWLGHRTSLLRQQRVLNTLTEQALRKSQPLIICNLNHEKAELLTAEDLKGTEKIEQLCLQVLSMRICPGGAIVDVPLTDSSSATVEEINQPNVKNGSPEAASAIPETDLPEFVQVIRSCRDGIHKVVELLQHKFPNVPRLN

SEQ ID NO: 78857 - protein, 63 aa, Zea mays
  Coding DNA Sequence Number=SeqID_35482
MGHRATLAAAVLLAAVVALCLAARYGEIVVAVSNKKKKKQAMLPVRMLRISRARVHEPRPRGT

SEQ ID NO: 78858 - protein, 292 aa, Zea mays
  Coding DNA Sequence Number=SeqID_35483
MELVTKVQPLINHACTEEAQREAKERNSVWRRAGRRVFSQWPAPPPLGPCGSISISLDTIASYADPAAAGLGGTGLAASAHRAARHSATTAARRTAAASVARWPMTLDLCYCLCSASAPLARACHSGRARYVVDRMLTRFKCCWLLFAFAGSPSGIKNRSSIQLRDHHDVNCFFFLSGFGPLGSAALDGQGNGQGFATLGDTEAARPEFSVILSRAAWGFQVQRPGQQVVVPVHRRLMWNPESSENSWGLGPPKCQSPRTRVLGRSQRPGLGFRRVQGRGSTGLVALESQGG

SEQ ID NO: 78859 - protein, 335 aa, Zea mays
  Coding DNA Sequence Number=SeqID_35484
  Homolog annotation: Hit_ID=Q75IZ8; Match level="QueryCoverage=86%, HitCoverage=42%, E-value=5e-24, Identity=32%"; Hit description =Expressed protein
KYFGKDLFERKPLIRSLIEEELFRLADEAEKKELEESEAAEAKARAEQAAKEMAQVQTVELVINEQNVLEDGRDSNTKDSLKNANDSANKKCIDGGASVEYGFNENSCYAAEGSEEHKVDDDNKNITKDGNGGKVAVAPTANTDCTLQLQGSSNVEAETTMKSNVGTLEASKDGEVRDARNGENNGTEDGGNEGIRSGNVGSNAEAEESHGHGNNERAEHTEDDKAQECSHNENSASVGILGDGDGEAREGDINAEAEQSQADGGGNSKAEDAEHNENTKTDANSSKNGTTAAGNGKTDVDVKGATAMAQLKEALCDEMDVDCKGGGVGPRLCRS

SEQ ID NO: 78860 - protein, 131 aa, Zea mays
  Coding DNA Sequence Number=SeqID_35485
MSDDLVVPVHFEVGQELCFRLLDHPLLVLLELELLVSQQEISELSLEPAIEGRFDELRCAVPSGVAKKYVDAFSERQTLNKNRGGALCTGADGPRAGTRRSAAWCEARWCSLRKGGLSAAWGRMVRGLVRG

SEQ ID NO: 78861 - protein, 109 aa, Zea mays
  Coding DNA Sequence Number=SeqID_35486
MGSDGKRMNNEGAAQFGGSQPQQQPPPPQPPQQQQQHQQHHMAIGGRGGFGQQGGGGGSSSSSGLGRQDRARGYFPFGPLPRHGQGPWKHQKERSAVFERTPSINSVCV

SEQ ID NO: 78862 - protein, 127 aa, Zea mays
  Coding DNA Sequence Number=SeqID_35487
MSKNTRDTRFIPRFGHTTKDRLNLPLGRLNLPWQAWQPVCQSDWQTDAQTDLQTDCWSEVRGVRDQLNCPSGPVQLVLSREFRRENPSSTARRQVQLLKKLNSAEVKFSWKAQLQLKKFSCFSARTL

SEQ ID NO: 78863 - protein, 334 aa, Zea mays
  Coding DNA Sequence Number=SeqID_35488
  Gene Ontology: Mol. function=ubiquitin thiolesterase activity; Cellular component=integral to membrane; Biological process =ubiquitin-dependent protein catabolic process
  Homolog annotation: Hit_ID=A2YWA2; Match level="QueryCoverage=97%, HitCoverage=33%, E-value=3e-76, Identity=47%"; Hit description =Putative uncharacterized protein
  Pfam annotation: Domain name=zf-MYND; Domain location=1-26; Score =0.7; E_value=0.038; Accession=PF01753.9; Description=MYND finger
MTSVCSSCCSFKCQIAHWRQGHKDECHPPSVNTRHDEEEEKAKVGRAAKENASVGVKQVAEMNKPAVGSKTSDANHDLKSSNGKSKHMPSEAVCSSAEIPGGHKSNSTVEISQNVQSVDSSKMGSSIKHANFVEDGSSTEDLNEALPCNFHSSSPNINGRSSFVNKEFCNHSKEHQRAKDASVVEDCSQTSSTRELEDSNIHHVAASVVLESKSSRTPIHVELERSKTKSAGNDSIQSTKPVPSALTVDKATSVRGSLSITPNNSSKVADSLPDRSFKPSDRSGSTTNNLATSLKKMTLFPYELFVKLYSKVELHPFGLHNLGNSCYANAVFSV

SEQ ID NO: 78864 - protein, 250 aa, Zea mays
  Coding DNA Sequence Number=SeqID_35489
  Homolog annotation: Hit_ID=Q75IZ8; Match level="QueryCoverage=20%, HitCoverage=7%, E-value=1e-09, Identity=58%"; Hit description =Expressed protein
  Subcellular localization annotation: CTP_CleavageSite=42; ConfidenceScore=5.04e-01
MTKQRLLVLGSSRSPPHCVEPSVPLADLGTLPAPARAPTLPEAASDSSPGRAGLLPARATPERPSLPATPGAQVLFGPFAGDERHQDASETKLMKQPTWVFFEKESAKETLLATETRCIDATFYTCIDRLAMLRPSLTEPNLGIEYAVYLFAKCKSSEMVTDLREQILQLIQHDCKDQEEKSRAELLEKLNRCKRDTLIELCRSFDLIGSRANRKKYKKRKRVREEENLSAGKPSKAIFSNLTYLVRAVV

SEQ ID NO: 78865 - protein, 54 aa, Zea mays
  Coding DNA Sequence Number=SeqID_35490
MTKVMLAESVQNSENGNKDKLQMYLQLEGKKIQAWRKSECQVSVNSTGILFTYL

SEQ ID NO: 78866 - protein, 100 aa, Zea mays
  Coding DNA Sequence Number=SeqID_35491
MVMGARQRLRMRAVQASARGATTVVVDKSNPWDRDDNEWGWVIAADKWGCGGIEEKQGCVVGDKDKLQMYLRLEGKKIQAWRKSECQVSVNSTGILFTYL

SEQ ID NO: 78867 - protein, 241 aa, Zea mays
  Coding DNA Sequence Number=SeqID_35492
  Subcellular localization annotation: CTP_CleavageSite=36; ConfidenceScore=5.22e-01
MSSSSLMRRVFPSSKPPDGGPGRTPPPAVTQDGDLRLDGGGKRAGLRPLPLPRPQGFSSSRPRWRMRRVGGLPLHGSAAVFFPRRLGENGILQSHGDFLQPCRDRPSPWSGVVRTCGGGTGVPLALRMPRQVSPVDYLKRFTKRESPRVKVTSELGCPSAGLTPELISRGLGSGWRPWKMVGRGPRGNRLSRLLGPDSRRSPRTASPSEAGSDLAEGVVDAEGATAPFQREDPSLQDQIIL

SEQ ID NO: 78868 - protein, 68 aa, Zea mays
  Coding DNA Sequence Number=SeqID_35493
MVNAAESGPAVMTVAGGREQQSRRQPGSRPIQGQQESLLPRREDGTGKGGYPEKDPSLRRNRAPSPPY

SEQ ID NO: 78869 - protein, 131 aa, Zea mays
  Coding DNA Sequence Number=SeqID_35494
  Subcellular localization annotation: CTP_CleavageSite=29; ConfidenceScore=5.01e-01
MTNGEVSTNDMNAAALGELGIVQQGPRPRFSASGHRAGMTVLRPSGAQQQLQKREKQNLALEIQEEVSKNHKAGSSVVQGFLELTLTRQSLQGVKEEEATNGEVGDALSPNKDGKEEALKGRFKVSMRARA

SEQ ID NO: 78870 - protein, 256 aa, Zea mays
  Coding DNA Sequence Number=SeqID_35495
MEGSLVIRTSYCSEVEGFPHLLRSCALRMGIRKKPEYIWKEYRENGTEKCSMAVYLGESRSYPNHPFPSHLHRTPLPKHLPKCCPKSPPIAMPKLQQRGRDPTEDDPTIIYMVGYLHTLDNHYDDLSSHYTHLNSRVESLEQQVKELKKEKASVQESLEIAEGEEANTREAYRTLKMDYDKKLKKLAPTKKIRKKTKSQGCQTERKKEAPPALPPSRIENLSDVEDMSLASLDDLLKEFGDTLEREFGSTLESARV

SEQ ID NO: 78871 - protein, 185 aa, Zea mays
  Coding DNA Sequence Number=SeqID_35496
MAPAEMKVQDIPEKTIDTSLSSSVDVSEILKLKLMKAHVKLRTSGPQCQRLTDLYLTWLPEKDIIEVSTDKALTLKMKELKKASEETESDLQHLGGQGLSDEDISKLKEFSLARGYKPRSVLFGGVDEEILGVFLTVPKQRLLIFYQRLLDFRSLSETSVTIGDNTLLGAYSTRILRCKLLCLPI

SEQ ID NO: 78872 - protein, 96 aa, Zea mays
  Coding DNA Sequence Number=SeqID_35497
MPPTPPQGIPTAGGDLDEDDADDHAGGSSSHGTGYNPYKITYMPFTFGDNSIAFYRGPNGLFIFKSVPFSANMPKLSCFTASGTVSTFVSFELPPF

SEQ ID NO: 78873 - protein, 102 aa, Zea mays
  Coding DNA Sequence Number=SeqID_35498
MKGTTRQTRWRVCGHETGVREGRTAGKRLRAGWDNSGEEFRPLGEAIDCDRARSRFSEGGEALWTNAEALDGVGLARHRGRDEQAWPHTGEARRPARAGTGL

SEQ ID NO: 78874 - protein, 72 aa, Zea mays
  Coding DNA Sequence Number=SeqID_35499
MSQSKFINKLILRGATVGGLRLPKVSSDLYQKGGSSKDTKVDTVPEAVKQESFGMFAEKGTDLKMKRPFGPR

SEQ ID NO: 78875 - protein, 148 aa, Zea mays
  Coding DNA Sequence Number=SeqID_35500
MFLRTFGSRRPPTELSEEPEPKGWIARPITRDVARGGVADGLDLKYYPRRSTYSVGGVIVSPISEGNPRLNSMVNLVAVLNTELDHALDELGKVRAEVAELRVECATHHYLDGGSPAPVGIQHPYRSPPRGLFDYATPDYRTRIDLDP

SEQ ID NO: 78876 - protein, 114 aa, Zea mays
  Coding DNA Sequence Number=SeqID_35501
MCQVFERTKHMPRNMVNRYKCGHCKTAVGVSEALYAKAVLLRMIGCWCDLASIPATGIDGRCIHLVQWMLMLPLVSGCLKKLINPDLMGWFLLISKSRINLWHDNLHDDPEIVL

SEQ ID NO: 78877 - protein, 176 aa, Zea mays
  Coding DNA Sequence Number=SeqID_35502
  Homolog annotation: Hit_ID=Q6J9V9; Match level="QueryCoverage=53%, HitCoverage=36%, E-value=8e-27, Identity=66%"; Hit description =Putative uncharacterized protein
MTASKRGRERRYFERVLLSKGNGPRALLLIRGSKVAPCGVRQPPQSTGAPSPLLIRGSKAGSSEGFDSHPRACRVRDDPGEAPSPRTLSNGPGPANHLQDNDTIHHIPTTVPTTGVRLTTASYRLCRVQPRAQQGFSPRPTQASAPASASGGIVTTPDPGLGLSLGLGRRSSPRST

SEQ ID NO: 78878 - protein, 113 aa, Zea mays
  Coding DNA Sequence Number=SeqID_35503
MDVLMIRNLGEDQQGLGKGLGVEEEQQGRPQQEGDQVRLGYDSISAPHTISSDQYRFDLAIAVSLPLGDDDEARIPTDFDECVSRQDLEANNKLLKEQMEETVCGGTARMIPT

SEQ ID NO: 78879 - protein, 44 aa, Zea mays
  Coding DNA Sequence Number=SeqID_35504
MWSHIPVMVGTSAVTARQQSGSVLLRMIGCWCDLASIPATGIDG

SEQ ID NO: 78880 - protein, 202 aa, Zea mays
  Coding DNA Sequence Number=SeqID_35505
MENSEEGFTAVRRGGRRELAAMDREEGSWVAMEGRELPAVPSGRRSASMEEERGRWEGDGAAALCRAAAGHRPWSKELAEVVVAASREEEGALCRASAAPRELLWQGTEGGGSYAGRGAEHRELWMPWLLAEQRRRSATEGASQRRVEVRPWLFLPRAREAKDGRHGKELGCRGASHHGERAQGKVELLLREEETGRRENGG

SEQ ID NO: 78881 - protein, 260 aa, Zea mays
  Coding DNA Sequence Number=SeqID_35506
  Homolog annotation: Hit_ID=Q7XXM8; Match level="QueryCoverage=30%, HitCoverage=17%, E-value=4e-07, Identity=41%"; Hit description =Putative uncharacterized protein P0705E11.11
MIMRLEPLATTRKAMWTREMESLLSIVDSIHELLKGGGQFEVMPTGTMENSEEGFTAVRRGGRRELAAMDREEGSWAAMEGRELPPLPSGRRSASMEEERGRWEGDGAVALCRAAAGHRPWSKELAGGCCRREQGGRRGAMHGVCCTQGALVARDRGRRELRRKGRRAQGSSDALAAGREEASVCNRGREPEKGRGPAMAASTPCKGGPGWTPWAGALAVGGLLTMERGCRGRWSCCCARKKQGEERMAAENFLRGGSAK

SEQ ID NO: 78882 - protein, 106 aa, Zea mays
  Coding DNA Sequence Number=SeqID_35507
MTDLEVPPVDDDDSDVQSPSLEDDEHNASGGILRSTGVRVVKATHPQDTGKAEGNARRFRDPAEGVRKATGLQEVQGSGGVIRLYAGAGVLKWMGEDGCDRRRGGT

SEQ ID NO: 78883 - protein, 368 aa, Zea mays
  Coding DNA Sequence Number=SeqID_35508
MTLEPHPLQPGWRSLDSESFGYRAEDTIEAIALHGLTTFCGFHPLELATHPIGLFPAEREDDPMWKDRVEHAKDIWAIYPGQTAHLTVRCMNALYRLQVMRGEAMSHLMALLEATKITLDNREELVVDLSTEMQQLAEANEHLDMHHQEIQDMEANEDVDIEGGEEPASSMAGRQRRGQNERVPPPPPPPPTLQELMAQQNEILRQLAQRQPPPQHYGGGDHQRHPAAATYQEFLSTQPPLFTRAEDPLDADYAGYHADMDEKKRDRFRRGLSTKLRDRLNTVRANSYNELVNMAISQEDCITARQAEKKRKTPVAGPLAQPQRFRIVSDTQNRGPQQQQGRWVIRPQQQQQQAPNRTQFPAQRNNQQ

SEQ ID NO: 78884 - protein, 57 aa, Zea mays
  Coding DNA Sequence Number=SeqID_35509
MGKPVPSLLMLLLSRVTALVPTITRMGDHVLGRVRAYVHCQVHSGFNNIMLREEKLS

SEQ ID NO: 78885 - protein, 786 aa, Zea mays
  Coding DNA Sequence Number=SeqID_35510
MPFHGGRVVRSPAFTLNLQNRDPAAFVREAEDGAVRLVGRYVPRTEGQRSFDIRGSNDRLNRVFELNQLPYDSYPGQDDMDRRGKKPVVETGDGPAPAAAPSSKKRKLGTAMGGLGVSDSFARELMRTCAAPGVRMSSPELRESLARMLRVTGGCWPRNVPIPRAAGEDFFTSRMVREWRVFPYGRNIVVVVSAVMDKDRQGAAHKRQAVVRLVEARPKRQRGVAEVAKAARALPSAGKRVADFATDISVEDYLGGSDEGQLAIVAPATATTTAAVAPKAKGGALSAGGEVVALAAVRDEAGATSRRLKEVVESLISAAKLADKVAALEGEKADLQRQLAGERRETNEALAKAQAAQAETNLARAEGNLARERAEQLQERLIALESRVERAEAAARAEAERTRTQLMDTYRELGARTSDFEVPDREPGLCCLEWVQEELQALPTVVEGFMLYASVVTCEGEMNALSHEGCRHFEVFDQADEDFERDIYKVEDPVVKESAGAIYDRMWGPHGREVVRERAETARAQAARGERVDDFGALNSALPDPEPTPAEAVSGVALVPTPETAEDAPDAPASATAGEDLPPKVVEGAPDVPAAAAPSAEGPAAVAAETTTEATAERTAEAPATSGPSQVQNFGPAHATATTKFLAASTAEGGNECGGSASEFFDFADSGSSVEWTEESSEEDLDYFAALDVAAAEASPHAADAQDVPGPSTGRRRRRAVAKRRVSGEEGARLRVSRAGWQELLSLPTAASTGEGELRSLFAGEELRIMLFNYREMGIIPKVKPM

SEQ ID NO: 78886 - protein, 170 aa, Zea mays
  Coding DNA Sequence Number=SeqID_35511
MKSIKRSKSLLKEQRKKSETAVPVVCSDNYLCDANRSGELPNNLYLLVAQFFLVEVWALDTMNSHMAQGESIAASSLSSWHSGWRAFRGMAGDVGADMRRSWGFPGVRVAVRNQTRALACGRVGGAVSEGFAAAAVRARFAAAADAFDIDQLFECMGKLKKWTILFDINP

SEQ ID NO: 78887 - protein, 268 aa, Zea mays
  Coding DNA Sequence Number=SeqID_35512
  Gene Ontology: Mol. function=protein dimerization activity; Cellular component=nucleus; Biological process=regulation of transcription, DNA-dependent
  Homolog annotation: Hit_ID=A2WTQ5; Match level="QueryCoverage=36%, HitCoverage=35%, E-value=6e-42, Identity=82%"; Hit description=Auxin- responsive protein IAA5
  Pfam annotation: Domain name=AUX_IAA; Domain location=94-268; Score =85.0; E_value=2.5e-22; Accession=PF02309.7; Description=AUXIAA family
  Subcellular localization annotation: CTP_CleavageSite=73; ConfidenceScore=5.09e-01
MAIALLIQPLKGTVRGLPPPPPRPPAAIPSPQPPSAIPYRPPVIPAAAAAARRNLCLDKDRGRPPPSIIRTCVAIAPSTPATATRRFVSGLAACDLEVTEPAGSMTTTVTPEAKMAAQQQAPASRSSSRPRRRVPIPAGPRYLRRPLDPAGAGDRCSALSIRAERRSKAPTEEAASGAGPMYVKVSMDGAPYLRKVDIKMYSSYEDLSLALEKMFSCFIAGQSGLHKSSSKDRLTNGSKVDALKDQEYVLTYEDKDADWMLVGDLPWE

SEQ ID NO: 78888 - protein, 63 aa, Zea mays
  Coding DNA Sequence Number=SeqID_35513
MPGGEGGGRYGLTLRLHWHTQGCHKRIVLGKKQQPNTGYFNLPRPSWNEGTLNRYTRAELVKG

SEQ ID NO: 78889 - protein, 91 aa, Zea mays
  Coding DNA Sequence Number=SeqID_35514
MEPAGSVTSRSQAARPETNLRVAVAGVDGAMATQVRMIEGGGRPLSLSRQRLRRAAAAAAGITGGRNIPGIVQVPEGTCVLTLRHWALRHL

SEQ ID NO: 78890 - protein, 85 aa, Zea mays
  Coding DNA Sequence Number=SeqID_35515
MTLFPHSGNMHDFLLALALLGCFGWLMGQEGEVPGFYDVVIDFLPASCSDGTAAAAAEETTSGTAVAGSDADAGAGAGAGVVDLA

SEQ ID NO: 78891 - protein, 221 aa, Zea mays
  Coding DNA Sequence Number=SeqID_35516
MTSHISTEGGNAHSHTDGLAREGFPRILWEVLQGAGYATPPQAEDTIESTALHVLTTFYGFHPLELSTHPIGLFPAEKEDDPMWKDRVEHAKDLMGLVESTKITLDNREDLVVDLSTELVEKDLQVEQMATQIQELEDQVEARENTIEVLEDQLQTTQQQLEGANQHFDLHHQEIQNKEVEGANEDVDTEGGGELEAASSLDIVGSGRQPSPKSSVALFAH

SEQ ID NO: 78892 - protein, 326 aa, Zea mays
  Coding DNA Sequence Number=SeqID_35517
MNALSREGCRHYEVFDQADEDFECDIYRVEDPIVKESAGALYDRMWGPFGREVVRERAETARGQAARGERVDDFGALNSMLPDPEPNPAATVTEAALEPTPATAEGVLEAPAVAAAGGGPPPETAEGAPDAPAATGACGGPLPTAALRAEDPVMVAAESTAEAPATAGSSQVQDFGPAHTTATANILAASTVDDGNKSDESASKFSDFGDSGSSVEWTKESSDEDLDYFAALDVAAAEASPHAADDEAAPGPSAGRRRRRAVAKRRVSEADGGRLRVSRAGRQELLSLPATVGSGEGELRSLFAGEELRIMLFNYREMGIIPKVEP

SEQ ID NO: 78893 - protein, 499 aa, Zea mays
  Coding DNA Sequence Number=SeqID_35518
MEVVELVPCARNKWGNWHEFWFYVAEGTVEDHPGLLVSEMCSHFYSAYPPFEVAEEDADEGALRCTAGLSSGRDLVEEFVAFGVCPLAHGWALGKVCPRQMPSHGGKLVRSPAFVLDLRSRDPAAFVREAEDGAVRIVGRYVPRTEGQRSWDIRGSNDRLNRVFELNRLPYGDYPGQDDADRRGKKTVVESGDDPAPAAAPSSKRRKLGTAMGRLGVSDGFARELMGTCAAPRVRMSSPELRESSARMLRVTGGWWPKNVPIPRAAGQEAAGAAKATTPGAGKPPLAAKSAVPASSRAPEAAAVAGGSKSAKAAPAASRVPEAAKAARELPSPGKYDVDFASDICVDDYLVGSDEGQLVVVPPVAATTAAAVVPRAKGGAPSAGGEMPALTAVRDEAGAVSRRLKEMKEALSQAADFADRAASGALTAAVCAEVERLRMQHADAVREKSAADSKCRKLADKGSLARERAEQLEERLSVLQSRVERVEAATRTEAERTRK

SEQ ID NO: 78894 - protein, 91 aa, Zea mays
  Coding DNA Sequence Number=SeqID_35519
MGKNKKGRDDSQGIAAEVWTYIRSVERVGLEGSDESEVSSDEEDSFDSSKEGSGGDGDDEGDGGNGGDGGDGGNNGGKGDDSGGSSKITAE

SEQ ID NO: 78895 - protein, 75 aa, Zea mays
  Coding DNA Sequence Number=SeqID_35520
MEAPDSVRCANGSKSSTVGCANLGRRPALDSKQGMFGGPPDCPGERLQVVEIPRKRGKSKRKKNTVVFQVDHWIT

SEQ ID NO: 78896 - protein, 97 aa, Zea mays
  Coding DNA Sequence Number=SeqID_35521
MVSALNGNSSVNLPLTGTVRGQRPRRACYNGPDHTWASMLDDAARWDDLVTGLRPMSYGEKGVPARCPVSAGPTTSAKASSEGWRIRLRPNTELILL

SEQ ID NO: 78897 - protein, 27 aa, Zea mays
  Coding DNA Sequence Number=SeqID_35522
MVAQMPKLKRGLRLQDEGLLSAKTYTM

SEQ ID NO: 78898 - protein, 364 aa, Zea mays
  Coding DNA Sequence Number=SeqID_35523
MAKRPFLERLAQRLPPRTTRPVALTLRQGRRHLWQAKRAMLHLRHDDRVKKGTGKGDTPKGILLREGSGPRALLLMRGSKAGPSEGFDSRLRALGLRAHYWSEVRRLAPRKGSTAASGHSGSAPTTDQGFVGWPPKGSTAASEHAERGITLGTSDTWPGLGLRSRGTLGHFRDQQERFCNGIPSEGGIEPSDPIKRDRVRQITCRARTQPRPRMTVSASPDPGARTQPLPRTTDSASPDPGLGLSLDLGRRTPPRPTPGLGLSLDLGRRILPCPTPGLGLSLDLGRRTPPRPTPGLGLSLDLGRRTPPRSTPGLGLNLDFGRRSPPRPSPGLRLSLDLGGVTASPDLGLEPTTSQGGHHYPTPS

SEQ ID NO: 78899 - protein, 198 aa, Zea mays
  Coding DNA Sequence Number=SeqID_35524
  Pfam annotation: Domain name=Transposase_28; Domain location=1-160; Score=-48.9; E_value=0.0051; Accession=PF04195.3; Description =Putative gypsy type transposon
MALLDPPKCFQSEVALNLVRNLLGWGAPAFAGRIRVGVSPHDDLAAVEFVLFVSNLPCGLALSISSFFVRMVELLDLQPQHFTPRFISQAAIFAYLCEMSVGATLLPPTYGQKGVAQRPSGGGMRVELRLHLSRLHQHPMVGSELSCGFVSLALMASVSPLMVTVGPVADTEGATREVVQDAVETAAACLQRDPTDVE

SEQ ID NO: 78900 - protein, 281 aa, Zea mays
  Coding DNA Sequence Number=SeqID_35525
  Gene Ontology: Mol. function=hydrolase activity, acting on ester bonds; Cellular component=cytoplasm; Biological process=D-amino acid catabolic process
  Homolog annotation: Hit_ID=A2WMP8; Match level="QueryCoverage=51%, HitCoverage=70%, E-value=2e-49, Identity=74%"; Hit description=D -tyrosyl-tRNA(Tyr) deacylase
  Pfam annotation: Domain name=Tyr_Deacylase; Domain location=2-143; Score=87.7; E_value=3.7e-23; Accession=PF02580.7; Description=D-Tyr -tRNA(Tyr) deacylase
MRAVVQRVLSASVEVEGRIVSAIGPGLLVLVGVHEADTDSDADYMYNTLLLSFASHFLQLLVLNMRLFSNDKTGKAWDQSVMQRNFEVLLGNMMMQPFTIQFTLYGILKGNKPDFHVAMSPAKAKPFYASLVEKFQRSYSADSVKGVRHFPMGVRSHCRYSGVYRLFWPCGDPRAIHVVGSGVVYHATRGSRMGIVPSHCSKGYPCSREPAPKEDDSWVRAPVSDTGLLVSAEVKRRATTGGGLLLTLRFAFFALGDRRPRSMTRGPRPPLQRLVRCFRRR

SEQ ID NO: 78901 - protein, 169 aa, Zea mays
  Coding DNA Sequence Number=SeqID_35526
  Homolog annotation: Hit_ID=A2WMQ2; Match level="QueryCoverage=39%, HitCoverage=37%, E-value=1e-12, Identity=47%"; Hit description =Putative uncharacterized protein
MSGEEADGSKPQGGGVHYGTFQGPPSYPPPRPPPSLSAHHRGDYQAVPARDYEAGVRGRSHDRLPCCGIGFGWFLSIVVPRSIPGQNSWYSNCSAAAIASCPSDLFALSSNDNPLRFKPFCCAVPELITGRNQVMSHVLQRHLEYLVLAAAVSYPNPMNFIPALDHYNA

SEQ ID NO: 78902 - protein, 163 aa, Zea mays
  Coding DNA Sequence Number=SeqID_35527
MACLGLGGRRKHTLRDNPILQARISIVEGSSSTLGVDYTFGEGLLQESGSSRRLGWSPRGLGQLSPEDISLARGLGRSTPASVPLTDDPARLRPTKSSFRANSASVRADTATPDFGSSKSDRGVPLTKQKKPRTVRPTEPRDSYASGIRIPRSSPLHGATHAW

SEQ ID NO: 78903 - protein, 103 aa, Zea mays
  Coding DNA Sequence Number=SeqID_35528
MAEPESEPWGRAKRSSSSSGAEPESEPWGRAKRMERRSDYGHFGSVNWRTRVRTKLRADGGYQLRFRSLEAPEASEEWFDSSEVLMPRAMLRLVWSFPHASWP

SEQ ID NO: 78904 - protein, 79 aa, Zea mays
  Coding DNA Sequence Number=SeqID_35529
MARNSSSFYRWPCHHHLPTARLALTPRLPKGHDQPEPKKQPTRASAILRIAADTAYSVGSLERGKSGSQAYPITSSDGF

SEQ ID NO: 78905 - protein, 304 aa, Zea mays
  Coding DNA Sequence Number=SeqID_35530
  Subcellular localization annotation: CTP_CleavageSite=51; ConfidenceScore=5.25e-01
MSSSSLMRRVFPSSKPPDGGYPPPFHLLVGGTQLHGSWYLSAIVRLQGFSSAGPAAPLRRRSPRMVTTSFWVGKSKPGCDLGPTLSFKDVHHPRWGGGHAEPALYLPRGSAGHPFPRRSGVEALAGPAGGADLDNVGLIDGGRRHLQRVGVVDRASGGPSCRRAAAAPGRCPTRLGGFEWGSAGGLASPAIGAEAEAVREVLVADGITATIRAPGHCAGVLVLAPRASAGARARSQQRRPTVAVVRTGGGEPLVSLLLLRRPSPWSGVESLGPIGLVVWGSSSLVKETPRPLFDEPRPGVAISV

SEQ ID NO: 78906 - protein, 79 aa, Zea mays; identical to SEQ ID NO: 78904
  Coding DNA Sequence Number=SeqID_35531

SEQ ID NO: 78907 - protein, 354 aa, Zea mays
  Coding DNA Sequence Number=SeqID_35532
  Subcellular localization annotation: CTP_CleavageSite=60; ConfidenceScore=5.10e-01
MDVGMPISRGSAKFRHIIFVDGVSVSMGDATRGNHGSTITSSIDGGLAAARGFPARRRVREMRRQILETALVTVDVGTRGRDLALSDDHQQRRRAAVSKCEHGVYPASDELQLYDSGGTEGAPLVIGKGALLSATTFRYQPPRGRIRWSLLRPTPGGHPCAPLSSRWRPWDLGGCTRASPMRGGVGLWAPVMLQLEDELLVQEGMLNCSGVRMASHSSSDFCTDPGGGVDDDIAATLGGLRPAAPCNADAAAWPLHGRAAHERGADRGRAAEGEGARREESGSAACGAKAAQREHERDAILSLSRRWTHIVVLAAVKCNVSRSLSDKVLDGRAYGLDLLESLVGGIKDLTVPYI

SEQ ID NO: 78908 - protein, 177 aa, Zea mays
  Coding DNA Sequence Number=SeqID_35533
  Gene Ontology: Cellular component=1-2nm peptidoglycan-based cell wall; Biological process=regulation of cell growth
  Homolog annotation: Hit_ID=P58720; Match level="QueryCoverage=92%, HitCoverage=23%, E-value=7e-89, Identity=99%"; Hit description =Putative membrane protein igaA homolog
  Pfam annotation: Domain name=IgaA; Domain location=1-177; Score= -308.2; E_value=5.5e-08; Accession=PF07095.2; Description =Intracellular growth attenuator protein IgaA
MAENLDALKCGGRKLTPEERSAVENYLESLTQVLQVPGPTGASAAPISLALNAESNNVMMLTHAITRYGISTDDPNKWRYYLDSVEVHLPPFWEQYINDENTVELIHTDSLPLVISLNGHTLQEYMQETRSYALQPVPSTQASIRGEESEQIELLNIRKETHEEYALSRPRGLREAC

SEQ ID NO: 78909 - protein, 50 aa, Zea mays
  Coding DNA Sequence Number=SeqID_35534
MLDEAAGWDDLVIGLRLATRGTRARLAKASSEGWRLRLRPNICPPRDQFD

SEQ ID NO: 78910 - protein, 140 aa, Zea mays
  Coding DNA Sequence Number=SeqID_35535
  Gene Ontology: Mol. function=peptide-methionine-(S)-S-oxide reductase activity; Cellular component=cytoplasm; Biological process=response to singlet oxygen
  Homolog annotation: Hit_ID=A5BF60; Match level="QueryCoverage=37%, HitCoverage=37%, E-value=2e-24, Identity=90%"; Hit description =Putative uncharacterized protein
  Pfam annotation: Domain name=SelR; Domain location=9-76; Score=19.5; E_value=3.4e-11; Accession=PF01641.9; Description=SelR domain
MGSMYLFLYPGTGEYDKFFEEGIYKCAGCGTPLYKSSTKFNSGCGWPAFYEGLPGAIRQTATKQLVQDYTIRLLNVNHFISCRRRKSLTIANRIETDIMIGFTPCTNLPAPHTNSVVTVCKYVLSSCPINVSEAIDLTGD

SEQ ID NO: 78911 - protein, 259 aa, Zea mays
  Coding DNA Sequence Number=SeqID_35536
  Gene Ontology: Mol. function=nucleic acid binding; Cellular component= intracellular
  Homolog annotation: Hit_ID=Q6QP57; Match level="QueryCoverage=50%, HitCoverage=42%, E-value=2e-11, Identity=36%"; Hit description =Putative zinc finger protein
MSSVVEVESEPARVGRGGDRRLRPGPSASPGVERGGVRRLLGPRPSPSPGVGRGGVRRLPGPRPSPSPGVGRGGVRRLPGRVRALGSGEAEFVVFRARGRVRALGSGEAELPMAPEAGLGCCQPHSVEWHSSRSGAGGAVLSSGRSVERRSDCGHFGSVAWRARVRIRCQAILALNASAVRSVGVASGQGCFLAKTGPRASRRPLQLCADGGYQLRLGVLGVPLIMVPDNRLVEGVLDKESLYLKTGGYKKLEWLSEGF

SEQ ID NO: 78912 - protein, 84 aa, Zea mays
  Coding DNA Sequence Number=SeqID_35537
MERNQWMVDGFAKADYVADSATNLGEESYEACITAGHAKIIHGHAFLSSFSENLAVGRIWLWGESEYHYDYVWRKIKLFIGLRI

SEQ ID NO: 78913 - protein, 134 aa, Zea mays
  Coding DNA Sequence Number=SeqID_35538
  Gene Ontology: Mol. function=oxidoreductase activity, acting on paired donors, with incorporation or reduction of molecular oxygen, 2-oxoglutarate as one donor, and incorporation of one atom each of oxygen into both ...
  Gene Ontology: Mol. function=donors; Biological process=protein metabolic process
  Homolog annotation: Hit_ID=Q5QMV1; Match level="QueryCoverage=84%, HitCoverage=27%, E-value=4e-34, Identity=62%"; Hit description =Oxidoreductase, 2OG-Fe(II) oxygenase-like protein
MALDAPVERRDEVQIAMGNGNGVAPSQPSRPAGRPTAAAAAAPYADRRLRLNPNADHKPEDYSDVRGEYAPAVYSALERHLPPSLIDADRDVKLHFMRDILARYWPQGERNKVWLSIPLSHLQPTDMKNHADSL

SEQ ID NO: 78914 - protein, 222 aa, Zea mays
  Coding DNA Sequence Number=SeqID_35539
MAFHTPVRKEWHSFHPCHGGKGIVEVDVLGGVTVGAEVRVDSGGGLEQRRVPQLEGIGLSRGLCCSHALEQKGRSRSRGAQSHAGEELQREQKRLEELGRWGHIQSEFSQEPSTNLPRNLKVLVGLTVVRMRMALHRNLLIKLWVHQARCEDEIFQGMPTSVQEFHTQGLKKILVQPMKEEEDKDPHDDVDVTDSEDTHAPNGSNVGGENNEAAPDEFEDGY

SEQ ID NO: 78915 - protein, 73 aa, Zea mays
  Coding DNA Sequence Number=SeqID_35540
MASGEYDSLQYFCPIPLIKCLGFEEERCKGTENIGRGYSTFTRAEDLGATSTIYLFYVRLVTRAVGVTRVQRV

SEQ ID NO: 78916 - protein, 158 aa, Zea mays
  Coding DNA Sequence Number=SeqID_35541
MARTRAYKAPRDFDRTPLHALDLTEAQTHQRLPVHGVSVAARSPYHHRPANRTLPNPVQPSEKAEHTSVKLPEQGIGVCFAGEASPWSPDSTRPPVKENRKDYNLADGDYVLVPEQGAAQEVAPDPAPEPALEDLIATALEGKPRFMHNLLFMLFYYT

SEQ ID NO: 78917 - protein, 53 aa, Zea mays
  Coding DNA Sequence Number=SeqID_35542
MGIGVYGIKIGIRIKVWYRSLEDMVAGVSWSSILPPGWTVEWDPTSAEEEHEE

SEQ ID NO: 78918 - protein, 214 aa, Zea mays
  Coding DNA Sequence Number=SeqID_35543
MARRDFDGFEGQISSLAFTVELDKRSCELFIAETVMEVEDLVGPVMKAEVEKGAALCGGYVSVNHVFSMMDHEYEKHRAKPKRGRKTPTVVPAQSHMSIETVGLFGGAPGTRDVDPYLDVTARDSPSSLDPSPEPYQCWSFKKKQFQKISTEANIARSICVAYLGMKDFGCHSAEASSSILEPLGHPKIAIGATGSYEASLRLIFLFHPDLMIA

SEQ ID NO: 78919 - protein, 214 aa, Zea mays
  Coding DNA Sequence Number=SeqID_35544
  Subcellular localization annotation: CTP_CleavageSite=38; ConfidenceScore=5.03e-01
MARTRAYKVPRDFDRTPPHALDLTGAQTHRRLPVHGVSAAARSPCHRRPANRTLPNPVRPSEKTEHTSVKLPERGIGVCFAGEASPRSPDSTQPPASVDRVKENRKDCNLADGEYVLVPEQGAAQEVAPDPALEPAPEDLPATALEGKPRRLCPSRDLGRGLPFRLWWVQVRSLHDDSRGSLEDMVAGVTWPSILPPGWTVDWDPASAEEEHEE

SEQ ID NO: 78920 - protein, 119 aa, Zea mays
  Coding DNA Sequence Number=SeqID_35545
  Subcellular localization annotation: CTP_CleavageSite=44; ConfidenceScore=5.45e-01
MEMWPSAMGEQGAARAWLLGKRSSTASWSITARRSSGRAQTPWRAASRAGMRRRLERGERRRKGWRLGKPSVAAPPVRELGGGSSWSRCRLRDEPERRYHGDKNQTCRDKIDEAKYQKR

SEQ ID NO: 78921 - protein, 178 aa, Zea mays
  Coding DNA Sequence Number=SeqID_35546
MAVGPARPPCPARLLRPRLLVRPLWQNLQGFKEGNQVQGRERRLAKSELASVRQGDSQFDGTVTERILWHGLWKDSASDDARNKARSRSGELYGVDCLTATTAVATRTTSPHHNITTAITRCAHMQLETELGIARELDQIRAGRKRSRAGWSRARRWRATQMRDAGARAPLAMGGRGS

SEQ ID NO: 78922 - protein, 42 aa, Zea mays
  Coding DNA Sequence Number=SeqID_35547
MGLGVCGSLCQGGDEEDGYDYAYGNDEVVEEDFQEFQEYDES

SEQ ID NO: 78923 - protein, 57 aa, Zea mays
  Coding DNA Sequence Number=SeqID_35548
MRQGLPFRLWWVQVRSLHGGDQGSLEDMVAGVTWPSILPPGWTVEWDPASAEEEHEE

SEQ ID NO: 78924 - protein, 77 aa, Zea mays
  Coding DNA Sequence Number=SeqID_35549
MVNSTPVLFTLICIRLRVTLGLFAFCQAEDCNLADEEYVLIPEQEADQEEAQELATMAATVDLPTTPAIKGKPRFYA

SEQ ID NO: 78925 - protein, 120 aa, Zea mays
  Coding DNA Sequence Number=SeqID_35550
MGKPVPSLLVLLLSQVQWIKQSHFLREADDSNRVFILASDRTCTHHNRNGRPRLRSREEGNLLLGSIRLCIKPGLAFQSWGRQILDGRLWYWIWGYLLSNSLLRHEDILSVSEVAIYRMQ

SEQ ID NO: 78926 - protein, 125 aa, Zea mays
  Coding DNA Sequence Number=SeqID_35551
MGKSKKGGSSSHHFSDKRKREPTPPLEDFGDSEYSEEEFSFESEGSPGSDESEVSSNEGDSSDSSEEGSDDNDGGEGDGCDGGEDDGDGGGSKGDGKGDGGNDSGNGKGDTTAARPVARHHWLRC

SEQ ID NO: 78927 - protein, 74 aa, Zea mays
  Coding DNA Sequence Number=SeqID_35552
  Homolog annotation: Hit_ID=Q5NKP3; Match level="QueryCoverage=75%, HitCoverage=22%, E-value=6e-22, Identity=89%"; Hit description =Putative uncharacterized protein 9C20.7
MYEDFTGRLISNGFARETLVLASLIDDEKKLGDCQFDLWKQYYVATCVAVFGKLRRSHRLDAVQSGCTALSIFK

SEQ ID NO: 78928 - protein, 440 aa, Zea mays
  Coding DNA Sequence Number=SeqID_35553
MLPSEGAEHGVSSELLMGPFDRVRGLDASLRWDSVTNRSRWSRKCPRGYLESPVLVPQSRRRGIGMSGGVSSYDAWVPAPCRGGRTLEVVSGDFARDAKRCKRGGLPIKGGNDPLGSGHAFVLPSCLVPFRLLSPRMGCPSFALLLLSLEEHGLMEIASRIFVILAEVEGELSRALPPAWASRPSPPSAFRGEGTHRPCGGANFDNAGLVGRKRRQLQRVWLAGSAGSVAASDAASCRLIWARASVAPRAPVDRPRRRQGLPVREDLSGDQPVQARASAIRRCGADAQVAAVVGAEVVAAEGAVLPPGTEVVVTAVGAVAGEPLGVCHPVGPCFRKPQLLCDEPKPEAAVLARTDAESARNEASSAREMASSQAEEDVAAGCWSLAKTSAGVVLASSLRWRSFCSGRRPRPGLVPPRVESMPRVLLLPLPMPEPAGIVCL

SEQ ID NO: 78929 - protein, 403 aa, Zea mays
  Coding DNA Sequence Number=SeqID_35554
  Gene Ontology: Mol. function=caspase activity; Cellular component =cytoplasm; Biological process=proteolysis
  Homolog annotation: Hit_ID=A2XHI1; Match level="QueryCoverage=99%, HitCoverage=97%, E-value=1e-123, Identity=60%"; Hit description =Putative uncharacterized protein
  Pfam annotation: Domain name=Peptidase_C14; Domain location=90-398; Score=167.9; E_value=2.8e-47; Accession=PF00656.13; Description =Caspase domain
  Subcellular localization annotation: CTP_CleavageSite=36; ConfidenceScore=5.23e-01
MAGGNTAATLWCSHCGMGIAAPAPGSGSIVRCAFCRGVTRVEHQRGGVGERAMTTRTLAAAASLPRQLPVSAGPVEIPASYPRVSGGNKKRALLVGVSYTGTAHELKGTVNDVKEMRRLLCDRFGFPGACILELTEKESDPTRVPTRENLLRAMRWLVEGSSSGDSLVFHFSGHGVQKLDMNDDEVDGYNEALCPMDFERSGKILDDEINDTIVRPLGKGVKLHAIVDTCHSGTILDLPYLCRMSSKRIDTRVHTRIARPFVSRTGYWQWENHARPSGMLTKRPNGGLAISISGCSDDQKSADASLQMTHAATVCATQGFSDESSSIGAMTDSFIKAVEAEPGTTYGRLLSAMRTRIRDGQGSRRLPGRLGSFVRWMIPSSSVQEPQLCSSEMFDIYRKPFLL

SEQ ID NO: 78930 - protein, 57 aa, Zea mays
  Coding DNA Sequence Number=SeqID_35555
MGDYISGRVRGKVHCQVQSGFNNIMLKETESRSNLGFLNHAGLPVGYAYYLLGLGFD

SEQ ID NO: 78931 - protein, 132 aa, Zea mays
  Coding DNA Sequence Number=SeqID_35556
MARVLNPASHGPNPRIKGVFCAKEDETNYYDAALTEDDDTFGLSTARCGAAAAPNSGDELRLARTRSLHAKPLPGAPTVGVSDPGGYLGPTSEIAACPYPDGLARDGTQEVGQALYYPAPGVPLVVGVKRVA

SEQ ID NO: 78932 - protein, 89 aa, Zea mays
  Coding DNA Sequence Number=SeqID_35557
MAHRTVRCATGAPTVRHRGLDAFTALVPTITGMGDYVSGRVRGKVHCHVQSGFNNIMLKETESRSNLGFLNHAGLPVGYAYYLLGLGFD

SEQ ID NO: 78933 - protein, 227 aa, Zea mays
  Coding DNA Sequence Number=SeqID_35558
  Gene Ontology: Mol. function=caspase activity; Cellular component =cytoplasm; Biological process=proteolysis
  Homolog annotation: Hit_ID=A2XHI5; Match level="QueryCoverage=96%, HitCoverage=63%, E-value=5e-35, Identity=39%"; Hit description =Putative uncharacterized protein
  Pfam annotation: Domain name=Peptidase_C14; Domain location=64-227; Score=-28.9; E_value=0.0024; Accession=PF00656.13; Description =Caspase domain
  Subcellular localization annotation: CTP_CleavageSite=59; ConfidenceScore=5.11e-01
MNMGGVSPSTVRCKHCSTQLTVCPGERAIQCTQCCGVTRIRRRRVQRPAAAPPTTGFPRARGKKRALLIGITYAAGLRPAEGGPQRRQVHEATPLPALRLPQRLHHHAHCWTSSRGADDQKDPFRLPTKDNIRLGMQWLVEGSSEGDSLVFHFSGLGAQVADDDGDELDGYDEAICPMDSFQKGPILDDEINETMVRPLVHGVKLHAVVDACHSATVLDLPFCCNMS

SEQ ID NO: 78934 - protein, 994 aa, Zea mays
  Coding DNA Sequence Number=SeqID_35559
  Gene Ontology: Mol. function=transcription regulator activity; Cellular component=nucleus; Biological process=regulation of transcription, DNA-dependent
  Homolog annotation: Hit_ID=A2YNU4; Match level="QueryCoverage=84%, HitCoverage=95%, E-value=0.0, Identity=71%"; Hit description =Putative uncharacterized protein
  Pfam annotation: Domain name=Ank; Domain location=635-667; Score =33.7; E_value=6.7e-07; Accession=PF00023.21; Description=Ankyrin repeat
  Pfam annotation: Domain name=CG-1; Domain location=19-137; Score =298.3; E_value=1.5e-86; Accession=PF03859.7; Description=CG-1 domain
  Pfam annotation: Domain name=IQ; Domain location=810-830; Score=22.1; E_value=0.002; Accession=PF00612.18; Description=IQ calmodulin -binding motif
  Pfam annotation: Domain name=IQ; Domain location=833-853; Score=28.0; E_value=3.5e-05; Accession=PF00612.18; Description=IQ calmodulin -binding motif
  Pfam annotation: Domain name=TIG; Domain location=403-489; Score =26.5; E_value=9.7e-05; Accession=PF01833.15; Description=IPTTIG domain
  Pfam module annotation: Pfam domain module=Ank::CG-1::IQ::IQ::TIG; Domain location=635-667::19-137::810-830::833-853::403-489
MADTRKFVLPGQPPDISQILQEAQNRWLRPTEICEILSNYKLFSIAAEPPNMPRSGSLFLFDRKVLRYFRKDGHNWRKKKDGKTVKEAHEKLKAGSIDVLHCYYAHGEENENFQRRTYWLLEEDFTHIVLVHYLEVKGCKQSFNRVKEELMQLSNVDSPSCSNSITSQNQMGPQNMEAAESPISGQISEYEDTESGYHGEMLPITDNLDNRSFSNHDIARMLDGANIGLSDVSSTLFDSVPFNEPFTNYSAGFTEPTLHSSFACLEANDLDDSSCLQTFTSEALYTNHLNQKEADALGFTGILASEVNRDRYNDGSIKHSLLKQSSLDLLTIEAPGLKKNDSFSRWMSKELEEVVDLGIKSTSDAFWSSIETVKVPDGSNVLTNEQLDAYVVNPSLSQDQLFSILDVSPSCAYIGTNTKVSVTGTFLVNKKHVESHRWSCMFGDVEVPAEVLTDGTLRCYAPAHQSGRVPFYVTCSNRVACSEVREFEYRDSEAHYMETSRSQANGVNEMHLHIRLEKLLTLGPDDHQMLVISSGNEKYEIMNAINSLMLDGKWSNQESSVKEVVSTARVQSLKKLVKEKLHQWLICKVNDDGKGPNVLCKEGQGVIHLVAALGYDWAIRPIMIAGVNVNFRDAHGWTALHWAASLGRERTVSVLIANGAAAGALTDPTSEFPSGRSPADLASVNGHKGIAGFLAESALTSHLSALTIRESNDSTVEACGLPFAEDLTGIDSVHLAGEGPDAESLEGSLSAVRKSTQAAARIFQAFRVESFHRKKVVEYGDDTCGLSDECTLSLVSLKNVKPGQHDTHLHSAAVRIQNKFRGWKGRKEFMIIRQRIVKLQAHVRGHQVRKNYRKVVWSVGIVEKVILRWRRKRPGLRGFRPEKQLEGPSQIQPAKAEDEYDFLHDGRRQAEARLQRALARVHSMSQYPEAREQYHRLTTCVAEMKQSRMMQDEMLSQAAGGADDFMAGLEDLICIDDAPPRCLPFGEAEPFYIR

SEQ ID NO: 78935 - protein, 432 aa, Zea mays
  Coding DNA Sequence Number=SeqID_35560
  Homolog annotation: Hit_ID=Q6J9V9; Match level="QueryCoverage=15%, HitCoverage=22%, E-value=1e-23, Identity=80%"; Hit description =Putative uncharacterized protein
MTNSKRLAGRPPHLHSLASRTKSPLTYFGVLPPRHGGWDPHVIRADPKHEEGEPPHARHVTVSRLQALSHLRRNQGSKGWTATRQASNCTAIVRPFGFDHIRRTSTKEAGPHVMTQQCQLKVTATGRSAAGDQERGCCGKDPSRRRKRAPSPPTDQGFEGWPLGRAGPSEGFDSHPRARRVRDDSGYVRYIAEARATLPRYPRTFPRLAGMICNGIPPKGGIEPSDPVEGENSAARSAPTAVSATPTTTDNKSRSTTEFSLGRNRKLRLARPHAPASRGGFRLARPQAPASGGGLRLARPPNSASTPVSGGITSSPDPGLGLKRSLRLNRPWAQADHANRGYIISLFLACSGYKEQDRRPIWLTPTTGLKRSSDGHAITCTGPKLSPNGHVGMCTGLRHSTAGHKVIPNGYVLSAVVFNGIIRHADCTLIVT

SEQ ID NO: 78936 - protein, 98 aa, Zea mays
  Coding DNA Sequence Number=SeqID_35561
MRLRSVLWFRILVCLIFSVLLRHGYVGSAGAESEAHLTYLPGLLTLLTISGRYVEEWAEDAALRQFDTQGTAADDDDDDDDDFGVPPPPPPPMPSPLP

SEQ ID NO: 78937 - protein, 149 aa, Zea mays
  Coding DNA Sequence Number=SeqID_35562
  Subcellular localization annotation: CTP_CleavageSite=45; ConfidenceScore=5.07e-01
MNKKHWHSKCHYKRNSGSPSAGTNNPTPRGRPAEQRKADEQRAVTCSSSGDDDDFCFGGPNSGNADLRLDAAARRPPPMPKLVRQGRAEGREVGGQPVAGPGYRAGGRTSSSCRGRRRRRERLQGHSRLKTRHAAAASATGNTRSSPHH

SEQ ID NO: 78938 - protein, 927 aa, Zea mays
  Coding DNA Sequence Number=SeqID_35563
MPSSSSSADATPPAAASSEETLSSVMVEELCAGDSVEFGVSRMTSARIEDMQRLGYFGGGVARAPGTEEVPEPEGELVVFEAFFVAGLRLPAHRFVGEKRVVEGGVAQFGSCTFTPKTGKTTMPVVELVPCARNKWGNWNEFWFYVAEATVEGHEGLPVSEMCSHYYSAYPPFEVAEEDADEGALRSAAGQSSGRDLVEEFVAYGVWPLAHGWALGEVCPRQMPFHGGRVVRSPAFALNLRNRDPAAFVRDAEDLAVRLVGRYVPRTEGQRSFDIRGSNERLNRVFELNQLPYDGYPGQDEADRRGKKPAVETGGDPALVAAASSKKRKLGTAMGRLGVSDSFARDLMRTCAAPGERMSSAELRESSARMLRVTGGCWPKDIPIPCAAEEDCFTSRMVHRWRVFPYGRNIGHVVWAVMDKDRQGAARKRQATVRVHEARPKRQRGTAKAEASGGGKPPLPAKVGASAPGKAPEMTVGAGGPKLSKVVPSVSGVAEAAKAARSLPPPGERVADFGTEINVEDYLGGSDEGPLALVVPGAAIATAAPAPKAGGETLGAGGEVSALALVRDEAGVATRRLKGATEALSRATEALSQVADFTSRAASGALTATLSAEVERLRTQHADAVHEKSASDSKCRKLAEKVAALEKEKADLRRQLAGERREANEAIAKEQAAQAEARLARAEGNIAKELAGELQRRLTALESRAEGAEAAMRAEAERTRTQLMTSYRELGVRTGDFEVPEREAGLRCLEWVQEELQELPTVLAGLMSFTSLVTCEAAMNALSREGCRHFEALDQVDEDFGCDIFEVEDPVVKESAGALYDRMWGSYGREVVRARAEAARAQAERGERVDDFGALNSALPEPETTPAEAATGVAPGPTPETAEDAPGAPASAAAGEDLPPRVAEGAPDAPAAAVPSAEDPAEAAAER

SEQ ID NO: 78939 - protein, 173 aa, Zea mays
  Coding DNA Sequence Number=SeqID_35564
  Homolog annotation: Hit_ID=A2X5P6; Match level="QueryCoverage=67%, HitCoverage=74%, E-value=6e-24, Identity=52%"; Hit description =Putative uncharacterized protein
MAATACAYAYQGARPPQVLLPATFIDVDGAVQQSAPPPPPPLPRPSFLSHHLDICTEGLGSESSGDIDLTDDVDDNAAACVDVGQAPTCKRQHRDGGHEETGRARNARPAFPPPISLIGAGGKPWLYLRPLREDGRLVLREVRIPLRELLQARREDGRFKLQFAQPQPDDRCQ

SEQ ID NO: 78940 - protein, 294 aa, Zea mays
  Coding DNA Sequence Number=SeqID_35565
  Gene Ontology: Mol. function=hydrolase activity, acting on carbon -nitrogen (but not peptide) bonds; Cellular component=cytoplasm; Biological process=nitrogen compound metabolic process
  Homolog annotation: Hit_ID=Q93XI4; Match level="QueryCoverage=94%, HitCoverage=94%, E-value=1e-130, Identity=79%"; Hit description=N -carbamoylputrescine amidase
  Pfam annotation: Domain name=CN_hydrolase; Domain location=10-161; Score=125.8; E_value=1.3e-34; Accession=PF00795.13; Description =Carbon-nitrogen hydrolase
MAAAAGRKVAVAAVQFACTDVEAENVATAERLIREAHKKGAKIVLVQAALPLMVHRMQQLAKELEVVIPVSFFEEANNAHYNSVAIIDADGADLGLYRKSHIPDGPGYQEKFYFNPGDTGFKAFKTKYATIGVGICWDQWFPECARAMALLGAEILFYPTAIGSEPQDCNLDSREHWKRVMQGHAGANLVPLVASNRIGRETVDTEHGKSSITFYGNSFIADRRLNVRNTTSIEFSAGPTGEIVKLANDKDEEVLVAEFDLDEIKSIRHGWGIFRDRRPELYKVLLTLDGEKQS

SEQ ID NO: 78941 - protein, 55 aa, Zea mays
  Coding DNA Sequence Number=SeqID_35566
MLLLLLSSTFLLLMQAVVQSLQVAGLSGHGTAKRTLSKTGCGCNADNLGMGGFGV

SEQ ID NO: 78942 - protein, 285 aa, Zea mays
  Coding DNA Sequence Number=SeqID_35567
MSRKDKLLGPSLATLLAGVTSMMRSTPCYVGHLTDGAEVCSEHYSISERDSAEAAMQDAARRALSHYCSVLGGVADGLNLKYYPRRPSGSTGGVIVSPVGEGNPRLSSTVNLAAVLNTELDHALDELSRARAEIALLRAERAERRHLDDGSPAPVGTQHPYHSPRRGRQLSTFRDRGVPKPTSECAACPSPDGSSAWASAKGGEARWPEPSVREVEVPRPSCSSRAQVRCACSRGVTSVHAGEGSERPQESACPVLGPARPTSSEKALVLPFIVVRRGSRCTMGM

SEQ ID NO: 78943 - protein, 303 aa, Zea mays
  Coding DNA Sequence Number=SeqID_35568
  Gene Ontology: Cellular component=integral to membrane
  Homolog annotation: Hit_ID=A9PHY1; Match level="QueryCoverage=52%, HitCoverage=55%, E-value=2e-42, Identity=60%"; Hit description =Putative uncharacterized protein
  Subcellular localization annotation: CTP_CleavageSite=61; ConfidenceScore=5.90e-01
MAAAAAISLSFHFRFRPPFPSPRTPTRHAPFSLFSPSLLAPCRLRVAPGRPSPSPWRPDVRARAGSTIGAPPALVRPGGAVETDRLPSDVRDRAMEAVDHFGGRVTIGDVASRAGLQLAQAERALQALAADTEGFLEVSEDGEVLYVFPKDYRAKLAGKSFRMRVEPLVDKAKQVGAYLVRVSFGTALIASIVLVYTTIIAILSSSSKANATEKAMVAGLGGLNLFGVIILGNLLKQMTVTPGGLISFAAQLYPLLQLLSARDMAERKVITPEEIVYTTEKDLLEQDYEVKEWERRFKELESE

SEQ ID NO: 78944 - protein, 99 aa, Zea mays
  Coding DNA Sequence Number=SeqID_35569
  Subcellular localization annotation: CTP_CleavageSite=77; ConfidenceScore=5.90e-01
MASSPVLAVSSNPLPPPSAYKRTRPSPVFTTQLRPPPLPSPPSHSSKRRRAPFIALLCQKLRHTLTVTGRHFSPSIVAGNLTGGITAAGTSHRTADRPP

SEQ ID NO: 78945 - protein, 105 aa, Zea mays
  Coding DNA Sequence Number=SeqID_35570
  Subcellular localization annotation: CTP_CleavageSite=43; ConfidenceScore=5.05e-01
MMLVDYTMGLLQQSGYPVVVQGASLAKVQGKAASQTPPPAEARGKSPAGPGPGPTPTPGVGAPAPRTGDNAVSLGDWTDLAPYDAVDAPSGEKAKRGSQTYVQCT

SEQ ID NO: 78946 - protein, 79 aa, Zea mays
  Coding DNA Sequence Number=SeqID_35571
MELPLDAQSSGRRLDVDERVEQCRAVVGVLHVLARFVLVLQMQHLRGALSSDDTAVAAEETASGTGAGADADAGASDLA

SEQ ID NO: 78947 - protein, 344 aa, Zea mays
  Coding DNA Sequence Number=SeqID_35572
  Gene Ontology: Mol. function=hydrolase activity, acting on glycosyl bonds; Cellular component=extracellular region; Biological process =cell wall organization and biogenesis
  Homolog annotation: Hit_ID=A3BRY4; Match level="QueryCoverage=87%, HitCoverage=72%, E-value=1e-148, Identity=80%"; Hit description =Putative uncharacterized protein
  Pfam annotation: Domain name=Glyco_hydro_28; Domain location=19-343; Score=335.1; E_value=1.3e-97; Accession=PF00295.8; Description =Glycosyl hydrolases family 28
MEARPRLLLVVVAIFVSISAVAAAVINVKNYGAHGNGVNDDTKGTLKAATDLKRFGNDWIEFGWVNGLTVAGGVIDGQGAASWPFNKCPIRKDCKVLPTSVLFVNNQNTVVRDVTSVNPKFFHMALLSVKNIRMSGLKISAPSNSPNTDGIHIERSSGISIMDTHISTGDDCISIGQGNDNVDVARVQCGPGHGMSVGSLGRYSGEGDVTRVHVRDMTFTGTMNGVRIKTWENSPSKSNAAHMVFENMVMRDVQNPIIIDQKYCPYYNCEHKYVSGVTLNDIHFKNIKGTATTPVAVLLRCGVPCRGLVLQDVDLRYKGQGGTSAKCENAKAKYLGYQFPKPCP

SEQ ID NO: 78948 - protein, 76 aa, Zea mays
  Coding DNA Sequence Number=SeqID_35573
  Subcellular localization annotation: CTP_CleavageSite=44; ConfidenceScore=5.21e-01
MSPACGPGSAARRGGPVRHRRDGPMANLSCARPDGSPSARARPRHDSVGARPRRGGVARFGPARRRAAQPRPPRYI

SEQ ID NO: 78949 - protein, 84 aa, Zea mays
  Coding DNA Sequence Number=SeqID_35574
MGERAREQQLAMEESKMQGHAMGERQQGDGRIGTVEKRPTQVFCAHFVLTHAHPRKLLGRSLIPICSKPCTLNLEVLSRKASEN

SEQ ID NO: 78950 - protein, 49 aa, Zea mays
  Coding DNA Sequence Number=SeqID_35575
MAVRVSEALYAKAVLLEDMVAGVTWPSIFATGLDSRVGPYLTRGRSMKE

SEQ ID NO: 78951 - protein, 104 aa, Zea mays
  Coding DNA Sequence Number=SeqID_35576
MAGLRPSTTVPYFFPRLVDSRDVASPMRNWFNPTPNSLIYSNIFHPVGVLGDLGHLPEVKMIAEVVGHGDSGPQPLRRSERIVQRPTGTNSLHAVRQGATGDPN

SEQ ID NO: 78952 - protein, 177 aa, Zea mays
  Coding DNA Sequence Number=SeqID_35577
  Subcellular localization annotation: CTP_CleavageSite=58; ConfidenceScore=5.30e-01
MAIVDRPNQPLPAPSDPRDSFTGDAGSTSSDFNRPPSHVDQAPQPERTPSMSSTACARGQTDSGHHHRRVAPRRDRQDLPDLTPPFTGPPSPPAEDTIESTALHVLTTFCGFHPLELSTHPIGLFLTEKEDDPMWKDLVEHAKDVWAPYPGEDLVVDLSTELVEKDFQVEQMATQIQ

SEQ ID NO: 78953 - protein, 132 aa, Zea mays
  Coding DNA Sequence Number=SeqID_35578
MARVACTLRGKRLDGGVSVLSETKKWKKQMSKVMTKCRKIPKLKLETTSTQTPEKTLATLEAIRLPTIEETPLAIVVSETKETIASELLISSDEADKECIAPLMSSYLCDDEDDDALVKTTSVIDVQSMDIT

SEQ ID NO: 78954 - protein, 227 aa, Zea mays
  Coding DNA Sequence Number=SeqID_35579
MAERYQLPRSCAPPTMRRKDGGYPPSGGLEGGKTRCMSEREDMVYFQGGHPPFKGDYPYLRPQPSQAESSPTHSKALPCGAGAGSHMSCKPAQSRRSQTAVRGGASGRRSGRRFAFAVITAPKKGSGKGDTPKRILPQEGTRLRASLLIRGSKAGPPKGSTAASDRVGPTPTTGQRGSGAALSNPALAEPLTASTYQPENLGPDRTPGLRPARMREQPDQPKHYARH

SEQ ID NO: 78955 - protein, 141 aa, Zea mays
  Coding DNA Sequence Number=SeqID_35580
  Subcellular localization annotation: CTP_CleavageSite=54; ConfidenceScore=5.19e-01
MRQPRAPLAGGTGLSGVHRTVSGAPRGHQLKLFALGNSRKPARYNSPDCPPKPRVGLAPSEDGWPRPWGDRPSRLLGPDSRRRPWQRLPGRGDDVDLRSGDLRTVSLSKARSDLAEDVVDAEGVAAPFQRQDLSLQDQIVL

SEQ ID NO: 78956 - protein, 184 aa, Zea mays
  Coding DNA Sequence Number=SeqID_35581
MVTSSLMVGESESGCGLCPYLSLKDFHHQGWGGDCTVPGSRTRVASEPLAAPASSMAAGRGSSADEIARAAHGLTSNSTAFCPSLPHEFGHGRGPPGSSTRPEVSAAAVWPPGAEVVVVAAAGAGDGAPFVGGHQLKLFALGNSRKPARYNSPDCPVCTGHVRCSKEARSPELASLGFARQPLR

SEQ ID NO: 78957 - protein, 144 aa, Zea mays
  Coding DNA Sequence Number=SeqID_35582
  Subcellular localization annotation: CTP_CleavageSite=59; ConfidenceScore=5.40e-01
MAGTPSLGPDDLPQPHPEVRAPTQAGFPRRRAPFRLSTKFSFATFFHGRGRSACELHVRADKIAEGDRKPTGERVPPTIYNTVYNEFVCCSTCLSAYGAQMWSQKTMVDNEEQIMSSARSWTSGTCVQDVGTRMEYATRNGFGG

SEQ ID NO: 78958 - protein, 75 aa, Zea mays
  Coding DNA Sequence Number=SeqID_35583
MHQGSLCKGYIVYPWPFTLVVKIGSCKPRLERDHGSWMVRDTDDLRYNDFIDGFGKEEGVEEDLQEFRDFNEFED

SEQ ID NO: 78959 - protein, 72 aa, Zea mays
  Coding DNA Sequence Number=SeqID_35584
MANNIGFPKLDAILSTMPSEDFSNCLAYTYLKVVEILHNLVNICFLTLPGLILNKALKNRKILWVKPPRRKL

SEQ ID NO: 78960 - protein, 197 aa, Zea mays
  Coding DNA Sequence Number=SeqID_35585
  Gene Ontology: Mol. function=kinase activity; Cellular component =ornithine carbamoyltransferase complex; Biological process=amino acid metabolic process
  Homolog annotation: Hit_ID=Q6QP54; Match level="QueryCoverage=52%, HitCoverage=36%, E-value=3e-12, Identity=40%"; Hit description =Putative kinase
MAPPVDVAGLRPRLGDVEAPPKPRSSLSSMAEAESEPLGRARQRSSAKARAESEPWGRAKRSSSSSGAEPESEPWVGRSGVRRLPGLSPSPSPGSGRVEFAVFWDLARARALGRAKRSFLWCLWQGLTACQSHSIKWHCSRSGTGGAVLLLGRCSRPTDAILEDLLDLWVRTHTRFCSATLILLVDVDRIVFIGVSG

SEQ ID NO: 78961 - protein, 974 aa, Zea mays
  Coding DNA Sequence Number=SeqID_35586
  Gene Ontology: Mol. function=hydrolase activity, acting on acid anhydrides, catalyzing transmembrane movement of substances; Cellular component=integral to membrane; Biological process=copper ion transport
  Homolog annotation: Hit_ID=A2X210; Match level="QueryCoverage=99%, HitCoverage=75%, E-value=0.0, Identity=89%"; Hit description =Putative uncharacterized protein
  Pfam annotation: Domain name=E1-E2_ATPase; Domain location=388-628; Score=297.9; E_value=1.9e-86; Accession=PF00122.11; Description=E1 -E2 ATPase
  Pfam annotation: Domain name=HMA; Domain location=111-175; Score =66.9; E_value=6.6e-17; Accession=PF00403.17; Description=Heavy-metal- associated domain
  Pfam annotation: Domain name=HMA; Domain location=37-101; Score=44.2; E_value=4.6e-10; Accession=PF00403.17; Description=Heavy-metal -associated domain
  Pfam annotation: Domain name=Hydrolase; Domain location=632-866; Score=128.2; E_value=2.3e-35; Accession=PF00702.17; Description =haloacid dehalogenase-like hydrolase
  Pfam module annotation: Pfam domain module=E1-E2_ATPase::HMA::HMA::Hyd rolase; Domain location=388-628::111-175::37-101::632-866
  Subcellular localization annotation: CTP_CleavageSite=51; ConfidenceScore=5.21e-01
MERNGESHLKDPLLPTTSGASPAGASPRKERKTRKVLFSVRGISCASCAVSIETVVAGLNGVESIQVSSLQGQAVVQYRPEETDARTIKEAIEDLNFEVDELQEQEIAVCRLRIKGMACTSCSESVERALQMVPGVKKAAVGLALEEAKVHYDPNVTSRDRIIEAVEDAGFGADLISSGDDVNKVHLKLEGVNSPEDTILIQSVLEAVEGVNNVEWDTVEQTIEVAYDPDFTGPRLLIQCIQDTAQPPKCFNVTLHSPPKQREAERNHEIRNYRNQFLWSCLFSVPVFLFSMVLPMLSPFGDWLEYRICNNMTIGMLLRWLLCSPVQFIVGWRFYVGAYHALKRGYSNMDVLVALGTNAAYFYSVYIVLKALTSDSFEGQDFFETSAMLISFILLGKYLEIVAKGKTSDALSKLTELAPETACLLTLDKDGNAISETEISTQLLQRNDVIKIVPGTKVPVDGVVIKGQSHVNESMITGEARPIAKKPGDRVIGGTVNDNGCIIVKATHVGSETALSQIVQLVEAAQLARAPVQKLADKISRFFVPTVVVAAFLTWLGWFIPGQLHLYPQQWIPKAMDSFELALQFGISVLVVACPCALGLATPTAVMVATGKGASQGVLIKGGNALEKAHKIKAIIFDKTGTLTVGKPSVVQTKVFSKIPLLELCDLAAGAEANSEHPLSKAIVEHTKKLKEQYGSHSDHMMESRDFEVHPGAGVSAHIEGRLVLVGNKRLMQEFEVPLSPEVEAYMSETEELARTCVLVAIDKIICGALAVSDPLKPKAGQVISYLKSMGISSIMVTGDNWATAKSIAKEVGISQVFAEIDPVGKAEKIKDLQMQGLTVAMVGDGVNDSPALAAADVGMAIGAGTDVAIEAADIVLMKSNLEDVITAIDLSRKTLSRIRLNYVWALGYNVLGMPIAAGVLFPFTGIRLPPWLAGACMAASSVSVVCSSLLLQLYKKPLHVEDAPRPREDSDLV

SEQ ID NO: 78962 - protein, 147 aa, Zea mays
  Coding DNA Sequence Number=SeqID_35587
MGQWLGWGRGASNRTQRRGCLTSGATTEPGLSVSGMGQAQARARTDRRGLPGDDPEQREGVSVVLTRGTQGPPVSGHTKGQERGRGWEATGGSHLVGVAVNLDRALSSSAMARIGDLTRAKEDMGRWRLAKEPRHDNTVSVPLIVGA

SEQ ID NO: 78963 - protein, 53 aa, Zea mays
  Coding DNA Sequence Number=SeqID_35588
MSVPALCARWRAINALQVRKRQIFVAFAPRWYQMRKNKIEEREDLVLHIGTNL

SEQ ID NO: 78964 - protein, 169 aa, Zea mays
  Coding DNA Sequence Number=SeqID_35589
MVRLYSRLTAVEPIVRDGAERGPNRVTQELRWGSGLAREASLFLWVGEATSWSQARMAVTVATNRPHRHAREDLQSSLPTQTHASAVEESGHPPQRLAEDPPVGADHRQGARVWLTAEPTCRKPGRTAGRIGSSDALGPVRGNVFNMKYTHHICFNSILFWVCSQIKKG

SEQ ID NO: 78965 - protein, 192 aa, Zea mays
  Coding DNA Sequence Number=SeqID_35590
MGSTAVSLEYSRTIASSTGVRRVLPVTVEGHATAISQDLGSIGVSLTIQDHTWASEQDEAVPRGDVTAGLRLVLNKAKGVPARFVFVKPATAAKGDERRVASLPSPQHLPSEGPVRQSHLVPKTSLDGGDAALARSGSAGVFDVTVDGRRTVGLRVSRSVASCRIAGFPKSRALPIKGGGGRRCLNFAFRAP

SEQ ID NO: 78966 - protein, 146 aa, Zea mays
  Coding DNA Sequence Number=SeqID_35591
MLSAPRWRLGSSTAVDSITNSDFHRSSTEPPIVPDDNLSREPRYRAGLLASPSCPTILVQDLRLTLNSPRSSDKLSHRFSDLLTSKQENEEDKNIKIILLLIKLSLIPIFACQLSKSMQCQCVGLNSRADVYEAIRGEETRSSLIR

SEQ ID NO: 78967 - protein, 239 aa, Zea mays
  Coding DNA Sequence Number=SeqID_35592
MSSLRFSSVLQETSVSSNLVKPKVPPAPPQGTPTAGGDPDGDDNDGGSSSHSTELLEEQEPEGWIARPVTRDAARSCHFHDAVDTLVHQAFDRHTWSIEYRCVVYHHSRGLYLDQWEATCLVRYPDDDLRGLEAYSENYSITKRDTAEAVMQDAAWRNPRLSSMANLVTVLNTELDHALDELGKARAEIAELHAERVEHRHQEEGSPAPIRTQHPYRSPPHGQHAYGTPDCRTKIDLEP

SEQ ID NO: 78968 - protein, 179 aa, Zea mays
  Coding DNA Sequence Number=SeqID_35593
  Subcellular localization annotation: CTP_CleavageSite=59; ConfidenceScore=5.36e-01
MVGAQELPWLALTSSRQASLPSLSLLERREPSSPREQPLTSTAPSGVGQRAGFPTFLPRSALFWPVLLLIFSQQEASGLSRLAHGARLAMASPLQLASLPDLFLVAAASSLPPSTRPAGTSSGPNLSRCSPPRHPLSPTRQQAEHHLPSIDSLGVLLLHGMGPSLHLPSRPMALVLSLH

SEQ ID NO: 78969 - protein, 244 aa, Zea mays
  Coding DNA Sequence Number=SeqID_35594
  Subcellular localization annotation: CTP_CleavageSite=31; ConfidenceScore=5.49e-01
GVRRLPGLSPSPSPGSGGAEFAVFRVLARVRALGSGGAEFAVFRVLARVRALGSGGAEFAVFRVLARVRALGSGGAEFAVFRVLARVRALGSGGAEFAVFRVLARVRALGSGGAEFAVFRVLARVRALGSGGAEFAVAPLARPDFGVAQAALSFCQTGQWSGGVTAVTSALPGARVRIEVSGHLCVKCPCNLVSWCGDLVKVASERSQGIGRAGDVSAIKRGPRARRKSLEVGCLWPRLGSGEA

SEQ ID NO: 78970 - protein, 182 aa, Zea mays
  Coding DNA Sequence Number=SeqID_35595
  Gene Ontology: Mol. function=nucleic acid binding
  Homolog annotation: Hit_ID=Q5NKP8; Match level="QueryCoverage=57%, HitCoverage=17%, E-value=4e-38, Identity=74%"; Hit description =Putative uncharacterized protein 9C20.4c
MDELLEMLGRLEPDIGCEDAGGASTGGGNHGEEDAVGNTEGEHVTQCDNEEHVAVHSRQQEHNMGMLERWHKLIAPKYARPKGRTIKTSEQRVLKLGAKGEKKKTRKCQKCGIADGHNSRTCLSIEENRVKLASLADRKRGRPPGSRNKNSTMAPQWNETTTSKKHKHTDCEEHGSDDDNLA

SEQ ID NO: 78971 - protein, 476 aa, Zea mays
  Coding DNA Sequence Number=SeqID_35596
  Gene Ontology: Mol. function=cysteine-type peptidase activity; Biological process=proteolysis
  Homolog annotation: Hit_ID=Q5NKQ2; Match level="QueryCoverage=87%, HitCoverage=53%, E-value=3e-97, Identity=44%"; Hit description =Putative uncharacterized protein 9C20.3a
MRKVDRPPTNPKRLIIESSQECFSVDIPRSTDMADPTNTPSDGDPPQHRKRGVAAAAKNIAMPNVDDDGDFEPPKKKCNISMDAPTKTQRLNIRCNLGDVLASIQILNEKQRQAIVRKGFSSILDMTIDAIGCRTLLCWLMQKLDPRDMTLRIGPDKELKITKQIVHQILGLPNLGGGKPLNIDEANAAATLQSSLNISKDEFVISKLQDRLRLGQDDDLSIRCFFLILFNRLLFPTASWSISFNEVLLTEEMERFPQIDWCHLIFSDLCEAAQRWHNRSINNVSATIYGCSIIVLFRSNSETCYVSKSPSTCQIEFPMRPETFDEDPNQHGRLPNIIIQLPLMQDLMANKIQMLPVHQRQKFQATLIDYDLEVGKIFASIKQCLNTIGTKQSNLAATFGDLIDEVLRADESVTPNTQGQTVVGGTVDHDSRPVFDKTPIGSVSALGLFLYELECARALRAYLCSRFIELDRFSLE

SEQ ID NO: 78972 - protein, 263 aa, Zea mays
  Coding DNA Sequence Number=SeqID_35597
  Homolog annotation: Hit_ID=Q6JAD6; Match level="QueryCoverage=100%, HitCoverage=42%, E-value=1e-123, Identity=76%"; Hit description =Putative uncharacterized protein
MSAQIALRVHRLLDLPAFLLAAGAESEAHLTYLPGLLSFLTISGRYVEEWVRVFYASVWIDPDHQWMRFRFEREDVTITARTAHVAALFRPPFTDGSRRSPADFTTAAKYLYELVRRTLLPRMGYREATTHIQLWLLGALVSHSEFDVVDFLICEIEDTVLDGIRARRQLPYAHYLCHIFAQLIQPPRFQSTLEASRLVFGSYRPAPEIPAEDAALRQFDTQGTAADDDDDDDFGIPPPPPPPMPPRSHDHEAGSSSAAPATP

SEQ ID NO: 78973 - protein, 172 aa, Zea mays
  Coding DNA Sequence Number=SeqID_35598
DYVYLKVSPMKGVSRFGVKGKLAPSSRGEEKGGGAYRRRDCSGEVVEDEGEVAGITTGGPRDAREVMSERNWAETHWIARSTRDGGRPKSGEVDLGPPVKSGRVRGLGELHGLLAELAEALACPEDGWRGLATVAEALAAMAGGNELAGAKGKWLAGEGECGAKWGAPGRDL

SEQ ID NO: 78974 - protein, 36 aa, Zea mays
  Coding DNA Sequence Number=SeqID_35599
MAGGNELAGAKGKWLAGEENTDDLWEEVFPFRNSEI

SEQ ID NO: 78975 - protein, 176 aa, Zea mays
  Coding DNA Sequence Number=SeqID_35600
  Gene Ontology: Mol. function=oxidoreductase activity, acting on the CH-OH group of donors, NAD or NADP as acceptor; Cellular component =cytoplasm; Biological process=metabolic process
  Homolog annotation: Hit_ID=Q8LL97; Match level="QueryCoverage=87%, HitCoverage=26%, E-value=2e-49, Identity=66%"; Hit description =Putative uncharacterized protein
  Pfam annotation: Domain name=2-Hacid_dh_C; Domain location=1-140; Score=133.5; E_value=6.1e-37; Accession=PF02826.10; Description=D -isomer specific 2-hydroxyacid dehyd
  Subcellular localization annotation: CTP_CleavageSite=49; ConfidenceScore=5.01e-01
LSGKRVGILGLGSVGSLVAKRLQAFGCAVSYHSRARKASVAYRYFPDARALAAGSDALVVACALNDATRRVVGRHVLDALGPGGVLVNVARGGVVDEQELVAALRDGRIAGAGLDVFQDEPHLPPGLGGMDNVVLTAHQAAFTEESSADLRELMIGNLEAFFSGKPLLTPVMTRPQ

SEQ ID NO: 78976 - protein, 116 aa, Zea mays
  Coding DNA Sequence Number=SeqID_35601
MALCCFFYVLGTWQHNIYVKGDCISVTVSQQRACGYGSEGVDVAWLIFEMHHDGAAKVSLIRILQRTIDGLTTSRSRGWATRDIAQGAAHLRYNSLDCLVRQQSSGHLRTTVDSAK

SEQ ID NO: 78977 - protein, 132 aa, Zea mays
  Coding DNA Sequence Number=SeqID_35602
  Gene Ontology: Mol. function=sequence-specific DNA binding; Cellular component=nucleus; Biological process=regulation of transcription, DNA-dependent
  Homolog annotation: Hit_ID=O24009; Match level="QueryCoverage=81%, HitCoverage=32%, E-value=5e-23, Identity=62%"; Hit description =AGAMOUS-like protein
MECSLVCLCCVLCALCMGISSLYCSVKSTIERYKKANSDSSNSGTVAEVNAQYSYGQILRNACIPIMYKVLPAGVLQAATDDPQLAKRKHPNLFRWSSRNIVGDSIHTMGLRDLKQMEGKLEKAIIKIRARK

SEQ ID NO: 78978 - protein, 489 aa, Zea mays
  Coding DNA Sequence Number=SeqID_35603
  Homolog annotation: Hit_ID=A7P4Y0; Match level="QueryCoverage=79%, HitCoverage=98%, E-value=1e-56, Identity=38%"; Hit description =Chromosome chr4 scaffold_6, whole genome shotgun sequence
MSNVPPDRALDRVFMKHGIRTRKVNLPRTSGSGASPNGLILAGCGVLSPIHWFLYSGSDIGVCCGGNCMDTVREEAWPVAAPRQQPSAPQPQQQQQNGRIDLRELKAQMEKQLGPDRSRRYFGYLNGYLSERLGRQDFEKLCLHTLGRENLQLHNRLIRAILYNAYQGKCPPPPLDAGRPVGASVKKAYQAAEVLNACNGDARLLQIQRLRPVARAQDHTLKDSTNNTGPNCRVAAANHNQVTHDASGSLENGTLNQLELKRLRFQQCEPVEPVAKHPRVEQLPPNNLPVQRRSMSSTAEQSAEILRSPVRAPLGIPFCSASVGGARKFPPPLIVAGEDHFNSCSEHDGLFSTELLHRRMEKTAETLGLAGITMDSAELLNIALDKYMKNLIRSSVELVGGSVQRDARKGTPTYKQQAYGKQINGVRLPNHVHMQSASGSPGAKNEIGINHLISINDFKVAMQLNPQHLGENWPVLLEKICLCSSEEND

SEQ ID NO: 78979 - protein, 561 aa, Zea mays
  Coding DNA Sequence Number=SeqID_35604
  Gene Ontology: Mol. function=protein binding; Cellular component =nucleolar preribosome, small subunit precursor; Biological process =rRNA processing
  Homolog annotation: Hit_ID=Q8S405; Match level="QueryCoverage=96%, HitCoverage=97%, E-value=1e-148, Identity=54%"; Hit description =Similar to H. sapiens NNP-1 / Nop52 AP001752
  Pfam annotation: Domain name=Nop52; Domain location=16-228; Score =362.1; E_value=9.4e-106; Accession=PF05997.3; Description=Nucleolar protein,Nop52
MAAAAAAAAAADVPAEAAAIARRLASCNTGTRERAVRYLLSDFLPASARRLSATDLIKLWKGLFFCFWHADKPLYQSSVATRLASAVSAPPSPTDGAAFLAAYLTTLRREWAHIDVHRLDKFYLLNRRFLHHAFLLLSANSFAPVVTSQVVSVLSDKALLPEADSAAAGTSRGLGYHVAEAFLDELLPVLPVTLETVDALLAPFFIVLAKSTDRVMVSKVKTCVFERLLESGSRLLEMVKKGEEVDKGSAEEKLGKFGLLFGFSKRFLDIGANAATVQWNRKVLFGLRDAFVKIEKALQLSGLEIPVPQFEAAELSVQPNAGDEKAQKKKKTKNVALAEGEMGDAKDLKREKKVKKDKKVKKEKKKKRKVEVVDEGNTTDKSTDAPVDDQQIGDGADGITFDETLKSNLQKQFEMAAAEAGMVKGGSSSSASPVTPVSGKVATKRKRSKSADKLSEASDGGDGSEGNLLAQDGEKSGKKVRFSMKNNLVWKPHNPLPPQCLRLPPSATPRGSALKKGVKPGPITPTPLRKAKPKAKSAKKVLKKQPSSAVKRLRKLQSFSA

SEQ ID NO: 78980 - protein, 20 aa, Zea mays
  Coding DNA Sequence Number=SeqID_35605
MAKRAVRPGPVKSEIGPPEV

SEQ ID NO: 78981 - protein, 280 aa, Zea mays
  Coding DNA Sequence Number=SeqID_35606
MSGAPGDSNSELLAFGNWQERLRYNSPDCPVYTGHVRCSKEESPPELASLGRAQKSELQRSNCNGFGDVAVAPDMSESLLPIPEGEQFGVGVPWCTGHVRWHNGQSDERSTVNSVRLQNYVLYALLGPPAALAPSIRSPGQHASCKLLDVKLTPGPPTPRRRRHQQRQSIGRAACRGADNRDPLSRTAVATNSDSREGEPPAAGPRHDPATGRGVKQQTSVDADSRAWTPIVPSAQSRFRPAPPPALTWQTEQWSSTLSFSMNKLLLASLYLVCTTARAE

SEQ ID NO: 78982 - protein, 90 aa, Zea mays
  Coding DNA Sequence Number=SeqID_35607
MEVKQPEEEEEEKAKLRWTAGQGADAEAGLIYSADYSGVAMHAGSPPTTKPKHRHPRPLYRWIVQAALPAVSVNKLGLASVALALRLCPA

SEQ ID NO: 78983 - protein, 465 aa, Zea mays
  Coding DNA Sequence Number=SeqID_35608
MTVAGAREQRSRRQPSSRPIRGQQENPLSRREDNAPVIRSSNGSRTRNGRPANYSKQPRRFWQEQRATLRLRRNNRAKKKGPGKGDTPKGILPRKGTRLRAYLLIRGSKAGPPKGSTAASDRVGPTPTTGQRGSKAGPRRVHSRLRRRARDDQGYVRYITKARAALPSSPETPCSVPIEGNMALSPLLLAEGRRRGRWYPLPTSHVTRLPRDRDFPYTSTEEARQGIPCRTAIAAKSSRGPPYTDHSPTALAPFGSAATARCGPRWCCSSGEESVRHRGPNATITATDGSVRTQPRTPADQRRRRNGMSTAPERDRGSGFVPQGMRREWTSGGERIRLGSEDSVLKYPRAGPRARTSCPEISGQGVRVAPVVQETRVSLLGKNLTCGSPEAATEKSVDAVSGARRLRKNVADGVGPLGSDYGVRAISGFCRRAWYDMWAPRGRWSGARVEEFWAARVAPSGGPNC

SEQ ID NO: 78984 - protein, 244 aa, Zea mays
  Coding DNA Sequence Number=SeqID_35609
  Homolog annotation: Hit_ID=A2YGC2; Match level="QueryCoverage=47%, HitCoverage=50%, E-value=1e-07, Identity=31%"; Hit description =Putative uncharacterized protein
RGGVCEGVPPLCPSWRRPLHHHRASRLLDELLEEISMKTTMVEAQATVPRFLRNRSIKDGSADPLPMTPLAHSCGTYLNRWEATCLVRRPEDDFRGAEICSKHYSISERDTVEAAMQDAARHALSQYCSLFSGVDDGLNLRYYPHRSTSSTGSVIVSPVDEGNPRLSNTVNLVIVLNIELDHTLDELSRARAEIAKLQDNRAKRCHQEYGSPAPARTQHPYRSLPHGHHAYVTPDCRTKIDLDP

SEQ ID NO: 78985 - protein, 373 aa, Zea mays
  Coding DNA Sequence Number=SeqID_35610
  Homolog annotation: Hit_ID=Q10MS6; Match level="QueryCoverage=37%, HitCoverage=96%, E-value=4e-18, Identity=39%"; Hit description =Expressed protein
  Pfam annotation: Domain name=DUF538; Domain location=265-366; Score= -44.8; E_value=0.095; Accession=PF04398.3; Description=Protein of unknown function, DUF538
MPSPPRRQPHTRDLHSLHSQAQRIPPPALANAAMDGGRILDPLLSGAANFASLMRPHTARPPSRTASHMSRMADSPPHLHRNHLLLVASTIPFVGAASMAGLASLVIRPYLVPFLLPTSASASSGHVVSGELYAPSHVALAELDAFEASASPPRQTRCSLSTEDKRMQLLDKLKYMERELVATKGWESALQERLLKELGDNQERIVVKAARLSGERKETRDGQDHEKVGAYWLEPPANKEIFSAGDDLEIASPMFPNSNYIQLLSTSIGDGVKWLVNKLKGKMQKPLADLLSTTSLWACSQAKKPTIQVRVGSEQWFDATVSGMLGEGCLMQRVTIVKAAAAKVEIKWSCNQDSYEVVRGGITVDEFAAHRDG

SEQ ID NO: 78986 - protein, 262 aa, Zea mays
  Coding DNA Sequence Number=SeqID_35611
  Homolog annotation: Hit_ID=A3BL20; Match level="QueryCoverage=54%, HitCoverage=7%, E-value=7e-27, Identity=50%"; Hit description =Putative uncharacterized protein
MTEPARGWILIALCLCLARLVDLARVDRVLMRTLDLDCSIRKPGNGHGRHQRVVNQPDTTGYQPAPAPGLLQTPARSPPAPQNAAMHVPVSASWLQHQDPHVSSSLSASEKPANPLLPLPKATHAAPRALPKNSNTALPQGGSQGETSKGFNFQFGSINMNGLPQFPARTSSTPPNLDEQKLPLPSLKSKNSFLGLVRCSSSSKAVCLLGNTVTFLVPVMQRDTSSSDVSASHVGRVRRRKHPTEATTDGNRANGQPLLVND

SEQ ID NO: 78987 - protein, 117 aa, Zea mays
  Coding DNA Sequence Number=SeqID_35612
  Gene Ontology: Mol. function=kinase activity; Cellular component =ornithine carbamoyltransferase complex; Biological process=amino acid metabolic process
  Homolog annotation: Hit_ID=Q6QP54; Match level="QueryCoverage=67%, HitCoverage=37%, E-value=4e-14, Identity=52%"; Hit description =Putative kinase
MALPVDVAGLCPRSGDVEALLKPGSSLSSMAEAEPELLGRARRRSFGRGQGGVRALGSGEADPSPSPGSGGAEFAVFRGLSPSPSPGSGGAEFAVFRGLARVRALGRAERSSPSSGA

SEQ ID NO: 78988 - protein, 127 aa, Zea mays
  Coding DNA Sequence Number=SeqID_35613
  Subcellular localization annotation: CTP_CleavageSite=35; ConfidenceScore=5.12e-01
MAVLSAEMRMVRGQGPNVCDLAQRLGSCLTSRTVRAGAGVAKFADGASNRRRAGESLASWASLCLVVFATGLNQKVQERKPQFNCPKASSTGVWSKRFTVEVEVQLELRKLNCSCKSSTAVEEVQLS

SEQ ID NO: 78989 - protein, 90 aa, Zea mays
  Coding DNA Sequence Number=SeqID_35614
  Gene Ontology: Mol. function=protein binding; Cellular component =cytoplasm; Biological process=steroid metabolic process
  Homolog annotation: Hit_ID=A2YRC0; Match level="QueryCoverage=96%, HitCoverage=11%, E-value=1e-44, Identity=87%"; Hit description =Putative uncharacterized protein
SRPCKPFNPLLGETYEADYPEKGIRFFSEKVSHHPMVMACHCEGKGWKFWGDSNLKSKFWGQSIQLDPNGVLTLEFDDGEIFQWSKLLSL

SEQ ID NO: 78990 - protein, 313 aa, Zea mays
  Coding DNA Sequence Number=SeqID_35615
MERFLHKLAVPCLRTVANHVSQNSAQAAIVPVCLGFWADSGRQKLKPRLNAQLLGQLLAVALPTEAGLAQGIRSRPTHASAGSRVFATVFIHPLRPLQASALSLNRRLLLRRIGAAAWTTVPSPLPRHSLSRRGCIVARDLTSPLPGLRYSVVPRRRGSIVARVLTSPPPDLGVLAVCLSVASQNLHPNEADSIADKAIGRMQEISDKIFSVARETIRPGRGLTSFDATKLRVALEEIACMLEQDSLVLQEHLDIVNNFNIPVDSSYEPSTLSSPPPSDDDLTPHWDFAEHFQNFWGVEYDSDQMPSFSDNDV

SEQ ID NO: 78991 - protein, 471 aa, Zea mays
  Coding DNA Sequence Number=SeqID_35616
MNKNTGIQSAITNRTPVPPPQVRTTPLDGGQPAEQQKTDGQLVVARSGSNNDDPRSGWPNCSIDGLRADAAATLPPPAPTLEGRGQGPSALRQIPTQILPDEWGTDLRVEAPYRCKGRTAPEHERRPGSARHLGRSSRAHGVTTAFAAEGGTGSQAGESNALRLTTPAVDQPRVVEVRPSRRASERPLPRTMKERLTHETVREIELRLSPASTPARMMNILEAEGGTKIAAWLASPHPGAGEGGKTRCIREHEDMVAFQGGRPPFKGDSPYSRPQPSWAESSPTCSKVLPLRRGGWVPHVMQAGPEQKKPNHRARCMQPPSGYKRPSTFAKTSGREGGQPCRRHATAPSGRTSPTSSVPSMEAQAHASCNRRAGCYVRATAPPLAPLPRLLDYGTSGQEQRSRRQPSLRPIRGQRENPLSRREDDAPVFRSSNSSRTRNGRPANRTPHRINSMAGKAAPPAGEASDVSSSP

SEQ ID NO: 78992 - protein, 256 aa, Zea mays
  Coding DNA Sequence Number=SeqID_35617
  Gene Ontology: Mol. function=nucleic acid binding; Cellular component= spliceosome; Biological process=mRNA processing
  Homolog annotation: Hit_ID=Q6Z358; Match level="QueryCoverage=67%, HitCoverage=35%, E-value=1e-61, Identity=69%"; Hit description=RRM -containing RNA-binding protein-like
  Pfam annotation: Domain name=RRM_1; Domain location=15-81; Score =54.0; E_value=5.4e-13; Accession=PF00076.13; Description=RNA recognition motif. (a.k.a. RRM, RBD,
MPSLTPPDDETIRTLYIGGLDSRITEQDLRDQFYAHGEIESIRMVLQRAIAFVTYTTREGAEKAAEELANKLVIKGVRLKLMWGKPQAPKPEEDESGRLGQVSHGGLLPRAVISQQQSGDQPQPPGMEGQQQQAAPASYYFNIPAPPATERTVYPSMDPQRMGAIVKPHDSEGKPGPQQAGQAQASSNPAQGGGYPAPPPYYHGQYPPYYPPPPPYGGYMPPPRMPYPPQYPPYQPMLAQPAQVDLTTSKNTDASS

SEQ ID NO: 78993 - protein, 887 aa, Zea mays
  Coding DNA Sequence Number=SeqID_35618
  Gene Ontology: Mol. function=DNA binding; Cellular component=nucleus; Biological process=DNA repair
  Homolog annotation: Hit_ID=Q5SNL7; Match level="QueryCoverage=91%, HitCoverage=100%, E-value=1e-155, Identity=54%"; Hit description =Putative uncharacterized protein P0675A05.29
  Pfam annotation: Domain name=HIRAN; Domain location=279-377; Score =64.3; E_value=4e-16; Accession=PF08797.2; Description=HIRAN domain
  Pfam annotation: Domain name=VRR_NUC; Domain location=764-882; Score =131.9; E_value=1.8e-36; Accession=PF08774.2; Description=VRR-NUC domain
  Pfam module annotation: Pfam domain module=HIRAN::VRR_NUC; Domain location=279-377::764-882
  Subcellular localization annotation: CTP_CleavageSite=5; ConfidenceScore=5.41e-01
MSLCRSSLEASWKVASACTFALSADRSKAASPRLFASLRAPSRPKPAHLPTTHAPIPSRPAARRHLYGSPAAMLTGRESLVRLIGRRRRSPLPASLVAALSLPSPSPSTSLAQVEVKPAAPDPRNAPPINISSFSSRQTMGVAREKRPGVRLVRRREEAASLAWARSGCKKVSAEPTINNLNNESETENMKQIDEGLSSDQAFFAFDSEIGSSKAGTTISSPTCMNDSLGTSETITSYAPSNTVLSDAKDAVNDGAGELPTVATSCSFDECAVMDSSTVVVVDTVIVGRRFHENIELREDADITFMRDPQNAKDPDAIKVLHAGSECEEMLGYLPRDLAKVLAPLVDKHHVECENALHYGDINTSMRAQCSVPVNRPTKDFYINFADDINHSAWYRKAVIFPVFLRRLGEQMHQTTALAPRRGSVVGLHEQQFGNVPIQITIQKWPWFRKGSISYQEISDLEHAVMELECYIDMLSCTIDPFEYDMKEILDVLSVPEMKEILKELPKTSLVHDVRVLVRRRVTKHLDLSQSNGHTNKRDMKLLKKLSEPTTLGHNMGDNIVSYLGARAGDNASWVYSKILTLGVSVYERDRRYEDAVRILKTLLSTVACDRRRGYWALRLSIDLEHMGRPNESLSTAEGGATDPWVRAGSKFALQRRVLRLSKPPRRWKVPSYADYVKRNIREVSIEGRPLNCETGAKNVFYGYDGELCGVEQLALQYYADEGGGWQDIQDVFQSKFQTAPLDLGTDDFYKSRENIAESQLKRIRDGMAEEMLISSWELHQGTSCQGVNWARYSLTDLRAVVACVGGHRLASLLRHLAVDYRSWSSGMPDLLLWRFLDERGGGEAKLVEVKGPRDQLSEQQRAWILVLMDFGFDVEVCKVSPVTKRR

SEQ ID NO: 78994 - protein, 499 aa, Zea mays
  Coding DNA Sequence Number=SeqID_35619
  Pfam annotation: Domain name=MAP7; Domain location=191-316; Score= -79.6; E_value=0.054; Accession=PF05672.2; Description=MAP7 (E-MAP -115) family
  Subcellular localization annotation: CTP_CleavageSite=59; ConfidenceScore=5.33e-01
MDKDRQEAAQKHRAVIRLPGARPKRARGTAKSAAPGGSQSTLAAKSAAPGSSKVSEVVKAAGAGGTKSASAGSAKARELPSPGKRVADFGTDISVDDYLVGSGEGQLVVVPPVAATAVSAAVPGAKGSALSAGGEIPALATIKDEAGAMSRRLKEASQRLSQAADFADRVASGALTAVVSAEVERLRAQHADAVREKSAADSKCRKLAEKVAALEGERTELRRQLAEERREANQALAKALSAQKEANLARVEGSLASQCAEEWEEQFNTLQARMERAEASTRWEVERTRKQLMDSYHELGARTADFEVPDRDSGLRCLEWLQEELLALPTIVEGFMSFASLVTCEGAMNALSREGCRHYEVFDRSDEDFEREIYKVEDPVVKESAGALFDRMWGPHGREVVRERSDRARGQAACDEKVKDFGALNSARPEAESNPVAAGAEVAPAPPPETVEGSLAAPAATASGGGSSPTAVPRAEDPPKTATEPAAEDPTAAGSSQVA

SEQ ID NO: 78995 - protein, 101 aa, Zea mays
  Coding DNA Sequence Number=SeqID_35620
  Gene Ontology: Mol. function=binding
  Homolog annotation: Hit_ID=Q5SNL9; Match level="QueryCoverage=86%, HitCoverage=20%, E-value=8e-15, Identity=47%"; Hit description=Inner membrane ALBINO3-like protein
MALSTILLSSFPIHFLLLYFFQGSQIKDHPGIFGLLAKDIASDGVLWCSAGAKGPQQLVYYRIYLNVLTIPLFLVAHVVPQGCLVYWTTNGLFSVAQYLYA

SEQ ID NO: 78996 - protein, 386 aa, Zea mays
  Coding DNA Sequence Number=SeqID_35621
  Gene Ontology: Mol. function=catalytic activity; Cellular component =cytoplasm; Biological process=metabolic process
  Homolog annotation: Hit_ID=A2XAQ6; Match level="QueryCoverage=82%, HitCoverage=61%, E-value=3e-91, Identity=57%"; Hit description =Putative uncharacterized protein
  Pfam annotation: Domain name=MoeZ_MoeB; Domain location=244-319; Score=125.1; E_value=2.1e-34; Accession=PF05237.4; Description =MoeZMoeB domain
  Pfam annotation: Domain name=ThiF; Domain location=132-241; Score =173.5; E_value=5.4e-49; Accession=PF00899.12; Description=ThiF family
  Pfam module annotation: Pfam domain module=MoeZ_MoeB::ThiF; Domain location=244-319::132-241
MGGRREAIERELKKLRAEREELDGRIRLLESQLEAGPAGFNGAAAGKGVGDDACGGSGACQSRVGNEFAPDGSLPADMIYRYSRHLLLPDFGVEDVSSQSQHIAGENGAVSTLVSADPLTFVIFLAGQRKLSQSSILVVGAGGLGSPLALYLAACGVGRLGIVDGDDVELNNLHRQIIHKEAYVGQSKVKSAADACREYDIVVDATDNLPTRYMISDCCVLLNKPLVSGAALGLEGQLTVYHHNGSPCYRCLFPTPPPVAACQRCSDSGVLGVVPGVIGCLQALEAIKVATGVGEPLCGRMLLFDALSARIRVRLHRNSESTKDGGPLVKMSANYEIFGMWRTQTSLMATCLGKVEINPNMFRALVMYPVDGEVDDAYIVVVEDCS

SEQ ID NO: 78997 - protein, 155 aa, Zea mays
  Coding DNA Sequence Number=SeqID_35622
  Gene Ontology: Mol. function=nucleic acid binding; Cellular component= spliceosome; Biological process=mRNA processing
  Homolog annotation: Hit_ID=A2Y9T7; Match level="QueryCoverage=100%, HitCoverage=64%, E-value=4e-85, Identity=88%"; Hit description =Putative uncharacterized protein
MAHRLLRDAQADGWERSDFPIICESCLGDNPYVRMLRAEYDKECKICARPFTVFRWRPGRDARYKKTEICQTCCKLKNVCQVRDTALSINSNDAIPRSDVNREYFAEEHDRRARAGIDYDSSYGKARPNDTILKLQRTAPYYKRNRAHVCSFFVR

SEQ ID NO: 78998 - protein, 75 aa, Zea mays
  Coding DNA Sequence Number=SeqID_35623
MAWKRPLLLTCKIHRSNPFVEMKPPKIMWNQSFDLRSPIATSDDATPVASMGARKDGQLGNLLKAPKLLDTYTKS

SEQ ID NO: 78999 - protein, 70 aa, Zea mays
  Coding DNA Sequence Number=SeqID_35624
MAHRTVRCATGAPTVCHRTVFFSAVPVLVLAAQCFQIGLHWFCGRVLELFEEFLMPDLWSVFPALDDQEL

SEQ ID NO: 79000 - protein, 1147 aa, Zea mays
  Coding DNA Sequence Number=SeqID_35625
  Gene Ontology: Mol. function=cysteine-type peptidase activity; Biological process=proteolysis
  Homolog annotation: Hit_ID=A3A3S8; Match level="QueryCoverage=22%, HitCoverage=21%, E-value=3e-93, Identity=70%"; Hit description =Putative uncharacterized protein
MEIVVEEGNVDVGNTAEPSYEVVALSGCSAQLSTNDIDKHELAIESKDSKTYVSFTPHTDVIHLTSLDVTNESSQISSDADMVEQNKQDALDTLIKISQHKKPKKLNVARVVSEALSAYIHCIRGEEHLPHREGGKVFLENTFISSLLKRDGDPKVLLNCVPSNEYRKFSLVPGSSKCKKSELKGLERQIKLAAEHKELYQDKWSNLDVASWPVIEKITTQMQTDGFKLPAILWDSRLNTKKKHQNLDHNVDEDGESSSDVQIIDTPCELSKSSNTSHQIEPYISPYVLPAKVTLTNTQELMFVLCTYIMGIDNAKYLKKHWIQSTKPYPISLSLQKLKDILDVNKPMDTDCFNMAVRMIACNDALFLLEDKYHYMDLQLCSISKFGRDPRLRAKPDINMLAKLLECWPDMEYDVSDCKQILLPFSFMGHFTLYVLNMDTRSIYIMDSMPIPSWFKGDHPSMHYIHNIHYIANNMNAAMELANPTWKDDIYMRRRIVPTWVPRTLNWDLSGFLVINFMHDWNGIRLPCICTHCNLSPLPAYEPAFDWENERSLIFGQRVPESIPAISNSGLKITVKVLSLSFQAGLVEPFSGTICLYNRDRREKLSEDFYFHILPTDMQDAQGSLDRRGVFSLDTHSPSVCLLIQLEKAATEEGGVTPSVYSHKEPCCAAYIDCMFSYYSCTHAFMTELPRDNEHKIVNINKEGHMLTQLTMADTSDVPIEDPLSILNSRTDDNHALELRDKELLVSELQNTLDQKSKQLGETEIKLSAMMDEVNSLKKELEQTRGLLDESQMNCAHLENCLHEAIEEARTNKCLADRRAVEYDALRSSALRIHGLFERLNNCITAPGVTGFAKSLHSLAASLASSVKKDEADTTVQFQQCIKILADKVYLLTRQSAELLERYSAMQAVHGGITKELDEKKELIKNLYNKLQQEKQPKQPNATFSMVFSIMNSRVVWYAVTVRQYLTNQKILIWEGFTIREHVHAWLGSKVAMFQYSSVKIYNACKPQPTLEIHNPDMHEWYGQEIRNVCIVRSWRSWTSMLYTAGLRVINFAAKWRRYMYIFPLDEDADLILGEAQSSKTLENSEHNIKPQSFDVAKVDEILQPLAGKTLSYKMFARDTQASRSVLQQPHHRQQLSEPIRDTNRRT

SEQ ID NO: 79001 - protein, 91 aa, Zea mays
  Coding DNA Sequence Number=SeqID_35626
MEAEVAEDDRLHVTVRWLSVSQRSRGLTQRQSNFDERSALAQSSRPAAVVELGRLPCLGGGVNVDAKEIRMVVPVEMPQNGSAGKGPRAEF

SEQ ID NO: 79002 - protein, 181 aa, Zea mays
  Coding DNA Sequence Number=SeqID_35627
  Gene Ontology: Mol. function=exonuclease activity; Cellular component= intracellular
  Homolog annotation: Hit_ID=Q9SN09; Match level="QueryCoverage=51%, HitCoverage=27%, E-value=1e-11, Identity=40%"; Hit description =Putative uncharacterized protein F3A4.170
MQRRDGCRGVRELVHDERPRGAELEEEQQQCVPYDALEGRLEHAASLARTTSFCSVSAARNRRFMAYRSLVEMKWKDLNQALKIDYSQVIDTTYIFKYANLPTTASPSLNSLCKAVLEYLVREEGEPHNCLKDAEAAMNLVLAKLKNEFNDPIEIAASIVTESDFVKLLAHRILVSYYDYG

SEQ ID NO: 79003 - protein, 111 aa, Zea mays
  Coding DNA Sequence Number=SeqID_35628
MKLWKETSRSSKTTTSSRCGLAATPQSAACEGRVIYVSFPHFDLFRARGYERPRELQRLVILDQRYFGTGDNEIDGSDYDYGIGCQHCNHCSGEDEAMEGDFQEFQDYDEF

SEQ ID NO: 79004 - protein, 128 aa, Zea mays
  Coding DNA Sequence Number=SeqID_35629
  Gene Ontology: Mol. function=aspartic-type endopeptidase activity; Biological process=DNA integration
  Homolog annotation: Hit_ID=Q8S474; Match level="QueryCoverage=37%, HitCoverage=6%, E-value=7e-09, Identity=62%"; Hit description =Putative pol protein
MACGNILGFGAKGPHLANKKTKNWVQQREQGITEGTLVWRTGLSGAPPDSVRCTRGLHAELLTFGKIQRRSAIIHRTVRCPREERLWNSPASGIHSAIIHRTCPMYTGLSGEPAEQRLFGANGHLLQH

SEQ ID NO: 79005 - protein, 106 aa, Zea mays
  Coding DNA Sequence Number=SeqID_35630
  Pfam annotation: Domain name=GRP; Domain location=10-94; Score=-26.8; E_value=0.044; Accession=PF07172.2; Description=Glycine rich protein family
MGVGKGRLDDSQGIAAEVWTYIRAVERSRLEGSDESEYSSDEEDSSDSSEEGGSSDGGDDDDDGGDGDDGYDSGGGGDGGSKGGNGGSGRDNNGGGSSKGSNKASG

SEQ ID NO: 79006 - protein, 233 aa, Zea mays
  Coding DNA Sequence Number=SeqID_35631
  Gene Ontology: Mol. function=helicase activity
  Homolog annotation: Hit_ID=Q1EPC6; Match level="QueryCoverage=72%, HitCoverage=10%, E-value=5e-60, Identity=63%"; Hit description=DNA helicase homolog, putative
MTEGADVGMQQQITPNVTTNDADEGVLFVENHDEDVLFEDDDEEDGYLFAGQDGESIEDIEIDETQDAFTVTPDVPDPYDKVYSNIPEETHSLDIIADCVYCKAKKFQYEPPGFCCRNGQIDLAPFETPPQLRRLWECSDADARHFRDNIRFFNGHFSFTSLYCCLDSMTANMNCGIYTSRAHGMMYHNVRSFGREAGAEHKHLELYFYDDDPSLEHRYRKCRQDQLEKTRQY

SEQ ID NO: 79007 - protein, 487 aa, Zea mays
  Coding DNA Sequence Number=SeqID_35632
  Gene Ontology: Mol. function=metal ion binding; Cellular component =cytoplasm; Biological process=regulation of transcription, DNA -dependent
  Homolog annotation: Hit_ID=A2YX04; Match level="QueryCoverage=97%, HitCoverage=42%, E-value=1e-156, Identity=61%"; Hit description =Squamosa promoter-binding-like protein 15
  Subcellular localization annotation: CTP_CleavageSite=51; ConfidenceScore=5.45e-01
MDLLGVVPTGLATSTPETNTSQSQGSSDSSGNNKSKSHSTEPATVFVVLCLDNSKVYPFLPNFPGHTHRYKQTEQETRPYLSLQLFGSTEEDFPPKMDSVNKYLSYESSNPLDERSPSSSLPITRKFFPIHSVDEEVQHPHITDYGEDATMGEVSTNQAWLAPPLDLFKDSERPIENGSPPNPGYQSCYASTSCSDHSTSTSNSDGQDRTGRIIVQLFGKEPSTIPRNLRDDIVNWLKHSPTKMEGYICPGCLVLSMYLLMPGIAWDELEENLLQRVNSLVQSSDLDFWRKGRFLVRTNSELVSYKAGMTRLPKSWRTWNTPELTLVSPIAVVGGQKTSLILKGHNLSIPGTQIHCTSIGKYISKEVLCSAYPGTIYDDSGVETFDLPGKLDLIIGRCFVEVENRFRADGEELEDGSALEAAIGKEEFEGVWNSETDGSNTSFEFIQDEDEWVLCGGGDQFHRAVPTSEAEASQAQFHRASLNVCRV

SEQ ID NO: 79008 - protein, 486 aa, Zea mays
  Coding DNA Sequence Number=SeqID_35633
  Gene Ontology: Mol. function=transcription repressor activity; Cellular component=cytoskeleton
  Homolog annotation: Hit_ID=A2WV28; Match level="QueryCoverage=65%, HitCoverage=96%, E-value=4e-41, Identity=39%"; Hit description =Putative uncharacterized protein
  Pfam annotation: Domain name=DUF623; Domain location=409-469; Score =84.5; E_value=3.5e-22; Accession=PF04844.4; Description=Protein of unknown function, DUF623
MSEFPNLRCACLPLPLARCFCTSVRLSVGGWRELLRLRDEKKKRMARGGVFCHDQQLEERARKDGPSEIHARRPQAHARTHARKGGTMSKILVSTESARTLARAHVPAGTAHTPARLQCASKVKSQPKRPSYETPTRQEPQLLPGRAAMRWGLRSSCKQRHKESLQPLEQESKGKSKASFSSFLPLAWLAKLTARNGVPATKVVHATSSAAKNTAQAATAFPSCFHKPASPSTASASRSSLSLASSSSSAADAEAAGIVPCRRDDATGGDTVAGIAPRRRSVGNDDARTEAATATARQLYHSRRHYSVGGDRDLPHLGHLVSLSPNPKAAPPTPAPVRTLTPTLPPLPSDSDTDEEKRTTARNRRRRRRRAVSGRRSFSSAKATVRVRSPRPPAAAVSELERFAVVRRTRDPHRAFRASMVEMIASKRMVGRPDELETLLACYLSLNADEHHDCIVKVFRQVWFELNNASRATATAPPQRTAHLSG

SEQ ID NO: 79009 - protein, 373 aa, Zea mays
  Coding DNA Sequence Number=SeqID_35634
  Gene Ontology: Mol. function=hydrolase activity, acting on ester bonds; Cellular component=extracellular region; Biological process =lipid metabolic process
  Homolog annotation: Hit_ID=A3B3V1; Match level="QueryCoverage=32%, HitCoverage=36%, E-value=6e-50, Identity=74%"; Hit description =Putative uncharacterized protein
  Pfam annotation: Domain name=Lipase_GDSL; Domain location=233-371; Score=-14.9; E_value=0.075; Accession=PF00657.13; Description=GDSL -like LipaseAcylhydrolase
QSSSPLIRLNIRGNRLSGPTVHPPLYGEAEQGRAAQIETPSRPSRALHLHLGPPPPRVEDELLPCFRQICAPSSAPCLLRPQGGCVGVESDKAKAPSTRASPSSPSRDRQKSAGYFRTVGERGVVRVWCLERRLIGYNDEILVLKFIGEEEQCIAVATNLEQVRVYDVASMSCSYVLAGHTEIVVCIDTFVIPSWFLYGRIGEESRLRAGKQARPEKFEIPTKIKLTLQPWTSSLRGGHQEGIRDGPCPVVQPVTLSLQFFKDRGDMHSRYIPQQDYFSEGLYTFDIGQNDLAGEFYSRTEDQVIVSIPTILLEFENGLKKLYDQGARKFWIHNTGPLGCLPQNIALFGKDPSQLDELHCVAKHNRAAKLFNL

SEQ ID NO: 79010 - protein, 102 aa, Zea mays
  Coding DNA Sequence Number=SeqID_35635
  Homolog annotation: Hit_ID=Q8H6I2; Match level="QueryCoverage=92%, HitCoverage=38%, E-value=5e-36, Identity=81%"; Hit description =Putative MURBZC
MESAAEICAQKLSLAVVAARDTLNASAAASIVAGDYCATFSIGNDVVSTLDVLESAVAAEKSAMHSYKQASAAVDCAKETVAKYSEVCILKLILSQAILEIV

SEQ ID NO: 79011 - protein, 935 aa, Zea mays
  Coding DNA Sequence Number=SeqID_35636
  Gene Ontology: Mol. function=catalytic activity; Cellular component =alpha,alpha-trehalose-phosphate synthase complex (UDP-forming); Biological process=trehalose biosynthetic process
  Homolog annotation: Hit_ID=Q75II7; Match level="QueryCoverage=100%, HitCoverage=99%, E-value=0.0, Identity=74%"; Hit description =Putative trehalose-6-phosphate synthase
  Pfam annotation: Domain name=Glyco_transf_20; Domain location=76-578; Score=841.5; E_value=4.4e-250; Accession=PF00982.12; Description =Glycosyltransferase family 20
  Pfam annotation: Domain name=Trehalose_PPase; Domain location=627 -886; Score=302.3; E_value=9.4e-88; Accession=PF02358.7; Description =Trehalose-phosphatase
  Pfam module annotation: Pfam domain module=Glyco_transf_20::Trehalose_ PPase; Domain location=76-578::627-886
  Subcellular localization annotation: CTP_CleavageSite=40; ConfidenceScore=5.19e-01
MSRSYTNLLDLAEGNFAALGPAGGSGRQRHGSFGLRRMSRVMTVPGTLSELDGEDESEPAATSSVASDVPSSVAVDRLIVVSNQLPIVARRRPDGRGWSFSWDGDSLLLQLRDGIPDEMEVLFVGSLRADVPAAEQDEVSQTLLDRFRCAPVFLPDHLNDRFYHGFCKRQLWPLFHYMLPFSSPASASAAATSSSVATSSPGNGRFDRSAWEAYVLANKFFFEKVVEVINPEDDYVWVHDYHLLALPTFLRRRFNRLRIGFFLHSPFPSSEIYRTLPVRDEILKALLNCDLIGFHTFDYARHFLSCCSRMLGIEYQSKRGHIGLDYFGRTVGIKIMPVGVHMGQLESGLRLPDREWRLSELQQQFQGKTVLLGVDDMDIFKGINLKLLAFENMLRTHPKWQGRAVLVQIANPARGRGKDLEAIQAEIEESCQRINGDFGQSGYSPVVFIDRDVSSVEKIAYYTIAECVVVTAVRDGMNLTPYEYIVCRQGAPGSESVSEVGGPKKSMLVVSEFIGCSPSLSGAIRVNPWNIEATAEAMNEAISMPEQEKQLRHEKHYRYVSSHDVAYWSKSFILDLERACRDHFKRTCWGIGLGFGFRVVALDAHFRKLNMDSIVNAYEISGSRAILLDYDGTLVPQTSINKEPSPEVLNIINTLCSDSRNIVFLVSGRDKDMLGKWFSSCPKLGIAAEHGYFLRWSSEEEWQTCTQAMDFGWMQMAKPVMNLYTEATDGSYIETKESALVWHHQDADPGFGSSQAKELLDHLESVLANEPVSVKSGQFIVEVKPQAVVTLPPFLPYAKNFLQVVSTSGKGVSKGIVAERILASVKERGKQADFVLCIGDDRSDEDMFENIADIIKRNMVAPRTSLFACTVGQKPSKAKFYLDDTFEVVAMLSALADATGAELESDSADELAASISSLDIGDEQSETSDTPIGGS

SEQ ID NO: 79012 - protein, 222 aa, Zea mays
  Coding DNA Sequence Number=SeqID_35637
MQYKGSSSLISCEKQTIRIEFYPYKGLTALAYNAPLTPATVVQEILDSSLGSLLLVLLLDSSLLGDEHAGELVDGEESGLSRAKLTNQTGQRASPDIKEGGRPKSGGGDLGLPVKFCWVRGLGKLHGPLAKLTEALARLGGDWSGLATVAEALAAMAGGKELAGAKEGDMEPGNPVCLPAQTRGKSRVLSCLGLASQCHLLACDREDRLFTPLGALKILGRT

SEQ ID NO: 79013 - protein, 104 aa, Zea mays
  Coding DNA Sequence Number=SeqID_35638
  Subcellular localization annotation: CTP_CleavageSite=58; ConfidenceScore=5.75e-01
MDFASPDPQGSDSATTQKTTDSASPDPRARTQPRPRKMVSTSPDPRARTQPRPRKMVSASLDLGVGLSLDLGRRTRPRPWRSLRLARPRARTDHIIGGPSLPYA

SEQ ID NO: 79014 - protein, 67 aa, Zea mays
  Coding DNA Sequence Number=SeqID_35639
MARVDGSTGWLGQTQGTKPSWNWEDMSFDGKGHHTQVNLTLGSLCCLHYPRIVKVSDGDGSMDGACA

SEQ ID NO: 79015 - protein, 87 aa, Zea mays
  Coding DNA Sequence Number=SeqID_35640
MSSRAQRTHPLLLLRPVASPAISPAAGACHLVVDRPSQAPSGQIGPTTVIPYPRPCLATTLLSQNWDPGGEPPRTSPAIEPDRRRGI

SEQ ID NO: 79016 - protein, 128 aa, Zea mays
  Coding DNA Sequence Number=SeqID_35641
MKTKMMSHLRRMTFIKGEMMIMKTWKMIKGFEIKDHHTQESIKQFKEITPSTPYLPYMIEDALRDPNWVVAMQEELNNFTRNEPPSPVLPTATAACLAHRRRQFSPTVAVTRTGPYPSEASRSIGTQM

SEQ ID NO: 79017 - protein, 58 aa, Zea mays
  Coding DNA Sequence Number=SeqID_35642
  Homolog annotation: Hit_ID=Q8W0Y3; Match level="QueryCoverage=98%, HitCoverage=23%, E-value=8e-08, Identity=75%"; Hit description =Putative gag protein
MYNRLKTMVNQVRNLGSTKWDDHEMVKDAANIAINKRLLFPNVDHKCLMAKEGKKKKK

SEQ ID NO: 79018 - protein, 38 aa, Zea mays
  Coding DNA Sequence Number=SeqID_35643
RYFGTGGYEIDGFDYDYDAGEDEAVEGDFQEFQDYDEF

SEQ ID NO: 79019 - protein, 71 aa, Zea mays
  Coding DNA Sequence Number=SeqID_35644
MCEREWEVFLKLEMEFKSCSLLWGERGAVEPALTTSDQLVASLSVRLQVRLQKRLRGPQGALKTPSGAVDQ

SEQ ID NO: 79020 - protein, 502 aa, Zea mays
  Coding DNA Sequence Number=SeqID_35645
  Homolog annotation: Hit_ID=Q8H6I0; Match level="QueryCoverage=73%, HitCoverage=21%, E-value=2e-08, Identity=24%"; Hit description =Putative gag-pol polyprotein
  Pfam annotation: Domain name=zf-CCHC; Domain location=159-176; Score =20.0; E_value=0.0014; Accession=PF00098.14; Description=Zinc knuckle
  Pfam annotation: Domain name=zf-CCHC; Domain location=401-418; Score =13.0; E_value=0.016; Accession=PF00098.14; Description=Zinc knuckle
  Pfam module annotation: Pfam domain module=zf-CCHC::zf-CCHC; Domain location=159-176::401-418
MTSISIGINKLGDADIVRKIISLLPQQRYGSIITILHNMEDLSNMTPAIVIGKIAAFEMSRKMCRGEEPTSSRPYAFACDERKGKKKAPTPSSSSEEEEEEESDDDEDNQPCTSSSEDEETIRHVGKVMGTIHKIHLMGVPLQVEDLLFNIDRKKQRKRGCFACREKGHFRDSCPTMTEPKKGRSKGKALTSVKTWDDSSSEDEPPRTRSHRSSSRSSHKCLMARGLLEKFETFANLNSELSTKIELLESSAPSTATDDGLIKKNEKLKAKLASSQEAIENLLEKMEILSIHNNELTTKLENIGSTPATSLVEIPEIIKKDASTSCFDLINDSNPCNQVVVKNIVVETCSDEVAKENEQLKQEVARLGKALYDKKGKAKQIRPPQDNTTAGVNKPVEGETVICRLCHMEGHKSFQCKAMTGDKQRQKLKQKPTNKISNTYIKKVNKKDATPYLIKKKKNGKVIAIKANKQVNKGKGAKRIWVPKEIISTMKSTKKVWIPKGK

SEQ ID NO: 79021 - protein, 248 aa, Zea mays
  Coding DNA Sequence Number=SeqID_35646
  Gene Ontology: Mol. function=metal ion binding; Cellular component =ribonucleoprotein complex
  Homolog annotation: Hit_ID=Q10PH9; Match level="QueryCoverage=58%, HitCoverage=26%, E-value=1e-59, Identity=74%"; Hit description=IBR domain containing protein, expressed
  Subcellular localization annotation: CTP_CleavageSite=64; ConfidenceScore=5.12e-01
MNVGHGSHTLTWHITRMTIQEQNQTPTRFVTVRRKDISPAFPNSGHTRYACGAACRLPFLFASRASFTAAISSSRCDASLSAPRFLYPRLPCPLRLLHLTKLMGRDAEKTSPPVPSSELEQEEDDDCYLSDQEDDALEESVLHVITKESLLAAQKEDLRKVMELLGLREHHARTLLIHYRWDVERIFELLDQKGRDSLFSEAGIPLQYTNNAGPTSSAEVTCNVCYDDVPPSCALEMDCGHSYCSDCE

SEQ ID NO: 79022 - protein, 385 aa, Zea mays
  Coding DNA Sequence Number=SeqID_35647
MWVGEGSANGGGYRGSVGWSAGRSGCQDEPVNGAENASGAPSHHRVDVPGVAVDGDRVVYGRLGVSRRNVGSGWWGRLTAVIDDGGVGESGRARRRARVGGRRGSGVAAAMAGSTGPRVAQAGSTGPRVAQAGLTGPRVSRKRSWGPHEDKGKHIFVKDDMTRDDDAMGGEVQTSGEVGGRVAVRLRGKTVEEVGGSVQGLCPVAGRERRLEEEAAEHISGGADHAFGSAVLSRSVGARETQLDAMSKEEGARGVVIKLAAIVTLQSTDRATKLSGYPGEEGRSKDHNEPGQKPAQPEKKRMAETSMPCGGGGGGDQGRRRHAGGGGLERVERPRAVTAGEKGPGGQILHRKTRGVKLNRTGVVSGESTNRKKVVSDVGRSRTSL

SEQ ID NO: 79023 - protein, 76 aa, Zea mays
  Coding DNA Sequence Number=SeqID_35648
MAAQSGTPDCPVVHRTVSGGAPDSVRSEQTEEGVEIDSKPRRHPDPVPGSKGNFQSRANPETSEPASHKHFVQPYP

SEQ ID NO: 79024 - protein, 107 aa, Zea mays
  Coding DNA Sequence Number=SeqID_35649
MGLGCNCPVHGQNRVPRRQSEGGLGTWGAGERSSGGKFIVGLGSAAAVQTAATVSACSQSNTPLVCANCYVRVNGTERDCESEMGTERLRPVDFLERNGSGSEENIP

SEQ ID NO: 79025 - protein, 708 aa, Zea mays
  Coding DNA Sequence Number=SeqID_35650
  Gene Ontology: Cellular component=nuclear pore; Biological process =nucleocytoplasmic transport
  Homolog annotation: Hit_ID=Q10PQ6; Match level="QueryCoverage=92%, HitCoverage=51%, E-value=0.0, Identity=77%"; Hit description=Nup133 nucleoporin family protein, expressed
  Pfam annotation: Domain name=Nup133_N; Domain location=71-512; Score =90.9; E_value=4e-24; Accession=PF08801.2; Description=Nup133 N terminal like
  Subcellular localization annotation: CTP_CleavageSite=20; ConfidenceScore=5.35e-01
MAEEFQSPPPAAPAHSLSPRGFAVPDRPATGTPAPWNSSLLTRISTSKRADRTGDSDQIQPVHVADFPRVVRNAQASLKNFSGKNMLAGGIDKETSLAWMICGNELFIWNYLVSVAKDCIVLDIPSSLIGYNDVKPLLSIQWTVCIMRWHNSGASTRNSGEMLHRKSSTGVILCNKRTQAVAYWPDISAESSRSPVLSSSDHGEVSTCGAASDFLRFNSLIAAAVPGCIHECIAIASEPAGALWLFQCSPEGIRQRKVHADTLGDGGSDLYQKCDGGRSLVWLPSNVSSEGSDRKFFLLTNNEVQCWSISLLHDINVKKLGSHEIVGTDGDVGIKKDIAGQKNIWLLDMQIDEHGKEFSILVATLCKDRVSGSNYTQYSLLTMMYKPNQKFSSEDNVAKVERFLEKKAPSQVIIPKARVEDDKFLFSMRLKTGGKPSGSVIILSGDGTATVAMYWRGSTRLYQFDLPWDAGKVLDASIIPSAEDRDEGAWVVLTQKAGIWAIPEKAVLVGGVEPPERSLSRKGSCNGTIAEEKRSQVFSASVVPRRASSEAWSAGERQRPASTGIAQQSAVDEESEMLLNQLFHDFMISTAVNEAFQKLKAAGAFEKEGEMNIFVRMSKSIVNTLAKHWTTTREAEFLASTIVSSLVEKQQKHEKFLQFLVLSKCHEELASKQSSSIEARFLFARCPGPRGAPRALFARCPGIWTSGG

SEQ ID NO: 79026 - protein, 625 aa, Zea mays
  Coding DNA Sequence Number=SeqID_35651
  Gene Ontology: Mol. function=protein disulfide oxidoreductase activity; Biological process=cell redox homeostasis
  Homolog annotation: Hit_ID=Q10PH6; Match level="QueryCoverage=95%, HitCoverage=97%, E-value=0.0, Identity=66%"; Hit description=Ternary complex factor MIP1, putative, expressed
  Pfam annotation: Domain name=DUF547; Domain location=369-516; Score =211.6; E_value=1.8e-60; Accession=PF04784.5; Description=Protein of unknown function, DUF547
MDSAADSSSPRCHHGQYRQDAGELEDQTSTSKMPSSASELPCSLKREVRVLEKRLDDQFVMRRALEKALGYKPCAVHASSVNCIPEPTEELIKEIAVLELEVICLEKHLLTLYRKAFEQQLSPVNSACDAENNKQPARSFSGILSEASVLSFSTPRKHQPVQSSRMVLARKSTPTASTSEASSEKINIGRSHSSLLHRSVRVSPSANNLARALKPCHTSPLSFVEEGKCMEPGVVSLADILGTRVADHVPQTPNKISEDMIRCIAAIYIRLRDVPSAAAQHAFFPSPCSSFSSASGLSSKYTADVWSWSPRCRRESFTEAWQVQDNELGLGGGEARDSGLQYDSVIEVSALCKGDQRSADVKDMLRKYMSLVQLLESVDLGGMKNEEKLAFWINVHNAMMMHAHIEYGIPQSNSKRILLTKVSYIVSGQRVNAELIEYQILCCRAHSSGQWLRLLLHPKWKSGRDRDEELQGFAVDRPEPLVHFALSSGSYSDPVVRLYSPKSLFQQLEAAKEEHIRANVAVGVRGRGQRKIILPRALELYARDAGLGAQEVVAAVACHLPDGLRDAVRRSPPAGRARGGVEWKPHNLAFRYLLAKELVGGSPACGRQQLKKCGPPIGAPLRADR

SEQ ID NO: 79027 - protein, 50 aa, Zea mays
  Coding DNA Sequence Number=SeqID_35652
METRTRILSPDMWAQRQNRRKKLIGRAAQRPYVRLRPLAYEAPQSSGTQM

SEQ ID NO: 79028 - protein, 102 aa, Zea mays
  Coding DNA Sequence Number=SeqID_35653
MDLLHGDHQAFTNVVVLMLLVKGLEQPSWTRPWSRQRALVVLLVAVVATKLHPNVGARLQQQQQQSLLVPNKLGSLELKPNKTQKSRFGHMDSCFPSTPIQG

SEQ ID NO: 79029 - protein, 891 aa, Zea mays
  Coding DNA Sequence Number=SeqID_35654
  Gene Ontology: Cellular component=nuclear pore; Biological process =nucleocytoplasmic transport
  Homolog annotation: Hit_ID=Q10PQ6; Match level="QueryCoverage=27%, HitCoverage=18%, E-value=1e-104, Identity=78%"; Hit description =Nup133 nucleoporin family protein, expressed
MKGEEFQEELASFLKERSDLLWVHEICLNQFSSASDTLHTYALRRSPDGDASFTTSRKPLSFAERRRLLYLSKIAATAGKDIDYEVKVARIEADIRILKLQEEIVQHDPEYAQVKSTNTLLGPSELIEMCLRRDRELSLKAFEVFALTSSSFRSSNRGLLEACWMNATDQDDWVKLSEASMSEGWSDEVIEESLQATVLFKASRLCYSPDAVVYDGTFEDVLPVKKEDVHLRGLESKCLSVEEVLMQHEDFPDADAPTDAPRLHHIPLHASAWNPGGLAFVPPSWVTSVTGIVSPYYTARRSIQQLIFVVADQADVGPGALLLDCLSPRYQSGFFFSPHSTGHSHSCQLRQLRGLPATDLVPIQRHPGGGERACRHAHYAVVDLALDTLAAARSFGVEELLLLTQEPLMGQEVATSYVNNLRSMIEVHIRALVDKEVDNILRKCGLSNKMPYIKEYGSKVDARVPRLRSNACYGLARALAESYNNYPDPSFCAASGRQKLKLEPNGKIFARLLREALGDTGALGPSCRFLRSPTIALASSQGMECRSNREFLCVVAFRFPYQLELFVFGSKIKCNQADSIADKTIGRMQEIADKLFSVARETIRPGRGLTSFDATKLRVALEDIACMLEQDSLLLQENLDNVNNVNNPGDSSYEPSALSSPPPADDYLTPDWDFAEHFENFWGLEYDSDQMPSFSDNEVLVETLILVQSVLQMSGGLSKMNPLENEDELKVMFGPIVCTNQTTLVPGVEDANSSSDDHVEATLGGGENSTPDPCSNATRKRKVRHDSPKPKKKKDTREEYMKRLVEAFESRSMTTNKSITSAETDPVRVEVNAQLQQVIDDGAPEGNDLHLFATHLLIEKKFRDVFATLKTKEGRNAWLHSAFEIHVKKST

SEQ ID NO: 79030 - protein, 123 aa, Zea mays
  Coding DNA Sequence Number=SeqID_35655
  Subcellular localization annotation: CTP_CleavageSite=86; ConfidenceScore=5.37e-01
MTHATTIPTCCLSTLDGTYNTIRVQNGPRAQTLSYPKSTLALGQTLRHPSPASATCSRESRRRPLLQCETTDQAKDGGKKSFEVPSAWEKVKETRNPKPGVKKKTCKVKVDRVKSYGASRITT

SEQ ID NO: 79031 - protein, 320 aa, Zea mays
  Coding DNA Sequence Number=SeqID_35656
  Gene Ontology: Mol. function=metal ion binding; Cellular component =ribonucleoprotein complex; Biological process=ubiquitin cycle
  Homolog annotation: Hit_ID=Q10PH9; Match level="QueryCoverage=92%, HitCoverage=47%, E-value=1e-133, Identity=80%"; Hit description=IBR domain containing protein, expressed
MASNYLGKSVGIEGGNGLIIPLNWLCGGATGRDHTWSSISGHSCGRFTNDQTKKTEQARRDLYRYMHYHNRYKAHTDSLKQEAKLKNEIQGKISISENKESKIKDYSWVINGLNRLFRSRRVLSYSYPFAFYMFGDEIFKDEMTPQERELKQNLFEDQQQQLEFNVERLSGFLEKDFQLFTDDEVMDTMKHVINLSNVVDRLCKQMYQCIENDLLYPLRTPHNIAPYKSKGLDRASELNISWDPAEQSSQSTKHSQEDEHRNQPASISLGKRTHELHGSSSGNRGDNRGHRSNKRDRVDANGGGDALFDLNVPAELVDKI

SEQ ID NO: 79032 - protein, 314 aa, Zea mays
  Coding DNA Sequence Number=SeqID_35657
  Gene Ontology: Mol. function=D-alanine-D-alanine ligase activity; Cellular component=cytoplasm; Biological process=cell wall organization and biogenesis
  Homolog annotation: Hit_ID=A6T5A4; Match level="QueryCoverage=100%, HitCoverage=96%, E-value=1e-122, Identity=66%"; Hit description=D -alanylalanine synthetase
  Pfam annotation: Domain name=ATP-grasp; Domain location=90-272; Score= -35.1; E_value=3.9e-05; Accession=PF02222.13; Description=ATP-grasp domain
  Pfam annotation: Domain name=CPSase_L_D2; Domain location=91-292; Score=-129.7; E_value=0.081; Accession=PF02786.8; Description =Carbamoyl-phosphate synthase L chain, ATP binding domain
  Pfam annotation: Domain name=Dala_Dala_lig_C; Domain location=90-298; Score=404.3; E_value=1.8e-118; Accession=PF07478.4; Description=D-ala D-ala ligase C-terminus
  Pfam annotation: Domain name=Dala_Dala_lig_N; Domain location=4-76; Score=58.0; E_value=3.3e-14; Accession=PF01820.12; Description=D-ala D-ala ligase N-terminus
  Pfam annotation: Domain name=RimK; Domain location=101-300; Score= -71.4; E_value=0.069; Accession=PF08443.2; Description=RimK-like ATP -grasp domain
  Pfam module annotation: Pfam domain module=ATP-grasp::CPSase_L _D2::Dala_Dala_lig_C::Dala_Dala_lig_N::RimK; Domain location=90 -272::91-292::90-298::4-76::101-300
MEKLRVGIVFGGKSAEHEVSLQSAKNIVDAIDKSRFDVVLLGIDKQGQWHVSDASNYLLNADDPAHIALRPSATSLAQVLMFWLQQPVWTKMSPNVCYADAGLNIAPFITLTRANRHNISFAEVESKLGLPLFVKPAYQGSSVGVSKVTSVEQYAIAVDLAFEFDHKVIVEQGIKGREIECAVLGNDNPQASTCGEIVLTSDFYAYDTKYIDEDGAKVVVPAAIAPEINDKIRAIAVQAYQTLGCAGMARVDVFLTPENEVVINEINTLPGFTNISMYPKLWQASGLGYTDLITRLIELALERHAADNALKTTM

SEQ ID NO: 79033 - protein, 171 aa, Zea mays
  Coding DNA Sequence Number=SeqID_35658
  Homolog annotation: Hit_ID=Q6QP51; Match level="QueryCoverage=80%, HitCoverage=46%, E-value=8e-13, Identity=40%"; Hit description =Putative growth-regulating factor 1
MAGRSDRIHFDLPLTDLTGRQRRSPLSDCCATHQGKADNSYDQPQAQQEAPPRPTLGLDLRRRSPPRPTPGLSLNLGLGRRTPPRPTLGLGLNLDLRRWSPPRPTPGLGLNLDLGRNRVLARPQPRSQEESPPRPTLGSDRPHHRGYIITLPLASSSYGGTRPASHPGSPR

SEQ ID NO: 79034 - protein, 126 aa, Zea mays
  Coding DNA Sequence Number=SeqID_35659
MKLWKETSRSSRTTTSSRCGLAATPQSAACEGRVIYVSFPHFDLFSNGGSRRTEATVKSSAGSCPLLEQQGSPLPRREDDAPVFRSSNDSRTRNGRPVNHPSRRINSAAGQATPLAGEAGVVSPPP

SEQ ID NO: 79035 - protein, 275 aa, Zea mays
  Coding DNA Sequence Number=SeqID_35660
  Homolog annotation: Hit_ID=A3AQ03; Match level="QueryCoverage=25%, HitCoverage=42%, E-value=2e-08, Identity=48%"; Hit description =Putative uncharacterized protein
  Subcellular localization annotation: CTP_CleavageSite=44; ConfidenceScore=5.45e-01
MDVCSQRFHHLRESFLWLPRRFLLTVSARPRRRSCSLACWLTTRMSAPAGSTTSRELPMAPPLLRAPAALSRPLSLATISVCCFLLAISVGSVLASSMARVRKGMFHPEEAQDLLDKLLRQGTLPLGHELNGFLAALARAPPSIAYRYGPALAVALFNPRLALPDSSFCTRQGLILGTKDDTYQKLKEENERLIRSLTQLKGKCIAQPSQDNRDHMVKKLETGTTVACTKSLEENVKDLRIAKRRKQKKKSNTASKSLNHAFIKGDGDGMKLWDA

SEQ ID NO: 79036 - protein, 164 aa, Zea mays
  Coding DNA Sequence Number=SeqID_35661
MRARADGPGAVKGECWVLTDVPKQTEGTGGGTWRDHGGCVKTKQLRVKDVVVGSKSQELVHFAPSGVDRLYQRTHCHPCLASHPPQLGVTRTLCTLLPHLELAHPTRSSSDHAHSLSVALGCSSLSCLLVHAAVVIDPLQPRLRCDLHPACSRFPPLLKRRRPW

SEQ ID NO: 79037 - protein, 303 aa, Zea mays
  Coding DNA Sequence Number=SeqID_35662
  Gene Ontology: Mol. function=phosphoprotein phosphatase activity; Cellular component=cytoplasm; Biological process=embryonic development ending in birth or egg hatching
  Homolog annotation: Hit_ID=P22198; Match level="QueryCoverage=53%, HitCoverage=51%, E-value=4e-92, Identity=99%"; Hit description =Serine/threonine-protein phosphatase PP1
  Pfam annotation: Domain name=Metallophos; Domain location=7-199; Score=75.9; E_value=1.3e-19; Accession=PF00149.19; Description =Calcineurin-like phosphoesterase
  Subcellular localization annotation: CTP_CleavageSite=12; ConfidenceScore=5.13e-01
MGKNQAYKAMQRARLGSSNRRAGRRRRPQRRAWPTTLGDYVDRGKQSLETICLLLAYKVKYPENFFLLRGNHECASVNRIYGFYDECKRRFSVKLWKTFTDCFNCLPVSALIDEKILCMHGGLSLELNKLEQILNLNRPTDVPDTGLLCDLLWSDPSNEATGWAINDRGVSFTFGPDKVSEFLEKHDLDLICRAHQVVVFLKMGPSYGYRGRVMLAFEDNGSSKIGVRFDKQIPDGNDLGGLCEEDHGFFCSAESLCPDFSAGEEVERLAMTELIEDEALLTDWKQQLDRDVETLKAKSNIGS

SEQ ID NO: 79038 - protein, 27 aa, Zea mays
  Coding DNA Sequence Number=SeqID_35663
MAPTPCTGERSTFWDNNLRLLLKLGFY

SEQ ID NO: 79039 - protein, 185 aa, Zea mays
  Coding DNA Sequence Number=SeqID_35664
MESSVKTRLPLHSIGIIYPSSSLRTILHYGIIFIHIHLYHWGESAKGSTQTNKKIQVRVQKKGAKETEENPGLAHRTVLCTTGQCPVHQERSTQTLHLWVSGEPLRYNSPDCPVCQWSNGYRAQWSTPKVVCKHEQSADSLCRVRAAPEGAPDSEQCLSGAAPDCPVPQAVRAPTVETVRTLTVG

SEQ ID NO: 79040 - protein, 150 aa, Zea mays
  Coding DNA Sequence Number=SeqID_35665
  Gene Ontology: Mol. function=protein binding; Cellular component =spliceosome; Biological process=mRNA processing
  Homolog annotation: Hit_ID=A2XXC3; Match level="QueryCoverage=59%, HitCoverage=12%, E-value=2e-27, Identity=70%"; Hit description =Putative uncharacterized protein
  Pfam annotation: Domain name=cwf21; Domain location=70-114; Score =84.4; E_value=3.8e-22; Accession=PF08312.3; Description=cwf21
  Subcellular localization annotation: CTP_CleavageSite=60; ConfidenceScore=5.45e-01
DGAAVGFTPPTIAKCKSIGLQTARGSATNGYAQSNTFFVKPRSTTSGEGPGGPHRPLRPDAAGAVGGGMRKPNKEILEHDRKRQVELKLLVLRDALEEHGYTEDEIEERVAEARKTAEAEAAAAAEEAGSGRGAGRPPLPGRGYGSVGVF

SEQ ID NO: 79041 - protein, 51 aa, Zea mays
  Coding DNA Sequence Number=SeqID_35666
MATIPSGERAVAIVGDNSGGASRGATGGGAPQASKTRFAAKNLQSLPNIYN

SEQ ID NO: 79042 - protein, 276 aa, Zea mays
  Coding DNA Sequence Number=SeqID_35667
MERSLILNETLKKQDIFLHPKKDDRCGSIGYYRTLTKPERQIQTNKTGANPNGILLQIVTLLRGTSYTAARHPHPAYAASKPVGSIKSVHPRSKWDDYQKILIIWAVKLRSSSTSSIISGYGRVEVFLASRGCPTPPRAAAPAPPPSSPAAVASGLKRQHMRQASLRGLGPAAEVLLPTREGRCKGNPHVNVAGTDEDGRAQSSCSSRGILLLATLGLKRVRQACEALGLLQRSCFQRGKAVAKGTHRLTSRAQMRTGGHRAVAALGASSFSRPWG

SEQ ID NO: 79043 - protein, 304 aa, Zea mays
  Coding DNA Sequence Number=SeqID_35668
MRIGVQGSPDHSQDQREQGRKRRASQGPSAEAVKARRKARVKNVGTHVLKVKNVGTVELIVQSSQTHVGLRTWVPTFLRTHKFDGHVTPSNLTLRTWVSSNLWEKIQRPPSNLKTHVLNVKFDGTHVLNVKFDGTHVLNLKFDGAVELTSLSSSKNHRRLYSSVNPRSYGAKGSTQTNKRSKLGLKRKEQKKPKRTLVWRTGLSGVPPDSVRCTRGNRLKLFTFEFLESRSTIIHRTFRCASGATAIERNGQLQRSPANLNSARTVRAESVQRQKAHRTVNSACPVRHRTIWCPKMSELQRPKP

SEQ ID NO: 79044 - protein, 278 aa, Zea mays
  Coding DNA Sequence Number=SeqID_35669
MELYKKNLKEKAAASGTRGVNPGPRCRFLRFFSADTRDYGPENNEYMFSVLSAIFDTSSIHGSYSRGTPKTPKTRLINTISIKLQRPDGRNTGQSSVRSRNAISPRPSLASGRNGRPRQIHASPEGLLKQLTHLRLARGPVRTGFAEKQPWPDRLASPPDRRSIQCKDRLTPYPDARSSVDKAEVTAENSAACTTPTAVPPARVRLTAAKSSLGRHRKLRPARPQGSDSTSTSDDGLRLARPQGSDSTSTSDDSLRLARPQGSDSTSTPDGSLRLARP

SEQ ID NO: 79045 - protein, 172 aa, Zea mays
  Coding DNA Sequence Number=SeqID_35670
  Gene Ontology: Mol. function=zinc ion binding
  Subcellular localization annotation: CTP_CleavageSite=14; ConfidenceScore=5.28e-01
MSGSPTSSSAARAAAAASSTRTSTVTIHFRYHGYAAVCRTSLLPILTRAHMWRAWAAHSYCTNYYGDAAPAQAGAGVCDWCLRDDVGGGTKKRQHSSASAAACGGKQPHRQAEEEEEEEAAAAGWRRSAQHQPASSSSFPPSGGCSKVTGGSEHAEGGRRPRRYKLLKDVLC

SEQ ID NO: 79046 - protein, 358 aa, Zea mays
  Coding DNA Sequence Number=SeqID_35671
  Gene Ontology: Mol. function=peptidyl-prolyl cis-trans isomerase activity; Cellular component=chloroplast; Biological process=protein folding
  Homolog annotation: Hit_ID=A2ZRX7; Match level="QueryCoverage=20%, HitCoverage=51%, E-value=2e-35, Identity=95%"; Hit description =Peptidyl-prolyl cis-trans isomerase
  Pfam annotation: Domain name=Pro_isomerase; Domain location=78-271; Score=82.9; E_value=1e-21; Accession=PF00160.12; Description =Cyclophilin type peptidyl-prolyl cis-tr
  Subcellular localization annotation: CTP_CleavageSite=17; ConfidenceScore=5.31e-01
MTCMPAVSAPSVLAPAPASTRTHLCYSTEMRRGALSLRPARAIPTLRLGGHRDARGAVVVRATAAEGAVELQAKVTSKCFFDVEVGGEPAGRIVIGLFGEVVPKTVDNFRALCTGEKGYGYKGCSFHRIIKDFMIQGGDFQQNNPRAEQPPRQAQAPPPPGRRRTSPAAATLALPAPAHRAHPRTATPTAPAAEAARAPSPTDVHTNAPLFHPTDQIHHSLTRLAMPAPPHSKLPQHLANRVVGAGADSIVVTCVKHEYQPAEVTKMDGAIQRVYTRKNWSSMVLCNCSHPNNVVPLTSEIVSAQTGTFLHLLPGSTMTRSGNCPSPETSSSVTTRLTRLIWPHAPGPSTIPPTVSIS

SEQ ID NO: 79047 - protein, 107 aa, Zea mays
  Coding DNA Sequence Number=SeqID_35672
  Subcellular localization annotation: CTP_CleavageSite=34; ConfidenceScore=5.59e-01
MASTCFRAAARVASAAGRSAAATRSAPSAARAAAAAHRASSFSRMPVELGCCAGLSLLPLHSAVAAARLTSRLSTASSCRALSQAKCHPDHFNSSTIMFNTKPLPFS

SEQ ID NO: 79048 - protein, 225 aa, Zea mays
  Coding DNA Sequence Number=SeqID_35673
  Gene Ontology: Cellular component=extracellular region; Biological process=cell wall organization and biogenesis
  Homolog annotation: Hit_ID=Q6H677; Match level="QueryCoverage=48%, HitCoverage=41%, E-value=2e-40, Identity=71%"; Hit description =Putative expansin-B14 precursor
  Pfam annotation: Domain name=Pollen_allerg_1; Domain location=124 -208; Score=131.8; E_value=2e-36; Accession=PF01357.12; Description =Pollen allergen
MAWLRTVGGGGRFASLEPERRRAKGAAEEKEQQGGGRLGFYGARKAEFKQRRPRPPFIGRARLLGKPTTRQAATLRETRNPTVRRPSTVTSKTPAEPLRARAASPPSSDVFGTRVPCSWNGMDIAFKVDAGSNANYLAVLIEYESGDGELRSVELMQRGRGGAAAWTPMQQSWGAVWRYNSGATLQGPFSVRLTSGSGRTVVASDVIPAGWTPGATYRSVVNFSN

SEQ ID NO: 79049 - protein, 214 aa, Zea mays
  Coding DNA Sequence Number=SeqID_35674
  Homolog annotation: Hit_ID=Q10EU0; Match level="QueryCoverage=44%, HitCoverage=31%, E-value=4e-16, Identity=57%"; Hit description =Expressed protein
MPMDQAFRHCDKDTLKMAMLKHEETFRQQVIKLKSSKSFPEFVEATTSSRAPSLIRLYRIQKLLMRDFTRELKLKSQRSMPTSPNGSCAEYSRGAAGWPAPLCPSRLSRTLGWPLPLVDRLLCRAVQPQKVHKQKQETKKQKQECRSRTATADDEAVRWTVMGGDRRLTAVLCACAGCCGRDGRTADGCEARVRLPRRLASRGAAAGCSLPRCC

SEQ ID NO: 79050 - protein, 152 aa, Zea mays
  Coding DNA Sequence Number=SeqID_35675
MGIGDALGSALGSSEPTMVRGCSHATSDRVEPAVAGPAHPCVCVTRSARARVDAQGNYAWPCLVPACSPMEKRWRLGSTIRTRMHPPSASTEILFSPAMAAVTLGPLPSAADAPPDPRSRSATPGYRQPPLPCLDPRCHLPGRGSLSSPLAG

SEQ ID NO: 79051 - protein, 255 aa, Zea mays
  Coding DNA Sequence Number=SeqID_35676
MPLRESVSGPVSDEYGEEALAPTPSAENGVVRRWRHERREKRSRMLNEVVATEARTIIIMQSLYSKTWFSYVPKVHNKPIKRPKMGSNKESKRQPKGTLVWRIGLSGVPLDSVRCTRELEAELATFGKMGGRSAIIHRTVRCASGATATSRQRSTATAFNALQCAPDSEHAQLVHRPVYRTCLVHHRTAQRPHQSELQRSNPNDRLTWLAHQTVRCAMRQQPSNGHFLVVGAINTPTTPHSIVSKFSTFNTLQEL

SEQ ID NO: 79052 - protein, 370 aa, Zea mays
  Coding DNA Sequence Number=SeqID_35677
  Homolog annotation: Hit_ID=A2X7Z8; Match level="QueryCoverage=86%, HitCoverage=24%, E-value=1e-74, Identity=48%"; Hit description =Putative uncharacterized protein
  Pfam annotation: Domain name=Remorin_C; Domain location=271-370; Score=7.3; E_value=0.00046; Accession=PF03763.4; Description=Remorin, C-terminal region
  Subcellular localization annotation: CTP_CleavageSite=39; ConfidenceScore=5.28e-01
MAAAAAVPDGVSSCGSTNMRRADHLPQLPIPLPCMGEPTAASRVSPGSSPARSEASRGAPCYNADAEPDPDPEPEPEASVGRSTQMLLAMAAMGGHGGHYGRRPASSYGSCAAWSAGSLTRHRPASPSPICSPANSHDGGGEEEEDREPHGVEGANQMPPRFIHKTTPARFMRRVRSSRNFRQRVDALDATNEWRLPKVSEGDDEGGDKKDWQSNTVSSRVSSARDWNFESDGAYQGSNRSDRAFGDSDGENCPVEVQRTERWTPSSVLKPQGNLVHAKLVAWKDAQIAKLIEKLKKKEADIDDWQRKKTIKARQKMRSAELKLEKKRAEIAEKMQKAIKRAQKKADKKKVKEQLCCDSVHHFNFVSMMR

SEQ ID NO: 79053 - protein, 162 aa, Zea mays
  Coding DNA Sequence Number=SeqID_35678
MAVNFEQHAHITLGKQHRPGHRLRFFAECYVAGTRQRGRLCRVSHRTLGKEPDMGTLSGGLFAECANWHSAKKAALPSAARKTLGKAIFVAECHRRHSAKPPSPSPGVVTVAFLCRVLPGTRQTSVPSAREKVLGKEVFADALFAESSLPSVTLGKGFAECF

SEQ ID NO: 79054 - protein, 533 aa, Zea mays
  Coding DNA Sequence Number=SeqID_35679
  Gene Ontology: Mol. function=transcription factor activity; Cellular component=nucleus; Biological process=regulation of transcription
  Homolog annotation: Hit_ID=A3A1I0; Match level="QueryCoverage=52%, HitCoverage=88%, E-value=1e-120, Identity=77%"; Hit description =Putative uncharacterized protein
  Pfam annotation: Domain name=GRAS; Domain location=112-437; Score =342.9; E_value=5.8e-100; Accession=PF03514.5; Description=GRAS family transcription factor
MTLCSSRLPVCLCQEQAKRTTVALALAVPPQAVSLERKEKPQRRHDFLLGPYHFGGRINPHHPEHTKALELCLLHRPTKLKQRWSRRRRDEGSSSSVTSSPLHNFSTMPLHASPGGAPAPTPPWLVRELRSDERGLCLIHLLLNCAAAAGAGRLDAANAALEHIASLASPDGDAMQRVAAAFAEALARRALRAWPGLCRALLLPRAGPTPAELAAARRHFLDLCPFLRLAGAAANQSVLEAMESERMVHVVDLGGADAAQWVELLHLLAARPEGPPHLRLTAVHEHRDVLTQTAVALTKEAERLDVPFQFNPVVSRLEALDVESLRVKTGEALAVTSSLQLHCLLASDDDSGKHHQGSGDHKRQRSPESGVSPSTSRADAFLGALWGLSPKVVVVTEQEASHNAAPLTERFVEALNYYAALFDCLESAAPRGSVERARVERWLLGEEVKNIVACDGADRRERHERLDRWAARMEGAGFARVPLSYYALLQARRAAQGLGCDGFKVREEKGAFFLCWQERAIFSVSAWRGRRFD

SEQ ID NO: 79055 - protein, 252 aa, Zea mays
  Coding DNA Sequence Number=SeqID_35680
  Homolog annotation: Hit_ID=A2X8Y5; Match level="QueryCoverage=38%, HitCoverage=73%, E-value=7e-23, Identity=56%"; Hit description =Putative uncharacterized protein
METLVFPCAGVVGRAEKLSVTFDCLQQLRLDMSHSGTGPGGGAHHLDSINCYCVWTEFMWAEGGGEGESLGTVFLALQCAAHLAAAAVVVHEKPFRSAAHPLALRHDVGVVGRGKEERAADRGIVGSGRTGNAAAIAVALVRSGRRRRRGDKGSSGEEVVPAKKRRGRPQKRFASKIDQADVENFVEQVDADQEADDAKLKNSAAAGGTKRGRPLKEGSNIAVEDTNSTVRLSSDELTRTNGFRQIGSQLKN

SEQ ID NO: 79056 - protein, 472 aa, Zea mays
  Coding DNA Sequence Number=SeqID_35681
  Homolog annotation: Hit_ID=Q6QP51; Match level="QueryCoverage=40%, HitCoverage=88%, E-value=2e-07, Identity=30%"; Hit description =Putative growth-regulating factor 1
MQAACNRTKGAHPFDFDASSMEAQAHTSCQSAAEEGETVDMAKGGPALMAAAGGRKQQSNRDTFGRRSGRRFTSAMMTVSKKVRHDVQFRILFLFPFLSLATRTGKGDTPKGILLREGSGPRAPLLIRGSKAGPSEGFDSHLRALGLRAHYWSQVRRLAPRKGSTAASGHSGSAPTTDQGFVGWPPKGSTAALEHAERGMTLGTSDTWPRLGLRSRGSGAALANPAPTKPLTASTYQPENLEPDYAPGQRPLVTPISTKLQRPDGHNSGQCSVHSRDTISPRPSPASGKDSRPRRIHVSPEGLLKQRAHLRLARGPARAGFAEKQPWPDRHANRPYRRSIQCKDRLTPYPDARSSVDRAEEAPPRPTPGLGLNLDVGRQTPPRPTPGLGLNLDLGRRSPPRPTLGLGLYLDAGRRSPPRLTPGLGLSLDLGEATTSPDLGLGPTTSQGGHHYPTPSQLRLRGTRPASHLARP

SEQ ID NO: 79057 - protein, 270 aa, Zea mays
  Coding DNA Sequence Number=SeqID_35682
  Gene Ontology: Mol. function=sequence-specific DNA binding; Cellular component=intracellular; Biological process=DNA metabolic process
  Homolog annotation: Hit_ID=Q8GT06; Match level="QueryCoverage=96%, HitCoverage=42%, E-value=7e-85, Identity=61%"; Hit description =Endonuclease-like
  Pfam annotation: Domain name=ERCC4; Domain location=50-147; Score =75.4; E_value=1.9e-19; Accession=PF02732.6; Description=ERCC4 domain
MEPITSCGPPDISRPFQGTPKLQSSTMGSAKLAMPPRRANENFLEAYEVILILDDREKFGSRSRKVADNICSLSHFAVDVRQLPVGDGIWIARHKEDHTEYVLDFIVERKEVMDLDGSIEDNRYRDQKLRMKKCGLRKLIYLVEGDLNRAPKRVKTACFTTEILDGFDVQRTTGFADTQKRYVDLTRSVIAYYDASFSIVGKASPVCPTYDDFKRKCYDLKKKTVSDIFGCQLMQVPQVTEEAAQAVVELYPTPLLLAKAYSILVTNESS

SEQ ID NO: 79058 - protein, 229 aa, Zea mays
  Coding DNA Sequence Number=SeqID_35683
  Gene Ontology: Mol. function=sequence-specific DNA binding; Cellular component=intracellular; Biological process=DNA metabolic process
  Homolog annotation: Hit_ID=Q8GT06; Match level="QueryCoverage=68%, HitCoverage=29%, E-value=3e-39, Identity=46%"; Hit description =Endonuclease-like
MRPLPKKPNAALPVPKQLKVHHPENESLSRFFLEKWRAMMQEPDGLSQNNYLAFANANRSLCSSKEPIRTLKDFSNVKGVGTWLINHMKSFFEKSSQDLSPAKGKKAKGTKSYLPRKNTAAYAILITLHSPNKSKAKQSYGKDWYTGWSCMKTLLSNRLVTKWSNPAKHSPELVSDSSLTKKKSNCYRQVQATICNTFVTYGLPIMCRITKESFVAIQIQKSHVERTFP

SEQ ID NO: 79059 - protein, 168 aa, Zea mays
  Coding DNA Sequence Number=SeqID_35684
  Subcellular localization annotation: CTP_CleavageSite=39; ConfidenceScore=5.38e-01
MASLGPPTPRAIGGCSLKQPITFYPSLTRRMIYDTPSTVAGTRGALSMLRVNDDTRTRSIAGKSTTETMASQHGVRLPGPSQLRLQLVAPPGDGRDTTTTTPLPGTDNIIDDRRIHVEYRHLLCASGPFNGPLTSRYPTLTNMNLSRIREAGWPSTPPLPELLGRPRT

SEQ ID NO: 79060 - protein, 449 aa, Zea mays
  Coding DNA Sequence Number=SeqID_35685
  Homolog annotation: Hit_ID=Q2QY92; Match level="QueryCoverage=94%, HitCoverage=95%, E-value=2e-41, Identity=33%"; Hit description=F-box domain containing protein, expressed
MEALKPERVVDDAAADFICDAPSNALDEILVRLSPKWTLRMRSVCRAWRDKLDHWATRSRRKNPPQPLLCFDRVACPDRYVRLTDYCVESLDLRSGRPHHVLRFTASDYYEAAGARDDDDDDPPGDTEPEVSRVVDYAKMERENYADGFKQMVLLHASVDGYLLVSFSFDWYVINPATRHWASIPDLTLWNVIGFYEHFSSGEYRVLCSGGRTRTSSTVDEGPERWYHIVTVTRPVQWRSIGRPIARHVPRDHGLAAGVRMAGVSPPVQLRHRHLHWPPQKSQGYRILVFDIWVDAFSWKEPAPVTDMDQKDMALLEFPNGRLGMSVSGKNLATVELWRLEDYHNELWVLAYRIQLPLPWMRLMQDDDCWIPPSVVSADGDVLILSGRWLLHCDRNGNLLREFGLPHVRRMLPIRHVLRESLVQHRTFLNPKPAREPPFFRWLCGDPSW

SEQ ID NO: 79061 - protein, 686 aa, Zea mays
  Coding DNA Sequence Number=SeqID_35686
  Homolog annotation: Hit_ID=Q6JAD6; Match level="QueryCoverage=65%, HitCoverage=74%, E-value=2e-85, Identity=67%"; Hit description =Putative uncharacterized protein
MEDRRERSLIDPDVECSHQVRMPRTKNVSAPGGGDDEDPRRPFRQVKGKTVYLEQQEGRKKRRTDRAACAAAAAAAAAAQAELGDQPQTPSDQIAYRVRRLASRPRSSTHTTASTPPPTLPAPITPVAPSTTTAIPATSTTPASTAPPPAPASAPPIPPPRFWERDETEVRPLAADPRLFDLQRATAARESFFRAQLSAQIALRVAPALISSYSDCRRQIRQLFGFPESTTRLHSLCYGTSDPPRRPHGGVAPGTAHVAALFCPPFSDGSRRSPVDFTTAAKYLFELIRRTLLPRMGYREATTHIQLWLLGALVSHSEFNVVDFLICEIEDTVLDDIRARRQLPYAHYLCHIFAQLIRPPLFQGMLEASRLVFGSYRPAPEAPVPASAPVFDSQAEDAALRQFDTQDTSVDDDDDFWVPPPPPMPPRSHDHEDGSSSATPAAPPAIDPAIASILQSLTQQQAHLAAEQTCQRSPALGSTSPPERSSARRCRMRARPLGSRHSASTEDLDAVGSQEKETTKQELPPLWEEEDPRGCSPCPRRARHMAQWKTARDKVEARLSMLSYSATTVTSTTVSSSSSTIVGEHAAPDIFLRLRNSETGDYFRGTSVQGHFAERDGGGGWRGWELLLGLGVVMCGRGSELGATMEARAGGRELLLGLGAAILHARPPSYAPYVGSVKSARNRVGF

SEQ ID NO: 79062 - protein, 344 aa, Zea mays
  Coding DNA Sequence Number=SeqID_35687
  Gene Ontology: Mol. function=transcription regulator activity; Cellular component=nucleus; Biological process=regulation of transcription
  Homolog annotation: Hit_ID=Q2QMB8; Match level="QueryCoverage=90%, HitCoverage=80%, E-value=5e-43, Identity=38%"; Hit description=Helix- loop-helix DNA-binding domain containing protein, expressed
  Pfam annotation: Domain name=HLH; Domain location=231-280; Score =66.1; E_value=1.1e-16; Accession=PF00010.17; Description=Helix-loop -helix DNA-binding domain
MDMSHYIPDWSSSMGDTFAPLGGEDDDGLIELMWRNGHVVMQAQAPRKPPRPDDDEAAAAQAQAWFQYPVEERADLFSELFGEAQAAVGGARGEAARQSIRMMPPPPPPPRPAQAPREEKACPGDGGTATATDGAGSSVLTVVSSLCGSNGNHVQATAPGDVARARDVLMVTSSSTTRSRSCTTKSEQPGPGPGAARRSGKRKHNDATDAEDVGLECEPAQRTTTAKRRRAAQVHNLSERRRRDRINEKMKALQELIPHCNKADKASMLDEAIEYLKSLQLQLQVVWMGGGIAAAGVHQRTMVAAPGRPPHVGFPAGVGARPLYALPRRRPPAATALGATATHG

SEQ ID NO: 79063 - protein, 189 aa, Zea mays
  Coding DNA Sequence Number=SeqID_35688
MGIIEKVELTRVSLPTIDNQELMTLILLSTLVMRDLDDDDLGIPPPPPLVPPHSHDHEAGGSSVVSPAAPPAIDIALTSILQSLTQRHFDLAIEKTRQVVGVVSVQSPVPLVSVVSTLAVAVEVSVPATAPASQALQSDPYSVPSSKSTPALASTTDPRFETNSDTVLDFALTARPHPDVSAPPSCSGL

SEQ ID NO: 79064 - protein, 205 aa, Zea mays
  Coding DNA Sequence Number=SeqID_35689
  Homolog annotation: Hit_ID=Q2QMB4; Match level="QueryCoverage=58%, HitCoverage=43%, E-value=9e-19, Identity=42%"; Hit description=Plant integral membrane protein TIGR01569 containing protein, expressed
  Pfam annotation: Domain name=DUF588; Domain location=40-190; Score =153.1; E_value=7.8e-43; Accession=PF04535.3; Description=Domain of unknown function (DUF588)
  Subcellular localization annotation: CTP_CleavageSite=51; ConfidenceScore=5.37e-01
MDLERGDKKPPPPAPRTAATTTTTTTTSACSGKKRPPLRDSLVALQPVLLRAAAALAAAAAAAVMALDAQSYTAVVAIVGTRPLTQTFTARFSDTPAFVYFVIANAIAAAYNLLVLLVRRRRTTASLVVRMLDMVVMALLATGAAAAASMAELGRNGNARARWNPMCDRFGSFCRRGGAALASSFVGVALMLALNLLSAASGAGC

SEQ ID NO: 79065 - protein, 37 aa, Zea mays
  Coding DNA Sequence Number=SeqID_35690
MDGCNGQEQTQEELVVAVLFEAHYDSDKVKDFVAQRW

SEQ ID NO: 79066 - protein, 436 aa, Zea mays
  Coding DNA Sequence Number=SeqID_35691
  Gene Ontology: Mol. function=binding
  Homolog annotation: Hit_ID=A2YIA3; Match level="QueryCoverage=70%, HitCoverage=28%, E-value=6e-86, Identity=48%"; Hit description =Putative uncharacterized protein
MSILKQLLQTLQPTENFDDVLSEFQPSLAPCNVDYLYCGACKILEDIMDLDKSGEPNGKNIHMGCSKAIIPFLRKRLGYSAHKLLSADFPSEDAGKGWQSKGDLIQKILQIYLWNSDSTSDLLAEIGRELPKHEENTGSLNKTIKQALKARGSVDTILQEIQKSVDAFVSLIGMCKSHEKVSMHAMAVKHGGKFIDTFLKAFNFLERHFKQHNDTIVKMVKALLHSCSAEKEFQMGKLLCNLIHGFFSTVRSSHAQTASWHVNLDLSGYAYGNVDEEDEEQTEIDSDLPADEHDNGNAMEEDVVEGTSLVIWSWRWPFHSWLPALILGGLQQCRSPAESNEDDERREDDGKEDLQEGAAATIVIRISRKVQQRLSTIGILVVGALPWGSDRMQAHRSEGQHARTMRDAGSGSPDPWERQRAGDGRMRRLAGSVAMR

SEQ ID NO: 79067 - protein, 80 aa, Zea mays
  Coding DNA Sequence Number=SeqID_35692
  Gene Ontology: Mol. function=binding
  Homolog annotation: Hit_ID=Q69NX2; Match level="QueryCoverage=66%, HitCoverage=4%, E-value=1e-09, Identity=61%"; Hit description =Putative fanconi anemia, complementation group D2
MGEESINGASSKRQKGCKGKVSEKVNPDDKLKQPTILDAFKRAGVTVSHAANKASSQPSSSEMMSKDIEQDATDPVLKVA

SEQ ID NO: 79068 - protein, 169 aa, Zea mays
  Coding DNA Sequence Number=SeqID_35693
MDKGGGGIREGGAPSEGWEILGRKKSVPYVLGKAGERGKGTTPKDDERRHFSEVQVVPGGGHRVGVSHAGEPSETSFAHPTAPKRALESLVASMARASWWGIGEQGWRRGVAGLRVLGQGWEQPKTGGRDRGSKASWRKSSGPKHSARVGALAPPYAGSTERASKRVRF

SEQ ID NO: 79069 - protein, 156 aa, Zea mays
  Coding DNA Sequence Number=SeqID_35694
MPDAARAAPELGLGFGVGIGAKAAGTGRGEEDKRGSKTAGARQLVRGARAPAAGPVRCLRQPRPRPSPSSSPPFPLREAPARARPAPRLPPSLAETRAGGSCAGVRERGFRWRAGVAGAAVSLARGRAGAGAWGSRGGGWTAAIAQGFAACCRAVR

SEQ ID NO: 79070 - protein, 856 aa, Zea mays
  Coding DNA Sequence Number=SeqID_35695
  Gene Ontology: Mol. function=hydrolase activity; Biological process =lipid catabolic process
  Homolog annotation: Hit_ID=A2ZMM7; Match level="QueryCoverage=50%, HitCoverage=92%, E-value=6e-76, Identity=62%"; Hit description =Putative uncharacterized protein
  Pfam annotation: Domain name=Patatin; Domain location=164-374; Score=- 23.4; E_value=0.0009; Accession=PF01734.13; Description=Patatin-like phospholipase
MGCLGVDMGLGLLRLTPLAHPTLPPRHRRIVEQQFVRVASKRRQSRNAHWGCWWVGAIYKGRARALMSSGAITASPISPSPPQPTARHSPTPVPPPIIREPRQAPAAAAAMASSPPDVDLGKLSYEIFSLLESKFLFGGGSVPGTPARAAAPGPGEDRGRVRVLAIDGCGPGPGDALLAAAALARLEAALRARAGDPGRARGRLLRRGGGGRRRRACWAAMLFRAGRRRAGRGTRAADALAFRGGPASGEAAGGGSGGGGGVRGKWAALFRRGGRRGAPSPPLRRVFGDATLRDTVAPLLVPCYDLATAAPFLFSRADAVGSGSLDFRLRDVCAATCAAAGGAAPAVRSVDGRTAIAAASGGVAAMGNPAAAAITHVLHNKREFPLAAGVDDLLVVSIGSGSSFASAAAASAPSTGWRTPVPPRSPSPAEMVRLTSEGVADMVDQAVAMAFGHTCGRNYVRIQASCVGTALRSLDAKKAVALADGMLAQRNVEAELFRGRRLSAKSNREKLDAFAAELVKEQERRDRHRAVPGIAGLVPALAPAIGDRVDPRTSWSKNIIRVKAFHNHTPDNLSNRASKEKASTIRVLPSRPAPHAAAPQSPPPSTAAPQSCNSAARIHRAIAPAVPSPRPQFLVHPAVHAAEHSFPSRPQSPPRARSSRPAPQSTPPSTASHPVPQSPPPPRARSSRPVQRLCARNGVPPPSMELRDGMEQRAPNLHPAPPNLRRSAVNGRQRRRHGRGIERGRGGDVDGVLQGAVRLVLKSTGDTTPPSSVSSTTPPTSRRLGGTGRALLTVSNILLGRHRLCCRKSLLSTCSTSNWKSCTSTSVGPLAAVAPERASTAAVKMDGYYSLVDDAE

SEQ ID NO: 79071 - protein, 61 aa, Zea mays
  Coding DNA Sequence Number=SeqID_35696
MKWSIMLEETPVAAHFYGTLKKGNIETPVAAHFYDTLKKGNILGNIVDLNNWNLVWFVGQF

SEQ ID NO: 79072 - protein, 871 aa, Zea mays
  Coding DNA Sequence Number=SeqID_35697
  Gene Ontology: Cellular component=nucleus
  Homolog annotation: Hit_ID=A2ZML3; Match level="QueryCoverage=89%, HitCoverage=100%, E-value=0.0, Identity=71%"; Hit description =Putative uncharacterized protein
  Pfam annotation: Domain name=WD40; Domain location=199-237; Score =10.6; E_value=1.6; Accession=PF00400.23; Description=WD domain, G -beta repeat
  Pfam annotation: Domain name=WD40; Domain location=38-86; Score=19.9; E_value=0.0092; Accession=PF00400.23; Description=WD domain, G-beta repeat
  Pfam annotation: Domain name=WD40; Domain location=448-485; Score =10.6; E_value=1.6; Accession=PF00400.23; Description=WD domain, G -beta repeat
  Pfam annotation: Domain name=WD40; Domain location=501-538; Score =18.6; E_value=0.023; Accession=PF00400.23; Description=WD domain, G -beta repeat
  Pfam module annotation: Pfam domain module=WD40::WD40::WD40::WD40; Domain location=199-237::38-86::448-485::501-538
  Subcellular localization annotation: CTP_CleavageSite=37; ConfidenceScore=5.23e-01
MITGGQSYVSAPPAFSADGRLLLVCSGRAVSVFSTATAMLVSELEGHEGDVTAVVVVAPPAQATAAAKLASYCWTAGLDGVLIYWDFLAAEVMRKVQVGLPVHSMVVPDIYRTSKGVEVSSPFAFISVEDTSKLASEPKALCGQMRVYDLTKGRQVGGLLAETRKPEKIVASSSGEFLGITNKRKLHIWRIPTKDFKPDKIRKIKLRHTKHLTTLAFHPTERTVAGGDVTGRILIWRCFGNSKFSESSVQSKEDDGRDGVRGDDDADTCTTWHWHSSSSFPGRPVLLNDNFFYVRWFGGSYCCVATRYWKEKVSCTNNQVYLLKMPNMEVMRSIAGIKLPIASPNLGGSNRAVYGFDYTNRLVAIPTEDYCIQFYNLFENAEVSEVQVCERNFQPIDDITMYISMVSLSIDGDLMCTVDVKLPEEGLGGLVTLKFWNHGSRAGHYFLSTVIYEPHSDDGVSSVAFRPGRNMAVSSSFGGNFKVWVQSLSSQSNDERNCSGWRCQSVGSYKKKPMTSAAFSADGSVLAVAAESTITLWDPDNNALVGVIAETLSPVTNLSFVGTSVFLMSLCQSSRPQIALWNVSNLSMQWSYSIYAEAACCSPDGSEFAVLALLSCPDGEASTQQDGVILLFDAESSNPIASWSVKKASGGSISFVKGDVPLDANADSSRDKEPMLLVYVNGSHEYAIFDPRESEEVVISKNKHKKIQAEEPAPIGYASIYGELTKLEPKKEVSDVPFVPSDRPWETIFSGSSHVLPPLTKLCSAFLSSLLEKRPVANEKLTLGYLKLISFVTGIPEYWYGFGSIYVPTGLLMGSNGNPTVGMGNPLGTRNPHGFGFGQNFIPVMGIGFLAGVFFIRGYGFGQFTVALEQG

SEQ ID NO: 79073 - protein, 139 aa, Zea mays
  Coding DNA Sequence Number=SeqID_35698
MAGRYQLPRSCVPPTMRRKDGGYPPSGGLEGGKTRCIRESEDMGPGKGDTPKRILPREGTGLRASLLIRGSKAGPPEGFDSRLRSRGPYTHYWSEVRRPAPRKGSTAASGYSGSAPITDQGFEGWPPKGSQPPQTPSEG

SEQ ID NO: 79074 - protein, 83 aa, Zea mays
  Coding DNA Sequence Number=SeqID_35699
  Gene Ontology: Mol. function=kinase activity; Cellular component =ornithine carbamoyltransferase complex; Biological process=amino acid metabolic process
  Homolog annotation: Hit_ID=Q6QP54; Match level="QueryCoverage=77%, HitCoverage=22%, E-value=4e-11, Identity=56%"; Hit description =Putative kinase
MAPPVDVAGLRPRLGDVEAPPKPRSSLSSVAEAESEPLGRARRRSSAEARAESEPWGRAKRSRSVERRSDGGHFGSAGERASG

SEQ ID NO: 79075 - protein, 34 aa, Zea mays
  Coding DNA Sequence Number=SeqID_35700
MEKHFVFVYFLYPLLVPLLHDELKRRAYCTIGHK

SEQ ID NO: 79076 - protein, 134 aa, Zea mays
  Coding DNA Sequence Number=SeqID_35701
MAREAGAASLPAAGGGGNGRVGLGRLEEGQAEANGKTREIVGERRSDVSRQTSGGVVCRGPRYRCISSSTTILKSTVRNTVDYSGQEKLFGKSHKRGPSGPLRRTVRETRGRTVRTRGADRPRSVEKEQRLGSG

SEQ ID NO: 79077 - protein, 667 aa, Zea mays
  Coding DNA Sequence Number=SeqID_35702
  Gene Ontology: Mol. function=cytokine activity; Cellular component =nucleus; Biological process=cell-cell signaling
  Homolog annotation: Hit_ID=A4L9Q6; Match level="QueryCoverage=95%, HitCoverage=95%, E-value=0.0, Identity=86%"; Hit description =Putative splicing factor
  Pfam annotation: Domain name=RED_C; Domain location=545-664; Score =230.7; E_value=3.3e-66; Accession=PF07807.2; Description=RED-like protein C-terminal region
  Pfam annotation: Domain name=RED_N; Domain location=10-325; Score =189.1; E_value=1.1e-53; Accession=PF07808.4; Description=RED-like protein N-terminal region
  Pfam module annotation: Pfam domain module=RED_C::RED_N; Domain location=545-664::10-325
MLLTVSDWVSSNFSCSPFSEEKKKEEPETPRYRDRAKERREDQNPDYEPTELGSFHAVAPPGSDLRLADAHKISIEKSKYLGGQGPFQTGITRCGVCQDYIAWNNVTILSHLLLLAQAVPHLTVHYLSNWSMGKATRQHLAIGYQTDLIMEYAVHVILCSLISQKSPVDEQLVVLLYCLFIGDLEHTHLVKGLGYALLHKVRSEIEKKPEAEDGKDAKSRATKEDQAVSFRTATAKSVYQWIIKPQSIIKENELFLPGRMSFIYNLEEVVTNDIPTTLHRSKADCPVQEEMVTVSVDGSVLDRIAKIMTYLRLGSSGKVLKKKKKERDIKGKNNLASGDCDESVKPSKINGSTQKHQSDMPPPPARPPQNNNFTGKEKQPVPVARADDDDIFVGDGVDYTVPNEEMSQSPVSDMDESPHNHQKQSNFIEPMYGPVPPSEPAQAWQQPNGYDAVQAQMAAAGYQGDWSSYVYAEQQLGYPEQYVQQSTQEYDVLADPSISQDPRFMTQADKDRGLGSVFKRDDQRLNQLREKDERERDPNFISDSYSECYPGYQEYNNEIAGSDDEDDLSKMDMGGRAKGRLHRWDFETEEEWAKYNDQKEAMPKAAFQFGVKMQDGRKTRKQNKDQKLTNDLHKINKILARKKGEKDGAEDGGHYDDDLPSSKKQRG

SEQ ID NO: 79078 - protein, 214 aa, Zea mays
  Coding DNA Sequence Number=SeqID_35703
  Homolog annotation: Hit_ID=Q6QP51; Match level="QueryCoverage=19%, HitCoverage=19%, E-value=1e-08, Identity=71%"; Hit description =Putative growth-regulating factor 1
MTLGTSDTWPRLGLRSRGTLGHFRDQQERFCNGIPSEGGIKPLDPIERDRVRQITCSRQGRSDRSHFAPPLTDLTGKQRRLPCSDYCATRQSEADSSRVQPQAPQEAPPRPTLGLGPRLGLGRWSPPRPTPGLDLNLDLGRRSPPRPTPGLGLNLDLGRNRVLAQPRPRPQEESPPRPTLGSDRPRRRGYIIDLPLASSGYGGTRPASHLGSPR

SEQ ID NO: 79079 - protein, 295 aa, Zea mays
  Coding DNA Sequence Number=SeqID_35704
  Gene Ontology: Mol. function=molecular_function; Cellular component =cytoplasm; Biological process=protein modification process
  Homolog annotation: Hit_ID=Q2QXT9; Match level="QueryCoverage=21%, HitCoverage=22%, E-value=4e-28, Identity=96%"; Hit description=GRF zinc finger family protein
  Pfam annotation: Domain name=ubiquitin; Domain location=7-75; Score =7.4; E_value=0.049; Accession=PF00240.14; Description=Ubiquitin family
MIEVVLNDRLGKKVRVKCNEDDTIGDLKKLVAAQTGTRPEKIRIQKWYNIYKDHITLKDYEVGLNSEVMGAIRFAMQGVTVQSPSTSSRGRIRPRHRPEASRSSSLLFEAPAFRRFATRRRRFGRASVPVPVGAVDDEVEVVSKVLRSRPKTKRAQIRLHPAQFRMASSKEDTMKSLVKVLVDCAEDATKSLRGLVDHALDHMHDEEILARTLFAMKEKLDLLHQDALEAKVQAFPEIAKYEGDDISVQPTSPSTPPTVTEPSVDEEEFYCPDVSDEWYFSDSDRSTRNSYWNIY

SEQ ID NO: 79080 - protein, 526 aa, Zea mays
  Coding DNA Sequence Number=SeqID_35705
  Gene Ontology: Mol. function=transferase activity, transferring glycosyl groups; Cellular component=cytoplasm; Biological process =metabolic process
  Homolog annotation: Hit_ID=Q2RAM8; Match level="QueryCoverage=94%, HitCoverage=95%, E-value=1e-112, Identity=46%"; Hit description =Indole-3-acetate beta-glucosyltransferase, putative, expressed
  Pfam annotation: Domain name=UDPGT; Domain location=19-521; Score= -76.2; E_value=9.1e-07; Accession=PF00201.9; Description=UDP -glucoronosyl and UDP-glucosyl transferase
MAPLANDEDHKIYGEGCGSHFLVVAYSIQGHVNPARTLAHRLAQTSGCTATLSVPLSCHRRMFPSSSDDDGEATTIISDGLISYLPFSDGKDDGSWPVDSEDRARRRDANFRTLSAVVSRLASGGSRPPVTCVVCTLSMPMVREVARAHGLPLAVYWIQPATVLATYYHYFHGHDALLRLLGLDDGGGRGHGQHEVTLPGLHRPLRARDMPTFLSEEKSQDGLSKMVLQSLRELFQKMDQEQEENKPVVLVNTFGELEDVALRAVHPYMDVFAVGPAVPVPGVLGGSRHQGEMNSASELAQIHLVPHDDETKKAYMEWLDAQPEKSVVYLSFGSLLGYTKRQAEEVLHGLQASGRPYLWVVRKEGRAEEVDLWLTEVEEEKKDISKGMVVAWCDQQRVLAHPSVGCFVTHCGWNSTLEAVVCGVPMVAVPSWSDQPVNAWLVEEEWGVGVRAERDGEGVLTRGELARCVELLMGGGDRAVQVRANASGLKERARRAVAAAGPLEACLESFVETMQGLGRSGKQIAF

SEQ ID NO: 79081 - protein, 50 aa, Zea mays
  Coding DNA Sequence Number=SeqID_35706
MEASPVEGSACGCVEGRIGWRQVEEEGGARWRCHRRQCDRSACDGASLRM

SEQ ID NO: 79082 - protein, 64 aa, Zea mays
  Coding DNA Sequence Number=SeqID_35707
MPPKEWLRPIPGPNRSKIKLLQWVGLCRWEYHRDLGANLDNDLLVLKAVNYLFLHQAVKLFPLR

SEQ ID NO: 79083 - protein, 424 aa, Zea mays
  Coding DNA Sequence Number=SeqID_35708
  Homolog annotation: Hit_ID=A2ZBB0; Match level="QueryCoverage=51%, HitCoverage=44%, E-value=4e-26, Identity=34%"; Hit description =Putative uncharacterized protein
MADWNRPWDVNAHCDRSGSDRRPPLPRPDSSTDELPSYSIAMLPIRGDNYYPVPLWERKFCRNAYGIPWKKFCEKKQFIELYKNVMDWDDSGALENFEAAKERFRAKYHGEPFEDPLLDPDMYIDEIDHLCEVDPELVADLDKVPDVDKVLEQQLVANLGCEEPVADLVPMGHGELGAIPTPTGWGEEDAIPTPTGWGEEDANLAPVGWGEPVANVAAIGWGESASLTPDTAWEGRNSGWNSPLDQPQCTPSNWNDNSYGDRSSNNWYQQEVDPSHMPFGTRRNLNGGGRGSSCRNSNGGVGNRNNNLYGGRSSNTRYQQEVDPGRNSSGTRRKLNGGSGNRNNNFYGGGSSNNRYQQEVDPGRMSPGAGRKQNGGGRGCGRSGSKWNGGGGSGWQQGQRGRRTREMEWRPVQHKRDPQDDPAA

SEQ ID NO: 79084 - protein, 228 aa, Zea mays
  Coding DNA Sequence Number=SeqID_35709
  Homolog annotation: Hit_ID=Q6JAD6; Match level="QueryCoverage=89%, HitCoverage=28%, E-value=1e-51, Identity=55%"; Hit description =Putative uncharacterized protein
MPRTKNVSAPGGGDDEDSRRPFRQVKGKTIYLEQQEGRKKRRMDRAARAAAAAAAATEQVELGDQPQTPSDQIAYRVRRLASQPRSSTTTTASASTPPPTLPVPVTPVAPSTTSTTPASTAPPPAPVSAPPIPPARFRERDETEVRPLAADPRLFDLQRATAAQVRRFRYVPMESWLPAQRDPAAVDLFSTRIQESFFRAQMSAQNCSVSAPDFGTSRFSAKPARCYS

SEQ ID NO: 79085 - protein, 130 aa, Zea mays
  Coding DNA Sequence Number=SeqID_35710
  Gene Ontology: Mol. function=transcription regulator activity; Cellular component=nucleus; Biological process=regulation of transcription
  Homolog annotation: Hit_ID=Q8S490; Match level="QueryCoverage=70%, HitCoverage=61%, E-value=5e-41, Identity=90%"; Hit description =Transcription factor RAU1
  Pfam annotation: Domain name=HLH; Domain location=45-95; Score=42.4; E_value=1.6e-09; Accession=PF00010.17; Description=Helix-loop-helix DNA-binding domain
MPSVQSRITHQFSLPKTSSEMASIEKFLQFQDDVPCKIRAKRGCATHLRNIAERVRRTKISERIRKLQELVPNMDKQTNTSDMLDLAVDYIKDLQRQVKNSKASSLGIEKDYESPEVLANECPGPDEDDH

SEQ ID NO: 79086 - protein, 232 aa, Zea mays
  Coding DNA Sequence Number=SeqID_35711
MALVPCALPRLYGCLGHLDVIKYLSAIYFEHCVMMSNYVIAKCMAHIRCTARKSVIRFLPSRLVERPLRRTVPGQSSQLERLHRRLHEEQECRRQEQEQQDSSPSPQQEVESERPPSPAPQPEMPPAPPQGIPAAGGDPDGDGDDDDAGGSSCHGTELSEKPELEGWIARPITRDAARRCHFHDALDTLLHRAFDRHTWSIEYCCVVYQHRRGLYPDQWEATCLVRHPDDDL

SEQ ID NO: 79087 - protein, 16 aa, Zea mays
  Coding DNA Sequence Number=SeqID_35712
MAAAAPVLCAARAECQ

SEQ ID NO: 79088 - protein, 311 aa, Zea mays
  Coding DNA Sequence Number=SeqID_35713
  Homolog annotation: Hit_ID=Q6JAD6; Match level="QueryCoverage=64%, HitCoverage=28%, E-value=3e-50, Identity=54%"; Hit description =Putative uncharacterized protein
MRTDTSAADGILGRLPHISSSGFLVPRSLTLSLTLWDFLICEIEDTVLDGMRARRQLPYAHYLCHIFAQLIRPPQFQGTLEASHLVFGSYRPAPEDPVPASAPVFDTQAEDGALHQFKAHDAAVDDDDDDDDDDDDDDDFGIPPPHPPPMPPRSHDHEAGSSSATPAAPPAIDPAIASILQSLTQQQAHLAAEQTRLSERMLSMFQTIQDRQDSLQQQLLQDRAESRAFMALMLQHSGVSIPPVQSAPPPPLQALVVPAIQSGPLFLLLVLLPLRSGRSPWLSRHRFSAPSALIRQCHQLLLSPLLLWQCL

SEQ ID NO: 79089 - protein, 394 aa, Zea mays
  Coding DNA Sequence Number=SeqID_35714
MTKDRQEAAQKRRGGHQGFPRLGGRGARGTEKATAPGGSPADAGGEVGRPWVQQGSGEGQLVVVPPAVATTVSAAVPGVKGSALSAGSEISAVTAIKDEAGTVSRRLREASQRLSQAADFADRLASGALTADVSAEVERLRAQHADAVREKSAADSKCRKLAEKVAALEGERTDLWRQLVEERREANQAIAKAQATQAEANLARVEGSLASQRAEEWEVQFSALQARVERAEASMCSEVERTRKQLVDSYRELGARTADFEVPDREAGLRFLEWLQEELLALPTIVEGFMSFAALVTCEGAMNMLSREGCSHYEVFDLSDEDFGREVFKVEDPVVKDSVGALFDQMWGPHGREVVRERSDRARDQAVRAEDVEDFGPLNSVRPEAEANPVVPEG

SEQ ID NO: 79090 - protein, 149 aa, Zea mays
  Coding DNA Sequence Number=SeqID_35715
MWRIRSRKRKPRMNTTKYGENAKVPKSRQRSENDADAAVHVDKTIFPQVEGVVHDGVVFPQVEADIHVEGGVFPQVEADVHDAEAVIPHVEGVVHVEGGVCPQVEPAVHEVGVVVPLVEGVVQVQSPPKSRTPKKILSKKLTPRKLKRM

SEQ ID NO: 79091 - protein, 417 aa, Zea mays
  Coding DNA Sequence Number=SeqID_35716
MVFDCAFGNVEPKFPPVAPFIAGAGNQLNDFHRSLAGLRRKCARTKLSNLISDFPFLPMQTIILREDFDRGLPAVRNRCPDIFCQGHHGIRRQLVDLDVEFTQNFSHKSMRRQTKSSGEKSLEDDQLAFRLGDLLCPRDTCHSAAETPKLLPCLAHGPEDIRDTPNSTVSPERNSYAGHIAQRLLGRRAGRRRIGNRRRRGRHRYVPSAAAGGLLHTGQISNEQEQGGQTSSGRFEKEVRVFAERGKDKVQNVPPPAPLLYTGRGTSGNPQSNSTASINGHVKKPPQNHFERGQRLHHLATSSAPDDLVELVPRRANVGAKAKTPPFARCLRQPRCANGDKTTGRLTLRPTRRRTKTCDEVVSSRGLAQHGGPRVIRPIVTGPTWPPWITGLICKGLPVITVCNPALWEYSGDNLGA

SEQ ID NO: 79092 - protein, 151 aa, Zea mays
  Coding DNA Sequence Number=SeqID_35717
  Gene Ontology: Mol. function=aspartic-type endopeptidase activity; Biological process=DNA integration
  Homolog annotation: Hit_ID=Q8H8K3; Match level="QueryCoverage=56%, HitCoverage=6%, E-value=2e-10, Identity=41%"; Hit description =Putative retroelement
  Subcellular localization annotation: CTP_CleavageSite=32; ConfidenceScore=5.58e-01
MQLNGGGWGTHSPNHKSGRWKAVCRTAHRTVRSATSTGRWVLTVGALTGGASGLSGGAPDRSCRLSVLTLKTANEIWLKLHELHDDTSNVREQKHCLFLNEYNSFAMKDNELVRYMYSRLNLIINKLNPIGINKLGDVDIVRKIISALPQQ

SEQ ID NO: 79093 - protein, 380 aa, Zea mays
  Coding DNA Sequence Number=SeqID_35718
  Gene Ontology: Mol. function=hydrolase activity, acting on acid anhydrides, catalyzing transmembrane movement of substances; Cellular component=integral to membrane; Biological process=copper ion transport
  Homolog annotation: Hit_ID=A2X210; Match level="QueryCoverage=27%, HitCoverage=8%, E-value=2e-36, Identity=77%"; Hit description =Putative uncharacterized protein
MAADVAMVGDGVNDSPALAAADVGMAIGAGTDVAIDAADIVLMKSNLEDVITAIDLSHKTLSRIRLNYVWALGYVLGMPIAASVLFPFTGVALIQYTDAATALAARESLDGRSIPSAAPAHPGATAISPSTLATSPYSSSRPSPLTYRATTSLRCASSPARAPRSTLARSPPLAAGSPPSAALAAPAPHWLAAGSPPSAAPRRVRSSPARRGHARHPPRPLLTGSPRARPPSTAPRREHAAVHRPSPRPLFTDACRTPVPAPHRHTPTVHRPSPRHAAVRPFPHPLLTAPSNSNPPRLRTRVVDVLPRPLREKVLIAMPYQTHPYQWTRTIRIDFNSAQRGKDGLAFVEAFLAHKSYFRKFGLWSLFRGYGFWINDPRFF

SEQ ID NO: 79094 - protein, 335 aa, Zea mays
  Coding DNA Sequence Number=SeqID_35719
  Gene Ontology: Mol. function=nucleotide binding; Cellular component =protein complex; Biological process=protein polymerization
  Homolog annotation: Hit_ID=A3ACU8; Match level="QueryCoverage=72%, HitCoverage=19%, E-value=3e-93, Identity=68%"; Hit description =Putative uncharacterized protein
  Subcellular localization annotation: CTP_CleavageSite=51; ConfidenceScore=5.52e-01
MVAAAAVSATAAVSAASGKPVNAPDLPTFDKWLSISTSILTALLSGRNVLRCQSESKTHTSPTEKNGQLPVGSNAIEITLSCLESNNGLNMKFSSSWCQRVLPTDKEIYLKGLPAFYTTRMHEVQLQKALRSFGSMVKGPAVRVFSKKLEDECRAIWESGRQQCDTVSLTGRPCKHRRHGDFFSSDAMEQHFSGYVFLHACSCGRSRRLRDEPFDFQTTNVSFNCFQNCDDLLPTLALPRGNNVGSFSVSSWCLVRLEGARIKVIGVGGGGSNAVYKMIESSMKGVEFWIVNTNFQAMRMSPIEPENRLQIGQELTRGLGAGADMVFVTITANTS

SEQ ID NO: 79095 - protein, 320 aa, Zea mays
  Coding DNA Sequence Number=SeqID_35720
  Homolog annotation: Hit_ID=Q10LU7; Match level="QueryCoverage=30%, HitCoverage=15%, E-value=9e-22, Identity=54%"; Hit description =Expressed protein
MDPSSRTDSVLTLALANQTRSLLAELDTRLHSIDAKRETRESALESRSAEAAQSMADFSSNLRTDVAAHLTAADAVVDALLGQIEADAVTRVSTASASTPSTPVVAVGIAIVADNWGGGFDGGEDSIEQHYTVPSIVADNWGGLFDGDNVVANALDAIPTDTLSRLTCLARRDHAALQELESPPTDEVMRACDAFLLLVGGDHFMPVLRGALFVICSSCVSLFQLPVNFAVSSRGTRRLLCSSCPKVLSYSYRNPARKKMQLQSPFGGDAYNTDEFEQADPESYSKEYGLSFGISHSISTEDGILTTISISTSTILHTSL

SEQ ID NO: 79096 - protein, 647 aa, Zea mays
  Coding DNA Sequence Number=SeqID_35721
  Gene Ontology: Mol. function=transferase activity; Cellular component= nucleus; Biological process=metabolic process
  Homolog annotation: Hit_ID=A7NZV5; Match level="QueryCoverage=38%, HitCoverage=61%, E-value=3e-87, Identity=60%"; Hit description =Chromosome chr6 scaffold_3, whole genome shotgun sequence
MDPSSRTDSVLTLALANQTRSLLAELDTRLHSIDAKRETRESALESRSAEAAQSMADFSSNLRTDVAAHLIAADAVVDALLGQIEADAVTRVSTASASTPSTPAVAVGIAIVADNWGGGFDGGEDSIEQHYTVPSIVADNWGGLFDGDNVVANALDAIPTDTLSRLTCLARRDHAALQELESPPTDEVMRACDAFLLPVGGDHFMPVLRGALFVICSSCVSLFQLPVNFAVSSRGTRRLLCSSCPKVLSYSYRNPARKKMQLQSPFGGDAYNTDEFEQADPESYSKEYGLSFGISHSISTEDGILTTISISTSTILHTSLVHTLPGASVPSLAMLSSMSLVHASLGAHQVFEELSSCTDNVFNNSIGFTPALMAYGIDIRVIHAIKSRRSPVGKVLTILQANSLSSKEVERRSCISLEEFICNYFSCDTPIIISGTIDHWLARTKWNDIEYLKEIVGDHIFAVEVGKNYVCREWKQELITFSQLLDRMTSIVCSSNLTYCAQHPWFEQLKELSEYMMVTECCYAGAGELQSLNAWFGPEETVAPLHHDPHHNILAQVLGKKYIRFYRAVIAGDSYPHTATMLSSTSQVDLDNIDLKEFPTVESLEFIDCILVEGDLLYIPTKWWHYVRSLPTSFSVSFWWHYKVVDY

SEQ ID NO: 79097 - protein, 75 aa, Zea mays
  Coding DNA Sequence Number=SeqID_35722
  Gene Ontology: Mol. function=DNA binding; Cellular component=nucleus; Biological process=regulation of transcription
  Homolog annotation: Hit_ID=Q5NKI1; Match level="QueryCoverage=76%, HitCoverage=13%, E-value=3e-18, Identity=75%"; Hit description=MYB18 protein
MTFCYSSGLQHLNWYAEIRWSQVTTRWPRRTDNEIKNIWNSRVKKKLWQKGIDPNTHKPLAEVKHSKADPTSSTE

SEQ ID NO: 79098 - protein, 646 aa, Zea mays
  Coding DNA Sequence Number=SeqID_35723
  Gene Ontology: Mol. function=transferase activity; Cellular component= nucleus; Biological process=metabolic process
  Homolog annotation: Hit_ID=A7NZV5; Match level="QueryCoverage=38%, HitCoverage=62%, E-value=2e-86, Identity=59%"; Hit description =Chromosome chr6 scaffold_3, whole genome shotgun sequence
MDPSSRTDSVLTLALANQTRSLLAELDTRLHSIDAKRETRESALESRSAEAAQSMADFSSNLRTDVAAHLTAADAVVDALLGQIEADAVTRVSTASASTPSTPAVAVGIAIVADNWGGGFDGGEDSIEQHYTVPSIVADNWGGLFDGDNVVANALDAIPTDTLSRLTCLARRDHAALQELESPRTDEVMRACDAFLLPVGGDHFMPVLRGALFVICSNCVSLFQLPVNFAVSSRGTRRLLCSSCSKVLSSYRNPARKKMQLQSPFGGDAYNTDEFEQADPESYSKEYGLSFGISHSISTEDGILTTISISTSTILHTSLVHTLPSASVPSLAMLSSMSLVHASLGAHQVFEELSSCTDNVFNNSIGFTPALMAYGIDIRVIHAVKSRRSHVGKVLTILQANSLSSKEVERRSCISLEEFICNYFSCDTPIIISGTIDHWLARTKWNDIEYLKEIVGDHIFAVEVGKNYVCREWKQELITFSQLLDRMTSIVCSSNLTYRAQHPWFEQLKELSEYMMVTECCYAGAGELQSLNAWFGREETVAPLHHDPHHNILAQVLGKKYIRFYRAVIVGDSYPHTATMLSSTSQVDLDNIDLKEFPTVESLEFIDCILVEGDLLYIPTKWWHYVRSLPTSFSVSFWWHYKVVDY

SEQ ID NO: 79099 - protein, 76 aa, Zea mays
  Coding DNA Sequence Number=SeqID_35724
MVKVAVVAVLLMQCCDVILAARPLLHPAAGWQQHGQGAGTTAVMQVLDKGSPGGAGNGNCDWTKPGNPGCPPQPSS

SEQ ID NO: 79100 - protein, 210 aa, Zea mays
  Coding DNA Sequence Number=SeqID_35725
  Subcellular localization annotation: CTP_CleavageSite=68; ConfidenceScore=5.75e-01
MQDGSKQKKPNRRARCVQPPSSYKQLSTFAQTSGRKGGQPCRRHATTPSGRTSPTPNTPSMEAQAHASCNRRAECFVHATAPPLAPPPRLLDCGTNAATRGDPEHDPAALAWRDGTGKGDTPKRILPREGTRLRASLLIRGSKAGPSEGFNSRLRARGLHTRYWSEVRRPAPRKGSMAASGYSGSAPTTDQGFEGWPPKDSQPPQTQSEG

SEQ ID NO: 79101 - protein, 194 aa, Zea mays
  Coding DNA Sequence Number=SeqID_35726
MGDTRRLSASSPEERNSVGVGTFQPSFGFKYFHQLARLYPPRRQSPKTATTSPWVGRSKPGCDLGPTLSFKDVHHPRWGGGRAEPELYLPRGFVGHPLLRCSRERALAGPAGGPDLDNAGLVNGGRRQPQRVELVGLAPGSPSCRKAAAAPCAREDRPRCRALLGRRSCSGAVLPLHRYGASARRSVPHSSGRI

SEQ ID NO: 79102 - protein, 157 aa, Zea mays
  Coding DNA Sequence Number=SeqID_35727
  Subcellular localization annotation: CTP_CleavageSite=24; ConfidenceScore=5.09e-01
MVAFQGGRPPFKGDYPYLRPQPSRAESSPTRSKALPLRRGGWVPHVMRAGSEQKKPNRHARDRERGDTPKRILPCEGTRLRATLLIRGSKAGPSKGFDNRLRSRGPYTHYWSEVRRSAPRKGSTAASGYSGSAPITDQGFEGWPPKGSQPPQTPSEG

SEQ ID NO: 79103 - protein, 199 aa, Zea mays
  Coding DNA Sequence Number=SeqID_35728
MEAISNTRLTLEILVADSVVLVGEMVTSKLFQIWHSADVQRPPPFGISLITRFTKKTQKIGMRAINILGIKGEAACTCLDLMLIQGQLRTEQQLVYVLYSCAVRAIGLERTCGKPISDLASFRFPHCRHTRVQPATNAPAGDWSLDPVCFVGKLQAPLDGRRLEPRSSLLCWKTSSTTRRKCMAKKRGSLILVGWSLLH

SEQ ID NO: 79104 - protein, 75 aa, Zea mays
  Coding DNA Sequence Number=SeqID_35729
MVKAAAVAVLLMQCCDVILGARPLLHAVAGWQHGQGAGTTTVMQVLDKGSSGGPGNGNCDCTKPGHPRCPPPPSS

SEQ ID NO: 79105 - protein, 219 aa, Zea mays
  Coding DNA Sequence Number=SeqID_35730
MADSKDPNSASPNSDTRLTNLSVAEHENLEDDMKKMDEEIQRQQDQMLKVAKKWYLSHFKVDRHQKVIKEREIDADYMSSVLQQLPTIGDARGRDLDSSKEEEDDPVARSRTVRPRAADRPAATAVHLAEPNPRYCSSREATMVKAAVVAVLLMQCCDVILGARPLLHAAAGWQHGQGAGTATVMQVLDKGSSGGRGPGKGNCDWTKPGHPGCPPKPSS

SEQ ID NO: 79106 - protein, 75 aa, Zea mays
  Coding DNA Sequence Number=SeqID_35731
MVRAAMVAVLLMQCCDVILGARPLLHAAAGWQHGQGAGTTTVMQVLDKGSTGGPGNGNCEWTKPGHPGCPPQPSS

SEQ ID NO: 79107 - protein, 257 aa, Zea mays
  Coding DNA Sequence Number=SeqID_35732
  Gene Ontology: Mol. function=DNA binding; Cellular component =intracellular; Biological process=regulation of transcription
  Homolog annotation: Hit_ID=A2Y612; Match level="QueryCoverage=48%, HitCoverage=57%, E-value=3e-49, Identity=78%"; Hit description =Putative uncharacterized protein
  Pfam annotation: Domain name=MMR_HSR1; Domain location=110-214; Score= -13.6; E_value=0.019; Accession=PF01926.14; Description=GTPase of unknown function
MNTLHNSPIRENAVLKRGVAIQHERQKEFDVRTQEVDSLKEMVLQYQEQLRTLEVNCDTWFDADKHLKQAQQNNSMPAKLAKLRGELLTPTSKGGGGAGEGFDVTKSGDARVGLVGIPSVGKSTLLNKLTWTFSEALKMQMEVQKRLHEQLEVQIQLQLTIEAQGRYLQMIIEEQQKLGGSIKASEDQKLSDSPPSLDDYPEIMQPSPKKPRIDALSPDSERDTTQPEFESHLIGPWDHGIAFPLEEFKADPTMSKS

SEQ ID NO: 79108 - protein, 77 aa, Zea mays
  Coding DNA Sequence Number=SeqID_35733
MVKAAVVAVLLMQCCDVILGARPLLHAAAGWQHGQGAGTATVMQVLDKGSSGGRGPGNGNCDWTRPGHPGCPPKPSS

SEQ ID NO: 79109 - protein, 95 aa, Zea mays
  Coding DNA Sequence Number=SeqID_35734
MVKDLLRARACWFAKLTGCRGWVASSRRARLGLPRAGWCHDDNERGEDVGKEPGSGDVRRQEGGDSVKNGAPGRIGPDRLGCNKKKWYLMDRCED

SEQ ID NO: 79110 - protein, 119 aa, Zea mays
  Coding DNA Sequence Number=SeqID_35735
MAEDLEVDCGTGAAIEIESGGRRNRGSGEFRQAKSVACTQASGWRGQDLLAGQIGGDIVREGVGGAELQPRRAAISGAGAAAWGGAAAWGGARGWGVGRGGRVGVVKGARMGRGQTGAR

SEQ ID NO: 79111 - protein, 76 aa, Zea mays
  Coding DNA Sequence Number=SeqID_35736
MKKCGSELHNLTFISKKQQKSATSSPKNNEGINPEYGILSKSYPTKEKTLKGMLVIWESRVSRRVIKIKEGNAGIV

SEQ ID NO: 79112 - protein, 218 aa, Zea mays
  Coding DNA Sequence Number=SeqID_35737
MVRIRFTFKTGCDSAEEHRCGCQVLTDPTRCGWRPDPDVVGDAVLETLGQVTYFSGRGLARPYLPDVPADRLKRSCSLVEPGLRPADLLELWVVTPLKGKCALGPFLSILVIECQHKCLNVNLCSWMDKVQIKSKALVATCVRAVALILSLVCVASSSLTPYFFVNLKCKGERLQVVEIPRKRDIEKQSKTPWYSSWSLDRLRGVDCNPRPLGRHNVE

SEQ ID NO: 79113 - protein, 42 aa, Zea mays
  Coding DNA Sequence Number=SeqID_35738
MGTNGHLDLDEGGKSVDQKILCFLYACVQDSKPTLRKLTLRP

SEQ ID NO: 79114 - protein, 259 aa, Zea mays
  Coding DNA Sequence Number=SeqID_35739
  Homolog annotation: Hit_ID=A2XFR5; Match level="QueryCoverage=93%, HitCoverage=97%, E-value=3e-42, Identity=52%"; Hit description =Putative uncharacterized protein
MGSEKGGAKVIGGGGIFNLFDWKRKSRKKLFSNSPEGSKLVKRSEETLLSGRLHLGDDDEGIGVSSFKGSSDYSCASSVTDEEVREMKAPGCDKDDSDNKVEAKGQIFRGSKIKDRPALDSSLFQKLENMHVYNKQGKEPFCRGGYRRLLFDCVNECLETRRTAYFRAGYAAWSKGAAALIRGVEAQVCSEITSWKSMGDWTEDELVDKDMSSGLGTWVDFLVEEFEAGVEVENHVLGSLLDEVVADMVVGRHGRSVNL

SEQ ID NO: 79115 - protein, 43 aa, Zea mays
  Coding DNA Sequence Number=SeqID_35740
MAACAMDELIWLAQAGKQIWVKGMPGDARDFSAQTPTGPSQQE

SEQ ID NO: 79116 - protein, 174 aa, Zea mays
  Coding DNA Sequence Number=SeqID_35741
MEAQAHVSCNRRAGCCVRATAPPPAPLSRLLDYGTSTAARGNPTHDPAAPAWRDDQCDQKWAGSNGGGRRAGAAVTSSARLTSHPRAGPGKGDTPKRILLREGTRLRASLLIRGSKAGPSEGFNSRLRARGLHTHYWSEVRRPVPRKGSTAASGYSGSAPTTDQGFEGWPPKGS

SEQ ID NO: 79117 - protein, 49 aa, Zea mays
  Coding DNA Sequence Number=SeqID_35742
MQWLLGRGMHRMRHVAYAGWLLMAAVLTDYKKSSIRARQLIGFCSGRVF

SEQ ID NO: 79118 - protein, 199 aa, Zea mays
  Coding DNA Sequence Number=SeqID_35743
MKALSVGIGRVPRVVHRARWYIGRGVVPPLGKSARGGGVEPGAGGGALASEGYPKKVARPLEDGSRTGRPTYQAARREGPKGQPGTACQADQPARRTNIRRAPQRGRAAEQPSEAGLPSNPTGRGYQPTQRGKAADQPNEARLPTILPVEQPRKTTMNRPIGPNDLDLKDLNIVVSIVTHTPKGMGHYVVPDVRLRMMK

SEQ ID NO: 79119 - protein, 513 aa, Zea mays
  Coding DNA Sequence Number=SeqID_35744
MNELTGIRSAITNGTPVPPPQVQTTPLRGGRPAEQRKADEWCAVARSSSSDDNAFCSEGPSSGSASLGLDAAARKPPPMPKLVRQGRAEGHRVGGQPAVGPGHLAGGRTSSSCRGGCQRREWLRSHSRLKARHAAAASATGDGRLSLRSLSEGAGCRPRGGRPQLGALPSPALAMKILEAEGEEEAAAPARFPSPSSRRSPSQVTAGGGEQPGSMMKILEAERWLRGSLPPFKGNSPYVRPQAPRAESSPTRSKALPCDSGAGSRMSCKPAQGRRSQTAAHGAHDRPAVTGDPPFSPRPTGRRGGQPCRRHATAPDGRASPTSDTPAWGPGPRVEQMARQLLHASNRTATCATIAPLRLRSLCHDSRRPSARPSSARLARRSNAVKNGSAVMTVAGGREQRSRRRPSSRPIRGQQENPLSRREDNAPVIRSLERLAHAQRPPRQPLAPVALNPRRDRRRFWQEKRATLRLRRNNRAKKGVRRLAPEGFTFSSNAERGMTRGTFVLPRLGLRSR

SEQ ID NO: 79120 - protein, 187 aa, Zea mays
  Coding DNA Sequence Number=SeqID_35745
MEKYTQITVEGPPKDRKMSQTPGARLRHHALQQHLAIAAAARLFVVLLLIIVDVAVAAPGALARLPRGGGGAEEVAVVAVEARRVRHGRRDAGDEAEHARGRGAEPERRRLVYGVLALAAAEPVASRAGPGRRVRDRDRRIVRAGAGTDLCDAPPFRAHSTATSSSRPRPDTERTVFFSPAAFALRV

SEQ ID NO: 79121 - protein, 184 aa, Zea mays
  Coding DNA Sequence Number=SeqID_35746
MARWRRMSQGDPGSHHGVCGERGGDARHEIRWRPQDGEAIATEISGGRTQPHATGLRKIVASLEEKINAEITLSMQHKGHAMGKGQPHLVSLAHVRRWSSRVQKPREAGGGSLPRRGRTEEREALEPRASEHGSRRGSSEGRKGASVSTGRKREAADSSKLMHDDEAPHDNSGMEERRNFAREE

SEQ ID NO: 79122 - protein, 184 aa, Zea mays
  Coding DNA Sequence Number=SeqID_35747
  Gene Ontology: Mol. function=metal ion binding
  Homolog annotation: Hit_ID=Q6EP91; Match level="QueryCoverage=39%, HitCoverage=25%, E-value=5e-20, Identity=67%"; Hit description=F-box protein-like
MDHVLAGLMGDHLALIVDRLLTESTLEAAIGSGKHMVDLRQEIVDVEICQEDWDTCMEAPCACCGSLKGGCTDMVDIGEGMGQTGVCCGGDSGGGGGAVAAMVLLYLDQPEICQVALLNSAFHGVASADCVWAAKLPANYRYLAALAATADDEGCGDGDASGKRLTKKEIYVRTGEGEILQGTD

SEQ ID NO: 79123 - protein, 198 aa, Zea mays
  Coding DNA Sequence Number=SeqID_35748
MAPRCVLRWPNLNDVAPTWYRARRQDLWRRARICNNKLGAKIYGAELGSMSVPRRCHDVRLCQRNTHLGAIAYGAELCYLGAIGYGAEKRKTADRVAPTAGELGDVWFVAKCATLCLRFNALPHSPLHGTEGRHRRIFIKDILAPSIISETTDQAKDGGKKSFEVSSAREKVKETRNPKPGVKKKTCKVKVDRVKKTY

SEQ ID NO: 79124 - protein, 80 aa, Zea mays
  Coding DNA Sequence Number=SeqID_35749
MVHVKGRGWAGGRCRCRCRCSWLSLSRVHGGSRVGVAAAHAAQCGGRSFMQGMRCAVARSCRGGSSSGCCPAGTGSPASA

SEQ ID NO: 79125 - protein, 17 aa, Zea mays
  Coding DNA Sequence Number=SeqID_35750
MTNSDCDMDEGPKPKIF

SEQ ID NO: 79126 - protein, 113 aa, Zea mays
  Coding DNA Sequence Number=SeqID_35751
MLQGPPLRLGGWVPHVMQTGSEQKKSNRRAWCAQPPSGYKRPPTFAQTNGREGQADGSSSHVVSQAHVPSRDSKRASSHGVKTEKRTTLRLRRNNRAKKGTGKGGYPEKDPSL

SEQ ID NO: 79127 - protein, 178 aa, Zea mays
  Coding DNA Sequence Number=SeqID_35752
  Homolog annotation: Hit_ID=O48967; Match level="QueryCoverage=89%, HitCoverage=35%, E-value=1e-48, Identity=63%"; Hit description =Putative uncharacterized protein
GLALGFSPVSLFDTMVQIVEHRDLSPEDFLMEEGAASSMPQGSHRPTPGAAAMHATQQHTPTQTSKAPSRAAHGGALSATRELLRNPPSSTASPEAMRQWREDVDRLLVMAHPGSARSRPRSFRHQREASASVRSPSMRELNRRRAGEDARVSLERARERRQNFEGRNFEQDFTAKDA

SEQ ID NO: 79128 - protein, 45 aa, Zea mays
  Coding DNA Sequence Number=SeqID_35753
MDPSAIVGRTAATTMRDHYVNQNIERPPGKTVLPQGRNGSPWMIN

SEQ ID NO: 79129 - protein, 119 aa, Zea mays
  Coding DNA Sequence Number=SeqID_35754
MARRLVASRGKEKVDEGDLAAGERDLGYQTPEQVLKDIVTGDSDSGDDDDRRKKLYAMYGGSWELTSRRNVKSLRHEPRCVQAAVDPRVPTGALTPFIRSEPSTGVSPWEHRTPGYIRD

SEQ ID NO: 79130 - protein, 122 aa, Zea mays
  Coding DNA Sequence Number=SeqID_35755
MLVPLADAVHEFQDLPAFRGAVATVGVATPEPPIWVTPVYGAECHARPSAALAHLSASVKSVVTVSTSCVANFSNIFLSHTLCRKAVIMEASEMRGIVPRTLVKREMKAWRVSLGSCLTAWR

SEQ ID NO: 79131 - protein, 102 aa, Zea mays
  Coding DNA Sequence Number=SeqID_35756
MARAHLGTKDCDHMWQKLKEQKEYVLVPDQGAAQEVAPDPAPEPAPEDLSATALEGKPRLACGINFTSSLEDMVAGVTWPSILPPGWIVEWDPASAEEEHEE

SEQ ID NO: 79132 - protein, 108 aa, Zea mays
  Coding DNA Sequence Number=SeqID_35757
MEARRASRYRVQGEGQGDQEPKARGEEEDLQSQESNIDLKQAKLGKTMKKVNYVRESTILSSAGGEIEKLGEEQERFSGKSSQKLKSNGERTEEKALSVLLVGAQDSE

SEQ ID NO: 79133 - protein, 137 aa, Zea mays
  Coding DNA Sequence Number=SeqID_35758
MVEFHIRGYGYGYYTISTGNNFAGMDICYPYPSTDGYMTCGPKQWKQVPAASLGLVLVHCFAGSAVSASAASQQLAIARPHRKANGQWPAVQGPSGPGLRSKRTACGSAYRPLGLGQSESRAAAEHRGAAEQPSHRA

SEQ ID NO: 79134 - protein, 68 aa, Zea mays
  Coding DNA Sequence Number=SeqID_35759
MEDDDDNGRYPRTINEELVELGQLPDDVDDMGDAVAALFGVDTTPNPGSDSQWYSSCLAIDSKRYSKI

SEQ ID NO: 79135 - protein, 25 aa, Zea mays
  Coding DNA Sequence Number=SeqID_35760
MVQSRLLLLVGPRTRPWGRDLRMLQ

SEQ ID NO: 79136 - protein, 296 aa, Zea mays
  Coding DNA Sequence Number=SeqID_35761
  Subcellular localization annotation: CTP_CleavageSite=42; ConfidenceScore=5.18e-01
MSTEIDPNPYPNRAKTHQVLDSGYPLPSLFRTVTSQQAQCRRAQRAGEITGRRQVKRASSCNTHLAGHYWFSHEPRLFFPSGAGAAAVSTGVTLSRVQYLSRDPSSSLLLCAWQWHRLRLRPARLSFPPASAAAMTSRLLSMPCDDGYWIGTERFVQPQDDTEQEESGKDPYQQWKPRARKKVHTPRPQADGPNFPGLLHCMHVCISRYASNDAASSCHGKVKVKGPVGITILIKMHTASSPTFNPTEQLNRERYSSDTDTGQGDLCSAKVNGIRCPMLLPINDPAVVNSDNQEMW

SEQ ID NO: 79137 - protein, 364 aa, Zea mays
  Coding DNA Sequence Number=SeqID_35762
  Gene Ontology: Mol. function=metal ion transmembrane transporter activity; Cellular component=integral to membrane; Biological process=metal ion transport
  Homolog annotation: Hit_ID=Q5G1L7; Match level="QueryCoverage=100%, HitCoverage=100%, E-value=1e-138, Identity=73%"; Hit description =Zinc transporter ZIP
  Pfam annotation: Domain name=Zip; Domain location=43-361; Score =290.8; E_value=2.8e-84; Accession=PF02535.13; Description=ZIP Zinc transporter
MGAVKHTLKMLSWLLLFAQLAAATTSKCTNATNGTETDSLGAMKLKLIAIASILTAGAAGVLVPVLGRSMAALHPDGDIFFAVKAFAAGVILATGMVHILPAAFDGLTSPCLYKGGSGGNIFPFAGLIAMSAAMATMVIDSLAAGYYRRSHFKKARPIDILEIHEQPGDEERSGHAQHVHVHTHATHGHSHGEVDVISSPEEASIADTIRHRVVLELGILVHSVIIGVSLGASVRSSTIRPLVGALSFHQFFEGIGLGGCIVQANFKLRATVMMAIFFSLTAPIGIALGIGISSSYNGHSTTAFIVEGVFNSASAGILIYMSLVDLLATDFNKPKLQTNTKLQLMTYLALFLGAGMMSMLAIWA

SEQ ID NO: 79138 - protein, 18 aa, Zea mays
  Coding DNA Sequence Number=SeqID_35763
MAMPVKLTPASLSLKAAS

SEQ ID NO: 79139 - protein, 381 aa, Zea mays
  Coding DNA Sequence Number=SeqID_35764
  Gene Ontology: Mol. function=oxidoreductase activity; Cellular component=cytoplasm; Biological process=metabolic process
  Homolog annotation: Hit_ID=A2YT96; Match level="QueryCoverage=92%, HitCoverage=95%, E-value=1e-129, Identity=65%"; Hit description =Putative uncharacterized protein
  Pfam annotation: Domain name=ADH_N; Domain location=37-152; Score =127.6; E_value=3.6e-35; Accession=PF08240.3; Description=Alcohol dehydrogenase GroES-like domain
  Pfam annotation: Domain name=ADH_zinc_N; Domain location=183-329; Score=96.1; E_value=1.1e-25; Accession=PF00107.17; Description=Zinc -binding dehydrogenase
  Pfam module annotation: Pfam domain module=ADH_N::ADH_zinc_N; Domain location=37-152::183-329
MAPVEAEQHRRRALALAAHDASGAVSPIRISRRDTGDDDVAIQILYCGICHSDLHTIKNEWKNANYPVVPGHEIAGLITEVGKNVKRFNVGDKVGVGCMVNTCQSCESCEGGHENYCSKIIFTYNSHDRDGTVTYGGYSDMVVVNERFVIRFPDGMPLDRGAPLLCAGITVYNPMKHHGLNEAGKHIGVVGLGGLGHVAVKFAKAFGMRVTVISTSPGKREEAMETLGADAFVVSGDANQMKIGCSFRSLSMVAAKGTMDGIMNTASASMSMYAYLALLKPQGKMILLGLPEKPLQISAFSLVTGGKTLAGSCMGSIRDTQEMMDFAAKHGLAADIELIGTEEVNEAMERLAKGEVRYRFVIDIGNTLNAASLGSSPVPAL

SEQ ID NO: 79140 - protein, 124 aa, Zea mays
  Coding DNA Sequence Number=SeqID_35765
MAKSLRSKREKRLRTLRREIAEPFYDKKEAAKLTAQAAALAAPPLQVRGPPPSQDAGSSRGASSASAMDVEMSDEGNNRSKTFLKPLGIISKKKKLLPSYSSSLENHALIGLFKFETDVEQLGA

SEQ ID NO: 79141 - protein, 487 aa, Zea mays
  Coding DNA Sequence Number=SeqID_35766
  Gene Ontology: Mol. function=magnesium ion binding; Cellular component=chloroplast; Biological process=metabolic process
  Homolog annotation: Hit_ID=Q84ZW8; Match level="QueryCoverage=100%, HitCoverage=85%, E-value=0.0, Identity=88%"; Hit description=Terpene synthase
  Pfam annotation: Domain name=Terpene_synth; Domain location=1-138; Score=10.8; E_value=1.2e-09; Accession=PF01397.12; Description =Terpene synthase, N-terminal domain
  Pfam annotation: Domain name=Terpene_synth_C; Domain location=154 -422; Score=313.3; E_value=4.7e-91; Accession=PF03936.7; Description =Terpene synthase family, metal binding domain
  Pfam module annotation: Pfam domain module=Terpene_synth::Terpene _synth_C; Domain location=1-138::154-422
MGISRHFAAEIKCILDRTYRSWLQRHEEIMLDTMTCAMAFRILRLNGYNVSSGYLNDTRTLLELHKASTVSISEDESILDSIGSRSRTLLREQLESGGALRKPSLFKEVEHALDGPFYTTLDRLHHRWNIENFNIIEQHMLETPYLSNQHTSRDILALSIRDFSSSQFTYQQELQHLESWVKECRLDQLQFARQKLAYFYLSAAGTMFSPELSDARTLWAKNGVLTTIVDDFFDVAGSKEELENLVMLVEMWDEHHKVEFYSEQVEIIFSSIYDSVNQLGEKASLVQDRSITKHLVEIWLDLLKSMMTEVEWRLSKYVPTEKEYMINASLTFGLGPIVLPALYFVGPKISESIVKDPEYDELFKLMSTCGRLLNDVQTFEREYNEGKLNSVSLLVLHGGSMSISDAKRKLQKPIDTCRRDLLSLVLREESVVPRPCKELFWKMCKVCYFFYSTTDGFSSQVERAKEVDAVINEPLKLQGSHTLVSDV

SEQ ID NO: 79142 - protein, 498 aa, Zea mays
  Coding DNA Sequence Number=SeqID_35767
  Gene Ontology: Mol. function=nucleotidyltransferase activity; Cellular component=cytoplasm; Biological process=metabolic process
  Homolog annotation: Hit_ID=Q6ZJ97; Match level="QueryCoverage=99%, HitCoverage=99%, E-value=0.0, Identity=79%"; Hit description =Putative UDP-N-acetylglucosamine pyrophosphorylase
  Pfam annotation: Domain name=UDPGP; Domain location=58-482; Score =17.8; E_value=3e-15; Accession=PF01704.9; Description=UTP--glucose-1- phosphate uridylyltransferase
MKEEMMVGLSAPEPVGRWGAAPPQAMLERMKDYGQEGAFALWDDLSPEDQELLVRDIELGILRQSYVVFIPITGIPLPAVEPVPESSVSKVEGRSAEDKERWWKKGLKAISEGKLAVVLLAGGQGTRLGSSDPKGCFNIGLPSGKSLFQLQAERILCVQKLAAQSSESPSNTVPIHWYIMTSPFTDAATAKFFETRRYFGLDPDQVTFFQQGTLPCVSADGRFIMETPYRVAKAPDGNGGVYAALKSKKLMEDMAARGVKYVDCYGVDNALVRVADPTFLGYFIDKGASSAAKVVRKPIEHSTQQAYPQENVGVFVQRGRGGPLSVVEYSEMDAAMATEMNQSTGRLRYCWSNICLHMFTLDFLNQVANSLEKDSVYHLAEKKIPSIHGFTTGLKLEQFIFDAFTYSPSTALFEVMREEEFAPVKNASGATYDTPDSAKLMLLRLHSRWVVAAGGFLTHSVPLYMTGVEVSPLSSYAGENLEAICRGRTFHAPSEISF

SEQ ID NO: 79143 - protein, 276 aa, Zea mays
  Coding DNA Sequence Number=SeqID_35768
  Gene Ontology: Mol. function=3'-5'-exoribonuclease activity; Cellular component=nuclear exosome (RNase complex); Biological process=RNA processing
  Homolog annotation: Hit_ID=A2X5Y3; Match level="QueryCoverage=43%, HitCoverage=31%, E-value=9e-54, Identity=81%"; Hit description =Putative uncharacterized protein
  Pfam annotation: Domain name=RNase_PH_C; Domain location=186-254; Score=44.8; E_value=3.1e-10; Accession=PF03725.6; Description=3' exoribonuclease family, domain 2
MAGGGRQSQRPDVQTMAEPQSDEGRAELGGGARQCAWTCVNPRAFERVPAAWVEVEYPNGGPIPPSADSVKMARKKGGSVELTMEHGWRKFVGEEKNSADKSAPQVNHPQQPAQPAKRLTQRAHVSVTQARIAGHAGISLMQLISLHWQLLSTFWRPECTVGGDDGQQVTVHDPEVRDPLPLTIHHMPIAVTFAYFGEGNIVVLDPTYKEEAVMGGRMTAIVNSNGDVCAIQKAGGEGLMSSVTMQCLRIAPVKVADITSKIKKALENVHRYYISI

SEQ ID NO: 79144 - protein, 114 aa, Zea mays
  Coding DNA Sequence Number=SeqID_35769
MAPKRANPKADEAAKAALLAARKGKALALTQSTHQEATEDDVPRTCEDDTLRTCGPEGQPQPPSGFAPPEGADLTEDGEVLGVSAEEQLQLRAPRGGGGSLSWSKSTFSLSNLL

SEQ ID NO: 79145 - protein, 570 aa, Zea mays
  Coding DNA Sequence Number=SeqID_35770
  Gene Ontology: Mol. function=magnesium ion binding; Cellular component=chloroplast; Biological process=metabolic process
  Homolog annotation: Hit_ID=Q673F9; Match level="QueryCoverage=95%, HitCoverage=63%, E-value=0.0, Identity=65%"; Hit description=Ent -kaurene synthase-like protein 1
  Pfam annotation: Domain name=Terpene_synth; Domain location=230-448; Score=162.3; E_value=1.3e-45; Accession=PF01397.12; Description =Terpene synthase, N-terminal domain
  Pfam annotation: Domain name=Terpene_synth_C; Domain location=466 -569; Score=-24.4; E_value=0.00031; Accession=PF03936.7; Description =Terpene synthase family, metal binding domain
  Pfam module annotation: Pfam domain module=Terpene_synth::Terpene _synth_C; Domain location=230-448::466-569
  Subcellular localization annotation: CTP_CleavageSite=31; ConfidenceScore=5.08e-01
MPDVMAAALTGFSPRGVIPSRGRASLPGVARAYAERRLVAENTSLPNMHKEQLETIIRNQLRKPQLPPSSYDTAWVSMVPVRGSHQTPRFPQCVEWILQNQQDDGSWGVSQSDSSVSKDVLLSTLACVLALKRWNVGRENIWRGLHFIGRNFSVAMDEQFTSPIGFNFTFPGLLSLGIDMGLEFPVRQIDVCGILHRREMELKRLAVDSSFGRKAYMAFIPEGFGNMLDWDQVMKFQRKNGSLFSTPSTTAVALIHKYNDQALQYLNLLVNEFGSAVPAMYPSRVHCQLSMVDALEKMGISQRFVSEIESILDMAYNCWLQNDEELMMDIATFAMAFRLLRMNGYDVSSDELSHVAGASTFHDSLQGYLNDTKSLLELYKTSKVTLSENDLILDRIGSWSGNLLKDKMCCSRVQKDSIFGEIEYAVNFPLYSTLERLEHKRNIEHFDAWGSLMLTTKSSSFRINQEFLALAVEDFSFSQRVYRDELRHLDSWVKENKLDQLQFARQKLTYCYLSAAATVFSSELSDARISWAKNGVLTTVVDDFFDVGGSKEELENLIALVEKYVYSFMK

SEQ ID NO: 79146 - protein, 316 aa, Zea mays
  Coding DNA Sequence Number=SeqID_35771
  Subcellular localization annotation: CTP_CleavageSite=54; ConfidenceScore=5.06e-01
MLGVLGVGEVRPLGAVACRLHGCPPFRPLVWAKVKSRFPAAPLRRRSPKAVTTSLSVGRSKPGYDLGPTLSFKDAHHPRWGGGWVEPELYLPRGFVGRPLLWRSRERALTGPAGGSDFDNVGPVDGGCRQPQRVGSSAWLLAPPPAGRQLPHRVHGRTAQDIARCQGGVRVLGRFSLCTGTAPPRGGRCLTRPGGFEWGSAGGLMAPVVGAEVEAAREVLVADGITATIRASGLRLFVLVLALRAAVDGELPVGLLLLRRPLPHRVGLFVPAESGDPWTASPSEARSDLAKGVVDAEGAAAPFSRQGPSLQDQIIL

SEQ ID NO: 79147 - protein, 47 aa, Zea mays
  Coding DNA Sequence Number=SeqID_35772
MAKSMSNELVVPSDMDPLNLDQVHGVKRYKEYEGWRRAEAMRRGASA

SEQ ID NO: 79148 - protein, 159 aa, Zea mays
  Coding DNA Sequence Number=SeqID_35773
MAAVPEYPATAAGRIRVGGVQHDSRQHVPGGGGVEATTTRSTSFEDAVPPGSFSVSAGHSPLPALSRVGNGVAYCCAWIAMCLDRRWRLSRCEGGCRRCIKDSRASEFKVMDERQNTAEIVWSAGGEGGDARTAEVGDDGAGWVRGRLLRTRAPSKVVG

SEQ ID NO: 79149 - protein, 75 aa, Zea mays
  Coding DNA Sequence Number=SeqID_35774
MKTPDVGGGLSTYTVNSRLVELVVVVEVVVVVVSPTALALFLGGPDVFPRVLVLSDFASRSRDWGNQSYKVNIQG

SEQ ID NO: 79150 - protein, 71 aa, Zea mays
  Coding DNA Sequence Number=SeqID_35775
MARVACTLRGKRLDGETGDQAKDEGKKSFEVSSAREKVKETRNPKPGVKKKTCKVKVDRVKKSYGASRITT

SEQ ID NO: 79151 - protein, 38 aa, Zea mays
  Coding DNA Sequence Number=SeqID_35776
MVPSNMDPSDLDQVHGVKRYKEYEGWRRAEAMRRGASA

SEQ ID NO: 79152 - protein, 53 aa, Zea mays
  Coding DNA Sequence Number=SeqID_35777
MVGTSAVTARRQPGSVEHCTMQDLVDGVTWPTTLPPGWTVKWDVAPAGEEHEE

SEQ ID NO: 79153 - protein, 85 aa, Zea mays
  Coding DNA Sequence Number=SeqID_35778
MNAHGYRCNNDFCLHISKDMKLHHTPSRATYDAQCTETTDQAKDGGKKSFEVPSAWEKVKETRNPKSGVKKKTCKVKVDRVKKSY

SEQ ID NO: 79154 - protein, 27 aa, Zea mays
  Coding DNA Sequence Number=SeqID_35779
MAKSFIIALEGPALTWFTRLPPVIPGS

SEQ ID NO: 79155 - protein, 86 aa, Zea mays
  Coding DNA Sequence Number=SeqID_35780
MKITRKINKDLQPQNEVVHDMESVVWEKDEQFRSYAWRSFGLAVENETDLKMKRLFRPRWIAIELLANVKGMGVILHGLRPMPINT

SEQ ID NO: 79156 - protein, 104 aa, Zea mays
  Coding DNA Sequence Number=SeqID_35781
MMMKIINLQHHPLRTKKMSDVSERLRIFSLTLIEKSKEREDASHEGRRATSGTAVQLWSNPQRGGAKARRLQVSKFGMTLQAKINLQGREATDPHHAHHAHHVC

SEQ ID NO: 79157 - protein, 58 aa, Zea mays
  Coding DNA Sequence Number=SeqID_35782
MAVRRGILASALPINCSGFSEASGTLLRPRSVALPRFLGRGEEQVVQEEPQSEEFDLI

SEQ ID NO: 79158 - protein, 58 aa, Zea mays
  Coding DNA Sequence Number=SeqID_35783
  Subcellular localization annotation: CTP_CleavageSite=31; ConfidenceScore=5.15e-01
MAPKKANPKADEAAKASLTGGRGPHRGRESSASQRKSSYSCASLRLKNRNLQRQKREN

SEQ ID NO: 79159 - protein, 191 aa, Zea mays
  Coding DNA Sequence Number=SeqID_35784
  Gene Ontology: Cellular component=cytoplasm; Biological process =protein transport
  Homolog annotation: Hit_ID=A2ZA76; Match level="QueryCoverage=28%, HitCoverage=14%, E-value=2e-17, Identity=79%"; Hit description =Autophagy-related protein 3
  Pfam annotation: Domain name=Autophagy_C; Domain location=72-172; Score=-7.3; E_value=0.0001; Accession=PF03987.6; Description =Autophagocytosis associated protein, C-terminal domain
  Subcellular localization annotation: CTP_CleavageSite=36; ConfidenceScore=5.23e-01
MTPIQLRHAACLARNPSPSRTTPHWSAAALPPLRVSASIIHRPAASTALRVCRAKHQPYRPPLCIGLRGLGNSTLHWRLHTGDSARVDSPHRVLHFCSNSGFGVLLLGAHDLTQTDPARKVTIEDHPHLLAGKHASVHPCKHAAVMKKIIDVPMSGGVEPEVDNDSHTDYRVRLYNGRRPWQYKLIIGWLE

SEQ ID NO: 79160 - protein, 201 aa, Zea mays
  Coding DNA Sequence Number=SeqID_35785
  Gene Ontology: Mol. function=chymotrypsin activity; Biological process=proteolysis
  Homolog annotation: Hit_ID=Q5ZGX2; Match level="QueryCoverage=38%, HitCoverage=14%, E-value=2e-14, Identity=57%"; Hit description=Apr protease
MSDVVLLGRNARKGRLEIGHELSLNIALKAGTLSHKRVTERPCSATEARNTISRFCSRISDQSTSTMGIVLPEQIKLACQRLRPSSPYAIAQLQSMNMMRLSMIRCFPISYYHVILVAIKGARVVSRVPLRRNETDGFSYDYGAASPLQPNKMLDEYVDVYSPLLYTPNPPSPGCQHCNHCSGEDEAVEGDFQEFQDYDEF

SEQ ID NO: 79161 - protein, 129 aa, Zea mays
  Coding DNA Sequence Number=SeqID_35786
MKDCPSRLMTGLSSLLTYTLIKYNHSRLCGQSLDLNLHGPNPRIMTAGEHREDKEGECFVRFGHGGGLVPPGIIAKVRTCKEGESFSIRISRREGVADRVRVTPVPNLAYGCWTADLLRSVYRAASAPL

SEQ ID NO: 79162 - protein, 92 aa, Zea mays
  Coding DNA Sequence Number=SeqID_35787
MDLPLLSRLSTRTAHLSLDTMLMMSDNRRRGGRRAQQEQVAPQDEAPQQQQLAPPPPMSIEKMFLMQTQAVQAIGQTLAAIQQQQQQPPPQP

SEQ ID NO: 79163 - protein, 73 aa, Zea mays
  Coding DNA Sequence Number=SeqID_35788
  Subcellular localization annotation: CTP_CleavageSite=34; ConfidenceScore=5.29e-01
MFRLQVAMRLMVLGFDSGNATAQEKMKPWKETSRSSKTTTSSRRGLAATPSRLPVKATFIYVSVGDLFSNASN

SEQ ID NO: 79164 - protein, 47 aa, Zea mays
  Coding DNA Sequence Number=SeqID_35789
MFRLQVAMRLMVLGFDSGNGCPHCSHCSGEDEAVEGDFQEFQDYDEF

SEQ ID NO: 79165 - protein, 254 aa, Zea mays
  Coding DNA Sequence Number=SeqID_35790
ASTTGAGAAGLFFLAPVGDKVYEELLPRASTGRAPPTPPLSAPAPGVAAGGDPDDGGGDDSSSFRIDLSASQELEGWVARPITCNAARGCHFHDALDTLLRRALDRHTWSIEYRCVVFQHSRGVYLDRWEATCLVRRPENSLWGAKICSEHGVAAMQDVARCALSHYCSVLGGVVDGLNLKYYPRRPSGITGGVVVSPVGEDNPRLSSTVVTPGFRRQTECKPCSRLGVAANPRLELVVVLELLEVSFHGFIFS

SEQ ID NO: 79166 - protein, 99 aa, Zea mays
  Coding DNA Sequence Number=SeqID_35791
MERTIKDLGKAKVLTRSSKGVHNRKEINSDSAATSSQVLGPDKPSWRGHSCVTGDNQWSCVVVIARSRSLGDLDHQRQGLHSIKLSYLTEERASYSITI

SEQ ID NO: 79167 - protein, 261 aa, Zea mays
  Coding DNA Sequence Number=SeqID_35792
MAERAAIDQRMADMFQYMQSLSASQGFAPPPPSFPAVDPVVFHTPGKQIKKVPTGHFAECDTRQRGALSSVKTIALGKEPRPGHRYRFFAECNVSNTRQRSTFCRVPHLALGKEPDMGTLPRGIFAECHQGHSAKMDSLSSVVGQTLSKDGSFAECHRGHSAKMPSPSPGAVTAAFLCRVLSGTRQTSLPSAREKVLGKEGFVECDIRQRLGRVFLSLCRVLRALGKACDSGSDIPGPGRLTTLALLFLGYPTRSCTVTGG

SEQ ID NO: 79168 - protein, 130 aa, Zea mays
  Coding DNA Sequence Number=SeqID_35793
MLAVMSGQGSSIDYRYLIRDVWFTGGDEDDDFGYDYGNGARRGNTWAGLYSGPPESLIGPLPTPSSASYHGRAPSTPSPSMIVLRAPGTLYADEHRRRGPVAPPLAGVALGEKRPWPLVQHWAAKIRLGV

SEQ ID NO: 79169 - protein, 286 aa, Zea mays
  Coding DNA Sequence Number=SeqID_35794
MEPSSSHLLPVVHVQEARLKKAPCLNDVWAQGRPVTPISTKLQRPDGRDSGQGSVHPRDTISSRPSPASGRNSRPRQIYASPEGLLKQWAHPRLARGPARAGFAEKQPWPDRYANRPYRRSIQCKDRLTPDPDARSSVDRAKENSVACPAPTAVPLDRVRLTAAKSSLERHRKLRLARPPGLGLNLNARRRTPPRPTLGLGLSLDLGRRTPPRLTPGLGLSLDLGRRTPPRPTPGLGLSLDLGRRSPPRPIPGLGLNLDLGGVTASPDLGLGPTTSQGGHHYPTPS

SEQ ID NO: 79170 - protein, 233 aa, Zea mays
  Coding DNA Sequence Number=SeqID_35795
MRRVASSRDTGSVVEKARYWRKWRPACVMRGTQPPFRRGKTLERVGEASVRDGSGRKWGESPLKGGNTTSRKLVPFSHRSASRIFIRQPGCIPSPVVAQDGDHQFDGGEKHAGLRPLPRPQLQGCSSSVLGRGVRRVGACLRVGSGPLLPSMIRGKDVRRSWRWQLPRVWLSGLSGFGAASGATSHRGSQKRFLCRRDSWCHPRTDLRLYGLLLVLAPRVGTWARALSQQRLP

SEQ ID NO: 79171 - protein, 401 aa, Zea mays
  Coding DNA Sequence Number=SeqID_35796
MAAAGERKQQSRTGKGDAPKGILLREGSGPRALLLIRGSKAGPSEGFDSRLRALGLRALLLIRGSKAGPSEGFDSRLRALGLRALLLIRGSKAGPSEGFDSRLRALGLRAHYWSEVRRLAPRRGSTAASDHSGSAPTTDQGFVGLPPKGSTAASEHAERGMTLGTSDTWSRLGLRSRGLGATLANPAPAKPLTASTYQPENLEPDYAPGLQPLVTPINTKLQRPDGHDSGQGSVHPRDTISSRPSPASDRNSRPRQIYASPEGLLKQWRTLDSPEAQLGQASRRSNLGRIATPTDRLGLNLDAGRRTPPRPTPGLRLSLDLGRRTPPRPTPWLGLSLDLGRRTPPRPTPGLGLSLDLERRSPPRPTLGLGLNLDLGGVTASPDLGLGPTTSQGGHHYPTPS

SEQ ID NO: 79172 - protein, 85 aa, Zea mays
  Coding DNA Sequence Number=SeqID_35797
MAATEEGRAGVGGLGGWRMETAGARGGRLRDSSDSSEEGSGGDGDDEGDSGDGGDDGGGGDGDDMGDGGKGDDGSDRANGKAPLA

SEQ ID NO: 79173 - protein, 146 aa, Zea mays
  Coding DNA Sequence Number=SeqID_35798
MGKIKKGGSSSHHSGDKRKREPSPPSEDFGDSEYSEEEFSSESEGSPNRAHRLGIQCLTDPDCRRAVTALVPTITEMGDHVLGCVRSKVCGQVHSVHSNAWHMVPHLNPYSNFRLIDNASPWIVVHRPSSLRYKNGYNQFLTSREC

SEQ ID NO: 79174 - protein, 112 aa, Zea mays
  Coding DNA Sequence Number=SeqID_35799
MALLAISENGQGDDNTIPKSKHGPTVKVPEVGMSFEFGENAYQILSASQKIPSRPRSSGCPIPPFKVGGGRSAAVPTLHPVSLGHCIVSRSRNGVAKIHGRSCARVRRLVPR

SEQ ID NO: 79175 - protein, 148 aa, Zea mays
  Coding DNA Sequence Number=SeqID_35800
MGKSNKRKREPSPPLEDFGDSEYSEEEFSSESEGSPAPVSPPASSDDSDDSQGIAADVWTYIRAVERSGLEGSDESEYSSDEEDSSDSFEEGGDGDGGDGEDDDDDGGDGDDGDSSRGGDGGSKGSNGGGSRGGNGGGSSKGSNKASG

SEQ ID NO: 79176 - protein, 110 aa, Zea mays
  Coding DNA Sequence Number=SeqID_35801
MATCPVELKVKNVDGTHVLNLKFDGTHVLNLKFDGAVELTSLSSSKNRRRLYSSVNPRSYGAKGLQQANKKTKKRVQQKEKGITEVCPGLAHRTVRWATGQCSVHQGTPS

SEQ ID NO: 79177 - protein, 113 aa, Zea mays
  Coding DNA Sequence Number=SeqID_35802
MNKKTLAFEMPLPTELRFPPPQEERATLHLRRNNRVRKGTGKGGYPERDPSPRRNRAPSPPLLIRGSKAGPPKGSTAASDRVGPTPTTGQGFEGQPPEGFHGRLRLLGLRAHY

SEQ ID NO: 79178 - protein, 72 aa, Zea mays
  Coding DNA Sequence Number=SeqID_35803
MVEKGHGSCGETVVTRSAITKQKRNRERGYSERDPSPQRKRAPSPLLIRGAKAGPSEGFNSRLRALGLRTHY

SEQ ID NO: 79179 - protein, 278 aa, Zea mays
  Coding DNA Sequence Number=SeqID_35804
  Gene Ontology: Mol. function=phospholipase A1 activity; Biological process=lipid metabolic process
  Homolog annotation: Hit_ID=UPI0000D9FA20; Match level="QueryCoverage =73%, HitCoverage=64%, E-value=2e-10, Identity=28%"; Hit description =PREDICTED: similar to tenectin CG13648-PA, partial
  Subcellular localization annotation: CTP_CleavageSite=20; ConfidenceScore=5.60e-01
MGAIKVKAQSTQGTRSRLTRAQPLAKAADPGGFTSRPRAPSSNGHTFGSPKAQSSQRSNLGQIAMPTNHIPSPASGAIGSSTSPDPQGSAPVSASEDGLRLARPQGSDSTSTSDDELRLARPQGSGSALAPEDDELRLARPQGSDSTSAPEDDELRLARPQGSDSASAPEDDELRLARPQGSDSASAPEDDELRLARPQGSDSASAPEDNELRLARPQGSDSALASDDSLRLARPGARTRPRPRKIDSTSTSKEPPPHPTQGSDRPRHRGGHHYPTPS

SEQ ID NO: 79180 - protein, 36 aa, Zea mays
  Coding DNA Sequence Number=SeqID_35805
MGSRHSACSAEAECRGKEEVVEADLQEFQDFDESED

SEQ ID NO: 79181 - protein, 106 aa, Zea mays
  Coding DNA Sequence Number=SeqID_35806
  Gene Ontology: Mol. function=nucleic acid binding; Cellular component= nucleus; Biological process=mRNA processing
  Homolog annotation: Hit_ID=Q5ZBG2; Match level="QueryCoverage=66%, HitCoverage=12%, E-value=3e-26, Identity=81%"; Hit description =Polypyrimidine tract-binding protein 1-like
MGKTKTENDKDSMQRECAGDQNQAIAMISYYASSTEPAQVRGKNVYLQYSNRQEIVNNKATGEGSGNVLLVGMEGVAPDSVSIDVLHVEYFDVAGLSFSDANKSIE

SEQ ID NO: 79182 - protein, 93 aa, Zea mays
  Coding DNA Sequence Number=SeqID_35807
  Subcellular localization annotation: CTP_CleavageSite=51; ConfidenceScore=5.62e-01
MWSAHTAAGCYVPSVRFHGTLVSLAQSSSSNDRGRMSRAERTYCRGRSNKRASGRGAGIASATFVHPQCLGTTVVAKPAIKPGECLEIAKLST

SEQ ID NO: 79183 - protein, 539 aa, Zea mays
  Coding DNA Sequence Number=SeqID_35808
  Gene Ontology: Mol. function=cytokinin dehydrogenase activity; Cellular component=extracellular region; Biological process =cytokinin metabolic process
  Homolog annotation: Hit_ID=A2X2I2; Match level="QueryCoverage=92%, HitCoverage=94%, E-value=0.0, Identity=70%"; Hit description =Putative uncharacterized protein
  Pfam annotation: Domain name=Cytokin-bind; Domain location=244-527; Score=579.5; E_value=3.3e-171; Accession=PF09265.1; Description =Cytokinin dehydrogenase 1, FAD and cyt
  Pfam annotation: Domain name=FAD_binding_4; Domain location=68-212; Score=104.6; E_value=2.9e-28; Accession=PF01565.14; Description=FAD binding domain
  Pfam module annotation: Pfam domain module=Cytokin-bind::FAD_binding _4; Domain location=244-527::68-212
MARRTRFVAVAALLASFLSVAAGHPRPLPAAGLPGDLFGLGIASRIRTDSNSTAKAATDFGQMVRAAPEAVFHPATPADIAALVRFSATSAAPFPVAPRGQGHSWRGQALAPGGVVVDMGSLGRGPRINVSAATGAEPFVDAGGEQLWVDVLRATLRHGLAPRVWTDYLRLTVGGTLSNAGIGGQAFRHGPQIANVHELDVVTGTGEMVTCSMDVNSDLFMAALGGLGQFGVITRARIRLEPAPKRVRWVRLAYTDVATFTKDQEFLISNRTSQVGFDYVEGQVQLNRSLVEGPKSTPFFSGADLARLAGLASRTGPTAIYYIEGAMYYTEDTAISVDKKMKALLDQLSFEPGFPFTKDVTFVQFLDRVREEERVLRSAGAWEVPHPWLNLFVPRSRILDFDDGVFKALLKDANPAGIILMYPMNKDRWDDRMTAMTPATDDDDNVFYAVSFLWSALSADDVPQLERWNKAVLDFCDRSGIECKQYLPHYTSQDGWRRHFGAKWSRIAELKARYDPRALLSPGQRIFPVPVESSGIASA

SEQ ID NO: 79184 - protein, 60 aa, Zea mays
  Coding DNA Sequence Number=SeqID_35809
MAGWLLVLGADLMWGDDNSTIAAMMTCLNDKEEPMVSSDSNRYHSGRSPKNTKVDTAPKL

SEQ ID NO: 79185 - protein, 461 aa, Zea mays
  Coding DNA Sequence Number=SeqID_35810
  Gene Ontology: Mol. function=translation elongation factor activity; Cellular component=eukaryotic translation elongation factor 1 complex; Biological process=translational elongation
  Homolog annotation: Hit_ID=Q5Z627; Match level="QueryCoverage=88%, HitCoverage=98%, E-value=1e-175, Identity=74%"; Hit description =Elongation factor 1-gamma 3
  Pfam annotation: Domain name=EF1G; Domain location=276-384; Score =151.1; E_value=3.1e-42; Accession=PF00647.10; Description=Elongation factor 1 gamma, conserved
  Pfam annotation: Domain name=GST_C; Domain location=128-220; Score =41.6; E_value=2.7e-09; Accession=PF00043.16; Description=Glutathione S-transferase, C-terminal domain
  Pfam annotation: Domain name=GST_N; Domain location=26-99; Score =61.1; E_value=3.9e-15; Accession=PF02798.11; Description=Glutathione S-transferase, N-terminal domain
  Pfam module annotation: Pfam domain module=EF1G::GST_C::GST_N; Domain location=276-384::128-220::26-99
MAPLGLFLLLCFCSHLFRCSPDLALPVLHANSGNKNAFKTLIAAEYSGVKVELVKDFQMGVSNKTPEFLKMNPIGKIPVLETPDGPVFESNAIARYVTRLKADNPLYGSSLIDYAHIEQWIDFAATEIDANIGKWLYPRMGFYPHAGVVEESTIAALKRALGSLSTHLASNTFLVGHSVTLADIVMTCNLCMGFSRILTKSFTSEFPHVERYFWTMVNQPNFKKVIGDVKQAEAVPLVPQKAAPAKVQKPKETKKEAPKPKVTEKSAEEEEAPKPKPKNPLDLLPPSKMILDDWKRLYSNTKTNFREVAIKGFWDMYDPEGYSLWFCDYKYNDENTVSFVTMNKVGGFLQRMDLCRKYAFGKMLVVGSEPPFKVKGLWLFRGSEIPKFVMDEVYDMELYEWTKVDLSDEAQKERVNAMIEDQEPFEGRGLAGCKMLQVRKEFLGPILKQPWMIAFDMACWL

SEQ ID NO: 79186 - protein, 273 aa, Zea mays
  Coding DNA Sequence Number=SeqID_35811
  Gene Ontology: Mol. function=protein serine/threonine kinase activity; Cellular component=integral to membrane; Biological process=protein amino acid phosphorylation
  Homolog annotation: Hit_ID=A2YPQ7; Match level="QueryCoverage=32%, HitCoverage=18%, E-value=7e-33, Identity=76%"; Hit description =Putative uncharacterized protein
MGRDEGFGEKAKAVVKISSFQIILAQGVTGSFPWSALPFAPMWLELMGFTHNRTGLLMITFALASSLGGLLGGNMGDHFATCFPNSGRIVLSQISSASAIPLAALLLLGLPDNSSGSLHGLVMFIMGLSISWNGPATNKQLLEMLLNNCGEPVHRQVIDNGLLPILVKIVKKKKRRLITHANAKSKSEKFPPPHQDGALGFPLGCSNHMEPSFEPPNPSPFSTVFPYEKSTVPTWSGPLANSTAGNQKRKHKSGRSSKQPATAHARLYTSFHA

SEQ ID NO: 79187 - protein, 58 aa, Zea mays
  Coding DNA Sequence Number=SeqID_35812
  Subcellular localization annotation: CTP_CleavageSite=33; ConfidenceScore=5.20e-01
MASRSRTTMVAPSPSPVEAAPRLRLRPPPRKMTAELLETVCKACPLSRKQVAFIASEF

SEQ ID NO: 79188 - protein, 323 aa, Zea mays
  Coding DNA Sequence Number=SeqID_35813
MASVVGAEVVAAEEVLVADGIIATIRAPGLRLVGFGSLSSPLEWGCERGARCSSVCPEVIAAAVWPPRAEVVIAAAGASVGEPPRVSSPRRPSNVGGCSYLRGWNRSSVCNGTLSVGVCSLWLSGPEHEPSRAVHWRDRRRSWVAEAPSRADVLGGQLAEATERPVEPSVRAGFPEETLAVMAHAWCQQVPSRWRSSDRVVVRGQVGFRRRCQRFIYNDTNSTVRNTVDYSGQEKLFGKTGQARTVRAPAADRPRHMNDPRTEPMQKHKFPLQTVRRKSKDRLSPRADRPASGADRPVAVDLQGRTVRTWLADRPRSAERCNG

SEQ ID NO: 79189 - protein, 225 aa, Zea mays
  Coding DNA Sequence Number=SeqID_35814
  Homolog annotation: Hit_ID=Q6QP51; Match level="QueryCoverage=18%, HitCoverage=18%, E-value=2e-14, Identity=90%"; Hit description =Putative growth-regulating factor 1
MQAACNRTKGAHPFDSDASSMGAQAHTSCNQRAGYYVRETAPPLALIPRLLDWRTSAVTRGDPAHGPTVPTEHIDHGSDSRGRRRDGQYGQKWAGSNCGGRRAEAAQVVCRLTSPPGTAREPSPTGPRKGILRKGSFSAKEAGPEPPTDQRFEGWPLGRVRQPPQSTRAPSPPIDQRFEGWPLGRVRQPPQSTQAPRPPLVRGSKAGPSEGFDSRLKPLGLHAYY

SEQ ID NO: 79190 - protein, 215 aa, Zea mays
  Coding DNA Sequence Number=SeqID_35815
  Subcellular localization annotation: CTP_CleavageSite=33; ConfidenceScore=5.59e-01
MQAACNRAKWTRFSDSQRAQPRGPGPHVTQPARRMLRSGRRFAFAVITAPKKASSLLTDQRFEGWPPEGFNSRLRSRGPYTHYWSEAGPRRVHSRLRRRARDDQGYVRYIAEARAALPSSPETPCSVPIEGNMALSPLLLAERRRRGVCKKAESVPDRPLALCGGSGAAPANPAPAEPLTASTYQPENLGPDRTHGLRPVRMREQPDQPKHYARH

SEQ ID NO: 79191 - protein, 234 aa, Zea mays
  Coding DNA Sequence Number=SeqID_35816
  Gene Ontology: Mol. function=helicase activity
  Homolog annotation: Hit_ID=Q5JMT3; Match level="QueryCoverage=82%, HitCoverage=31%, E-value=9e-14, Identity=29%"; Hit description=DNA binding protein-like
MAPRKPCDDGGSQLSYGSRRTYKISLTAEDDTDTAEFIFFGRMAQRLIKKNVDALISTNPPGFIPREITNLLEKSFEWNVFSLRPLPINCNSSGSNLFFCPPANSAPGQGLGVTQNKGAAFIREPSLTPESHKVSSSAKCNLQTATHQGANLLLGTEIITSPPNVQTPSGAAYSVLDGSTNKTHKGVTGKKEMTMLLVPQTLMLSNVLLDTSTTSYGGPLLGTEDRFWELSQFI

SEQ ID NO: 79192 - protein, 69 aa, Zea mays
  Coding DNA Sequence Number=SeqID_35817
MALPVDVAGLRPRLGDVEAPPKPRGAAVGVAQAALSFCQAGQWSGEVTAVTLALPGGARQDKGVRPPLR

SEQ ID NO: 79193 - protein, 218 aa, Zea mays
  Coding DNA Sequence Number=SeqID_35818
  Gene Ontology: Cellular component=mitochondrion
  Homolog annotation: Hit_ID=A2Y4Y7; Match level="QueryCoverage=63%, HitCoverage=22%, E-value=1e-41, Identity=65%"; Hit description =Putative uncharacterized protein
MKAAPLFCVTPNPCPGAELAGGQKNRLEPEELQLMGRGRSEKTCTQKETYSVRRGECLTLRKYGRRWLSELNYKISGQMDMSRMETLYHADKEKTEALILELVVWLHHLISKSGNTSGGVRSPIKSPVSSPTQKGAAVTLLSGKTNNLPPILTQEDQDMLRGVKYRKFVLEISKSQEFDTKSSHSKQSRLSKSNSHSPASGSRKDLFPALNFTKAKIL

SEQ ID NO: 79194 - protein, 153 aa, Zea mays
  Coding DNA Sequence Number=SeqID_35819
MALARIGRRPPARDGKGIKDVSKAWVGLGKKEYDVIVDITPQLITLNQRSDKYHKNKHSSIPISTKIVLLLFLRLGLLFLKVTLGTGFQSVKSTFVLERKGPPSQQNPPEGLPTLTTPLLPLPLSEHEWVKEVIKGTTCLALEIPEVLSGRQY

SEQ ID NO: 79195 - protein, 159 aa, Zea mays
  Coding DNA Sequence Number=SeqID_35820
MEEKTAKKAAPDKSEVHPLNVIKVTMEDLAEADRKEIEEEIAREMEEKWNERLACFRKTKNGVIKQIGGASTSSKKVQGELQGKRVENLSYAPSYNGASAHNDVNQTVNERSGDSVMNFNLQQPYYQSMAYVPSIPPIGNKIPQGFVPNDYRIGELKGN

SEQ ID NO: 79196 - protein, 92 aa, Zea mays
  Coding DNA Sequence Number=SeqID_35821
  Gene Ontology: Mol. function=magnesium ion binding; Cellular component=chloroplast; Biological process=photosynthesis, light harvesting
  Homolog annotation: Hit_ID=Q0H633; Match level="QueryCoverage=68%, HitCoverage=55%, E-value=2e-26, Identity=92%"; Hit description =Putative chloroplast chlorophyll A-B binding protein type II
  Pfam annotation: Domain name=Chloroa_b-bind; Domain location=1-65; Score=-16.4; E_value=0.00035; Accession=PF00504.12; Description =Chlorophyll A-B binding protein
MGFVEGYRVGGGPLGEGLDKVYPGGAIDPLGLADDLDTTAKLKVKELKNGRLAMFSMFRFFVQHYRKRSNFRRPKPSDLSYVRRYPLMSDGF

SEQ ID NO: 79197 - protein, 416 aa, Zea mays
  Coding DNA Sequence Number=SeqID_35822
  Gene Ontology: Mol. function=isomerase activity; Biological process =protein folding
  Homolog annotation: Hit_ID=Q6Z9J0; Match level="QueryCoverage=15%, HitCoverage=82%, E-value=7e-23, Identity=69%"; Hit description =Putative uncharacterized protein P0524F03.13
  Pfam annotation: Domain name=DUF298; Domain location=155-250; Score= -24.2; E_value=0.029; Accession=PF03556.6; Description=Domain of unknown function (DUF298)
  Subcellular localization annotation: CTP_CleavageSite=72; ConfidenceScore=5.52e-01
MGFRRQHTMFSHVPPSISSSTHNNRNAKLTGVNQGPHRKGTCYGQRHRGAQRRMTRSTEETHAVISKVALPCCARDAKLYGNMISKLSKLEDTEDNGQMSQTVNKKRGLLWPLSEMVRRFFTADGSKGFTLWPALRLLIPDEWRTGLKALRADSISKLKKAFPELVQEVSRPSNFQDFYIYAFRYCLTVLGLQFHPQVDKLNNYLMAPRSTTAYFEIHIRGTEEESTDLANGEAPAATHAPSLAGVTPSQSHRPGRPRRSSQITAPRTPDSRRPSSRADAGALPLAAASQPRSASRSGAVSQSSSTRSAGRAQPTRRHALSLAVVAPSRAERRRALAPSVADPAARAARRVVLLPHTHARRRDNLRGDGRVVLSSPLRAHTHARRRARRAVVPLRAHTYADQQPNGPTVPHARVAA

SEQ ID NO: 79198 - protein, 144 aa, Zea mays
  Coding DNA Sequence Number=SeqID_35823
  Gene Ontology: Mol. function=magnesium ion binding; Cellular component=integral to membrane; Biological process=photosynthesis, light harvesting
  Homolog annotation: Hit_ID=A2XJ35; Match level="QueryCoverage=97%, HitCoverage=54%, E-value=1e-62, Identity=83%"; Hit description =Chlorophyll a-b binding protein, chloroplast precursor
  Pfam annotation: Domain name=Chloroa_b-bind; Domain location=59-144; Score=21.0; E_value=6.1e-07; Accession=PF00504.12; Description =Chlorophyll A-B binding protein
  Subcellular localization annotation: CTP_CleavageSite=33; ConfidenceScore=5.24e-01
MATSALQQTTSFLGQALVSRPAGVDAGSRITMRRTVKSAPQSIWYDPDRPKYLAPFSEQTSSYLTGEFPGDYGWDTAGLSADHETFARNRELEVIHSWWAMLGALGCVFPEVLAKNDVKFGEVVWFKAGAQIFSEGGLDYLVLL

SEQ ID NO: 79199 - protein, 380 aa, Zea mays
  Coding DNA Sequence Number=SeqID_35824
  Homolog annotation: Hit_ID=Q10HH4; Match level="QueryCoverage=92%, HitCoverage=41%, E-value=1e-08, Identity=44%"; Hit description =Expressed protein
MEHVVAVLYPWKSVHPDAASISNAGLIDYMIGNGQHPEVFHLVQNFNLEDKYPPFSLLKGYIQKAKQTFVEMFKKSQTHESLELYGCMAPWVARTLDIQATLCCRQKFEAAILLLTDFFRVGMHTSSRMLRGMARGCREVTGLVVGGIVRWWWSGWAGMEAGALYLEVEGSGVGGEQDPWWNWAIPKELWIAHYLAEQKLTDSKQRSAIMAEIKYLMSGYEKKQRSENLSTWASQHPPTESKRRNRKRKEEEQEHHEAQYNQQQQEQNENKLIQGKRHQLHQENMAQVTQQQQQHMQPTTRPATLKLPTPAIPLVLNAAQIQNFARPAYAAVPGVHNYPAQPGWSAAQGSPFVPQFMSPQYMGLPFNPFGLHPTCYPRRR

SEQ ID NO: 79200 - protein, 372 aa, Zea mays
  Coding DNA Sequence Number=SeqID_35825
  Gene Ontology: Mol. function=helicase activity; Biological process =RNA-dependent DNA replication
  Homolog annotation: Hit_ID=Q5JMT3; Match level="QueryCoverage=86%, HitCoverage=53%, E-value=2e-58, Identity=37%"; Hit description=DNA binding protein-like
MNKSSGEIPWRRYGDCYRVRAFCLRTNDLAERAPPAVRGSECEAELRWAREIGLAARVFGGNSIHAQIYPPLCQQFSALLDEGRIYNLKYFLVRKANRFYKPVENCNMISFTKWTTVEVILQIPPAFLVCTYNLTPIDQLQPRVDYKEYFTDVLGVVSVISQVSSVRTRGRQAEVMKRTVTISNARDTGPTVDVVLWGERATTFPAEQVHRDSGSSPQIIIFVGTLVRSYADNVSLSGGSSCKWYINEPVPEVNALRASAETNHHPVIWDQGKAAAESTVIAVPEHKKLKDIKYLHPFENKKKEWLVIVKVLKIDSSWWYNACKKCLRTTKPHGDTYKCTNISCDNIGSPTPRCCMNAAVAEKAKYEKPGKA

SEQ ID NO: 79201 - protein, 213 aa, Zea mays
  Coding DNA Sequence Number=SeqID_35826
  Gene Ontology: Cellular component=mitochondrion
  Homolog annotation: Hit_ID=A2Y4Y7; Match level="QueryCoverage=65%, HitCoverage=22%, E-value=7e-41, Identity=64%"; Hit description =Putative uncharacterized protein
MKAAPLFCVTPNPCPGAELAGGQKNRLEPEELQLMGRGRSEKTCTQKETYSVRRGECLTLRKYGRRWLSELNYKISGQMDMSRMETLYHADKEKTEALILELVVWLHHLISKSGNTSGGVRSPIKSPVSSPTQKGAAVTLLSGKTNNLPPILTQEDQDMLRGVKYRKFVLEISKSQEFDTKSSHSKQSRLSKSNSHSPASGSRKRLVPSTKLH

SEQ ID NO: 79202 - protein, 168 aa, Zea mays
  Coding DNA Sequence Number=SeqID_35827
MGRARRASAKGGSEVAGDGRERGGNPAAFVFVPRPGRVGRRGGSSEAEVESVFHGRGPSPSPWVGRGGGRSAEARAESEPWGWAERSSSSSGAEPESEPWVGQSGVRRLLGLSPSPSPGSGGAEFAVFRDFSPSPSPGSGGAEFAVFRDLARVRALGRAERSSPSSGT

SEQ ID NO: 79203 - protein, 92 aa, Zea mays
  Coding DNA Sequence Number=SeqID_35828
MGKHVPSLLMLLLSRVTALVPTITGMGDLVSGRVRRAICCQVMHKPGLAFQGCGRQILWCRLWCWIRGYLLSSSLLRHEDVLSVSEDLITLC

SEQ ID NO: 79204 - protein, 247 aa, Zea mays
  Coding DNA Sequence Number=SeqID_35829
MDAKRFLHLVEEKKRRVLEKKEAPLKWEQKLETAAKAKVDAEAKVKKLNSRKHRRRGDLSSDSDSDYGSDVDRKHLKRKNRRRNKKHEHSDSDDARRRNRRSRRSTDSSDESNSEYETRSEEERPRKKRSHRRRHHRHSSKSDSENYSSDEEQRRPAKDHSQSRRRHHRSSDDDSDKDKVKSRHGKGLRSRDEDARADFNSNKHLRSQSLEESSDDRDADESEKMRNGKRRQVLKDGQRALEGDSAY

SEQ ID NO: 79205 - protein, 33 aa, Zea mays
  Coding DNA Sequence Number=SeqID_35830
MEGTMRNETGKSAVREVTEARYFERRMGGSIKV

SEQ ID NO: 79206 - protein, 307 aa, Zea mays
  Coding DNA Sequence Number=SeqID_35831
  Gene Ontology: Mol. function=helicase activity; Biological process =viral genome replication
  Homolog annotation: Hit_ID=Q5VR06; Match level="QueryCoverage=84%, HitCoverage=18%, E-value=2e-82, Identity=54%"; Hit description =Helicase-like protein
MGANIDNVVNDGSGPPLFKICGQKFRMARDRLSDYEDEDFIIRIVGAREVLYTIEFQKRGLPHVHIIFWVSTDTSQPTPTLIDSVITAEIPDPQQDHLGYTLVAEHMIHGPCGPNNMNAPCMKNGICSKGYPKDFREETTIDANGFTIYRRRNTGRFITKGGVRFDNRSVVPNNLLLLKRFQAHINVEWCNKSIFIKYLFKYVTKGPDRSKIFLRRVQAGEDVPYNEQTDAKDEVKEYLDSRYICDKDACWRVFGFEIHRHFPVVERMSVHLPKQNHITYNSTSNMAQILSEPFLRRTMLTEWFACN

SEQ ID NO: 79207 - protein, 197 aa, Zea mays
  Coding DNA Sequence Number=SeqID_35832
  Homolog annotation: Hit_ID=A2WK20; Match level="QueryCoverage=100%, HitCoverage=98%, E-value=6e-46, Identity=51%"; Hit description =Putative uncharacterized protein
  Subcellular localization annotation: CTP_CleavageSite=44; ConfidenceScore=5.18e-01
MGNTPSCIPLGGGGGGASSSSSATDATTVIHADGTVTRLARPVRASELMLDHPGRFVCDSGRLAVGCRVPGVAADELLRPRHAYFLLPMDMLYSVLTDDEMAALSESHAATAAAASWKRIATSTHRSATGAHAKDDDCSSDGARVYPMLGLLETASLAADNNSKHELRAGPAGKSSGAGFRRHRSWQPVLDTIEEVP

SEQ ID NO: 79208 - protein, 512 aa, Zea mays
  Coding DNA Sequence Number=SeqID_35833
  Gene Ontology: Mol. function=protein binding; Cellular component =cytoplasm; Biological process=polar nucleus fusion
  Homolog annotation: Hit_ID=A2WNI9; Match level="QueryCoverage=82%, HitCoverage=89%, E-value=1e-175, Identity=69%"; Hit description =Putative uncharacterized protein
  Pfam annotation: Domain name=D123; Domain location=104-494; Score =212.3; E_value=1.1e-60; Accession=PF07065.5; Description=D123
MEAVVIESRWWSTDMSLGAAVAPRTLLRLVSNDARDTIHGVPISDGGMAAARARKGRAGEWSRVSRVEIMVAAQRPCPARSGEAESEAKEMLLEELLRCQIHEWYPAFRRHSIPTVIIPLPAAFLRYLAGQRAYPNADADAEDGADEEPLPFLLPAITSGRQPFAPIHAHHPDPDSLLNSDLFFGSSSEDVFDPDADHPLRPEFPELEVAIDAAIAELGGAALPKLNWSAPKDATFMSADGTSRCTCFAEVAMLLRSSDCVAHDLASARQSCKDFVRPEGARRNAQKVSAGSEEGARPNADGIRGCEGTNGAPSNSSKTGAEGGKTNDGDCDVEDATEEEHNENTWVDDGFQYYLALRKWYPGLRPESEFRCFVREQKLVAVSQRDPSAYYPSLPGWSSEVQPKIEAFFNEVIEPQFASNNYTFDVYVRTDGRVKLIDFNPWGGYTLPLLFTWEELEEKGRGSELEFRVVMQQGAVRPGLMTAVPYDMLDWGEGSGWDVFLKKADEELDRQI

SEQ ID NO: 79209 - protein, 339 aa, Zea mays
  Coding DNA Sequence Number=SeqID_35834
MARLRCTARKSVIPFLPSRLAERPLRRTVPGQSSHLERLHRRLHEEQERRRQEQQDSSPSPQQEVESERPPSPAPQPEMPPAPPQGIPAIGGDPDGDRDDDDAGGTTSHDMELSEELETEGWIAIPITRHFHEALDTLLRRAFDQHTWSIEYHCVVYQHHRGLYLDQWEATCLVRRLDDDLQGAEAFSEHYSITERDTTEAAMQDATRRALSYARGVIVSPVGEGNPKLNNMVNLAAVFNTELDHALDELGKMPENRRRGARRAQPEQQAPQEDAAQQQQFPPPPPMTIEQMFLMQTQAVQAIGQTLAVMQQVQQQPPRLSLRCKSRCRRCPGTSGQNS

SEQ ID NO: 79210 - protein, 139 aa, Zea mays
  Coding DNA Sequence Number=SeqID_35835
PDSHNEQTPALKVPLQTELRLHSRGYEQPPHRRACGTTNSGRLAGDLCSSSDGPRADATAGRLSFASPLEGREPDIKAKEPEVETTDQAKDGGKKSFEVSSAREKVKETRNPKPGVKKKTCKVKVDRVKKTYGASRITT

SEQ ID NO: 79211 - protein, 113 aa, Zea mays
  Coding DNA Sequence Number=SeqID_35836
MAQWLTRSTLAGGRRESGDRGLASPAKQTSIPRSGSFTEVCSVLSEGRTGLGRAWLAGLRWQGFGWPRTRRAWANAARPSRKRANLGKNPVRVFSWHLGLSLIRESPWQICPR

SEQ ID NO: 79212 - protein, 160 aa, Zea mays
  Coding DNA Sequence Number=SeqID_35837
  Homolog annotation: Hit_ID=Q5Z9G5; Match level="QueryCoverage=38%, HitCoverage=24%, E-value=5e-07, Identity=45%"; Hit description =Putative uncharacterized protein P0655A07.24
  Subcellular localization annotation: CTP_CleavageSite=45; ConfidenceScore=5.47e-01
SPELYLTTGSSDQAPVSRRAPAAAALSSRRIGGRGGGARRSLSVCGGTASGGTGQGAAEWVAVVLFMVLAVVVLLGAVAVLVVVLLLQPPHGAPLGDAGSAAMEAALRDGVVPFRVDGEAQTRWKVTGIIGVDQWTRLACQLCLFWPNSTVLPFRCISKS

SEQ ID NO: 79213 - protein, 136 aa, Zea mays
  Coding DNA Sequence Number=SeqID_35838
MLCVVVDRPSPRRGPSGRTQRKEEETFLRPDHESLSPVARTVCASVESIVRRFVLVFGVQIGANTLFGNSAGDQMSRSTKNQALKWAGSKDHTDIFPLNLNDWHKGMVQGSFGSSADELKSTESRRYKAVMESEED

SEQ ID NO: 79214 - protein, 156 aa, Zea mays
  Coding DNA Sequence Number=SeqID_35839
MECTAGSSGGWPGGVHLITGSFLPAPIWLLVRVTPWRGWCEFHASDEVLGPFIRGDVEVCLPEQLFGGGRRFLEYGSDEGRVIGSPVEVFNHRRLGDFGEAVLHGLKSLEVRPERFIALTPDGFEVPWLHRLVKEGLEVGDETPTEVAPIVDAVSG

SEQ ID NO: 79215 - protein, 174 aa, Zea mays
  Coding DNA Sequence Number=SeqID_35840
MASCMLCDDGSSQPPYGSKRTKDQGPLREGWPRGDEDKTGALLGPLASLSRVDACNPLLQAHPTWARDEHEGRGIPTSLTPVSGRLASPPFALALALDPSGLGHAATLTRRPEGPPGLETPTNRKSTSGTCQFLGRLSHPVLDGKPNANHVRARISYSRTQQLHNMDIITQCSK

SEQ ID NO: 79216 - protein, 97 aa, Zea mays
  Coding DNA Sequence Number=SeqID_35841
MRLSQNTLNTKQPAKVSKDDGGGPLGEIHRLNRKTVIFYLWPTPVCRELGEGADDCKGAETRQWSSAPVKRGSERPAAWASCAGSWAPVGARLGAAA

SEQ ID NO: 79217 - protein, 290 aa, Zea mays
  Coding DNA Sequence Number=SeqID_35842
MNKNTVIRSAITNGTPVPPPQVRTTPLHGEGPAEQQKTDERHTVTRSSSDDDDFCSGGPNSGSTDLRADAAARRPPPMPKLVRQGRAEGRRVGGRYVAGPGYLAGGGTSSSCRGRRRRRERLRSHSRPRAGHGAAAGATDDDRPSLRSLSEGAGHRPRGGRPQLGTLPSPALVMKILEAEGGAEAAARLAFPHHQAGGHHLGSPETPCSAPIEGNMALPPLLLAKRRRRGVCKEAESVPDRPLALCRGSGAALANLAPAKPLTASTYQPENLGPDRTPGLRPARMREQPD

SEQ ID NO: 79218 - protein, 140 aa, Zea mays
  Coding DNA Sequence Number=SeqID_35843
MAPPVDVAGLRPRLGEVEAPPKLRSSLSSVAEAESEPLVGRGGGRRLRPGRSPSLGVGRSGVHRLPGLSPSPSPGSGGAEFAVFRDLARVRALGRAERIGAAQAALSFCQAGQWGGEVTAVTSALPGGTCQDKGVRPPLH

SEQ ID NO: 79219 - protein, 94 aa, Zea mays
  Coding DNA Sequence Number=SeqID_35844
MRKWARPSPLLLMLLSCRSNIPLDRPTRWQGGRPSHTINYILHGTCKNGATSKAEYTNTQLDLTVQGIKQSHYLREADDSNRVLKPCKWLVTGV

SEQ ID NO: 79220 - protein, 37 aa, Zea mays
  Coding DNA Sequence Number=SeqID_35845
MPWLVLLFSIAASTIIGILVNGLDSQLPLFWRLSLQL

SEQ ID NO: 79221 - protein, 169 aa, Zea mays
  Coding DNA Sequence Number=SeqID_35846
  Subcellular localization annotation: CTP_CleavageSite=57; ConfidenceScore=5.24e-01
MSTSRLRAQAGSYGRVWFVSQWSLPAPNRLARAWLPRYRNETRFSTAWLTARCCIPQCSLAGPYAAYQTRPMCGREGHQREGNSRLETIRRRGAALYRGPSTFIAMNAGKPAIGIGPRGAWTRVPAWRRRAVLSRRRLRASVREERFSAVDCVADVSDQIGDNVGDRIR

SEQ ID NO: 79222 - protein, 191 aa, Zea mays
  Coding DNA Sequence Number=SeqID_35847
  Homolog annotation: Hit_ID=A6NKB9; Match level="QueryCoverage=72%, HitCoverage=6%, E-value=9e-07, Identity=31%"; Hit description =Uncharacterized protein SRRM2
MAAPRTTCPVALTLRRDRRRLWQEKRATLRLRHNDRIKKGSAPEDDELRFARPQGSDSGSAPEDDELRFARPQGSDSGSAPEDDELRFARPQGSDSGSAPEDDELRFARPQGSDSALASADGLRLARPRGSDSTSALEDRLDLDLGGASTSPNPGHGPTTSTGGAIITLPQADSGYGEQDRRPIWLAPLYE

SEQ ID NO: 79223 - protein, 114 aa, Zea mays
  Coding DNA Sequence Number=SeqID_35848
MNRTCPVCTGHPGGPRSQKLQRSESNGIGDVAGAPDMFGVHQTVRQEAPIVWWPLRGSFVPGFDLRREAHSFRPIHPPSRRLSQRLDAAVEGPSAALASSFEVEILPPRHVKVA

SEQ ID NO: 79224 - protein, 38 aa, Zea mays
  Coding DNA Sequence Number=SeqID_35849
MATTTTEEAHGEVQAKVGEPSLDPGKESVPHSTWAQTV

SEQ ID NO: 79225 - protein, 84 aa, Zea mays
  Coding DNA Sequence Number=SeqID_35850
  Homolog annotation: Hit_ID=Q6J9V9; Match level="QueryCoverage=45%, HitCoverage=13%, E-value=1e-11, Identity=86%"; Hit description =Putative uncharacterized protein
MAKARATLLRYPRTFPRPAGTICNGIPPEEGTEPSDPIDMGPGPANPLQRQQTSSKNSEPDHAPGLRPGRMREQPGRPRHHSKN

SEQ ID NO: 79226 - protein, 164 aa, Zea mays
  Coding DNA Sequence Number=SeqID_35851
MAQLYNVGVAVCYVASGEVSGSYARVNVSVGEVHEPCRSTAVAAAWILLMSPCFRRGLENHRRHGRMRGTIIACYRGVNQSCSGELGVPLITFCSQPGARAAPEPLYGAIGRSRTISTFIIRPFIAFSQGGRGESAMLPSEGTDHGVSSELLTGDPSGRSCPIR

SEQ ID NO: 79227 - protein, 409 aa, Zea mays
  Coding DNA Sequence Number=SeqID_35852
  Homolog annotation: Hit_ID=Q6J9V9; Match level="QueryCoverage=24%, HitCoverage=35%, E-value=8e-43, Identity=84%"; Hit description =Putative uncharacterized protein
MEDENQPLKPKSRRPGAQVALTVLSVETTACARGSLTYGDHHLSTDDSGHLPTNTAPANGGHPKAHRQVLTPVLAEAVPEHDRRRKEDLDVADPRAARLSPGWRTDSCTLARQQQFAFSRMAGGRLRRAGGCPSPPNVGGRSGSPAHAGGRTPLGAPSSSARIMNILEAEGGAEAAAQLASPHHQARTGKGDISKRIRLREGHGPPSPPTDQGFEGCALRGCALRGPAAAPRALGPPSPPTDQGFEGCALQGPAAALGHSGPQALLLIRGSKVAPCGVQQPPQSTRAPHPLLIMGSKAGPSEGFDNRPRACRVRDDPGYVRYMAEARATLPRYPRTFPRPALTICNGIPPEGDTEPSDPIEMGPGPANPLQRLGGCPRTRLRPKLLTASTNQLKKTRSLTMHLGCGQAA

SEQ ID NO: 79228 - protein, 199 aa, Zea mays
  Coding DNA Sequence Number=SeqID_35853
MRPTGSRTNGVDFKCIQSAFTHTIPDQRLRPTEHDERRNAFRNSDEELGSRRPVDGEAVHTDAYPGDPRTPEASRSNPNGADQRQSQAKVRRPGACKIVAPQLLRGDGGGAVTVELADREAPGATGSSASSDLRPQPREEISASPDPRARPQPRPREESRPHPTLGLGLNLGLGGAAASPDLGLRSTTPQGIHHYPTPS

SEQ ID NO: 79229 - protein, 170 aa, Zea mays
  Coding DNA Sequence Number=SeqID_35854
  Subcellular localization annotation: CTP_CleavageSite=24; ConfidenceScore=5.03e-01
MREKANCCCLARVQLSVLHPGDSRAARGSATSRSSLRRRLHRGSHNTSYAARAVLVFWDGLGEDGSEDLPVRLPLAQAVVSTDKTVSATCAPGLRLFGFNGWFSSSMRDVNEGLSAVAFALRPSLLLSSRPRRRSLSRCRCSGRRRAGRSSSSRSPSGVEVGKAADIYVA

SEQ ID NO: 79230 - protein, 113 aa, Zea mays
  Coding DNA Sequence Number=SeqID_35855
MDARGEPSLPITGGATFEPLISRRARGPECFGAATGPRRAQPSRKVTSENLRPLCDELKLEAAVAWTEAVSARTEAFLAREQAAEAVSRAEILGGQLAEATERLAEASARVAV

SEQ ID NO: 79231 - protein, 55 aa, Zea mays
  Coding DNA Sequence Number=SeqID_35856
MGLVMRKFVVPDVCFRFEKRNHCTIINRVMRKTSQVDPKRELIRRMKLMDKPEDG

SEQ ID NO: 79232 - protein, 121 aa, Zea mays
  Coding DNA Sequence Number=SeqID_35857
  Homolog annotation: Hit_ID=Q6J9V9; Match level="QueryCoverage=60%, HitCoverage=25%, E-value=7e-22, Identity=75%"; Hit description =Putative uncharacterized protein
MSCNRRTGYDVREVTPPLAPMLCLLDCGTSTTTRGSPAHDPTVPVKGTGKGDVVERILLGEGSGPRALLLIRGSKAGPSEGFRQPPQSTRTSSPLLIRGSKAGPSEGFDSRPRALGLRAHY

SEQ ID NO: 79233 - protein, 274 aa, Zea mays
  Coding DNA Sequence Number=SeqID_35858
  Gene Ontology: Cellular component=integral to membrane
  Homolog annotation: Hit_ID=A3A744; Match level="QueryCoverage=22%, HitCoverage=22%, E-value=9e-25, Identity=85%"; Hit description =Putative uncharacterized protein
  Pfam annotation: Domain name=DUF803; Domain location=122-271; Score= -60.6; E_value=1.7e-06; Accession=PF05653.5; Description=Protein of unknown function (DUF803)
MATMRQKHVRCSEGKRRWGHGPLAHLVFFLLGPVLSLLDEVTSPLVCGDVSVGVVEELLRGSQSLVEDGPYEGLVTGLVEDSSGVRCLCLIVISLRVMDLGPDHELVLLVLDRNKYIPGMVASLDNVRGLTLAMSSSAFIGSSFVIKKVGLKKAGDNGVRAASGGFSYLYEPLWWLGMITILHAPKERKIDSMKEIWHLATQPGYQCKSSCYCFKAIIWWIKSIHLRPDMVLHSSSHYLLLGAIKLLKQGIKVFCAGELRVISFKEEKRYKGQE

SEQ ID NO: 79234 - protein, 412 aa, Zea mays
  Coding DNA Sequence Number=SeqID_35859
  Gene Ontology: Mol. function=helicase activity
  Homolog annotation: Hit_ID=Q1EPC6; Match level="QueryCoverage=71%, HitCoverage=19%, E-value=2e-47, Identity=38%"; Hit description=DNA helicase homolog, putative
MSDEQKNEKNKKRREARLRNKELNKKRPEASQRNDCQNMMPNAPRGSVHENVGHTPKHTRQRTTYFSERYKNLTPVEREFRRERLRLYNRTPRRKEAKVDHNRRRRVMQADTLNPTSIAMEDPTYTPELVHPTTDVKGSDGSILTVCDWVIPEFVNAPFLPSPTQTEDVASPDMSTNTLKRKHHVPRGERQAILARRNQLFESAISRKVGTSIEDTSGDAVEGDDWTQRHTPMKITNNGDDDEGVIFEDDDDENEGYLFAAQCTIFDYYYPSKAYVNIHVLLIVFKKISDEDTDEDIEIDVTQEESTATYVSDPYDKVYSNIPEETHMLKLVPNCGYCTAKKFEYEPPGFCCRGGKVELAPVETPPQLKRLWDSADSDARHFRDNIRFFNGRFSFTSLYCCLDSMTTNVRGS

SEQ ID NO: 79235 - protein, 71 aa, Zea mays
  Coding DNA Sequence Number=SeqID_35860
MSKETSPFHIELFNCSFWHQLNPVIHTKPARTYRHSKIVHGEITDLTVEKSELLHDRPADIVMAQDEAVAT

SEQ ID NO: 79236 - protein, 134 aa, Zea mays
  Coding DNA Sequence Number=SeqID_35861
  Gene Ontology: Mol. function=transcription factor activity; Cellular component=nucleus; Biological process=regulation of transcription, DNA-dependent
  Homolog annotation: Hit_ID=A3A747; Match level="QueryCoverage=64%, HitCoverage=26%, E-value=6e-24, Identity=65%"; Hit description =Putative uncharacterized protein
  Subcellular localization annotation: CTP_CleavageSite=62; ConfidenceScore=5.28e-01
MSQSLLFSGLAFSPNLPILIVPYRFLLLSFFVGLSHRLISKLMIQMLRRAAFMCGREPNFVLSEEEKQELRRYTWEDFLAVTRNTITSKKQRKVGSLRRSKADLFMGQSDGDTEMANGGGSSNSDNGDAGTSAS

SEQ ID NO: 79237 - protein, 124 aa, Zea mays
  Coding DNA Sequence Number=SeqID_35862
MSTFFIEEIPVEDVADRPKEDLVVKVAEIKLVVVLCPCLHSLEPLCLLHRFFFHERLLHAVPLSSSSLLLFGVAVQGRRRNGRRGKRWSWFDPLRIPRFKFWTETTKKALRRDMTTGGLGGDMK

SEQ ID NO: 79238 - protein, 254 aa, Zea mays
  Coding DNA Sequence Number=SeqID_35863
MERSERSRRARQDNKWRSRRGRSRSCTRRSCWTWMTLTAPQTQRLNWIDFLERLHGKRMLLMDNSMNWNQFESMLYARLYGTRPDVRDALALSVCRGLKELRLVGFPASVQAYHMEHILCDICDILHYNGIRKVELQSYHFTDTHVCTVARSCQGALQELILDECPNVLGNFVVCLRESWSNLTKLTLNRIGISDVQIRILMLVGFDQLEEFNLTWCWCPLITDRLLAILHASTLPNVTQESVDYYQHHCEVEY

SEQ ID NO: 79239 - protein, 363 aa, Zea mays
  Coding DNA Sequence Number=SeqID_35864
  Subcellular localization annotation: CTP_CleavageSite=34; ConfidenceScore=5.60e-01
MTRGLTSETNTDWNSMNSRENSSVSSVCLVRVVRVARLTLARPSSYSFSTTSRFPRDFRQIMTGSLHSTATDDETDQWSDGWISAPLDPSRGGGLQYTPKPFTAALFLLLSPPVSFSLPLHGWGRYRARLPLDRYLPRQAPAVGKLRPASSRRFYRHFNAAGEGSRGSAHGRDSFLLVCAKAPPPVVSVRRIGVCWAEVNGGSSIRRQIYAHPICVIRASSAKPTSNCLRIQIKMSSHDAKVLQHLGLNLASSVESRAVNIRTFLEEAFRHLGDEHYLLNALLAIRKEVDLMEQDALETKARSDPKKERMEEQINLAEDAKPVPRHLTFTPLPHQNCMRPVTMTPTTQTGPLGIAFGTCSSAT

SEQ ID NO: 79240 - protein, 219 aa, Zea mays
  Coding DNA Sequence Number=SeqID_35865
  Gene Ontology: Mol. function=unfolded protein binding; Cellular component=chloroplast; Biological process=cellular protein metabolic process
  Homolog annotation: Hit_ID=Q43831; Match level="QueryCoverage=58%, HitCoverage=28%, E-value=1e-50, Identity=78%"; Hit description =RuBisCO large subunit-binding protein subunit beta, chloroplast
MSRIVMSMRFGGFPSMVGTGSLKIAAIKAPGFGERKTQYLDDIAILTGATVIRDEVGLSLDKADKSVLGTAAKVVLTKESTTIVGDGSTQEEVTKRVAQIKNLIEAAEQEYEKEKLNERIVKLAGGVAVIQLVLGDAMGGGQASVEQCSGLRRPVGGSSASSARWEQHFQKLVLGGAMGGGQASVEQCSGLRRPVGGSSALSARWEQHFQKCASLPVRN

SEQ ID NO: 79241 - protein, 650 aa, Zea mays
  Coding DNA Sequence Number=SeqID_35866
  Gene Ontology: Mol. function=cysteine-type peptidase activity; Cellular component=cytoplasm; Biological process=proteolysis
  Homolog annotation: Hit_ID=Q109R5; Match level="QueryCoverage=85%, HitCoverage=47%, E-value=4e-45, Identity=26%"; Hit description=Ulp1 protease family, C-terminal catalytic domain containing protein
  Pfam annotation: Domain name=Peptidase_C48; Domain location=71-278; Score=55.4; E_value=1.9e-13; Accession=PF02902.10; Description=Ulp1 protease family, C-terminal catalytic domain
MEFLSVGLCHNKPKKSVATAIVPEDYICTQGDLALIDFIKEIPCEPRVEVVLIDDAFVERKSMECLFQPNAYLGDEVIDCYINLIKAQKHLKCRSGGRVHIENAFQFNFLKRDGDVDIKTEELYPIEDMTQICSAERRVLLYLDHDMVFIPINIRETHWYLAVIHARNMEIQVLDSLGTSQDHKDLADSIKGLQRQIDMISQRKELKDHRWPNLQVASWPLREIDMGYAKQTDSSSCGLFLLNYIEYWTGDELSNSFTQDDMSHFRKKMAAILLSSELNKRRGCLLYKNDKEVDSGSPSDVEILENPTDSKKRKLLHVLDDNEVVYEDEEGPITQADLQKWFVDDWDKRTPVKVSNDGCTNDFLMVGLSTKDMPVTKADSIDVLCDYIMAIEDDTTLEMTWVRSFNPFKIEISVKDLQNILTINKDMTLRCFDMAVRLLANKESCRPKGEIINNRKHYMDMRFWRMVGFGKLPKYHQDPTAEELAKTLDCWPSMNYYITGCRYVLMPWKFNGCHALFVIDHVKKHVTFIDFTPTQDWCKHMPYTRFAEAIIMASKKYKIAYSKKRSGWAEDIFKWEHTIQTGVPIDLRGFNTSYLVLQAMAMWGNDRRMKFVGIVRRSFVIDLLSYEDNLCRYAIPANIQQRLIDIAKKD

SEQ ID NO: 79242 - protein, 223 aa, Zea mays
  Coding DNA Sequence Number=SeqID_35867
MVGRSKPGCGLCPALSFKDLHHPCWGGGRGEPGPAFAWAGVPLLPPASGGGNHPPALQRRRPPAMPGKANCCCPARVQHSVLCPRFRGEDGSEDLPVRFGAAGACWYGVGGQVDAAVGAEAAGEGFSADETVSATRGPTPVSLALIACPHPSSGDVGEGLVAAASALRSSLLLFGRPERRSLSLLQEWAVANHLEVVVPQALPMWGVVRTCGSGTGVSFVMAP

SEQ ID NO: 79243 - protein, 307 aa, Zea mays
  Coding DNA Sequence Number=SeqID_35868
  Homolog annotation: Hit_ID=Q6QP51; Match level="QueryCoverage=20%, HitCoverage=30%, E-value=3e-17, Identity=69%"; Hit description =Putative growth-regulating factor 1
  Subcellular localization annotation: CTP_CleavageSite=19; ConfidenceScore=5.26e-01
MQAACNRTTGMHPFDFNASSMEAQAHTSCNRRAGYNVRKTAPPLAPVSRLFDRGTGAATQGNPAHSPTVPTRRIGHGSVSRGRRDRERGYSERDPSLRRKRAPSPPTDQGFEGWPLGRVRQPPQSTQAPCPLLIRGSKAGPSEGFDSRLRALGLRAHYWSEFRRLAPRKGSTAASGHSGSAPTTGQRFEGWPLGRVRQPPQATRAPRPLLIRGSKAGPPKGSTAALEHAERGMTLGTSDTWPRLGLRSRGTLGHFRDQQERFCNGIPSEGGIEPSDPIKRDRVRQITCRKNIISVDEYNFTHRCAGG

SEQ ID NO: 79244 - protein, 157 aa, Zea mays
  Coding DNA Sequence Number=SeqID_35869
MESTVEGKGTDSESNSLDKRDDMSEDELTVLGGKIGDADNVTIDESDDSKSKKGVKRRRKKVKTAEMGKRGKSKVWDVFTKSFLSSTQSNPSKSELLIYLEETNVLSSVDMIVTRCLEPWMVVGLSHGALESRVWTSGQERTQDSGVVDYSLLDLVS

SEQ ID NO: 79245 - protein, 119 aa, Zea mays
  Coding DNA Sequence Number=SeqID_35870
MDGRRAAVGTGALLDTAGWEKGGPDVWTGGRRRTAGGCWLLPRWAAGRCWTPGLDRWALVANGAAVAACRSRNAGDEASTERVAQRLSQVGFLLDSGRLGFALLGPLVILVMKSPCLRY

SEQ ID NO: 79246 - protein, 80 aa, Zea mays
  Coding DNA Sequence Number=SeqID_35871
MQRDVQQARRGVTTNETVKRVHTGGAGRSAGGGGWCEAAERARDGRGALAAGAWWAGGCGGALAEDGWTGLPRLPGGLVR

SEQ ID NO: 79247 - protein, 124 aa, Zea mays
  Coding DNA Sequence Number=SeqID_35872
  Gene Ontology: Mol. function=transcription factor activity; Cellular component=nucleus; Biological process=regulation of transcription, DNA-dependent
  Homolog annotation: Hit_ID=A3A747; Match level="QueryCoverage=71%, HitCoverage=34%, E-value=8e-23, Identity=53%"; Hit description =Putative uncharacterized protein
MGGSQEGWDIPRAPAKDHNFLPSPAMLFISGKDSLPVDLPKPIENEKTVEVAHSNVKPFSVHPLPLAKTSDVLIKSSNGSDDSKEEKTQYYPGYLWLWYLNRSLYFRILYSKSQRTCAFFIVTI

SEQ ID NO: 79248 - protein, 391 aa, Zea mays
  Coding DNA Sequence Number=SeqID_35873
  Gene Ontology: Mol. function=electron carrier activity; Cellular component=mitochondrion; Biological process=electron transport
  Homolog annotation: Hit_ID=A2XNR6; Match level="QueryCoverage=43%, HitCoverage=48%, E-value=2e-77, Identity=87%"; Hit description =Electron transfer flavoprotein subunit alpha, mitochondrial precursor
  Pfam annotation: Domain name=ETF_alpha; Domain location=286-371; Score=191.4; E_value=2.3e-54; Accession=PF00766.10; Description =Electron transfer flavoprotein alpha subunit
  Subcellular localization annotation: CTP_CleavageSite=36; ConfidenceScore=5.06e-01
MAHVLPPAAPSLDACKHALAPPPQSPRWLYHVPAITAAARSHLGYSRPGSSPQSPQRPDPTSPGPWHAPELPASPKIRPKSSIVDGACSLNLHHAPASASRPLRTSSRVADTAPPACVPAPVQSGGSQNEWCFMCEFEKLIVEGKRCKTALSPTGILSRLNDIGSSFGPETTGIVDYRNYDVKKYAVGLVYGLLISFNVNSKPFFAVEEQRQLLDCSRPIYAGNTLCTVKYTGEDPCMMSIRSTSFSPTADAMSETKVAPITQVDLSFLNEGKSTWVNLTSQDTEWPDLANARVVVTGGRGLRSSENFKLLEQLAEKLGAAVGATRDAVEAGYVPNDLQVGQMGKIVAPELYMAFGVSGAIQHLAGMRDSKVIVAVNKDVDAPIFQVASLI

SEQ ID NO: 79249 - protein, 87 aa, Zea mays
  Coding DNA Sequence Number=SeqID_35874
MYNGSNSLISCEKQTIRIEFFILASDRTCTHHNRNGRPRLRSREGQSLLSGSIRLSYKFEVDTDSDTTCAKLTKISFKKAFYTIAVI

SEQ ID NO: 79250 - protein, 237 aa, Zea mays
  Coding DNA Sequence Number=SeqID_35875
MTSHGSLDEGNAQSHTDGLAREGFPRILWEVLQGAGHTTPPQYAVQLFEKHRVPRCRVRMTLEPHPLQPGWRSLDSESFGYRAEDTIEAIPLHGLTTFCGFHPLEMSTHPIGLFPVEKEDDPMWKDRVEHAKDIWAIYPGQTAHLTVEQLSNEIQELEELVGTRENTIEVLEDQLINTQQQLAEANQHLDMHHQEIQDMEANEDVDIEGGEEPASSLDTAGSGRPPSPESSVASFAH

SEQ ID NO: 79251 - protein, 100 aa, Zea mays
  Coding DNA Sequence Number=SeqID_35876
MGLPRGVHMQAHMLDGVGDVRPGEGLAVGHACPLQDVDGILALVEEETLRLALGGDAKEVVEGPQVLHRALPLKGDKVKTTIPLVVRGVTEEEAASGARR

SEQ ID NO: 79252 - protein, 79 aa, Zea mays
  Coding DNA Sequence Number=SeqID_35877
TFGLMSKRENLKRYEGEQYPRTVHADLAFAFASRLYFLSSLRTEGTIQEMVDGVTWPTTLPPGWTVEWDVAPAGEEHEE

SEQ ID NO: 79253 - protein, 110 aa, Zea mays
  Coding DNA Sequence Number=SeqID_35878
MCGLPSGMVGVGRSTCAGGDARRRLPVKFCRVRGLGKLHGPLADLVEALARLGGGRSGLAMVAEALAAVAGRKELAGAKEGWLAGDEIWSPEIRFVSLLKPEANPGFCRV

SEQ ID NO: 79254 - protein, 102 aa, Zea mays
  Coding DNA Sequence Number=SeqID_35879
  Subcellular localization annotation: CTP_CleavageSite=54; ConfidenceScore=5.07e-01
MTTGGGASTILTSAATGGSTGEPGMAPAGVDAGADNMSGRLGTAVVLAVSPGMMAAPTWGQSGRLAPWQLVPPEPPAGGRLGQRPTNRHGAPQHRPPKPASS

SEQ ID NO: 79255 - protein, 142 aa, Zea mays
  Coding DNA Sequence Number=SeqID_35880
MTSMALSSLRKQGNVSRVHVAPPAMLPHGSRHFSDGHVSTQITREARRNIGRAGIVGQGGDSSTARLPRHAAATLAGAQHDGGSGLPSTGYSSQGRTQAATAMAWEGGAGSRWSGSLTAALSQGAGHDADRRGQHVGRGGCA

SEQ ID NO: 79256 - protein, 120 aa, Zea mays
  Coding DNA Sequence Number=SeqID_35881
  Homolog annotation: Hit_ID=Q6J9V9; Match level="QueryCoverage=40%, HitCoverage=17%, E-value=1e-17, Identity=85%"; Hit description =Putative uncharacterized protein
MAEARATLPRYSRTFLRPTGTICNGIPPEGGIEPSDPIEWVRVQQITCRVKLSHDLPRVQPRAQQGALPRPTLGLGLSLGLGRSHVLARPQASASGEVSAPPDLGLGPTTLQGNTSLPYR

SEQ ID NO: 79257 - protein, 62 aa, Zea mays
  Coding DNA Sequence Number=SeqID_35882
MVGTSAVTARRQPGSVEHCTFGLMSKRENLKRYEGWQCRSCEAGKLRHVRRKGNRLKDEKAI

SEQ ID NO: 79258 - protein, 831 aa, Zea mays
  Coding DNA Sequence Number=SeqID_35883
  Gene Ontology: Mol. function=two-component response regulator activity; Cellular component=nucleus; Biological process=two -component signal transduction system (phosphorelay)
  Homolog annotation: Hit_ID=Q2RAB7; Match level="QueryCoverage=78%, HitCoverage=95%, E-value=0.0, Identity=67%"; Hit description=CCT motif family protein, expressed
  Pfam annotation: Domain name=CCT; Domain location=775-819; Score =87.6; E_value=4.1e-23; Accession=PF06203.5; Description=CCT motif
  Pfam annotation: Domain name=CCT_2; Domain location=772-799; Score =14.3; E_value=0.058; Accession=PF09425.1; Description=Divergent CCT motif
  Pfam annotation: Domain name=Response_reg; Domain location=194-310; Score=105.4; E_value=1.8e-28; Accession=PF00072.15; Description =Response regulator receiver domain
  Pfam module annotation: Pfam domain module=CCT::CCT_2::Response_reg; Domain location=775-819::772-799::194-310
MRNCFESEFLPYMGSGARAAPGATAFVSGMAKVVVRVLIVKGPSSSEALSPFGYNDPRTKGMKNKNEYGIGHHKLSEGGTLLVELGEHNLEKIGKAKDGGKKSFEIPSAQEKVKEVKRKCHFGLSLRRNRKVEKRMGKSNRMSPDADAAAGGGGGGEASAGAGAGASSPPASASAAANGRALVRWDQILPRRSLRVLLVEHDDSTRQIVTALLRKCGYRVAAVADGMKAWEVMRERAYDFDLVLTEVAMPSLSGIQLLSRIAAAAECKNIPVIMMSSQDSIGTVLKCMQKGAVDFLVKPVRKNELGIKNSMQMNCQTNGSENNAASNHVSTNVANGSKTGENNDEESDAQSFGNKRETEIKSAETLPDIRRDEMAGSSKKIELQNKSNDGVNTKVDASKDSDGAPSESEKNVRSKCLNGITSAKVAEQIMDNALRITDASSRRPTNLGKDLAMTEPAADRKCQSLVMENNAVKEKNPGEKSKSAVIGHADSYPSQFLETNLGKQQYRNGYKNQEFREKDIFNHSNSSAFSRYGNRRIESSGEIQFLPSRCIVGQEQHVHGKDPVFQPNGVLLPPNDHNTGESTRQARITLDSSMEGADIICSSSAREDAGASSSSHRKDSMSHPSYGFVPVPIPVGAMMPYHCGAILQPVYYPQGPLMHCNSSAINKATIHQTSGQSNYREDCGSGRPSQVDEHKQSEEKHQLHHSRQIHRESGQPVDMVRAHMDHANQSASCSRDICKGSGCTGSGEADTNANTTVALESGNESGIQNSDRSHREAALMKFRMKRKDRCFDKKVRYHSRKKLAEQRPRVKGQFVSQKLKAAMATEAETDS

SEQ ID NO: 79259 - protein, 138 aa, Zea mays
  Coding DNA Sequence Number=SeqID_35884
MGKSNKRKREPNPPSKDFGDSEYSEEEFSSESEGSPAPVSPPASSDDSDDSQGIATEVWTYIRAVERSGLEGLDESEYSSDEEDSSDSSEEGGGGDGRDDDDDDDGGDGDDGDDGGDGGSSRGSNGGGSSKGSNKASG

SEQ ID NO: 79260 - protein, 160 aa, Zea mays
  Coding DNA Sequence Number=SeqID_35885
MAPIFSLRDLGPGIVPRLFPEGGGIGFGTSDGLYDNGGICYGSYNPSQGSRGMKLIYQSCSQLRVALGFSLIRDTDGSRFNGSIDGFDYDDDNDVPRGGKDSQVAFGAIYAQVKKEKNASRQISRSSRTSMSSKIRLATSPSQLPVVDLFTLATFRFCVL

SEQ ID NO: 79261 - protein, 127 aa, Zea mays
  Coding DNA Sequence Number=SeqID_35886
MARCMGSDQLRGKWVTRLMGKDAQPLQSVKLGSDSGSAPEDDKLRFARPQGSNSALASADGLRLTRPRGSDSTSALEDRLDLDLGGASTSPNPGLGPTTSQEAPSLPYPKLTQATGNKTGVPSSSPR

SEQ ID NO: 79262 - protein, 91 aa, Zea mays
  Coding DNA Sequence Number=SeqID_35887
  Subcellular localization annotation: CTP_CleavageSite=52; ConfidenceScore=5.18e-01
MSSSQNRARSFSGALEYLGDHQFGVGGHKLSGNCSPTPASTAMPPSAVDRTSAHVTRDRSGPLKRQRTDRIRARIPLRAIGSGPPDFDRMA

SEQ ID NO: 79263 - protein, 101 aa, Zea mays
  Coding DNA Sequence Number=SeqID_35888
MAKVGGMFSKIKLDGESVKGLDGFNIGKDVPLPGLLTEDPLTGHMPRHGIHFSKHLCKTESLIIEKPYLDSHITSIPLRVFSLVGWGIRSGKVRKDTELVK

SEQ ID NO: 79264 - protein, 63 aa, Zea mays
  Coding DNA Sequence Number=SeqID_35889
MGLGVCDSICPRVDCPLGRSAVHLGNLTGGDEDEGFGYDNGNGKEEGVEVDLQEFQDFDEFAD

SEQ ID NO: 79265 - protein, 155 aa, Zea mays
  Coding DNA Sequence Number=SeqID_35890
MAKRPWEGPACSRKGARQGPDARPRLASHCAAVPWRRATAQAGQPPRRLAAAPWAQRVRRIGDACEGRTEPWEGAQAQLLTMSGLVEAEKREKKSRCLRLIDEILEDLLDLWVRTHTRFRCAALILLADIDRIVFIGELEVAKWTGARGKNSEKR

SEQ ID NO: 79266 - protein, 154 aa, Zea mays
  Coding DNA Sequence Number=SeqID_35891
  Gene Ontology: Mol. function=carboxyl- or carbamoyltransferase activity; Cellular component=ornithine carbamoyltransferase complex; Biological process=amino acid metabolic process
  Homolog annotation: Hit_ID=Q8SA97; Match level="QueryCoverage=68%, HitCoverage=21%, E-value=6e-11, Identity=44%"; Hit description =Ornithine carbamoyltransferase
MAPPVDVAGLRPRLGDAEAPPKPRSSLSSVAEAESEPLGQARRSPSPSPGSGGAEFAVFRDLARVRALGRRSGVHRLLGLSPSPSPGSGGAEFAVFRDLARVRALGWAERSSPSSGAEPESEPWVGRSGASYGRSVERRSDGGHFGSAGGRASG

SEQ ID NO: 79267 - protein, 50 aa, Zea mays
  Coding DNA Sequence Number=SeqID_35892
MAQEIIRKSEKAALSPSSEPAEPSADPHVKGDDEIKKWPKPSWIKLLISY

SEQ ID NO: 79268 - protein, 340 aa, Zea mays
  Coding DNA Sequence Number=SeqID_35893
  Gene Ontology: Mol. function=catalytic activity; Cellular component =extracellular region; Biological process=lipid metabolic process
  Homolog annotation: Hit_ID=A2YFC7; Match level="QueryCoverage=91%, HitCoverage=87%, E-value=1e-125, Identity=65%"; Hit description =Putative uncharacterized protein
  Pfam annotation: Domain name=Abhydro_lipase; Domain location=48-116; Score=56.6; E_value=8.7e-14; Accession=PF04083.7; Description=ab -hydrolase associated lipase region
  Pfam annotation: Domain name=Abhydrolase_1; Domain location=97-332; Score=-6.8; E_value=0.019; Accession=PF00561.11; Description =alphabeta hydrolase fold
  Pfam module annotation: Pfam domain module=Abhydro_lipase::Abhydrolase _1; Domain location=48-116::97-332
MAQKDLYLPFLALSIIACCLMNLQTVLSSSSRMRNSTDDISDDKCPPQPHPLGMCRSRVAAYGYPCEEYHVTTEDGYILSLKRIPYGLSGATEMTRTPVLLFHGLLVAFWDWTWDQLADYDLPAVLEFVYNRTGGMKVHYVGHSLGTLIILAAFSENRLTDIVRSAALLCPIAYLNSMESRLILLATRIFLAETIHMLGYHEFNPVGPVAKEVLGKVCVDPEVDCYDLFSAVAVVRKETIRKYDYGSEKENTKRYNQTRPPTYNLSSIPSHVPLFLTHGGQDFLGDVADTRHLLRTLLSQHDSDDIEVLYMPDYAHGDFIMGYNAPQLIYKPMVEFFKRH

SEQ ID NO: 79269 - protein, 731 aa, Zea mays
  Coding DNA Sequence Number=SeqID_35894
  Homolog annotation: Hit_ID=A2X1U2; Match level="QueryCoverage=9%, HitCoverage=20%, E-value=3e-11, Identity=55%"; Hit description =Putative uncharacterized protein
  Pfam annotation: Domain name=Transposase_28; Domain location=533-720; Score=-41.9; E_value=0.0015; Accession=PF04195.3; Description =Putative gypsy type transposon
MCMVTWKLGLFTHSLDVYLQKRPTVPKFGTWDSGDAGYTAYFDKVRENKGATAPPLRRPRSPNDPDPDREPEPEEGPMRRVPPPSSSRPATAGGHREPPPPGRRHGQSHRRTESSGSAPSDRQSKFAPPPQYYQQQQRASPQQQPRHHHGGGGGHQQQHPPSAHGHGHGHGHRAPHAHRQHHAAPGPRARSASPQSNAPRASAVPRFGVWDEQTASSAAQGFTVQFENVKRNREVARSGVPAVPRVPSPPEGAALRRAHQKTPFVSKDGLVGACQWSGQGTINAEAAHRLSVEWTGHIKCRGDTSPVRRRVLSAINAEDARPRSLTSGSACWLTSGAVGHVAASGLRLSGERKRVRHFPMGVRHTADILEDIVFSSHMAAPEPSAWWGRALFATRLEIAAWTPRLHTVVRGTPVLGYRQWPTVPPQGRIRACRWGQSLIGDWRAASVRLLIDWAVGFGGGEEAYYRGRWLAPLVAVRLLRTRRPTPKEHDSWAQAPMLEAGPLLSAEMKRCGGSLLAWRFAFFAHGDRRPRSMTRGPGPRVRGWSAAFVGDEEARCRHGLARPSRVLPVRGGTQLGAQPAWMGFAGRIRVGASPHGDLAVGEFVLFVSNLPCGLALSISSFFVLLLEERGLQPKHFTPRFISQAAIFAYLCEMSVGAMLLPPAYGRKGVAQRPFGGGKRAELRLHLSPLMASVPPPTVNAGPAAEDVAREVVQDAVETAATCFQRDPTDVE

SEQ ID NO: 79270 - protein, 300 aa, Zea mays
  Coding DNA Sequence Number=SeqID_35895
MVIHRDDHQPGGGGEASRAATSAPPSASRIFVIQAEAEERTEWGVASTFPSSTRAAVVPRAGQPRPGPPRTVSCARGSLSTSYDARAVLVFWDGLDEDGSEDLPVRFGAAVVHRRGVGGQVAAVVGAEVVIAIEVVVAAAAEVAGESLGVCYPVGPLNLRLLCDELKLKAAVAWTEAMSAQTEAFSAREQVASQAGKSGRPRRLLASPSKARPDSAEGGNNAEGAAPPPADDLFVGSRIALSERELLFAEGDEIAYPSESYFSRKVMSEDPAIDIVKSTKVVSVENFFEENFDAEGGSPF

SEQ ID NO: 79271 - protein, 372 aa, Zea mays
  Coding DNA Sequence Number=SeqID_35896
  Gene Ontology: Mol. function=hydrolase activity, acting on ester bonds; Cellular component=extracellular region; Biological process =lipid metabolic process
  Homolog annotation: Hit_ID=Q67WG1; Match level="QueryCoverage=87%, HitCoverage=84%, E-value=1e-138, Identity=74%"; Hit description =Anter-specific proline-rich protein APG-like
  Pfam annotation: Domain name=Lipase_GDSL; Domain location=50-363; Score=197.1; E_value=4.4e-56; Accession=PF00657.13; Description=GDSL- like LipaseAcylhydrolase
MASPRGHRHRRANVLQRAAAAAALLLALSCCCSSADPWPPPPPPPKVPAVIVFGDSTVDTGNNNAIGTVLKSNFAPYGRDMAGGARPTGRFCNGRLPPDFVSEALGLPPLVPAYLDPAYGIQDFARGVCFASAGTGLDNKTAGVLSVIPLWKEVEHFREYKRRLRRHVGRGRARGIVSDALYVVSIGTNDFLENYFLLVTGRFAELTVGEYEDFLVAQAERFLGEIHRLGARRVTFAGLSPMGCLPLERTLNALRGGCVDEYNQVARDYNAKLLAMLRRLQAARPGLRVAYVDVYQNMLDLITNPSTLGLENVEEGCCATGKVEMSYLCNDKSPHTCADADKYFFWDSFHPTQKVNQFFAKKTLDLCYEQLL

SEQ ID NO: 79272 - protein, 261 aa, Zea mays
  Coding DNA Sequence Number=SeqID_35897
  Gene Ontology: Mol. function=transporter activity; Cellular component= mitochondrial inner membrane; Biological process=transport
  Homolog annotation: Hit_ID=A2Y6Z3; Match level="QueryCoverage=79%, HitCoverage=50%, E-value=1e-107, Identity=92%"; Hit description =Putative uncharacterized protein
  Pfam annotation: Domain name=Mito_carr; Domain location=169-259; Score=91.8; E_value=2.2e-24; Accession=PF00153.18; Description =Mitochondrial carrier protein
  Pfam annotation: Domain name=Mito_carr; Domain location=74-167; Score= 80.5; E_value=5.3e-21; Accession=PF00153.18; Description =Mitochondrial carrier protein
  Pfam module annotation: Pfam domain module=Mito_carr::Mito_carr; Domain location=169-259::74-167
MAPGRRRRRGGCGSSSGIWWPAALMGGAVHTAPCFVYALGSVYDISLWGRVWKDLYRSILKDAGTSSDNKFTSIALSNFFAGAAAGCTTLVLIYPLDIAHTRLAADIGRTDTRQFRGIRHFIQTIYKKNGIRDIYRGLPASLHGMVVHRGLYFGGFDTAKDVLVPLESPLWQRWVAAQAVTSMAGLISYPLDTVRRRMMMQSGMEVQMYSSTLDCWRKIYRLEGIRSFYRGALSNMFRSTGAAAILVLYDEVKKFMDRGRL

SEQ ID NO: 79273 - protein, 189 aa, Zea mays
  Coding DNA Sequence Number=SeqID_35898
  Gene Ontology: Mol. function=hydrolase activity, acting on glycosyl bonds; Cellular component=beta-galactosidase complex; Biological process=carbohydrate metabolic process
  Homolog annotation: Hit_ID=Q0DGD7; Match level="QueryCoverage=84%, HitCoverage=23%, E-value=1e-51, Identity=65%"; Hit description=Beta -galactosidase 8 precursor
  Pfam annotation: Domain name=Glyco_hydro_35; Domain location=38-189; Score=-92.3; E_value=2.8e-09; Accession=PF01301.10; Description =Glycosyl hydrolases family 35
MASGGTFRNLLLVLPLYLALASLVGGEASRRFWIENDTFRKDGVPFQIVGGDVHYFRIVPEYWKDRLLRAKALGLNTIQTYVPWNLHEPEPQSWKFKGFTDIESYLRLAQELEMLVMLRVGPYICGGKLTFVLKLHMFGMAKAKDISVYLYRIEQIELVLLQRIDSVKLSLENQKSLLGFQLKNRSLNQ

SEQ ID NO: 79274 - protein, 178 aa, Zea mays
  Coding DNA Sequence Number=SeqID_35899
  Homolog annotation: Hit_ID=A3B6B3; Match level="QueryCoverage=75%, HitCoverage=27%, E-value=3e-41, Identity=58%"; Hit description =Putative uncharacterized protein
MGSSINRLSNWARPITVRGETPNKEFAVEWSPRFPNLFPWHTFDGAKKRGNAVLLYASKYHDVPAIVNISGRFALERGELQYRVSKASLDDRLSTDTLFSSRAISEGCRVLTIHGAKDEIVPAEDARQFAANIRNHELRIVADANHRYTGHREELASLVLGFLSSHPYQITSRLRPRL

SEQ ID NO: 79275 - protein, 77 aa, Zea mays
  Coding DNA Sequence Number=SeqID_35900
MWIPMHGERLSVTTTDTAVAAMPGHDAREMLDVRLPPTRQSAKNYVHMVPKLHIMRYRGPNLEDATGDEEDIDDKIF

SEQ ID NO: 79276 - protein, 250 aa, Zea mays
  Coding DNA Sequence Number=SeqID_35901
  Gene Ontology: Mol. function=nucleotide binding; Cellular component =myosin complex
  Homolog annotation: Hit_ID=Q6L5H7; Match level="QueryCoverage=97%, HitCoverage=32%, E-value=2e-50, Identity=38%"; Hit description =Putative myosin heavy chain
  Pfam annotation: Domain name=Prefoldin_2; Domain location=27-123; Score=-6.5; E_value=0.062; Accession=PF01920.11; Description =Prefoldin subunit
MAASLEAERQENEAIKRSLVEAQERNDALFKKVRDSEYRAHQLQDTVQKLRQDGDGVKNAHTEVHGTNEDLMRRNENLLKRNDDLVKKIEDSAILVTELRGNLERLEGKAANLEAENQLLRQQAIATPPSTAKSSQAACSKISMIHGSSLDLINHKVYENGQSLFNDVYQFSCNVHLKPPGQLPQLHIDEEFPVKGFFKPIKLQAVDLLVSVLNQWMEVPCFTKLKQGTSFLEQSNHPLSTFPVENLGNF

SEQ ID NO: 79277 - protein, 327 aa, Zea mays
  Coding DNA Sequence Number=SeqID_35902
  Gene Ontology: Mol. function=protein binding; Cellular component =nucleus; Biological process=nucleosome assembly
  Homolog annotation: Hit_ID=Q8L8G5; Match level="QueryCoverage=89%, HitCoverage=79%, E-value=1e-161, Identity=96%"; Hit description =Nucleosome/chromatin assembly factor group A
  Pfam annotation: Domain name=NAP; Domain location=58-309; Score =403.0; E_value=4.4e-118; Accession=PF00956.9; Description=Nucleosome assembly protein (NAP)
MSDGKDSLDLSALGAAIPNSAELSAEDKANLVASIKNTLEGLASRHTDVLENLEPKVRKRVEKLREIQGEHDELEAKFFEERAALEAKYQKLYEPLYSKRYEIVNGVVEIEGITKESAAETPEEQKSGDETSAEQKEEKGVPAFWLNAMKNHEILAEEIQERDEEALKYLKDIKWYRISEPKGFKLEFHFGTNMFFKNSVLTKTYHMIDEDEPILEKAIGTEIEWYPGKCLTQKVLKKKPRKGSKNTKPITKTEDCESFFNFFSPPQVPDDDEEIDEDTAEQLQNQMEQDYDIGYVMGSVLYVVVAVLLQILLLRSGDLINLLMHQD

SEQ ID NO: 79278 - protein, 749 aa, Zea mays
  Coding DNA Sequence Number=SeqID_35903
  Gene Ontology: Mol. function=glucuronosyl-N-acetylglucosaminyl -proteoglycan 4-alpha-N-acetylglucosaminyltransferase activity; Cellular component=membrane; Biological process=heparan sulfate proteoglycan biosynthetic ...
  Gene Ontology: Biological process=process, polysaccharide chain biosynthetic process
  Homolog annotation: Hit_ID=A2Y6Z7; Match level="QueryCoverage=93%, HitCoverage=93%, E-value=0.0, Identity=80%"; Hit description =Putative uncharacterized protein
  Pfam annotation: Domain name=EXTL2; Domain location=504-747; Score =417.1; E_value=2.6e-122; Accession=PF09258.1; Description=EXTL2, alpha-1,4-N-acetylhexosaminyltra
  Subcellular localization annotation: CTP_CleavageSite=20; ConfidenceScore=5.46e-01
MASQAARRGGVMRPPSSGVRAAAARSPAASFLLAAAAVAALVGGFYFWLVVSSFRLPDSGDAGCRPDGEGSWAVGMFYGSSPLALRPIELEGRSNGNSSAWPVANPVLTCATATEAGYPSNFVADPFLYIEEVIQDDTWSYRGRCASCDRCPGGGSALDGHADHGGGGGTALRRTYEAWHLSYPFVFKYENEIYMMPEGNKKKELRLYRAIKFPLEWTLEKVLVNKPLIDASLIQFEGYWWLFASDFTRHGVEKNAELEIWYSNSPLGPWTEHKQNPIYKSDKSLGARNGGRLFVFEGSLYRPGQDCSGTYGRRVKLYKVEKLSKEEYKEVPVNLGIDEPKKGRNAWNGMRFHHMDAQRLASGAWIAVMDGDRVPSGDSTRRSLIGYIAFLLASALVIFVGFMKGAITCYIPSSLWVPLTRRTELPRIFSVHRFNQKVRRYSTSISRYISAAKTKLGEKTWSNMLFFCVVALFTIVNVCIAVHFLYGGNGAEEAYTYQGQHSQFTMVTMTYEARLWNLKVFIEHYSRCESVREIVVVWNKGNPPSSDAFDSTVPVRIRVEEINSLNNRFRVDPLIKTRAVFELDDDIMMTCTDLEKGFRVWREHPERMAGFYPRMIDGNPLQYRNERYARGKNGYNLILTGAAFMDSEFAFKTYWSEKAREGRDYVHKNFNCEDLLMNFLYANASSTRTVEYVHPAWAIDTSKLSSVAISRDTQKHYDIRTDCLAKFSSIYGPLPQKWEFGMREDHWDK

SEQ ID NO: 79279 - protein, 330 aa, Zea mays
  Coding DNA Sequence Number=SeqID_35904
  Gene Ontology: Mol. function=manganese ion binding; Cellular component=nucleus; Biological process=DNA repair
  Homolog annotation: Hit_ID=Q9SXQ6; Match level="QueryCoverage=94%, HitCoverage=95%, E-value=1e-146, Identity=74%"; Hit description=Flap endonuclease 1a
  Pfam annotation: Domain name=5_3_exonuc; Domain location=170-259; Score=10.2; E_value=1.9e-05; Accession=PF01367.11; Description=5'-3' exonuclease, C-terminal SAM fold
  Pfam annotation: Domain name=XPG_I; Domain location=98-189; Score =117.3; E_value=4.5e-32; Accession=PF00867.9; Description=XPG I-region
  Pfam annotation: Domain name=XPG_N; Domain location=1-110; Score =24.6; E_value=7.6e-06; Accession=PF00752.8; Description=XPG N -terminal domain
  Pfam module annotation: Pfam domain module=5_3_exonuc::XPG_I::XPG_N; Domain location=170-259::98-189::1-110
MGIKGLTKLLADNAPKAMKEQKFESYFGRKIAVDASMSIYQFLSGTGFLYFLEQIVVGRTGMETLTNEAGEVTRYSKRDDATKDLTEAVEVGDKDAIEKLSKRTVKAPSEAEAECAALCINDKVFAVASEDMDSLTFGAPRFLRHLMDPSSKKIPVMEFDVAKVLEELELTMDQFIDLCILCGCDYCDSIKGIGGQTALKLIRQHGSIESILENLNKDRYQIPEDWPYQEARRLFKEPNVTLDIPELKWTAPDEEGLISFLVKDNGFNEDRVTKAIEKIKSAKNKSSQGRLESFFKPTATTSAPLKRKETSDKTSKAAANKKTKAGGKKK

SEQ ID NO: 79280 - protein, 100 aa, Zea mays
  Coding DNA Sequence Number=SeqID_35905
  Homolog annotation: Hit_ID=A2Y700; Match level="QueryCoverage=100%, HitCoverage=100%, E-value=6e-42, Identity=68%"; Hit description =Putative uncharacterized protein
MSSRFWRWYADRQFHRCEKTVLWGMVEPHRPARSVAPLVGTYVAAFYTGVLGAAVTEQLYKDHPGEAVPIMPPKFYWGPWRVMNGEVSRFIQPPDEAKTA

SEQ ID NO: 79281 - protein, 168 aa, Zea mays
  Coding DNA Sequence Number=SeqID_35906
MSSATLTTDNLLKRVKGVVRKADYSILAQVLMRPDQGYVSLVSRRTCFCLIPVSASQSDYLGFPFVLKGCGVTGEGGIAAGALEASLDSFGDDDDDDEGMKFRLGLCPEVRPQFEPPSAPMSSGLDVSALGLEVSVSRPETHTSIELVTVPAAEEEVATKRVVADSKR

SEQ ID NO: 79282 - protein, 165 aa, Zea mays
  Coding DNA Sequence Number=SeqID_35907
MEWRKILGDILMEYLDSISGKNLKGITREISGREFEKISRFKFLGCYTAPAPVIDTQAEDTTFHQFETQGAAVPDDDDDDDDDDDFGVPPPPPMPPHTHDHEAGSSSGSAPASPPAIDPALAAILQTLTQQQVHLAAVQQQMSERMVSMFRMIQDRQDTLQQQLL

SEQ ID NO: 79283 - protein, 79 aa, Zea mays
  Coding DNA Sequence Number=SeqID_35908
MEFKSCSLLWGERSEVRGVRNQLNCPSGPVQPVLTTQLQLKKLNSAEVKFSWKAQLQLKSSAAFQQEHSRFLNPNHGQP

SEQ ID NO: 79284 - protein, 127 aa, Zea mays
  Coding DNA Sequence Number=SeqID_35909
MSGAPEDSDFKLFTFGNSRKSARYNSPDCPVYTGQCPRDNGYFGANGHLQRIKCAPERTEVRHARDGAPDTLQYMSGAPPDIKAGPEERKPQLNCPELKKLNSAEVKFSWKAQLQLKKFSCFSARTL

SEQ ID NO: 79285 - protein, 267 aa, Zea mays
  Coding DNA Sequence Number=SeqID_35910
MTAGHGVNPFLGKALPLVPLEISSDARLAPAATRPQHADPGSHVIHLEYWSPSAEKTDCRTGNYPPHDRTPLRGYYKKIFLLTKAAVMRHPAHDPMEPPDVVARILPRGGPKGHCRYPEIGVPLTTVRRHGARAAISSRAVSSTRPHHVDDSRVATWPGKTISSKIPTVGLDPPWESDGPLHIRTGPPSRVQDLRGYRPDPGTGPRPLCVGSGPPSAGSRDSGTKNTQALTKVRWGSGANTCPDHTMYTSAPRSGGDPMLPRGLLPM

SEQ ID NO: 79286 - protein, 244 aa, Zea mays
  Coding DNA Sequence Number=SeqID_35911
  Homolog annotation: Hit_ID=Q6QP51; Match level="QueryCoverage=20%, HitCoverage=22%, E-value=8e-13, Identity=71%"; Hit description =Putative growth-regulating factor 1
  Subcellular localization annotation: CTP_CleavageSite=60; ConfidenceScore=5.49e-01
MVAFQGGRPPFKGNSPHLRPQPSQAESSPTRSKVLPLRHGGWVPRIVQAGPRQKEPKPPRVMRATAQRLRAFLHFRPDQRVKGRTAMQAACNRTKGAHPFHFDASSMEAQAHTSCNRCAGYYVRETAPPLAPVLRLLDCGTSAATRGDPAHGPTVPTEHIGHGSVSRGRRDRERGYPERDPPSRRKRAPSPPTNHRFEGWPLGRVQQPPQSTWAPRPLLVRGSKAGPSEGFNGRLRPLGLRAHY

SEQ ID NO: 79287 - protein, 397 aa, Zea mays
  Coding DNA Sequence Number=SeqID_35912
MRAVWRSAETPTGGSIFPVYSPKVPSPPMRALEPPPPPPPRGPQLLGQGQRGYEQLFLSGSHREVGGREKTPTTPRRWVFCLGPTLNSGFSQKRQRTTGETVEAVSQAQGTQRRVSPPPPPSSDPPQPPPPPPLGQQQHQQQQQQGQRTSCFQGRWKVQGPKASSSFAPKVAPTGESGSQQQASAGRGAGDLPPPTIAEAAPSGPQVPSAIAEVVSSGLQVPAGGPEAVVSLTATADPTTVMLSNTPSKEKKLAKKEEHLDQREEVITALSEKLKSYNVMLEIQRDEQTVAEASLQKLQRELDDRASNIALTEENLKAKDASLEKQATDLDWQEKDLAFREEMWERWDKLLADHELEAEEKEKRLEENERTLEERVRRFQATQAAQVAKAAQAASDS

SEQ ID NO: 79288 - protein, 94 aa, Zea mays
  Coding DNA Sequence Number=SeqID_35913
MQEFPCRTAIAAKSSRGSPYTDHSPTALAPFGYQDDLQVTRVLTARRSHTDKHENSSTGRRVDSYLNQGLMCKKAWVKGYRRIAAVRSRIEGSD

SEQ ID NO: 79289 - protein, 139 aa, Zea mays
  Coding DNA Sequence Number=SeqID_35914
  Pfam annotation: Domain name=zf-CCHC; Domain location=113-130; Score =16.7; E_value=0.0046; Accession=PF00098.14; Description=Zinc knuckle
  Pfam annotation: Domain name=zf-CCHC; Domain location=26-43; Score =16.3; E_value=0.0053; Accession=PF00098.14; Description=Zinc knuckle
  Pfam module annotation: Pfam domain module=zf-CCHC::zf-CCHC; Domain location=113-130::26-43
MGHLAKACPNKRKLKLMKEERRLKHDKCFKCHTWDHLSSMCPTKKLVKSQVMSQPMPQVEQKKDPQKKIKINHEYDGDVAKKNKTRRGRRHSTYNQDANMMSTNQNKDDLAQIKCYKFDGMGHFASRCPNNLEKKAQEK

SEQ ID NO: 79290 - protein, 167 aa, Zea mays
  Coding DNA Sequence Number=SeqID_35915
  Subcellular localization annotation: CTP_CleavageSite=49; ConfidenceScore=5.08e-01
MGKPVPSLLMLLLSRGRVPLNSPTRWQGGRPSYPSNHLLQRTCKNYATSKAEYTNTQLDLPGLTALAYNAPLTPTGRRAVTALVPTITGMGDLVSGRVRGYVYGQYVQTLDSRYHTLILIQILSRGQPIPMDCCPQPTSVRYEGGNNQWPDLARVLEKSLVFYRDPT

SEQ ID NO: 79291 - protein, 60 aa, Zea mays
  Coding DNA Sequence Number=SeqID_35916
MEQIDGFGGVDEMGAGTNLRGDDDGVRREELDIEALSTSRQRTPMRFAQGRLEELDPWRR

SEQ ID NO: 79292 - protein, 256 aa, Zea mays
  Coding DNA Sequence Number=SeqID_35917
  Homolog annotation: Hit_ID=A3AS42; Match level="QueryCoverage=90%, HitCoverage=25%, E-value=9e-95, Identity=71%"; Hit description =Putative uncharacterized protein
MAHRRLPGPVCAQIADTGTQIDPGSSRARKSHVNAWLGSSCVCKTKGFVLQHQVILFCLGETFTELPPIYPLVDLPINTRASAADFGGSVPKPGLEVNLVDAVPCRIAFERGKERHFCFLAIAHGTSGWILLLEELPLKRERGIVRVMAPLAGSDPRIDTKHGKWLHLRIRPSSVPFLDTEKHKAKTKKYLVDGRWTLAFRDEQSCKVAESMVIEEMKLQRGAVAEQLKPLVEFDMPEDGMQHPQTSHETPSDDGS

SEQ ID NO: 79293 - protein, 577 aa, Zea mays
  Coding DNA Sequence Number=SeqID_35918
  Gene Ontology: Mol. function=binding
  Homolog annotation: Hit_ID=A2XRM1; Match level="QueryCoverage=79%, HitCoverage=45%, E-value=1e-164, Identity=66%"; Hit description =Putative uncharacterized protein
MKLIRQEFVIEALRSIAELMIYGDQHDALFFEYFMEKQIMGEFARVLRISKLSRVSLQLLQTMSIMIQNLRNEHSIYYIFSNEHINFLVTYPFDFRIDEMLSYYISFLRAISGKLNKNTISLLVKTKNDEVTSFPLYVEALKFAFHEDSMIRVAIRTLTLNVYHVGDESVNRFVSRTPLSDYFSDMVQHFQKQCIDLDKLVARSSRKGNSSVPISSIEDAIVQIEDTLYYFSDVMSSGIPDLERFITENILRVLVFRFLLPSLQRQSTDLDLSVTTSMYLLCCILHIFKNKDMASTVAAALFHQPDGPDDRKQRTPNGYTSEHDSCKSENHCTTASGIEQSSEEPNSLSSVSWKHLPNNSSRSDCCQGNTPREHLLSYITEGDDSQALGSLCLFATLLQTKELDESMLDALGILPQRKQHKKLLLQALVGEDLAETQLFSSSSSLTDDSICSDFDIYVRKLQRCEYVVLQTALNTTQKMLSSSQKNYNNALLFFTQDAVLKAVKTAVRKGAALPAVVLLCLLSYASTKADAVLEQRPKRTAAVHCSKDQQGLLLSFPQTMRLIPIILPQSLVRRFVG

SEQ ID NO: 79294 - protein, 77 aa, Zea mays
  Coding DNA Sequence Number=SeqID_35919
  Homolog annotation: Hit_ID=A3AS42; Match level="QueryCoverage=75%, HitCoverage=5%, E-value=9e-20, Identity=86%"; Hit description =Putative uncharacterized protein
MTSKAHRYQDYLVLDALVDLFCRSKVSADVRLVGGWLFRQLLPHGEEEFTAFHLRRLKQMQGENYDSIPIYYYQISL

SEQ ID NO: 79295 - protein, 103 aa, Zea mays
  Coding DNA Sequence Number=SeqID_35920
MGEGGGVQEKGECFPQIPNSQSASPERKKNKKNNLHFSSLQTGYHTFPLSNGHLDRVSFSPQSNGSLRPRKDHHTIGVSCFDYKLLENKNGKEEKRSKRQELK

SEQ ID NO: 79296 - protein, 171 aa, Zea mays
  Coding DNA Sequence Number=SeqID_35921
  Gene Ontology: Mol. function=cation transmembrane transporter activity; Cellular component=integral to membrane; Biological process=cation transport
  Homolog annotation: Hit_ID=A2XRM0; Match level="QueryCoverage=99%, HitCoverage=52%, E-value=2e-64, Identity=76%"; Hit description =Putative uncharacterized protein
MALWCNFLVFSLKFGVWISTSSHVMLAELVHSIADFANQMLILAFFFAAMVIRRKDLYGLSYLQLEYFAWVQPPENIHWAALVIGGSFLIEGASLLVAINAVRKGAEAEGMGIWDYIWRGHDPTSVAVMTEDGAAVTGLAIAATSLVAVQMTGNAMYDPIGSIFAGNLLGL

SEQ ID NO: 79297 - protein, 156 aa, Zea mays
  Coding DNA Sequence Number=SeqID_35922
  Subcellular localization annotation: CTP_CleavageSite=47; ConfidenceScore=5.20e-01
MHPPLASAALRLLSFTSRTRLLSHCPFFLSRRDDDGGREGPSSPLPPLSPSGSTFWPRSLLLSASDAAGLFSLRGGWRRRALPPAASRPPGAVTDAAPVRLTVSRKYSLRVAKGKKKAHFDDEHRSQNIAYPVKQISEVVFSSWIINIPSFHAKSK

SEQ ID NO: 79298 - protein, 145 aa, Zea mays
  Coding DNA Sequence Number=SeqID_35923
MDPKKVTTRASCSLDEAMKTTLIDKKDKATLAEDTPLTTFENNETEAVNNKHPQTEDLPTLEGNVHTSSFKYLPHDDPPSRFAPIGYLPTEGDGDILQEGKDLRILAEDQLKLRALRIKTNHLQKQREVLTAKRQRPICRKGLDN

SEQ ID NO: 79299 - protein, 125 aa, Zea mays
  Coding DNA Sequence Number=SeqID_35924
  Gene Ontology: Mol. function=cation transmembrane transporter activity; Cellular component=integral to membrane; Biological process=cation transport
  Homolog annotation: Hit_ID=A2XRM0; Match level="QueryCoverage=79%, HitCoverage=33%, E-value=3e-46, Identity=89%"; Hit description =Putative uncharacterized protein
MTGVDGGSALMAGSTRQNRAPRNRHALIGRAIDDHDMQRVLEFLKSDQVVDALYDCKSEFREAAMSKDDTELLRVMANYGEDVVEALGYEVDRLESEIKKLVPGIKHVDIEAHNPEGLTLRAEVL

SEQ ID NO: 79300 - protein, 79 aa, Zea mays
  Coding DNA Sequence Number=SeqID_35925
  Subcellular localization annotation: CTP_CleavageSite=41; ConfidenceScore=5.28e-01
MACSAKASSVWVHRTVRWCTGQCPCPVSQRSARPTVGRAIRAGHVAEPTASRGHQIVRCAPDSVRCANGSKAPMVGFAK

SEQ ID NO: 79301 - protein, 298 aa, Zea mays
  Coding DNA Sequence Number=SeqID_35926
MTRTTSVETGGPPSSMIGERKWWNRRICCRNATFGTVDTLPVSCVRDQKCPVPEPSRPALSACEPRTAQSQSQSHSATTAYPADPATRPEGACRCRCSAQPHAAPRSAVRLAAVSPASRADAERASCAAWPKGQSKGGAKPGGEADGKASAAAAGVNSGERVQRVTAAHGSRRGAACCSQQPARAGRFRLRFIIGARTFSAQQALQRGGLGILFPTFSSPPVPNPLALFSLQYLWPVGGSKNRCVPAGGALSSRRSRPRPSKNPGRACCRCAGRIEEMGVTRHQQPAEHLDLESSPQQ

SEQ ID NO: 79302 - protein, 494 aa, Zea mays
  Coding DNA Sequence Number=SeqID_35927
MGVICSHCYVALPPFEVAEDDEDEGALRVRDPSREVKKARGVVKSTTPNGSKPPPAAKPAVPDPSKPSSGARAAAPGSSKPPSAEPTRERGPPSPLRTAEVAAGGADLSMDICVDDYRVGGVMMFHAHTGQGLVVCCVYVVANLMDFSWQATAFADHVASGALTLEFAVERQRLESRIERLWAQHTEAVRDKSAAKNKSRRLMEKLAAAKAEKEDLSRQLAAYRKDANRACAKAQAAQAKAKLARAEASLACQHAEEAEMSHNSLRDRLDKAEASTHAEVDRTHAQLVDAYRELGARTAPFDAFGKEVVLHFLGWLQEELEVLPMIVTGLMSFASLITCEGASNALSREGCRHFEVFDRSDEDFERGIFQVEDTVLKRSAGALYDRIWGPHGRETAWERSDRAMEQMAHGEEVEDLGDLDSTLPEASGAKEGTGGELAPPSDVGEGPLVTPALTCAGEDPVPDAAPTGGDTSVVAGEPAAEDPTASAGPSQVAG

SEQ ID NO: 79303 - protein, 184 aa, Zea mays
  Coding DNA Sequence Number=SeqID_35928
MPVLIQIRIGPNPTRQRRGGRRRAVRVAYASLPWGSGDRYFSINSDYSSEDPRSNSAKMDSADSIADKAIGRMQEISDKIFSVARETIRPGRGLTSFDATKLRVALEEIACMLEQDSLVLQEHLDIVNNVNIPVDSSYEPSTLSSPPPSDDDLTPHWDFAEHFQNFWGVEYDSNQMPSFSDNDV

SEQ ID NO: 79304 - protein, 657 aa, Zea mays
  Coding DNA Sequence Number=SeqID_35929
  Gene Ontology: Mol. function=transferase activity, transferring hexosyl groups; Cellular component=Golgi apparatus; Biological process=carbohydrate biosynthetic process
  Homolog annotation: Hit_ID=Q652K2; Match level="QueryCoverage=96%, HitCoverage=92%, E-value=0.0, Identity=84%"; Hit description =Glycosyl transferase family 8 protein-like
  Pfam annotation: Domain name=Glyco_transf_8; Domain location=315-631; Score=403.2; E_value=3.8e-118; Accession=PF01501.11; Description =Glycosyl transferase family 8
MLPPVVVLVFLFVVAPSLFFVVRNDGRAHAHVHVASDRKGKNGNQEAAAMKNLKSILPKEVFDAITASQQESGTLSVDFFRNHASPSWKTDDLVTEKSMDVNDNAKAENSLLEHSVPTNRSPKDPDEHQVDKAAKVARRKLREKRREKRAMDLVHKDDEARIKLENAAIERSKAVDSAVLGKYSIWRKENENENSDSTVRLMRDQIIMARVYSTLAKSKNKNDLYQKLQTRIRESQRAVGEANADADLHHSAPEKIRAMGQVLSKAREELYDCTAITQRIRAMLQSADEQVRSLKKQSTFLSQLAAKTIPNSIHCLSMRLTIDYYILPLEERKFPRSENLENPNLYHYALFSDNVLAASVVVNSTIMNAKEPEKHVFHLVTDKLNFGAMNMWFLLNPPGKATIHVENVDEFKWLNSSYCPVLRQLESAAMKEYYFKADRPTTLSAGSSNLKYRNPKYLSMLNHLRFYLPEVYPKLDKILFLDDDIVVQKDLTGLWDVDLNGKVNGAVETCGESFHRFDKYLNFSNPHIARNFDPNACGWAYGMNIFDLREWKKKDITGIYHKWQNMNEDRVLWKLGTLPPGLLTFYKLTHPLDKSWHVLGLGYNPSIDRSEIDNAAVVHYNGNMKPWLELAMTKYRPYWTKYIKYDHPYIRGCNLSE

SEQ ID NO: 79305 - protein, 336 aa, Zea mays
  Coding DNA Sequence Number=SeqID_35930
  Subcellular localization annotation: CTP_CleavageSite=60; ConfidenceScore=5.28e-01
MAGLPSSHRWALAGKSQRSAGRHHRRAIPNHGACLSMRDVPNRGDSPTAPPLHSTRPRLRSSPRMPTTLRPPSSPWDLLLRRLVFLPPSPQPLATSPPRSAPPPNAALFKPTDAAALSSTPASGLPPPRASLPCHSRCHPVHCSGERAIFLLPSCATMVPEPTRRHPCVGACLATAANVNFTHASSARLVDGHVGRTRLGPHRHSRIQSASPCTDAHVPVSVVTGAYLHASSTPVPITPTLSLLALVAPAPTPPAFNVSTSLATVKADMAAAQDYKRVAALAWEHERNVADALATQLAKTKCHLFGSSVLKPPLAAPVPPPPAEYEATVISHLHAQ

SEQ ID NO: 79306 - protein, 949 aa, Zea mays
  Coding DNA Sequence Number=SeqID_35931
  Gene Ontology: Mol. function=phospholipase D activity; Cellular component=vacuole; Biological process=lipid catabolic process
  Homolog annotation: Hit_ID=Q7F0T4; Match level="QueryCoverage=67%, HitCoverage=60%, E-value=0.0, Identity=69%"; Hit description =Putative phospholipase D-like protein
  Pfam annotation: Domain name=PLDc; Domain location=461-488; Score =45.1; E_value=2.5e-10; Accession=PF00614.13; Description =Phospholipase D. Active site motif
  Pfam annotation: Domain name=PLDc; Domain location=853-880; Score =41.3; E_value=3.3e-09; Accession=PF00614.13; Description =Phospholipase D. Active site motif
  Pfam module annotation: Pfam domain module=PLDc::PLDc; Domain location=461-488::853-880
KVGWGSEWDIRGWSCRIKQPQHECHKDVVEVQRTMKDCVINGGVVWNEAPLSATQSVGGRGDKDMEKDERVIGGTPTEAQSHRKGPDTGARKRGGAATSSKETEVLAGARKEAASDMRVGQGPTPTSRAAEWRPVPALRGGKATTPAVSEAAVPAEGRGRVAAAKPGWRRPSDMGEEAVAALAGGGDEVAALAGRGAVVLAGRRPTRILSSVGSLTRSNPEVAGDASCCSGTSSSLRVLQQHCGGGVRSVGVGSATWGRRWPARGGAALGEEVTNQGKGHSREEMAGQRRSRSGRRKVSSGGRTIKLRATSSSRVKDWVTAINAARQPPEGWCYPHRFGSFAPPRGLLEDGSMVQWFVDGQAAFKAIASSIEEAKSEIFITGWWLCPELYLRRPFQHHGSSRLDALLEARAKQGVQIYILLYKEVALALKINSLYSKQRLLNIHENVKVLRYPDHFSSGVYLWSHHEKIVIVDNQVCYIGGLDLCFGRYDSPEHKVADSPPEMWPGKDYYNPRESEPNSWEDTMKDELDRDKYPRMPWHDVQCALYGPPCRDRNKALNEQAIPLLMPHYHMVIPHYKGRSKETNDEAEGKQYNDKDVDIGKPVLTSRTSCQDVPLLLPQELEPRELSSSDLRVNDLDINHSDRLNKKNFNQPLLNRKAKLDSSHQDLPMRSFVDNLSSLEPSSVRRFDSSKDDRNHIDKKWWEMQERGNQVASLLDIGQVGPRVVRSVGQWSAGTTQIEGSIHNAYFSLIEKAEHFVYIENQFFISGLSGDDTIKNRVLEALYRRILRAEREKKRFKAIIIIPLLPGFQNLFDVIGPKAHDYISFYGLRAHGKLHDGGPLVTSQDTILTMSHFQIYVHSKLMIVDDRITLIGSANINDRSLLGSRDSEIAVVIEDKEVVNSKMDGRPWEAGKSSLSLRLSLWVEHLGLHPGEPDDQLWPGDSSPQVELL

SEQ ID NO: 79307 - protein, 177 aa, Zea mays
  Coding DNA Sequence Number=SeqID_35932
MYRPASHAAQTLVFLSSKQKTYYYICTYIYISQTALQENRRGQQQESRSTTNPGDGGGGARKRRDLPALTHRQICQVGSYLLRARVATMWLGRTPRSARPVARLCTLPAISALGFDKGCWAEAVRGKEPARRASRGQRRGPGSGVVMGEEIEERLEADGARRLVWEGEEEADCRGVA

SEQ ID NO: 79308 - protein, 213 aa, Zea mays
  Coding DNA Sequence Number=SeqID_35933
MRWRRRSRRGGASKGDGVAHGPDGVDGAACGADGVDGATRHAGEGDGVVGGMKEGNKIGTSTQSASRRESRSTSWESEGENILIKDNMTRDDDAMGEKIETPVPLVIRGIYEEKTTGGSRGKFVRSGGRGVAIASAPEDSKVLIGGGGAEEGEKRSGMGRLGGKTIEEVGDCVQRLSPVAGGKRSLKKEATQHAGGGVNHTLDTTILSGGVRA

SEQ ID NO: 79309 - protein, 107 aa, Zea mays
  Coding DNA Sequence Number=SeqID_35934
MTSTKWGTKPGPRLAAPRLEGAATGRCAGVDMADTSGWGPGVVVVVCAHAAMGTNAEVGAGTSASDATCAEDRGRGQQLVVVVGGSGQHSPRGGNCSRRSDWGLRHI

SEQ ID NO: 79310 - protein, 61 aa, Zea mays
  Coding DNA Sequence Number=SeqID_35935
  Subcellular localization annotation: CTP_CleavageSite=48; ConfidenceScore=5.04e-01
MTSHNWQLPFYLMTLAGLGGCMGGSHAMHKRPPRGYSAALKLMLANSRASTAMKEPSENLY

SEQ ID NO: 79311 - protein, 338 aa, Zea mays
  Coding DNA Sequence Number=SeqID_35936
MAAASSATSVHDFIVKGCSGRRERRLTLVLGWSPGLSRGDGGESGECSVHDSEEDEVEEFWKSLSEDGISSSRKPSASLGRFWVTSAEEGVVSDAVSDDGLGTMGSSAEGGLPVREMSGEFSSVASNSPNMVSSQSVNKNSEWRRKASVQNPRDGQNADDGRNQRAWQGPLPRPRRSPNFSFGVALRKAQSVPFHSRRSWQGPRKEDSMGSSPPTDSPRKTMSHPIPVGPTLLGPRSFDVVREAGGDETLPRVVQQSGGPVINSEAGFRRVTNQIVPYKMPLGLVALFENAHSSQQLRRALVTRHKHPGHASYAAAAMDRRPPPQQPQPAQGGFLWSW

SEQ ID NO: 79312 - protein, 164 aa, Zea mays
  Coding DNA Sequence Number=SeqID_35937
MSLAARRVQNPATRRDSSNDDLVFPPYLVRRSGRNKAPKRQLTRQIYDDHLPRKCQAVGKKIKAATGKQQYGHGCYITMRCSPAAVNNTTLIMSLSDMVKEMLKDLGFGSLLIMNIEGLEDRVLGAYLLSSVQDNPLRIKVGGRSMSITAQVVHLVTGLPMGNQ

SEQ ID NO: 79313 - protein, 101 aa, Zea mays
  Coding DNA Sequence Number=SeqID_35938
MENNARPLQEKHNSDRSLISVIRIRTKFDTYCEGMMDQVQLVEDGDHRGLVLGALVHRCSSMSYRLPQELGARIMALSSATLALTSASCQSSSPTEHISQR

SEQ ID NO: 79314 - protein, 107 aa, Zea mays
  Coding DNA Sequence Number=SeqID_35939
MAAAHRRTGGNVGCPVRLCDGHHRSSVCGVVPCAQGQRQQEGGGARGRVGAGEQVLEVDDNSVDRAVITRILRGSRIRVTAVELATRALELLALGLLPDVSMIIKDY

SEQ ID NO: 79315 - protein, 87 aa, Zea mays
  Coding DNA Sequence Number=SeqID_35940
MRTLQADLATFTSDPEDVDSASSLRTVPGVLLYLTSHREKLKEKGRMRHARRRAAEGQRSRMQLTKRQATERFNPELKLQRLVGAKN

SEQ ID NO: 79316 - protein, 276 aa, Zea mays
  Coding DNA Sequence Number=SeqID_35941
  Gene Ontology: Mol. function=nucleic acid binding; Cellular component= heterogeneous nuclear ribonucleoprotein complex; Biological process =regulation of transcription, DNA-dependent
  Homolog annotation: Hit_ID=A2XY03; Match level="QueryCoverage=92%, HitCoverage=35%, E-value=1e-113, Identity=79%"; Hit description =Putative uncharacterized protein
MRWGSALFPHVLLKNVIVEMQFSREDGLLPVDGYEPWASAFSQRNSEFGPSFEQNKCEVMMMVGLPATGKSTWAEKWVKEHQEKRYILLGTNLVLEQMKVPGLLRKNNYGERFERLMDCATWIFNKLLTRAANTPRNFIIDQTNVYKNARIRKLRPFANYRKTDVVMFPTPSELKSRAAKRFNEMGKEIPAEAVNEMTANFVLPLSKDMPHSKEPFDEVIFTELSRDEAQRTLDDMQRVLPRNVTPSYGNSGNQKHFELLKFELLKNSWNDKMSTS

SEQ ID NO: 79317 - protein, 46 aa, Zea mays
  Coding DNA Sequence Number=SeqID_35942
MTDDEGALELALAYRPAACRERPPPLRDLANRVYATDEARSYLRHL

SEQ ID NO: 79318 - protein, 105 aa, Zea mays
  Coding DNA Sequence Number=SeqID_35943
MGLADWVVGLMKMGKLESSSCSRSSALEMAEVVELQLLQLPFVRLHLLLLSSYGVACAISLLSPVSLLFPTSISLWVVFEGERNGGAEEERRGEEEEEEEAAAAK

SEQ ID NO: 79319 - protein, 61 aa, Zea mays
  Coding DNA Sequence Number=SeqID_35944
MGKPVPSLLMLLLSRVTALVPTITGMGDHVSGRVRGKICGQVHSGTRLTDLPYFSDLITLC

SEQ ID NO: 79320 - protein, 164 aa, Zea mays
  Coding DNA Sequence Number=SeqID_35945
MQPGRIPLPAVTQDGDRQPWVGRSKPSCDLGPALSFKLSWGGGRAEPELYLPRGFVDQPLLQHSRERALTGPARGADFDNAGLVDGGRRQLQRVGLAGLAPGAPSRRKGGCRATCTGGPPKTSRAARAAFVFWGCPAFAPVGRLHAKVGAPLVWEDPSGDLPVG

SEQ ID NO: 79321 - protein, 60 aa, Zea mays
  Coding DNA Sequence Number=SeqID_35946
MQAACNRVKWAHPSDFQRTQHGGPGPHVMQPARRLLRTGKGGYLEKGSFPVKETGPEPPY

SEQ ID NO: 79322 - protein, 86 aa, Zea mays
  Coding DNA Sequence Number=SeqID_35947
MTRRRQPAGGLFILYGASRIHLLQKHHKSCLGHYTRASHSATWHSQSEVLEERQIQLPAYLGSGRNALKKRLFKTLRMYSKSSAHI

SEQ ID NO: 79323 - protein, 170 aa, Zea mays
  Coding DNA Sequence Number=SeqID_35948
MHPVVPPVAWLGFRQPTRCRRTFLAVAALGGDLRGTNTAERSCGTGKKARAQQQRFLLLSGGGAAGLAGFRGAGGHTVAGRSRQGDAAGVTQAAAAASVLSRAPQPPSRRGIGISRELEAVGVTQPVSAASGPSSASSPGGRAAAAVWIGRSTANSERSSSWTPPIGRIV

SEQ ID NO: 79324 - protein, 38 aa, Zea mays
  Coding DNA Sequence Number=SeqID_35949
MASFIHIRPHPPARPSRPHGNKDSLWALLSDPMGANNT

SEQ ID NO: 79325 - protein, 94 aa, Zea mays
  Coding DNA Sequence Number=SeqID_35950
MARLKGKCALGPFLSILVIECQRKCFCADLCNVADKVQIMSKGENKLERDSFVSGGAPDCPCKGERLQVVEIPRERDKKRKAKHHGIQDDHWIT

SEQ ID NO: 79326 - protein, 943 aa, Zea mays
  Coding DNA Sequence Number=SeqID_35951
MLDEAARWDDLIAGLRLMLVARVPGTEEVPAPEGELVVFEAFFTAARNKWGNWHEFWFYVAEGTVEDHPGLPVSEMCSHFYSAYPPFEVAEEDADEGALRCGTGLSSGRDLVEEFVAYGVWPLAHGWALGEVCPRQMPSHGGKLVRSPVFALDLQSRDPAAFVREAEDGAVRIVGRVFELNRLPYGGYPGQDDVDRRGKKPVVESGDDPAPVAAPSSKKRKLGTAMGGLGVSDGFARELMRTCAAPRGRMTSPELRESSARMLRVTGGWWPRNVPIPRAAGEDFFTSHMVHEWKVFPYGRNIAAVVSAVMDKDRQGAAQKRQAVVRLHEARSKRQWGATKAAAPGGGQPPLAAKSAVPASSRASEAAAAAGGSKSAKAALASSRVPEATKAARGLPPPGKRVADFATDISVEDYLVVPAAKGGAVSRRLKEMKEALSQAADFAARAASGALTTVVSAEVERLRTQYADAIREKSAADSKCRKLADKVAALEGEKTDLRRQLAEERREANEALAKAQAEANLARVEGSLARERAEQLEGRLSALQSRVERAEAATRTEAERTRKQLMDSYHELGARTADFEVPDREPGLRCLEWVQEELQALPTIVEGFMSYASLVTCEGAMNVLSREGCRHYEVFDQADEDFERDIYKVEDPIVKESAGALYDRMWGPHGREVVRERAETARGQAARGERVDDFGALNSTLPDPESNPAEAALEPLPETAEGAPDAPAAAAAGGGPPPETAEGVPDAPAAAAAGEGPPPTAAPRVEDPVTVAAEATAEAPATAGSSQVQDFGPAHATATTNFLAASTVDDGNKSDGSASKFSDFGDSGSSVEWTDESSDEDLDYFAALDVAAAEASPRAADAEDVPGPSTGRKRRRAIAKRRVSGADGGRLRVSRAGRQELLSLPAAVSTGEGELRSIFAGEELRIMLFNYREMGIIPKAEPM

SEQ ID NO: 79327 - protein, 53 aa, Zea mays
  Coding DNA Sequence Number=SeqID_35952
MGLGVCGSLCQGGYEIDGSGYDYGAGCQHCNHYSGEDEAVEGDFQEFQDYDEF

SEQ ID NO: 79328 - protein, 32 aa, Zea mays
  Coding DNA Sequence Number=SeqID_35953
MGFSHNTLNTKQPAKVSKSVWRPSRRGKVARY

SEQ ID NO: 79329 - protein, 88 aa, Zea mays
  Coding DNA Sequence Number=SeqID_35954
  Subcellular localization annotation: CTP_CleavageSite=48; ConfidenceScore=5.28e-01
MGKPVPSLLMLLLSRVIHGIKHLAINNFCQVITFPLVTQCSSMDQAVSLAARSRRFESSFNLARFEVFLRGNHSGLRLELPLKVLVDS

SEQ ID NO: 79330 - protein, 437 aa, Zea mays
  Coding DNA Sequence Number=SeqID_35955
  Gene Ontology: Cellular component=endoplasmic reticulum membrane; Biological process=vesicle-mediated transport
  Homolog annotation: Hit_ID=A2YAN0; Match level="QueryCoverage=37%, HitCoverage=59%, E-value=3e-52, Identity=53%"; Hit description =Putative uncharacterized protein
MVRALRLDGRATAAARWCTCRRAAVALCVANLIAALLVARALYALGSFAFAPKREEATKAFAREEKTQKGLPLELNQKVSLEILQRLHDLGEGSNTMEQQEAIEAWRVGKLKDMGSTSSKNLSNFGLSSEDSNEEIIPGPPLPPELHTELHTDYGGTAVRWGLTHHKESVADCCQACIDQAKRARPGALKCNIWVYCRSEYGCYSPDKYENKHQECWLKQLMMYISRISYFLRLIAPAKLEGLLLSHPEILDAVVIPNLFFAVPYGNMCLFLRLLGAEAGEVPIAYVVSKFHFLVLPDFWKFSSCTLGVQEKGCFSNIGLLKNRPPSIGKHSCRLYRWESKEGEGPQRLALEPDQDALAELKDVGFKLVVSFSGEASILAFGGKDGHLRVFNWPTMGSVLIEIDTKTSIKDLTIRFSNKADNSHVLFITVMEGDIKV

SEQ ID NO: 79331 - protein, 180 aa, Zea mays
  Coding DNA Sequence Number=SeqID_35956
MWYGGKKGRGSDHESGWGWGAHRPTQGRWTRGSRRQGRTGEAGTEGLGTGCVHGEMSGRQGVKARMEGRGGENDGAKDVGEDGARASLGWHLDGDDGSGGMELGRPWEMAGTGKWRLGKKKCRNKLDHQGEAAGAQSAMGYGWKWPWEGARDYASTMEGELQGRRGEAEVPAGRKGMVGG

SEQ ID NO: 79332 - protein, 125 aa, Zea mays
  Coding DNA Sequence Number=SeqID_35957
MAGTGKWRLDEKKCRNKLVHRGKRLVPRAPWEMARNGHGRELGTASTMDGEVQGRRGEAEVPVGHKGMVGGQGAASANIGAGAANGTHDEHRRDQSRKGVHGGAGRSTKSADSLVPDNKKPSPRG

SEQ ID NO: 79333 - protein, 95 aa, Zea mays
  Coding DNA Sequence Number=SeqID_35958
MERTGLVCRGEQPRGYGRRGILVILGGRWESECDQQKGVRRVIGRIRDKSILGVFWKMNHAQGMTWLDREKFDRNIETRIIGIRVWKPGSKESQS

SEQ ID NO: 79334 - protein, 44 aa, Zea mays
  Coding DNA Sequence Number=SeqID_35959
MAPLMDINGGLCNGEVMGRKKGKRPPVRVLQLRPSRGVTVIEAG

SEQ ID NO: 79335 - protein, 227 aa, Zea mays
  Coding DNA Sequence Number=SeqID_35960
  Homolog annotation: Hit_ID=A2XFR6; Match level="QueryCoverage=61%, HitCoverage=40%, E-value=2e-08, Identity=32%"; Hit description =Putative uncharacterized protein
MHPAPPRGIPAAGGYPDRDGDDDDASGSSSHSMELLEEQEPEGWIARPITRNALMGVTSTMLSTPCCVRPSTDPLGPLSTIAFSEHYSITERDTVEAAMQDAARRALSQYSSLFSGVADGLDLKYYPRCSTGSAGGVIVSPVGEGNPRLNSMVNLVAVLNTKLDHALDELGKVQAEVVELHAERAACHSQDGGSPDSIGIQHPYHSPRRGHFAYGTPYCGTHIDLEP

SEQ ID NO: 79336 - protein, 256 aa, Zea mays
  Coding DNA Sequence Number=SeqID_35961
  Gene Ontology: Mol. function=protein dimerization activity; Cellular component=nucleus; Biological process=regulation of transcription, DNA-dependent
  Homolog annotation: Hit_ID=Q84P61; Match level="QueryCoverage=44%, HitCoverage=63%, E-value=2e-20, Identity=51%"; Hit description=OSE2 -like protein
MASSSPPQHAGAGSSADLARFKSSGVRSMNMDDIIRNIYDPEAVNAAAAESAGVGPAEPSLAAPEAAARRTSEEVWKEISVAGGLPTPVLPIPPAASSGGSGAVEMTLEDFLARDSCGRAAVMEGNMALGFPDGDRDAAGRVAGGVGGVRGGGKRALLDHADCAVMQRQKRMKKNQESAARSRDKKQEESMISIADALCQSPNTEVYVSLSCPMVLSFFDPFMSDSLDKFCLVGMTKRCTGAMNNDDYRPAAHTSP

SEQ ID NO: 79337 - protein, 372 aa, Zea mays
  Coding DNA Sequence Number=SeqID_35962
  Subcellular localization annotation: CTP_CleavageSite=24; ConfidenceScore=5.24e-01
MAAQGAGRAVSSSLAKSLGLRKPKREAGSGAKNRNHTLFRVYNDQGEAGSNVPPGSDAGFKNAKRNSRSSNGSRTRNGRPANHSPRRINSAAGQAALLAGEAGDASPSPDRERDTPKRILPREGTRLRASLLIRGSKASPPKGSTAASNRVGPTPTTGQSRLRRRARDDHGYVRYITKAQAALPRLGGCSRKPGFGQTVDSVNIPARELGTRPYTRATASSHEGTTRPAEALREALRPRRSETTPPRPRGLHPAGALARTHRNKMQPRKAGPLAKTCDGSLQASANTPFEARGLLSGTIIRGTLKTPNSQLGSDSGYVPEDGELCSARPRARTRAKSRKTANFAPPDPGLGLGLSPGRRRTPLRPTQGSDSG

SEQ ID NO: 79338 - protein, 121 aa, Zea mays
  Coding DNA Sequence Number=SeqID_35963
  Gene Ontology: Mol. function=triacylglycerol lipase activity; Biological process=lipid metabolic process
  Homolog annotation: Hit_ID=Q2R077; Match level="QueryCoverage=45%, HitCoverage=15%, E-value=1e-16, Identity=70%"; Hit description =Lipase family protein, expressed
VVGLFDMGDGSSEPAAEDNNQMHQVHHRFYSAYDNTTLLYEILKSIKWARKTYGNLPVNVVGHSIGGDLASFCVLGLFVMELPLVAQSSGRRLDVDERVEQCRAVAGVLHVLARFVQVLQM

SEQ ID NO: 79339 - protein, 291 aa, Zea mays
  Coding DNA Sequence Number=SeqID_35964
MAHSPPSSLRKGDVGAYVKKSSLSLIVLSPCAEARGLLSQKPAPAKPLTASTYQPESLGPDRAPGLRPVRMRERPDQPKRYARVSLTGSQALPKAPRRTPLRPTPGLGLGLRPGRRRTPLRPTPGLGLGLRPGRRRTPLRPTPGLGLGLRPGRRRNSASPDPRARTRAKTRKTTKLRLARPQGSDSALASAERLPPRPTPWLGLGLGLGNRGQTQPRLRRSPHVTLPRAQTRHVNRKRHHHPTPNRLGSRRTRPASHPASSAGGAMMAPHKLCDDGGPQLSYGSRTTSAGT

SEQ ID NO: 79340 - protein, 56 aa, Zea mays
  Coding DNA Sequence Number=SeqID_35965
MAVLIGEELDDECGADQRQMVSTQHAGAAQIDGCADAAHSSYDPLAADVHNPTHIE

SEQ ID NO: 79341 - protein, 557 aa, Zea mays
  Coding DNA Sequence Number=SeqID_35966
  Gene Ontology: Mol. function=nucleotidyltransferase activity
  Homolog annotation: Hit_ID=Q6YYY1; Match level="QueryCoverage=93%, HitCoverage=71%, E-value=8e-84, Identity=46%"; Hit description =Putative uncharacterized protein P0604E01.3
MAILAWKQLCIILLYGHLYDWVLVKFYEVASHGRCYGVSPIVTARVPVLKVIDKGTGVECDISVENKDGMSRSAIFKFISSIDKRFRILCYLIEMLSNMNLLIHDLTTLSVILQMKFWAKTRCPPILPAFSAVLKDGTDFASIEKNVSLFQGFGHSNKESIAELFVSLMSKLVSVEGLWEQGLCASNFEGTWISKTWAKGVGNLNVEDFLDRSQNFARSVGVKEMQKICECLRASVSDLSKFSKGEIAAPKLKALLFKPLNQVNPVIKPHQKTIKRKRTNPNKTRTNPIQKNAKKKKALEQDKLAISPGQKDGKKTLDQEKSVSSPIQKGAKKTKPLNQDKLVISPGQEDDKKPLVQDEPIVVSPIQKNNNKYVDQEKSLQQEKQIISPGQKDDKKSSKVGPDSACNHVQQKKVKATVSTGRAANTHVSSSRPRSVFIPQAHWPSQPIVDRFAHIPEHLISPSAFSYGLPQPLMHPAYPHPHSHQGLVGQGQGNFLHFNPGIELQHQGQAFFGPPAVYHPMVNGFHPFGINGAQQVQYIDNRMVQRPPYGFGPGFWG

SEQ ID NO: 79342 - protein, 139 aa, Zea mays
  Coding DNA Sequence Number=SeqID_35967
  Homolog annotation: Hit_ID=Q6UUN3; Match level="QueryCoverage=28%, HitCoverage=4%, E-value=2e-08, Identity=66%"; Hit description =Putative gag-pol polyprotein
MHLRVGKKQNEDSFWKRSWCWCFPEECQCANPSPTSTLDDVVAQLANYGRRDFVVAILYKGFLITQPPVFSKAEDPLEAKDWLRTIEQKLGLIRCDDVQKIHSPQSREKQAIVPFIQHERDVPDIHSKDISDTTLIAPR

SEQ ID NO: 79343 - protein, 104 aa, Zea mays
  Coding DNA Sequence Number=SeqID_35968
MAEADGREEKDAVKNNEEMSGATPIGCTSGAPHGLSFQAEIVPTSKAWDKIKRPTLNQDAGAQMEIISGEDLRVDYFLKSTQSSGATPIGCTSGAPNEVQNPTN

SEQ ID NO: 79344 - protein, 313 aa, Zea mays
  Coding DNA Sequence Number=SeqID_35969
  Homolog annotation: Hit_ID=A7TNK0; Match level="QueryCoverage=73%, HitCoverage=24%, E-value=1e-09, Identity=28%"; Hit description =Putative uncharacterized protein
  Pfam annotation: Domain name=zf-CCHC; Domain location=266-283; Score =28.7; E_value=2.1e-05; Accession=PF00098.14; Description=Zinc knuckle
MAKGGRKVQPENDIVDDCDSDSDDEYASPTNDELADLLKEYTQIIRKSKAKCDKLKDENEFLTTKYDITVKTSEEMKEENKTMSSTKNELKTSLKDAKDKCEKLSEANRELKDRLVKLLSCNTHEAINPVVKLDVATSCDDLSQVDQSSLHDELIEKVEVMTLENQKLKKYLTDATTRGKVAIESNDINNELAVDNGRLRDEVKKLKIQKEHLATSVQKFNKGQYLQNELLMNTVMKNNKSGVEYNSFVQKKATSQYKAKQTPKPIKCFECGKEGHFAQNCKAKPPTPLPKHSKPFAFNAHYVLRKVANGKSK

SEQ ID NO: 79345 - protein, 166 aa, Zea mays
  Coding DNA Sequence Number=SeqID_35970
MGAPDSPEGRKIQKSVCSQGNLSRQRCPEEGLLGPGAKEWRSCWVPLSWQPRIHGYMFELTYPDSCGSLKIKQARINSKRSHLGLVTLSELRWRNRWSGSGSGSSGSKSSGGGGNNESGGRLESGRSWRSGRWSGDWVRWSGASSGGASLRREATNSISDLIKGNL

SEQ ID NO: 79346 - protein, 157 aa, Zea mays
  Coding DNA Sequence Number=SeqID_35971
  Subcellular localization annotation: CTP_CleavageSite=36; ConfidenceScore=5.38e-01
MALASVVATSFAILLLFSLPSCLRLRTTPFSVEGVGAGASSPYSFDTSPDTDPRSGYCTSMRKFHSMRAPSFSSSSDAPFVFSVFTLFFLPNLLPPSTTRSMAQRRLYTWPFPYHGVDSDLETYAGTTTRCSSLVFLALAYNRSFQRSHWRNGLQGV

SEQ ID NO: 79347 - protein, 28 aa, Zea mays
  Coding DNA Sequence Number=SeqID_35972
MASSSDPDKLMSKADKLEFLDLVLASCC

SEQ ID NO: 79348 - protein, 177 aa, Zea mays
  Coding DNA Sequence Number=SeqID_35973
MGAIKSRLGPLKQRTHLRLARGPAFAKKQPWPNRHTDRPVRLTAAKSGLGRHRKLCLARPQGSDSASAPEDDELRLARPQGSDSGLAPEDDELRLARPQGSDSASAPEDDELRLARPQGSDSALASADGLRLARPKGSDSTSTSEDRLDLDLGGASASPDPGLGPTTSQEGPSLPYP

SEQ ID NO: 79349 - protein, 137 aa, Zea mays
  Coding DNA Sequence Number=SeqID_35974
MAQGTFPFHRAQGRARRRLLLRPRPGSGEDVIPPEVEVEAEPRGQARRRPPSEVEVDAEPWGRARRRPPPEAEAQGRARRSFLLRLRLDLAVVSLTLSGGTAVREGRVALFSCQVSQWKGEVTAVTSTLPTEARVSG

SEQ ID NO: 79350 - protein, 76 aa, Zea mays
  Coding DNA Sequence Number=SeqID_35975
MSVSPEPIPGEKDEACGKPPKGHREIAAFNASTYPAQGCRSGEKKKKMKKVVYYETDSSSPSTSGSDAASLTEPPK

SEQ ID NO: 79351 - protein, 133 aa, Zea mays
  Coding DNA Sequence Number=SeqID_35976
MSLGVVSLSKSIKDRVDVGLMTEDPLTGHMLRHGIHFSKHFCKTESLIIEKPYLDSLNQHTLESLFFSRVRKRQTFVASVLRWYQRKNARNEVREERILHLELLCKNLSGGVFASLGETLLGKVRKADTELVK

SEQ ID NO: 79352 - protein, 229 aa, Zea mays
  Coding DNA Sequence Number=SeqID_35977
  Subcellular localization annotation: CTP_CleavageSite=38; ConfidenceScore=5.28e-01
MAPPVTWSVRALGRARRRLLRGRGRVCLPRSRSSLSPRSGEAEFVVFWGRGRVRALGSGEAESVVFRSRGRVRALGSGEAEFVVFRSRGRVRALGRARRSLSSEAETGAEPWGRARRSFLWRPKPDLAAVSLTLSSGTAVGATQAALSSCQAGARIRIRCQAIFALNASAIRSVGVATWPRLLLGEDWASGEPKLCADGGYQLRLGVLGVPLIMVLDTFQSLLQIVKGI

SEQ ID NO: 79353 - protein, 332 aa, Zea mays
  Coding DNA Sequence Number=SeqID_35978
MSGKANYCCPARMQHSILCPRFRGKGGSEDLLVRFGAACARWCGVGGQADAAVGADVVAAGESFSAVEAVSAAYGSTSGSLALMSGSRPLSGDANESLPVAASVLGPWLLLQTSLASRPELVAPQALRCGGNPRPLFDEPKPEAAVLAWTEAELARKEDFFGRSLAGPSTGGTSAGVELPKPRAGPVSSKDSWLRLRGDRPSRLLGPDSWRRPWRRWPGRGADVVLRSGDPPIALPSEARSDFAEGGVDAEGAAAPPPSTSEPAGSVHLVESLGSVGLAAYVYSYSSVGFCYRYSREGTKNRFDRRVFEREDVFGPWNRLSERELLITEGDE

SEQ ID NO: 79354 - protein, 478 aa, Zea mays
  Coding DNA Sequence Number=SeqID_35979
  Subcellular localization annotation: CTP_CleavageSite=59; ConfidenceScore=5.02e-01
MHEGSAKTWLPFKGVTLLLKATLPTCVLSRRGLSLLQHAPRSSPYDTGAGPTRHASWPKAEEAKPPRAVRVTAQQLQALLHFRPDQRVKERTAMQAACNRTKGVHPFDFDASSMEAQAHTSCNRRAGYYVQETAPPLVPLPCLLDCGTSTTTRGNPAHDPTVPTRHIGHGSASRGRRRDGRYGQKWAGSNGGGKQAEAAVKSSAKLASPPGTDRRHVWQVKQATLRFRRNDRVKKGTGKGDTPKGILLREGNEPRAPLLIRGSKAGPSEGFNSRLRALRLRAHYWSEVRRLAPQKGSTAASGYSGSTPTTDQGFVGWPPKGSTAASDAERGMTLGSSASPDPRARPPSRPRTMNSASPDLGLGLGLGSERRRTPPHPTPGLELGLGSRRRRTPPRPTPGLGLSLGPGRRRTLPRPTLGLGLGLGLGRRRTPPRPTRGSDSTSTSEDRLDLDLGGASASPDPGLGPTTSQGGHHYPTPS

SEQ ID NO: 79355 - protein, 139 aa, Zea mays
  Coding DNA Sequence Number=SeqID_35980
MGMFIHVLSTPSKCLAFQDHIVHSPLGILKVCQRCGAHERWLMAEVKVMRARADGPGAVKGECWVLTDISEQPGDHPWWLTSGTITCTRTWWSGPCCRRGRGLAGHASDRGGRARGVVLTTGLVVWASKPPSATDGGFC

SEQ ID NO: 79356 - protein, 232 aa, Zea mays
  Coding DNA Sequence Number=SeqID_35981
MKLAKVKGKCALGPFLSILVIECQRKCFCVNLCKVVDKVQIMSKGKIELKMRWLSSAKVRAVWVHRTVRWCTGQCPVRQAGSSELAALGNSSATYGYNSPDCPVSQRSAGPTVGCAICARHVAEPTVGRGHRTVRCAPDSVRCANGSQAPTVGFARKGKKSAPDSVQCAPDYPVRQATEGKICLPGMLSTAPSCLGAIKGTPRRMEEDIKHPLSIPKHQDIDSAPLILCNSN

SEQ ID NO: 79357 - protein, 242 aa, Zea mays
  Coding DNA Sequence Number=SeqID_35982
  Gene Ontology: Mol. function=transferase activity, transferring glycosyl groups; Cellular component=cytoplasm; Biological process =metabolic process
  Homolog annotation: Hit_ID=A2Z0T6; Match level="QueryCoverage=87%, HitCoverage=53%, E-value=3e-81, Identity=71%"; Hit description =Putative uncharacterized protein
MGGKKIPSTTSCSPLPSTDSDHRGISDGHVLLLPYPGAQGHTNPLLQFGRRLAYHGLHPTLVTTRYVLSTTPPPGEPFRVANISDGFDDCGAAACPDLSEYWRQLQAIGSVTLAELIRSEASEGRPVRVLVYDPFLPWSRRVAQEAGVAAVAFLSQSCAVDVVYGEVLSGRLPLPVVNGKELFARGLLGVELGPDDVPPFVAKPDWCPLFLRASLQQFEGLEDADDVLVNSFHDIEPKVRSQ

SEQ ID NO: 79358 - protein, 211 aa, Zea mays
  Coding DNA Sequence Number=SeqID_35983
MQVACNRTMRAHPLGFDASSMEAQAHTSWADGRNSGQGFVYSRDAISPRPSPASGGNNSPRRIHASPEGLLKQRAHPRLARTPARAGFIVKQPWPNRLTNRPYRRRIQCEDRLTPYPDTRASVGKVEEAPPRPTLGLGLRRRSPPRPTLGLGLNLDLRRLRGNKTGVPSRLAPVTSNDGSPHASMTTVVLSPLRKQGDVGKVPAAPTAVLL

SEQ ID NO: 79359 - protein, 112 aa, Zea mays
  Coding DNA Sequence Number=SeqID_35984
MHAACDRTKGAHPFDFDASSMEAQAHTSCNQFVGCYVQETAPPLAPLPCLLDCGTSTAARGNPAHDPTVPTRHIGHGSVSRGRRRNGRYGTGKGDTPKGILLREGNGPRAPY

SEQ ID NO: 79360 - protein, 311 aa, Zea mays
  Coding DNA Sequence Number=SeqID_35985
MEVRCQTSFCQNEDGFPKLLRACTVRLGIRSQPEYDGREFIEHGTKKCVVIVYIGSSPHHVEWSVTAVGHRFKDTCQVVARKALRTLCQIYEEEVADTPLRFFPPFQRNRPVWMARMRALKGQQLLEDDPTVVYLTAYLLILDAQYDFLARHHRQMIARAEDAEKLNPLRIQEPASSNPVQPIRAEDPQILEGHPISIRGEKKTWELPEGAIVLEGIPVFPQAMSKQEHPESSQDPPPELFEPLTMKKIPAPSLEVKEEAASTPPAPPPSEELQEPVQLEEEFDPVLPSQWPPEEVINISSLLTHPGDVSD

SEQ ID NO: 79361 - protein, 47 aa, Zea mays
  Coding DNA Sequence Number=SeqID_35986
MAKESSYYKGGSKKKLNFNFNWGPDRFNRGPGQVQPGSREVQPVSRV

SEQ ID NO: 79362 - protein, 364 aa, Zea mays
  Coding DNA Sequence Number=SeqID_35987
  Gene Ontology: Mol. function=hydrolase activity; Cellular component =lipid particle; Biological process=proteolysis
  Homolog annotation: Hit_ID=A7NT12; Match level="QueryCoverage=87%, HitCoverage=92%, E-value=1e-134, Identity=69%"; Hit description =Chromosome chr18 scaffold_1, whole genome shotgun sequence
  Pfam annotation: Domain name=Abhydrolase_1; Domain location=131-341; Score=36.0; E_value=1.3e-07; Accession=PF00561.11; Description =alphabeta hydrolase fold
  Pfam annotation: Domain name=Thioesterase; Domain location=105-343; Score=-47.5; E_value=0.079; Accession=PF00975.11; Description =Thioesterase domain
  Pfam module annotation: Pfam domain module=Abhydrolase_1::Thioesterase ; Domain location=131-341::105-343
MAAEEMRRASASTATAEMPASPAPAQAGSRWARVWPRALRWIPTSTDRIIAAEKRLLTIVKTGYVQERVNIGSAPPGSKVRWFRSASDEPRFINTVTFDSKENAPTLVMVHGYGASQGFFFRNFDALASRFRVIAIDQLGWGGSSRPDFTCKSTEETEAWFIDSFEEWRKAKNLSNFILLGHSFGGYVAAKYALKSHMRLLAAANNGHLARGLGPWGPGLVQRYTSARFGTSSTGELLTDEESALMTDYMYHTLAAKASGELCLKYIFSFGAFARKPLLQCASDWKVPTTFIYGQQDWMNYQGAQQARKDMKVPCEIIRVPQGGHFVFIDNPSGFHSAVFYACRNLLSVNGEEGFTFPDGLISA

SEQ ID NO: 79363 - protein, 105 aa, Zea mays
  Coding DNA Sequence Number=SeqID_35988
MAGGHIHKDPVKLPIWISPRHILRYLSRLKILWKRMSGSELLNRSSGFSDAQRLKSPYLWHSSCKALPVPGEEIMWLSNLLVIKLPGTNSSWLSGSTIFLKGCSI

SEQ ID NO: 79364 - protein, 166 aa, Zea mays
  Coding DNA Sequence Number=SeqID_35989
MASANVGASLSGVGDHSSTNFIEGGGLKGPVQHQVLLPLLQKVRLPFRQDPQSCSAIIHRTVRCTPDSVRCSRNEATLNSPASGIRNGYSAIIHRTCPVYTGLSGVTAEQWLLRRQRSPAGALNARQSAQKSGTREVAHQTLYSACLVRHRTSRLAQQSELQRSEP

SEQ ID NO: 79365 - protein, 626 aa, Zea mays
  Coding DNA Sequence Number=SeqID_35990
  Gene Ontology: Mol. function=binding; Cellular component=nucleus; Biological process=mRNA modification
  Homolog annotation: Hit_ID=Q650U4; Match level="QueryCoverage=90%, HitCoverage=89%, E-value=1e-180, Identity=56%"; Hit description =Putative uncharacterized protein P0669G04.8
  Pfam annotation: Domain name=PPR; Domain location=130-164; Score =35.3; E_value=2.3e-07; Accession=PF01535.11; Description=PPR repeat
  Pfam annotation: Domain name=PPR; Domain location=200-234; Score =15.0; E_value=0.13; Accession=PF01535.11; Description=PPR repeat
  Pfam annotation: Domain name=PPR; Domain location=262-296; Score =27.4; E_value=5.1e-05; Accession=PF01535.11; Description=PPR repeat
  Pfam annotation: Domain name=PPR; Domain location=364-398; Score =39.0; E_value=1.6e-08; Accession=PF01535.11; Description=PPR repeat
  Pfam annotation: Domain name=PPR; Domain location=399-433; Score=7.2; E_value=1.1; Accession=PF01535.11; Description=PPR repeat
  Pfam annotation: Domain name=PPR; Domain location=435-469; Score=0.3; E_value=7.1; Accession=PF01535.11; Description=PPR repeat
  Pfam annotation: Domain name=PPR; Domain location=44-77; Score=13.1; E_value=0.22; Accession=PF01535.11; Description=PPR repeat
  Pfam annotation: Domain name=PPR; Domain location=505-539; Score =10.7; E_value=0.42; Accession=PF01535.11; Description=PPR repeat
  Pfam module annotation: Pfam domain module=PPR::PPR::PPR::PPR::PPR::PP R::PPR::PPR; Domain location=130-164::200-234::262-296::364-398::399 -433::435-469::44-77::505-539
  Subcellular localization annotation: CTP_CleavageSite=32; ConfidenceScore=5.06e-01
MAPGGGTSAAGLVAATSRIASLGRAGDAASARAMFDAMPRRDAVAWNAMLTAYVRAGQPRDALTLFSRAPAPDAFSLTAALSAAAALRSPVAGAQLHARLIRAGLRALLPSGQHARRHELFDQMPNRNNVAWNTLLMGYSRSGNANQCLLLFNKMRAEGMACDGATLCILADACTELAHPSAGSAIHKVAVQSGWSAMAEVSNSLISLYSKFSLLDDAVRIFESMEVRTIVSWNSLIDSYMKLGCVEKATSLFRRVPETNVISWTAMIGGLARNGCADEALALFIVMLAHEHIHPDDFTFGSVLHACATAASLASGRMVHCRAFRSGFAAYLYVANSLMDMYAKCGDVEGGTNVFGAIVNKDLVSWNTMLFGFAINGWANEALVVYDSMKSHEVCPDEVTFAGLLTACNHSGLLEHGESFFESMVSVHGIQPKPEHLSCILDMYARSGNITKAMEMLDLYSETIRAHNSDIREALLSACSLEHLNFRVARKAMEDMVATKSAGDVGYVMLSNLFCAAGQWNQAEQVRIAMAEHGIKKTPGCSWIEVQGAVKVFASAGTKDTTRVDLVDFPLLVHRTDPRYLLFSDGTLDLAFSDDPSATSARNEEWRTEEDNPIYDRLYRALADGD

SEQ ID NO: 79366 - protein, 69 aa, Zea mays
  Coding DNA Sequence Number=SeqID_35991
MARVACTLRGKRLDGGESVLSVRKRQTFAAFIQRWCRKKTRSEASGGKGPPLKTFVDVYREGFLPPKMM

SEQ ID NO: 79367 - protein, 230 aa, Zea mays
  Coding DNA Sequence Number=SeqID_35992
  Gene Ontology: Mol. function=transcription regulator activity; Cellular component=nucleus; Biological process=regulation of transcription
  Homolog annotation: Hit_ID=A2Z369; Match level="QueryCoverage=89%, HitCoverage=90%, E-value=2e-20, Identity=66%"; Hit description =Putative uncharacterized protein
MDDLLSPCSSFSPPSPPPFFSHAGNPVIEFASCEVPEQWLLDDVVLDKNEGRYDDVDDLWPVAGRSLSPDSELSEQPLPTQPVPLPPPQQQQQELTSVTAAPAQQQRPGGKRRGRKPGPPPGRRAAAARWVDPVAAAASCGADEAVEVRMLGPDVAAVRATSAAPHAPARLMSALRSLELHVQHACVTRVNGMTVQDVVVDVASPLQVQDDDHDGLRAALLQRMQDSAAT

SEQ ID NO: 79368 - protein, 48 aa, Zea mays
  Coding DNA Sequence Number=SeqID_35993
MEPCLIVVGILCTITGGKNLVPCSAIVLASWCAIQTVDLAGAIRSGHY

SEQ ID NO: 79369 - protein, 48 aa, Zea mays
  Coding DNA Sequence Number=SeqID_35994
MEPCLIVVGILCTITSGKNLVPCSAIVLASWCAIQTVDLAGAIRSGHY

SEQ ID NO: 79370 - protein, 78 aa, Zea mays
  Coding DNA Sequence Number=SeqID_35995
  Gene Ontology: Mol. function=cellulose synthase (UDP-forming) activity; Cellular component=membrane; Biological process=cellulose biosynthetic process
  Homolog annotation: Hit_ID=A2Y0X2; Match level="QueryCoverage=56%, HitCoverage=4%, E-value=8e-15, Identity=84%"; Hit description =Probable cellulose synthase A catalytic subunit 1 [UDP-forming]
MGMVAGSHNRNEFVMIRHDGDAPGPAKPTKSANGQVCQICGDSIGDYKDKDGVKGLCVVGAIDNCTSQLPTYGRSSPP

SEQ ID NO: 79371 - protein, 231 aa, Zea mays
  Coding DNA Sequence Number=SeqID_35996
  Subcellular localization annotation: CTP_CleavageSite=78; ConfidenceScore=5.54e-01
MSSRSLMHHVFPPSDPPDGGCPQSFRLVVGGTQLRGSWYLSAIVRLQGFSSVSPAAPFRRRSPETVTTSPWVGRSKPGCDLGPTLSFKDVHHPCWGGGRAEPELYLPRGFVGRPLLRRSRERALTGPAGGSDFDNAGLVDGGRRQPQRVGLVSLAPGAPSYRKAVAAPCAREDRPRYRALPGRRSCSGAVLPLHRYSASRGGRCPTHPGGSEWGSAGGLTAPVVGAEVEAA

SEQ ID NO: 79372 - protein, 425 aa, Zea mays
  Coding DNA Sequence Number=SeqID_35997
  Gene Ontology: Mol. function=transcription repressor activity; Biological process=regulation of nitrogen utilization
  Homolog annotation: Hit_ID=A2YLP5; Match level="QueryCoverage=53%, HitCoverage=71%, E-value=1e-103, Identity=79%"; Hit description =Putative uncharacterized protein
  Pfam annotation: Domain name=Epimerase; Domain location=6-191; Score=- 67.8; E_value=0.041; Accession=PF01370.12; Description=NAD dependent epimerasedehydratase family
  Pfam annotation: Domain name=NmrA; Domain location=6-168; Score= -44.9; E_value=8.6e-06; Accession=PF05368.4; Description=NmrA-like family
  Pfam annotation: Domain name=Semialdhyde_dh; Domain location=5-91; Score=-25.3; E_value=0.072; Accession=PF01118.15; Description =Semialdehyde dehydrogenase, NAD binding domain
  Pfam module annotation: Pfam domain module=Epimerase::NmrA::Semialdhyd e_dh; Domain location=6-191::6-168::5-91
MEKSRVLVVGGTGYIGRRLVRASLAQGHPTLVLLRAEIGLDIDKFQMLLSFKAQGARLVEASLEDHAGLLAAVAHANVVVSAMSGAHIRSHNSPKGDTGRVRTLGGAWGSTQLRGQQGGWGRSTTPSSWEYIRSLEDPRVHHQELADALARVAFQERVGVKGDVRQVDFQKDIVRAAEGLVSIGNKHIEVGTKFSEDCYRYGSENNASDEALRKAASLYGGALRNIEKEYEDFNRILSSQTIDPLRAMAIGGPLEDARGLAQRYSRMRHEAEILSTEIARRKARVREAPIAEHTTKLQQSEARMIEHKASMAVLGKEAAAALAAVESQQQRVTLQRLVGAMSSEKQRRESAPPIISSHKRAEKAQYFLAEVMHNFNGTTEKELSLIVGDYVVVRQETGQNGRHQLYRKTHNDSEILEVGRAVQQA

SEQ ID NO: 79373 - protein, 122 aa, Zea mays
  Coding DNA Sequence Number=SeqID_35998
MGKSKKGSGSSPRSGDKRKREPTPPSEDFGNSEYSKEEFSSESEGSPAPVSPPVSSDGSDDSQGIAAEDSSDSSEEDSGGDGGDGGDDGGDGDGGGDSGKGSDGGSKGDHGGSSKGSNKTSG

SEQ ID NO: 79374 - protein, 65 aa, Zea mays
  Coding DNA Sequence Number=SeqID_35999
  Subcellular localization annotation: CTP_CleavageSite=56; ConfidenceScore=5.22e-01
MEYNATLPLASRLRLRRNKTGVTSNYSSNSGILPMSPPNVHVFVVSFFGNEQLKTVQEAGFEPTP

SEQ ID NO: 79375 - protein, 240 aa, Zea mays
  Coding DNA Sequence Number=SeqID_36000
  Homolog annotation: Hit_ID=Q6J9V9; Match level="QueryCoverage=25%, HitCoverage=31%, E-value=3e-07, Identity=43%"; Hit description =Putative uncharacterized protein
  Subcellular localization annotation: CTP_CleavageSite=44; ConfidenceScore=5.69e-01
MAVADGRKQQSSRQQAHVPSWGSRRTLSHGVKTTRPCSVPRTARARTTAAPRTTRPVALTPRQGRWHHWQAKQATLHLRHDDRVKKGTGKGDTPKRILLHEGSGPRAPLLIRGSMAGPSEGFNSRLRALGLRAHYWSEVRRPAPRKGSMATSGHSGSAPTTDQGFVGWPPKGSTAASEHAERGMTLGSGAALANSPPAKPLTASTYQPENLGLDYAPGLRPGLLSGTIIRGTPKTPNLSW

SEQ ID NO: 79376 - protein, 202 aa, Zea mays
  Coding DNA Sequence Number=SeqID_36001
  Gene Ontology: Mol. function=xylulokinase activity; Cellular component=integral to membrane; Biological process=carbohydrate metabolic process
  Homolog annotation: Hit_ID=P09099; Match level="QueryCoverage=91%, HitCoverage=37%, E-value=4e-83, Identity=84%"; Hit description =Xylulose kinase
  Pfam annotation: Domain name=FGGY_C; Domain location=1-183; Score =213.7; E_value=4.3e-61; Accession=PF02782.7; Description=FGGY family of carbohydrate kinases, C-terminal domain
MSVMLSAASCLDWAAKLTGLSNVPALIAAAQQADESAEPVWFLPYLSGERTPHNNPQAKGVFFGLTHQHGPNELARAVLEGVGYALADGMDVVHACGIKPQSVTLIGGGARSEYWRQMLADISGQQLDYRTGGDVGPALGAARLAQIAANPEKSLIELLPQLPTIHCIQVFHFPTTTRALAFNSRHTKEIKSSPNSTPRHRD

SEQ ID NO: 79377 - protein, 176 aa, Zea mays
  Coding DNA Sequence Number=SeqID_36002
MTIDDLFELFVEHLVNITLLASSSPDSYDFLMTYGTMTRSSLERAGEVWLSRTTAAGEIRAGKTTRAGKLRSGELRTPTSTRAAAGTEQRLSWATARDHGQAQIGAMESSRTRAGEQRRWPCAGSSTASMRTSRGTPGVHGREGFTMAEQTGSAASREASRARLDAGERARRDELD

SEQ ID NO: 79378 - protein, 287 aa, Zea mays
  Coding DNA Sequence Number=SeqID_36003
MARDPLRGLYKVPLASENPLQFIGRSSTGFLADSHRSKINQGPPRTDLSPTALAPFGAAPSRIHGPAIICPNAGVGSKHGSLTAAAPWGASGDGSPETRDPASCKGSGRGKRRRWDNLRSGRLPEAKQQRGRPWSEATLVEDLNSRKEFRATRSPAASNLASTTPGSAPQRHNAAESTANRGRACVDVSLPHSGVYPSVCGVTGVFTIGRKQVREGEMSSILGRGKMTARPAGVEWMPRRWLQPPARENLHSARGNFAQIRAQVRRGPPNSARFGTSAGKWGSSLLC

SEQ ID NO: 79379 - protein, 262 aa, Zea mays
  Coding DNA Sequence Number=SeqID_36004
  Gene Ontology: Mol. function=metal ion binding; Cellular component =integral to membrane; Biological process=regulation of multicellular organism growth
  Homolog annotation: Hit_ID=Q67WP3; Match level="QueryCoverage=36%, HitCoverage=14%, E-value=6e-44, Identity=86%"; Hit description =Ankyrin repeat-containing protein-like
  Pfam annotation: Domain name=Ank; Domain location=183-215; Score =37.3; E_value=5.5e-08; Accession=PF00023.21; Description=Ankyrin repeat
  Pfam annotation: Domain name=Ank; Domain location=216-249; Score =12.4; E_value=0.52; Accession=PF00023.21; Description=Ankyrin repeat
  Pfam module annotation: Pfam domain module=Ank::Ank; Domain location =183-215::216-249
MGPAAAGPDVGQELRICFLDQLLLVLLELELFVSRQGFPSWLYDIAGETSELSLELAIEDRSDRSICDLPSRVAKKCVGADPGANHCVENRRRCSLHRRGRSAAKDQTIRDLAQGSSSLPDGPDGPCLEAGRPYSYPAKLLDSCVKIDFSFYGRGILVCEHVQLRAECFAVVHGADINAVDHTGQTALHWSAVRGHIQVAELLLKEGAKVDATDLYGYQATHVAAQYGQTAFIYHIVAKWNADPDIPDNDGRSPLHWLLLTD

SEQ ID NO: 79380 - protein, 336 aa, Zea mays
  Coding DNA Sequence Number=SeqID_36005
  Gene Ontology: Mol. function=metal ion binding; Cellular component =integral to membrane; Biological process=positive regulation of I -kappaB kinase/NF-kappaB cascade
  Homolog annotation: Hit_ID=Q67WP3; Match level="QueryCoverage=88%, HitCoverage=45%, E-value=1e-142, Identity=81%"; Hit description =Ankyrin repeat-containing protein-like
  Pfam annotation: Domain name=zf-DHHC; Domain location=69-133; Score =82.2; E_value=1.6e-21; Accession=PF01529.11; Description=DHHC zinc finger domain
MVRVVPPSQQVTCSKQSLRIFAFASGRLALVIPSPDPVTKDPGYININARGSQNQRDDEPLLKMELENPALLSGNWSQLCITCKIVRPVRSKHCSTCDRCVEQFDHHCPWVSNCIGKKNKWEFFMFLTLEVFAMIITGSAAIIRIVRDPNSPSSFGAWIHYSAFQHPGVVSFLALDCFLFFGVAVLTVVQASQIARNITTNEMANSMRYAYLRGPGGRFRNPYDHGIRKNCSDFLLNGYNEDTERLEQTLPTDEEMGMIQMTSAVSQQNGDNHLHHGNGTDHSCAVSQANSKPHSQVGSSQCCDHSKRTDRTPLGLGLGLGRNSASRQYVRSLIPL

SEQ ID NO: 79381 - protein, 528 aa, Zea mays
  Coding DNA Sequence Number=SeqID_36006
  Gene Ontology: Mol. function=sodium ion binding; Cellular component =integral to membrane; Biological process=amino acid transport
  Homolog annotation: Hit_ID=Q67WP1; Match level="QueryCoverage=91%, HitCoverage=99%, E-value=0.0, Identity=74%"; Hit description=Amino acid transporter-like protein
  Pfam annotation: Domain name=Aa_trans; Domain location=73-480; Score =137.8; E_value=3e-38; Accession=PF01490.9; Description=Transmembrane amino acid transporter protein
  Pfam annotation: Domain name=DUF975; Domain location=177-372; Score= -103.0; E_value=0.062; Accession=PF06161.2; Description=Protein of unknown function (DUF975)
  Pfam module annotation: Pfam domain module=Aa_trans::DUF975; Domain location=73-480::177-372
MNTNYSALPLTSPSIELQPNGAKSSAAANGVLNGHAKISRQDSFLGEVEDDGGGAGEHDELPLIGDGPAGPPEGSDVTAAVFNLATSIIGAGIMALPATMKVLGVAAGLVSILVMGVLSEITVELLVRFSAHCRALSYGEVVHRAMGRPASIVAQMCVIINNAGVLVVYLIIIGDVMSGSLKHIGVMDQLVGHGEWDNRKLLILVVLVIFLAPLCALEKIDSLSMSSAASVALAVVFVVVSSIIALIKIAEGKISMPRMGPDFSSRAAMLDLLVVIPIMTNAFICHFNVQPIYNELKEKTPQNMYKVGRISTVLCVAVYALTALSGYLLFGEDTESDVLTNFDKDLGIRFSSLLNYIVRIGYVIHLVLVFPVVHFSLRQTVEALIFGELATPSRKRTFTLTVVLLALIYLGSTMIPNIWMAFKFTGATTGLALGFMFPALVALRLDKEGSHLGHGERLLALGLLGLSILVSVIGVVGNVYTLKKMVSPKLQTVYIALVKIILKMAYVRVYVQGSRKSQILKYEIENRN

SEQ ID NO: 79382 - protein, 840 aa, Zea mays
  Coding DNA Sequence Number=SeqID_36007
  Gene Ontology: Mol. function=peptidyl-prolyl cis-trans isomerase activity; Cellular component=small subunit processome; Biological process=rRNA processing
  Homolog annotation: Hit_ID=A2YFJ7; Match level="QueryCoverage=100%, HitCoverage=100%, E-value=0.0, Identity=67%"; Hit description =Putative uncharacterized protein
  Pfam annotation: Domain name=Utp21; Domain location=604-837; Score =260.0; E_value=5e-75; Accession=PF04192.3; Description=Utp21 specific WD40 associated putative domain
  Pfam annotation: Domain name=WD40; Domain location=128-168; Score =5.0; E_value=7.6; Accession=PF00400.23; Description=WD domain, G -beta repeat
  Pfam annotation: Domain name=WD40; Domain location=172-210; Score =25.3; E_value=0.00022; Accession=PF00400.23; Description=WD domain, G-beta repeat
  Pfam annotation: Domain name=WD40; Domain location=245-292; Score =5.8; E_value=6.2; Accession=PF00400.23; Description=WD domain, G -beta repeat
  Pfam annotation: Domain name=WD40; Domain location=414-452; Score =15.9; E_value=0.16; Accession=PF00400.23; Description=WD domain, G -beta repeat
  Pfam annotation: Domain name=WD40; Domain location=456-493; Score =14.3; E_value=0.48; Accession=PF00400.23; Description=WD domain, G -beta repeat
  Pfam annotation: Domain name=WD40; Domain location=497-535; Score =50.8; E_value=4.9e-12; Accession=PF00400.23; Description=WD domain, G-beta repeat
  Pfam annotation: Domain name=WD40; Domain location=84-120; Score=0.3; E_value=30; Accession=PF00400.23; Description=WD domain, G-beta repeat
  Pfam module annotation: Pfam domain module=Utp21::WD40::WD40::WD40::WD 40::WD40::WD40::WD40; Domain location=604-837::128-168::172-210::245 -292::414-452::456-493::497-535::84-120
MGIFEPFRAIGYITASGVPFSVQRLSTETFVTVSVGKAFQVYNCAKLNLVLAGPQLPKKIRAIASYKDYTFAAYGSDIAVFKRTDQVATWSRHEEKVNMLYLFGEYVLSADAKGNVFMWAFRGAEPNTEPVGSISLGDKFTPTCIMHPDTYLNKVIVGSEEGSLQLWNISTKKKLYDFNGWNSPVRCCVSSPALDVVAVGCSDGSVHVHNIHGKSKKGGPGAAVEPTVCNRKVPGSSPSLCILCGPLCLTLSSSFFDVCNISIRDENGRKRFYGNGKCILSAGQDRAFRLFSVIQDQQSRELSQRHVAKRAKKLRVKEEEIKLKPVVTFDCAEIRARDWCNVVTCHMDTPQAYVWRLQNFVIGEHVLTPSSSTVTPIKACVISACGNFTILGTEGGWIEKFNLQSGFSRGSYIDTSLAMQCAHDGEVVGLACDARNGFLISAGYQGDIKAWDFKTCKLKSRLDVGKSVTKIAFHRPNGLLATVAGDMVLILFDTVSMKMVRRFEGHTDRITDLCFSEDGKWLISSSMDGTLRIWDISLARQIDAMHVDVSITSISMSPNMDVLATTHVDQNGVYLWVNQSLFSVSTNTENYASGKHVRNVCLPAVSSTERSEEEQVQNLGESYKSSIKPFVITDHQIPNLVTLSLLPKSQWQSLTNLDIIKVRNKPIEPPKKPEKAPFFLPSVPSLSGEILFEPPASSKDTDISTTKNTNHKMSELSSHFSQQLQFCGETKNYSAFTDYLKGLSPSSLDMELRMLQILDDEESEDLEQRPELQSISSLLDYFIHELSFRNNFEFVQAVLKLFLKSKVKKLLEVQSLVWQKIDKIFQGARCMVTFLSNSQF

SEQ ID NO: 79383 - protein, 158 aa, Zea mays
  Coding DNA Sequence Number=SeqID_36008
  Homolog annotation: Hit_ID=Q5SMR4; Match level="QueryCoverage=26%, HitCoverage=9%, E-value=1e-07, Identity=55%"; Hit description=ALM beta-like
MGGGATAWPLAANRGGSEVVWSRVRGVERNKRINIVFSNVYYTSHPLRFRIAVRATILHISGLSEEIGTLIYARVVKTNNTMNPDVSCMDAENGYMFDTSRRVTNVIRSDILNFCAVAVALHDLWMFYTYNYHVYTLKPRVDIEGSPFAERLEVEATY

SEQ ID NO: 79384 - protein, 82 aa, Zea mays
  Coding DNA Sequence Number=SeqID_36009
MPLREICANGNGGSSEMDPRASSCRSEYRRGLVVGGALGIACHGNVAAADPPLAAALLLCFPITGMVYLNQIAGSSGLRSTS

SEQ ID NO: 79385 - protein, 72 aa, Zea mays
  Coding DNA Sequence Number=SeqID_36010
MATIGELGTTNRVLIPTAKPILAADSRAAEAVWELIGQKASARGRVTGEWGKPVSGTGEEQRAHHGVGLCVM

SEQ ID NO: 79386 - protein, 108 aa, Zea mays
  Coding DNA Sequence Number=SeqID_36011
  Subcellular localization annotation: CTP_CleavageSite=52; ConfidenceScore=5.78e-01
MTPTHASSSLLRAPPVPRVHPSPHFTQLRPFSRSAHAASRRRRPVPAFPAIRLAGDRSKPPKLRPETTSSSWFLSVLPKIPLSNNLVKARGEVGNMDDFEEFLEYDEF

SEQ ID NO: 79387 - protein, 43 aa, Zea mays
  Coding DNA Sequence Number=SeqID_36012
MENADEPSPGVLERESQIVPTLHDAEKYLHFGRSDFEVRIFFR

SEQ ID NO: 79388 - protein, 238 aa, Zea mays
  Coding DNA Sequence Number=SeqID_36013
  Subcellular localization annotation: CTP_CleavageSite=33; ConfidenceScore=5.43e-01
VPGRRSHHARPPGTTLAAMPSRAGLRVPRRAPCAASAGCEAAQGMGSRTAGRARLHERLSRQGGRRKGKGRREDGCELTTVTNGDSGEASWMPATTRTLGSTVVRAVRRGGRGSGQDETMREGFQAGWEGAVRREIVVAVAAARVVVKQDEWAAALGDVVAALASTRGGEGELGRGERHAGWAAVARDGPGGTTWPGLSETKVTELRRSALLLLFEVFVLRTFYRSGADLLWHYTEGV

SEQ ID NO: 79389 - protein, 164 aa, Zea mays
  Coding DNA Sequence Number=SeqID_36014
  Subcellular localization annotation: CTP_CleavageSite=59; ConfidenceScore=5.24e-01
MRSFLENSPLSGPFGPFRRTVRDTKPLMWRGGPSGLRGRIVRTKGADRPQLVERRQRLESGSAWGVTRRGVMQITSGVKRASEKFSEARDAMKAAEEVSKAAEDEVHKLSLACNGTIAEQALLGQVQRVVLEGAYHGSSMALGYMVSHFDEIDAAVIIEGYAAG

SEQ ID NO: 79390 - protein, 126 aa, Zea mays
  Coding DNA Sequence Number=SeqID_36015
MTSVHGLGVSPNTQWHPDVKTAARGGRHELGWLGRDALLESFLSAVGAPSQRVQRSGVSRMGKKMGAIDRSSVEAEIDKDWVKPTKLVKSEDLSKAEAAKPSSSESDEEQSESHSFPRCASPFAFL

SEQ ID NO: 79391 - protein, 114 aa, Zea mays
  Coding DNA Sequence Number=SeqID_36016
  Pfam annotation: Domain name=zf-CCHC; Domain location=43-60; Score =27.9; E_value=3.8e-05; Accession=PF00098.14; Description=Zinc knuckle
MKFLGRNSRLPSEDTTFPAGILGLQRHVPVREQQQQFHQGNGNKCFTCGNVGHYAKNCPRNQQRQMPTPNQDRERKQKVQVRQGNLNFTTLEELPEGAPIMTGIVGYLFSNTMN

SEQ ID NO: 79392 - protein, 87 aa, Zea mays
  Coding DNA Sequence Number=SeqID_36017
MRNRARPSPLLLLLLSCRSSIPLDRPTRWQGGRPSHTINHILKRTCKNYATTREILDGRLGSWLLIFLVDSSLLRNEHVLSVSEVAI

SEQ ID NO: 79393 - protein, 155 aa, Zea mays
  Coding DNA Sequence Number=SeqID_36018
MVMHPLGLFPAEKRDDPMWCSRALQSDAMAHLANLAQTTKLTLDSREDFVVDLSSELVEKDLQQELEEANDHLDMHHLEMEANEARSEGEEAPKELGPASWYQCDCLRDAPFAHIQCRFHYSARKCRGQNKQVPSPPPLAPTVQELMAQQNEILR

SEQ ID NO: 79394 - protein, 118 aa, Zea mays
  Coding DNA Sequence Number=SeqID_36019
MAGGDEADYEGPPAGVTRREQGTLLRFLLPIPISEFGCYTTEATRPAEKTHWTSWKRLGTWPYYTRHGISSPCDATTPEGFGIETSRWATWCFGYDKTPEGATSSRLPRKGRSSSPRF

SEQ ID NO: 79395 - protein, 82 aa, Zea mays
  Coding DNA Sequence Number=SeqID_36020
MKLENETRHSLYPKMRSWRWEKLLMNESSGKGGTLADVIAGPFNGPQTLRFQTSTNTSLSRTREVGWLSIQPLSGPLGQLKM

SEQ ID NO: 79396 - protein, 570 aa, Zea mays
  Coding DNA Sequence Number=SeqID_36021
MDGGDHPCGGKPSISQLLQGLHKGLEILLSVVRGPIAPVAAGGGHHSLRKRREPPIVIPKPPTCTAMQTLLSPVVKAKGSTEKRWVHRSQWGIAHIKRLAGTPNPRSWKETKLITYPDGGDGAAPLGGAIHSGCGSPERGRSKPSATRASRSSTVTVEKGHGSRGGTTVTRSAITKRRRWQRSGQGARFSFSGYSLRLRKPKREARSRVKNHHRSLFRIYKGPGETRSTLRPNPPRNSKLEGETPVPRTARATAAPRTTRPVALALRQGWRHLWQAKRATLHLRHDDRVKKGTKKGDTPKGILLCEGSGPRALLLIRGSKAGPSEGFNSRLRALGLRAHYWGSKAGPPKGSTAASDHAKRGMTLGMSDTWPRLGLRSRGFTEKQPWPDRLTNRPYRRSIQCKDHLTPYPDARSSVDKAEENSAAYLAPTAVPPARVRLTAAKSSLGRHRKLRLARPQGSDSTPTLEDGLRLARPQGSDSTSASDDGLRLARPQGSDSASTSDDGLRLARPQGSDSASTSKESPPRPTSGPDRPRRRGPPTEARRRQQGPDSSDSCAPTGLKRSSDGHDIT

SEQ ID NO: 79397 - protein, 77 aa, Zea mays
  Coding DNA Sequence Number=SeqID_36022
MCSWTKSLVPMVDRLRPRHETVTTKVVVILLVSGSLRLIRQLMDVAKASCIWFQSLAPHGSYKDPHFNDSFGSKLMK

SEQ ID NO: 79398 - protein, 185 aa, Zea mays
  Coding DNA Sequence Number=SeqID_36023
MSTIPTDPPLHDQVRATREYTTPLRRSVARRVEAILSRVRWRTTSIHKIYARLSIFVNHILILHRSIYKVPDGAQARPRSGEQLRRPIEAKTGANLRLSPNSSSYERFPQLNYTIGGLGSSGHGGRKHNGNMIVFPATHGGLARFNVSAPRTVAGEFQGDARRSEVTKVIGFATTCLPPWRAHRP

SEQ ID NO: 79399 - protein, 347 aa, Zea mays
  Coding DNA Sequence Number=SeqID_36024
  Homolog annotation: Hit_ID=A2YGC2; Match level="QueryCoverage=37%, HitCoverage=56%, E-value=9e-10, Identity=34%"; Hit description =Putative uncharacterized protein
MAAGNTLTERQMGTDVNLVIEMYESVTEVNSVTRKSSLMITFLLMACLRHTARKSVIPFLPSRLAERPLRRPQRVESVRSCSPVLPLEAPTAPPQSAPAAGVSVGGDPNDRGGDNNSSFSTDLSAEQEPEGWVARPITRDAARGCHFQDALDTLLRQTLDRRTWSIEYRCVVFHHSRGVYPDRWEATFLVRRPENSLRGAEVCLEHYSISERDSAEAAMQDVARRALSHYCSVFGGVADGLNLKYYPRRPSGSTGGVVISPIGEDNPRLSSTVNLAAVLNTELDHALDELSRARAEIAQLRAERVEHRHLEDGSPARVGTQHPYRSPRRGHQAYGNHNYRTRINLES

SEQ ID NO: 79400 - protein, 58 aa, Zea mays
  Coding DNA Sequence Number=SeqID_36025
MKRNPKDASTAGLPFMALASTPTLTLNFPDSMPYCPPEPILFMPPLFRHFIWQQTNAS

SEQ ID NO: 79401 - protein, 174 aa, Zea mays
  Coding DNA Sequence Number=SeqID_36026
MVRAETTAQLMLRRAIDGCAVVDSTHKLHGWFRASSVQAPDPIPTLDDESGPRTRCGDDLLSLSLRVLLAISALLFSIYGGESKGEQSRARARGCGAYTRGVAGGQSRDPRPLRGGRSLLAKREMRRGDKPPSETGRQHAEGRLVHDILHKCPEEEGEVAPRPQDPCGSFGLGG

SEQ ID NO: 79402 - protein, 127 aa, Zea mays
  Coding DNA Sequence Number=SeqID_36027
  Subcellular localization annotation: CTP_CleavageSite=77; ConfidenceScore=5.21e-01
MARAMASGGVSLGYIWVKNEPKACFALSRALPTLPAAARDPRPRSRPSSSPKTAPSLPELRPEPRPYRAISPLPVARMAHRSSSGPPEAFSSPFSPLCPWIQGPFPAIEFAVAPSSSLPNYGDPGPP

SEQ ID NO: 79403 - protein, 250 aa, Zea mays
  Coding DNA Sequence Number=SeqID_36028
MEPSGCRQEEQARVGSSSRGVSQPEVGNSVVTGVEREEQGAKNRRGIQKEKKAEAKLTHDKAYGQLKGPRLAGQQSLRSLNGDISCATKPPRLRPNQGGIVQLNGSESFTRGQRRHVREEFENGSPDCSVYAQLWATEVWRGRFCFSGEAMPRLKLWKALPIHGEAVQWLGRGLGLSGRASHSGRARAVMADGGELAEVGVFARGVRQSEEQTVAHPIVFLGYFGATLIFGLYGFELWKTGNTSELGKGF

SEQ ID NO: 79404 - protein, 354 aa, Zea mays
  Coding DNA Sequence Number=SeqID_36029
  Gene Ontology: Mol. function=nutrient reservoir activity; Cellular component=protein body; Biological process=protein oligomerization
  Homolog annotation: Hit_ID=Q6Y4Q3; Match level="QueryCoverage=100%, HitCoverage=100%, E-value=0.0, Identity=91%"; Hit description =Legumin-like protein
  Pfam annotation: Domain name=Cupin_1; Domain location=17-155; Score =18.0; E_value=1.4e-05; Accession=PF00190.13; Description=Cupin
  Pfam annotation: Domain name=Cupin_1; Domain location=188-337; Score =74.5; E_value=3.4e-19; Accession=PF00190.13; Description=Cupin
  Pfam module annotation: Pfam domain module=Cupin_1::Cupin_1; Domain location=17-155::188-337
MVHRTSIADVHVMCMDLSPKKPNKASASDGGAYYDWSPADLPMLGVASIGAAKLCLTAGGKGIFGVVLPEATKEKVISVKEGDALALPFGVVTWWHNNADAAISDLVVLFLGDTSTGHKPGQFTNFQLTGSTGIFTGFSTEFVARAWDLTQDDAAKLVSTQPGSGIVRVKDGHKMPEARDEDRQGLVLNCLEAPLDVDIKNGGRVVVLNTQNLPLVKEVGLGADLVRIDAHSMCSPGFSCDSAYQVTYIVRGSGRVQVVGIDGTRVLETRAEGGCLFIVPRFFVVSKIADETGMEWFSIITTPNPIFSHLAGRTSVWKAISPAVLQSSFNTTPEMEKLFRSKRLDSEIFFAPSN

SEQ ID NO: 79405 - protein, 174 aa, Zea mays
  Coding DNA Sequence Number=SeqID_36030
MEDLRPANIEAPLSQGKESGRHSEMTEGMDVEKNIEDDKGYIDNPSNDEDDLNENEDDLLCSQDLEEFAKDEDLVLSTLQEKENMNLVELQTEDASKDIGDKKGVTMEGDHVEGIRRSSRLESNDEMKIAEKATTRAMAKDAFITKSGAGRSMESIDLVINGGYRKMKWMNQDR

SEQ ID NO: 79406 - protein, 70 aa, Zea mays
  Coding DNA Sequence Number=SeqID_36031
MGPAPAGRVEATGPDGANRTVRAPAAARVLCERESLETWKTVHAKMIFMLLSISYVRFQERTGNFEQHAH

SEQ ID NO: 79407 - protein, 132 aa, Zea mays
  Coding DNA Sequence Number=SeqID_36032
  Gene Ontology: Cellular component=integral to membrane
  Homolog annotation: Hit_ID=Q2QLQ4; Match level="QueryCoverage=82%, HitCoverage=78%, E-value=1e-30, Identity=56%"; Hit description=Erg28 like protein, expressed
  Pfam annotation: Domain name=Erg28; Domain location=1-110; Score =97.7; E_value=3.6e-26; Accession=PF03694.4; Description=Erg28 like protein
MPALGCWLMAVGTFRLAFTWSCFFGSGSLCSATYSEIQVIGVHGRTVAVWTLLSCTLCFLCAFNLTSKPLYAATFLSFVYAFGYLSTECMVYHTMSAASLVPFTFIAGTVDFLDDRVDDDIATANITNQADS

SEQ ID NO: 79408 - protein, 120 aa, Zea mays
  Coding DNA Sequence Number=SeqID_36033
MADGVGGGGQPGSSGAAGGQGRVALGAGGLRGGGGGGGGSERAAREKMREIERREKESGCGVKSFISGCQGLTAENKLLFFAAVSVAAENKPGYCFSALAHKLNESVKIINEPSRANSLA

SEQ ID NO: 79409 - protein, 96 aa, Zea mays
  Coding DNA Sequence Number=SeqID_36034
MELRSRGGSSSHAGCGSSRSRRSVSSMEDTMREHQERFREELRQQQMTFLQQQSEYMAAYNAQAQQAMNNPNMLHDFVNEFFASEGSGHNSNNPDM

SEQ ID NO: 79410 - protein, 117 aa, Zea mays
  Coding DNA Sequence Number=SeqID_36035
MDLCRSYLGLRGSGSVERMEEEDDDGDELRFLLPATLDEVGGRRSRLPMATLHRRAGGTSLGTWIAVGHASSVASVVTSTPPDPPPHVRFSPTCLDASGEARRIEGSAPGDAVASAG

SEQ ID NO: 79411 - protein, 180 aa, Zea mays
  Coding DNA Sequence Number=SeqID_36036
  Gene Ontology: Cellular component=integral to membrane
  Homolog annotation: Hit_ID=O80594; Match level="QueryCoverage=46%, HitCoverage=65%, E-value=5e-24, Identity=63%"; Hit description =Ergosterol biosynthetic protein 28
  Pfam annotation: Domain name=Erg28; Domain location=62-154; Score =66.2; E_value=1.1e-16; Accession=PF03694.4; Description=Erg28 like protein
DEGKPTQVDVEAADGLMELVTWLAALREGPRARSPLLLGRLVAPAEHPSLSMSGPSKKQRGMPALGCWLMAVGTFRLAFTWSCFFGSGSLCSATYSEIQVIGVHGRTVAVWTLLSCTLCFLCAFNLTSKPLYAATFLSFVYAFGHIHGLDADSMELGWSRPPSSSWVYCFQAAMTSQASE

SEQ ID NO: 79412 - protein, 131 aa, Zea mays
  Coding DNA Sequence Number=SeqID_36037
  Subcellular localization annotation: CTP_CleavageSite=51; ConfidenceScore=5.04e-01
MVLASVATTSFAILLLFSLPLMPPPSRHPILDRQGVGEGASSPYSSDTSPDTDSRSGYCTSTRTFHIMRAPSFSPSSDVLFVFPAFALFFHPNLLPPPTVAAASRLTLVDAGTEQVGHAPGLSPCVPSRRT

SEQ ID NO: 79413 - protein, 294 aa, Zea mays
  Coding DNA Sequence Number=SeqID_36038
  Gene Ontology: Mol. function=hydrolase activity; Cellular component =mitochondrion; Biological process=metabolic process
  Homolog annotation: Hit_ID=Q2QUG4; Match level="QueryCoverage=94%, HitCoverage=60%, E-value=3e-87, Identity=50%"; Hit description=3 -hydroxyisobutyryl-coenzyme A hydrolase, putative, expressed
  Pfam annotation: Domain name=ECH; Domain location=26-195; Score=27.1; E_value=3.4e-09; Accession=PF00378.11; Description=Enoyl-CoA hydrataseisomerase family
MDDVGGAAAGGGDSKQVLVEADGNTRTLILNRPNQLNVLSSAMIKGLLNCFTAFVKDDGVKLLIMKEVVCRSYVSHCIEGSGRAFCAGGDVVAGVQSINNGTHPASKKNAILVSLLTGIVMGGGAGVSLHGKFRVATNNTVFAMPETSLGLFPDVGASYFLARLPGFYGEYVALVGARLDGAEMLACGLATHFVPSNRMLLLEESLKKVDTSNSFVEEVASNSASKWVAQTIKYLKKASPTSLKITLRSWMPPRLEQVHDDAVEEYFSRVDDPEWEDLDLPVMYSNGRIMESKL

SEQ ID NO: 79414 - protein, 306 aa, Zea mays
  Coding DNA Sequence Number=SeqID_36039
  Gene Ontology: Mol. function=1,3-beta-glucan synthase activity; Cellular component=1,3-beta-glucan synthase complex; Biological process=1,3-beta-glucan biosynthetic process
  Homolog annotation: Hit_ID=Q8W0J2; Match level="QueryCoverage=66%, HitCoverage=12%, E-value=1e-91, Identity=76%"; Hit description=1,3 -beta-glucan synthase component-like
MAKTMPLCESLSGLVSDEYGEEAPSPTPFLSRMGWRGGGGMRGREKRSRMVNEVVVTEARTIIIVRSIVHSPIPPTGPADIVLPSPTKSPSPKLPLSAPLDIHAASAEHPSLRFPEVRAATAVLQAVGGLRPPPFSPWRADQGLMDWLDAFFGFQRDNIRNKREHLMRLSSADFSDTLEPCIARQIRKKLLRNYTFWCGFLGRRPSVYVLEGDPRADLLYTGLHLLVWGEAANLRFTPECLCYIYHHMATELHRILEGFVDATTGRPANPAVHDENAFLVRVVMPICDVIHAETEFSRDGKAPHAA

SEQ ID NO: 79415 - protein, 112 aa, Zea mays
  Coding DNA Sequence Number=SeqID_36040
MDWSWLWLILLLIMWIIILLKNKGYNQIHFNRQKCFKKSTANSMYFKLDYLELLESGSNARRLKELYPQALAFLPQMGNQVMVIGWESVEDDLGVWDCTTKAKSFDCYIRSM

SEQ ID NO: 79416 - protein, 437 aa, Zea mays
  Coding DNA Sequence Number=SeqID_36041
  Gene Ontology: Mol. function=aspartic-type endopeptidase activity; Biological process=DNA integration
  Homolog annotation: Hit_ID=Q33BC8; Match level="QueryCoverage=35%, HitCoverage=9%, E-value=1e-08, Identity=31%"; Hit description =Retrotransposon protein, putative, Ty1-copia subclass
  Pfam annotation: Domain name=zf-CCHC; Domain location=163-180; Score =27.0; E_value=7e-05; Accession=PF00098.14; Description=Zinc knuckle
MAHRTVRRLGGVGSSVITLEILLATRLKIEVNGLGLTQISQPDVVRKILSVLPIDKYGHIVTVLHQMDLSVATPTHCHMHINDKDESSSKRKDLALKANQENKGKAKVQIEEESSSDDDLDANIALMVRKTTKMLKKLNREGIKFDSRKKKFFSSKRKPISEMDCYNCGELGHLAHQCNKPKKNKFKGKKEDGSDDEKKEKRFFNRKDGKHKRFHKKKNGKTFIVGDWLTDIESSSGSSSSEEENDENVAAIAGDFSSPPPSPSSTSHLCLMVRGERKVQNDNDIIDDSDSDDEFASPSYDELADLLKEYTQIIRKSKAKYYKLKDENEFLTAKYDIVVKASDEMKEENKTMSSTRYLTDATTRGKVAIENNDFNNELAVDNERLKMRSRNLRVKMNILQQVNYKIGGSHWVIDSGCTQHMAGNPRMFTSLDENVDG

SEQ ID NO: 79417 - protein, 415 aa, Zea mays
  Coding DNA Sequence Number=SeqID_36042
  Gene Ontology: Cellular component=nucleus
  Homolog annotation: Hit_ID=A3A9C7; Match level="QueryCoverage=97%, HitCoverage=89%, E-value=1e-178, Identity=75%"; Hit description =Putative uncharacterized protein
  Pfam annotation: Domain name=SET; Domain location=155-398; Score= -16.2; E_value=0.059; Accession=PF00856.19; Description=SET domain
MAFLFNKFQEAIRTIAKSPMFARDPRHLQFEADVNRLFLYTRYHFLNFFCYALSYYRLGENADEKDAEEIIDLASKASIADQQKQVQDNVHYELTHMCQAMDSILCPDTINDPSKGPSEAHNHSQRSGLSFAVGGAASANKQSAIIPATRPLTRAELSKKFRDHFGYTLDIGPSGIPHKDAGQGLFLSGQANAGAVLAIYPGVIYSPAYYRYIPGYPRIDVCNNYLITRYDGTIIDAKPWCFGGETRALWDGSDLVDYNAMAPKGSENNSDRVWRMLSKPLEKGVRENFGEVLERRNPLAFGHFANHPPKGSSPNVMICPYDFPLTEKDMRVYIPNITFGGQETIRMKRFGSFYFKSGGSDNQAGDSLVLKTLVLVSTRSICDEELFLNYRYSNSKRRPEWYSPVDEEEDKRRWS

SEQ ID NO: 79418 - protein, 88 aa, Zea mays
  Coding DNA Sequence Number=SeqID_36043
MAGGGGSWAGDGERARGDERRNVARNAIGNGKKPERSHQATRHHQQDCDIYRRRRPSAATAPVAEKCHIAASCATRSSSAPNKTVAPA

SEQ ID NO: 79419 - protein, 174 aa, Zea mays
  Coding DNA Sequence Number=SeqID_36044
MALHKLCDDGGSQLSYGSKATSARTRPLLQLSLRQAPLLLQQPRHHASKQEIESVKSCYPVLPLEAPPAPPLSALAAEVAAGGDPDDGGGDSSSSHDTDLSEEQELEGWVARPITHDAARGCHFHDALDTLLRQALDQRIWSIEYRCVVFQHSRGVYPDHWEATCLVRRPENSL

SEQ ID NO: 79420 - protein, 330 aa, Zea mays
  Coding DNA Sequence Number=SeqID_36045
  Gene Ontology: Mol. function=carboxyl- or carbamoyltransferase activity; Cellular component=ornithine carbamoyltransferase complex; Biological process=amino acid metabolic process
  Homolog annotation: Hit_ID=Q8SA97; Match level="QueryCoverage=34%, HitCoverage=21%, E-value=3e-11, Identity=45%"; Hit description =Ornithine carbamoyltransferase
MALPVDVAGLCPRSGDVGAPPKLGSNLSSVAEAEPEPLGRTRRKSFGRGQGEVRALGSGEAEFVVFRGRARVRALGSGGAEFAVFRVLARVRALGSGGAEFAVFRVLARVRALGSGGAEFAVFRVLARVRALGSGGAEFAVFRGRARVRALGSGGAEFAVFRVLARVRALGSGGAEFAVFRVLARVRALGSGGAEFAVFRVLARVRALGSGGAEFAVFRVLARVRALGSGGAEFAVFRVLARVRALGSGGAEFAVFRVLARVRALGSGGAEFPMAPLERSDCLSDSLCRVALQSEWRRRRCPSVRPLYADGGYQLRIRRLEGTPNYGPRQ

SEQ ID NO: 79421 - protein, 144 aa, Zea mays
  Coding DNA Sequence Number=SeqID_36046
MGKNNKRKREPTPPSEDFGDSEYSEEEFSSESEGSPAPIPLRESSDDSDDSQGLAAEVWTYIQAVERFGLEGSDESEYSSDEEDSDGGGEDEDGDDDDDEDEGGGDVDGDGSGKGGGGDSRGSNRGSSNRGSNQGGSGGRSNRA

SEQ ID NO: 79422 - protein, 46 aa, Zea mays
  Coding DNA Sequence Number=SeqID_36047
MVGLQVVMRMMVFYYDYGTGCQRCNHCSSEDEVVEDFQEFQEYDEF

SEQ ID NO: 79423 - protein, 195 aa, Zea mays
  Coding DNA Sequence Number=SeqID_36048
MGRWIRIPRIRSDLPEIESGRGENRTIHDLRQRSNPTESLVDPHSIPDVLRTHPVTHGLPGGDVRGRRMRQRVDPERIVAAQRRYKSPEAIRGLRQSLRDGLGLPRAKTVNPSRNRVEFVLVAREEDGPSRWAPPAAFSEAELILGFTNPTPLKNNLALEICVYADVIMDITPQPITLNQRSKSDKYHKNKHSSS

SEQ ID NO: 79424 - protein, 269 aa, Zea mays
  Coding DNA Sequence Number=SeqID_36049
MDRPIPATTAVEPYLTVTARTSRSQPCPSPDLSRRRVSDSEKWWRRGITEGIDLERTQASAFGKQTPQPNSCMSRGRGVDSSHQMTSHGSSDEGNAQSHTDGLAREGFPRILWEVLQGAGYTTPPQYAVQLFEKHRVPRCRVRMTLEPHPLQPGWRSLDSESFGYRAEDTIEAIALHGLTTFCGFHPLELPTHPIGLFPAEKEDDPMWKDRVEHAKDIWAIYLGQTAHLTVRCMNALYRLQVMRGEAMSHLMALLEATKITLDNREELV

SEQ ID NO: 79425 - protein, 218 aa, Zea mays
  Coding DNA Sequence Number=SeqID_36050
MGSRDHPGAFHRGLEGHLVEVESSVGQWQNPPPVEGRDNSGRGETTIPKLPQGLQQRLQVGLELLKQTPPPSLLRSEDDVVRECWQPPVVVVEVEPSTLPSLIERGKGGSCIPIDRPTRWQGGRPSHTVNHFLKRTCKNCATSKAGYTNTQLDLPGYKGSSSLISCEKQTIRIEFYPCKVEFTLATKDFCGILSNSGSSGFLLMYNPLFQNLGFNNGF

SEQ ID NO: 79426 - protein, 518 aa, Zea mays
  Coding DNA Sequence Number=SeqID_36051
  Subcellular localization annotation: CTP_CleavageSite=70; ConfidenceScore=5.26e-01
MSSHSLHASRPSTSRAPEWGALTSLCLAVVGGTQLRGSWYLSAIARLQGFSSGSPAASPRRWSPKTVTTSSMVGRSEPSCGLCPALSFKDLHYPCWGGGRAEPELYLPHGFVGHPLLQHSGERVLTGLAEGADSNNAELVGRERRQLQRVGLAGSAGSSSAPGAPSRRTSGRRATRYEGPPKTSCAARAAFVFLGYPAFAPVRRLLRGGQWSPVREDPSGDLRVGRWLPSLTLRWWRLKKSSLPTRSPPPSALRASGSLALIACPRPSSGDVGEELVAAASALRSSLLLFGHSERRSLSLLPEWASASHQGFCRPAGPPMWGVESLGSVGLAARGFTCLVEETLGRSAVSRGRGQRCQHGQRRSWLEKGSFVGRGLAGSSTGGTNAGVELSRPRARLVSSGDSWLRLRGGRPSRLLGPGSWRRPWRRWPGRGADVVFRSGDPSPVLPSEARSDFAEGGVDAEGAAAPPLSTSEPAGSVRLYRIAHPNASYFSQKVMSETSYVNEVYERLENILRVEAT

SEQ ID NO: 79427 - protein, 179 aa, Zea mays
  Coding DNA Sequence Number=SeqID_36052
MGTIQAKAPLKGNDPASPEPDLGQRQPTLEDSRLAQGAACPAPTVVPLARVRSTAAKSSLGRHRKLRLARPQGSAPRLGLGRWTSSRPTPGLELNHDSEDDGLRLARPQGSDSTTAPEDDGLRLARPQGSDSASAPEESPPRPNSGSDRPRRQGGPSLPYPELTQAAGNKTGVPSGSPQ

SEQ ID NO: 79428 - protein, 680 aa, Zea mays
  Coding DNA Sequence Number=SeqID_36053
MAPLHGGFSAGKSGLCCDLLARRRGPSGFAPIRGPGGYLSPTVVDRRGKKPAAVTEDDPTPEATLATKKRKLGTAVGELGVSDSFAMELMGTCAALGGRMSSPELREPSARMLEVTGGRWPKNVPIPRAAGEDFFTSRMARDLRVFPYGRNIVVVVSAVMNKDRQGATQKRWAIIRLPDARPKRARGTEKATIPGGNQPPLAAKPTAPGSSKLPESAKVVGAGGTKSASDGAAKVRELPSLGKRVADFGTNISVDDYLVGWRFQRWRRDFGGHCRQGRSGHFVPPAEGGIAVAGAAAESNVAAEVERLRAQHANAVREKSAAESKSRRLAENVASLEGERTDLRRQLVEERREANQAIAKAQAAQAEAKPAWRGPKASMRSEVERTRKQLVDSYRELGARTADFEVPDREAGLRFLEWLQEELLALPTIVEGFMSFASLVTCEGAMNALSREGCNHYEGFDRSDEDFGREIFKVEDHVVKDSAGALFDRMWGPTVGRRLGSGLTEQGISAQPEAEVNLVEAEAEVDPVPPPETGEGSLAAPASTVSGGGSSPATVPMAEDPSKTATELAAEDPMAAARSSQDFGPAHATATANFVAASTVGAGNESDESTSKFSEFDDSGSSVVWTEESSDEDLDYFAALDVAVAEASPRVTDAEVLPGPSAGRKRRRAVVKRRVSEVDG

SEQ ID NO: 79429 - protein, 118 aa, Zea mays
  Coding DNA Sequence Number=SeqID_36054
MDDQVTPATMSSREPYNGSSSLISCEKQTIRIEFLSLQVTALVPTITGMGDYVSGRVRGKVYCQVQSGVNRAARLTGCEGGLVKGGVGFGRFLRSQRGIGSAPCHRTSRHAGLVLQVL

SEQ ID NO: 79430 - protein, 143 aa, Zea mays
  Coding DNA Sequence Number=SeqID_36055
  Subcellular localization annotation: CTP_CleavageSite=79; ConfidenceScore=5.31e-01
MPHAPAIAPACHTRTNLAARASHRPRALAPTNPAPELARAPISPPVIPPPPTASQSLPTPNYAPCPRPCKGQWPVEVACAVAVRAVENCCDWVSLLRLEEHGGDGVLLGEVEEVVDVSLSGGGGCVQSLGGDGMPGSVVSNEV

SEQ ID NO: 79431 - protein, 167 aa, Zea mays
  Coding DNA Sequence Number=SeqID_36056
MAARWRARAMGGRAPSGSHGRCRGALERGWSSGVAPWLRARGAESSQGATTMEVAGAERSLFVPREGKGWRWVEEVGWEMWCHGGEEELSSLLAARHGQQRGRKIYLLCCRVGEDKESVCVGWKEKRGATFKGWLQHGDWLGGMASPIGAGTRRSRIGQIGRRGLLA

SEQ ID NO: 79432 - protein, 150 aa, Zea mays
  Coding DNA Sequence Number=SeqID_36057
MALLPLWSTCCEILPRRTRRRARTGCSQPVRDSIDPRGGLVLALLPEPRPCTQQQGPDPLCIVCFARSAQRLHVVVETLGGTFIDVTSSLENASCVEDVLLRHDCQSSYISGYATMIEVSRVHATIWLYARQGKIRCSFDVEFTLLAENA

SEQ ID NO: 79433 - protein, 113 aa, Zea mays
  Coding DNA Sequence Number=SeqID_36058
MRVVWDALGQVIMEVLCWVLVLVIGDGGICCGSYILALGSSAHSHQSHSEDPREKPRSDTLPDHLGSDQLGVALLGQKGNHGSWVKCATSTECYETDISVVLTVMSGLGILFD

SEQ ID NO: 79434 - protein, 107 aa, Zea mays
  Coding DNA Sequence Number=SeqID_36059
MVTSSGADGIVPAGCLSLWRALSYWTVGLKRLVAKTPEGTVICPDTIFCESIRHFVVSPRDMVQFKDVKSFLQPAHLLTGVGDHISHQLESPFGNPPRNVRIAAHIA

SEQ ID NO: 79435 - protein, 67 aa, Zea mays
  Coding DNA Sequence Number=SeqID_36060
MTRDHAVVFLAVLGEIPNSGAVVANRRREVVLWLCNELTEQVGASIYSDQQRWRPIWGRHAGSRSKL

SEQ ID NO: 79436 - protein, 155 aa, Zea mays
  Coding DNA Sequence Number=SeqID_36061
  Gene Ontology: Mol. function=3'-5'-exoribonuclease activity; Cellular component=cytoplasm; Biological process=embryonic development ending in birth or egg hatching
  Homolog annotation: Hit_ID=Q7XC99; Match level="QueryCoverage=65%, HitCoverage=4%, E-value=2e-48, Identity=91%"; Hit description =Transcriptional regulator, putative, expressed
MARAAAGGKDRDGVGGGRGGLVKIRPYQIKFRGALLAKNLGSWLGKFTIGRNQALRAKEIDPKSLIVEAYEKGLMIAVIPFTSKILEPCQSSIAYRPPNPWTMGILSLLAEIYNLPNLKMNLKFDIEVLFKNLTVDILMELSVFWTSDNDYSKIN

SEQ ID NO: 79437 - protein, 117 aa, Zea mays
  Coding DNA Sequence Number=SeqID_36062
MALEAGLGCCPPHPGGWHSSRSSAGGAVFLSGFEFSGWYVDAVNGLAEAGFARATPERPHRARGRSRTNSAFLIRPFVAFPQGGGGQSAMLPSEGAEHGVSSELLTGDPSGRPCPVR

SEQ ID NO: 79438 - protein, 106 aa, Zea mays
  Coding DNA Sequence Number=SeqID_36063
MARTFLRWWKPDFGEVSNSGAQVNNWRHEWVCWVLEYLAKPRVCSIYWALERWLVNLSSRGGGRRGRGFSGSNTRGVTERGYDILPAVAGPLASGGCCEAMDEMSL

SEQ ID NO: 79439 - protein, 241 aa, Zea mays
  Coding DNA Sequence Number=SeqID_36064
  Homolog annotation: Hit_ID=Q6J9V9; Match level="QueryCoverage=31%, HitCoverage=27%, E-value=4e-09, Identity=50%"; Hit description =Putative uncharacterized protein
MQATCNRTTGMHPFDFDASSMESQAHTSYQSAAGEGATIDMAKSGPTIMVAAGERKRRSNRLQAHVPSWGSRRALSHGVKTTRPCSVPRTARATAAPRTTRPVALTPRQGRRHLWQAKRAMLHLRHNDLVKKGTGKGDTPKGILLCEGSGPRAPLLIRGSKAGPSEGFDSRLRALGLRALLLIRGWPLEGFDSRLRTCRARDDSGYVRYMVEAQATLSRSRLRPLKGHDLASPEPSLGQEQ

SEQ ID NO: 79440 - protein, 358 aa, Zea mays
  Coding DNA Sequence Number=SeqID_36065
  Gene Ontology: Mol. function=hydrolase activity, acting on ester bonds; Cellular component=cellular_component; Biological process =lipid metabolic process
  Homolog annotation: Hit_ID=Q2HTP0; Match level="QueryCoverage=55%, HitCoverage=63%, E-value=3e-69, Identity=52%"; Hit description =Lipolytic enzyme, G-D-S-L
  Pfam annotation: Domain name=Lipase_GDSL; Domain location=134-336; Score=100.6; E_value=5e-27; Accession=PF00657.13; Description=GDSL -like LipaseAcylhydrolase
  Pfam annotation: Domain name=Ribosomal_L30_N; Domain location=67-125; Score=3.9; E_value=0.0018; Accession=PF08079.3; Description=Ribosomal L30 N-terminal domain
  Pfam module annotation: Pfam domain module=Lipase_GDSL::Ribosomal_L30_ N; Domain location=134-336::67-125
  Subcellular localization annotation: CTP_CleavageSite=72; ConfidenceScore=5.79e-01
MQQIIVKRLLPSLSLGGSPPRNHPSQRQSSFSSPRFNLIALLSSGDRYALPSFNELNSSFAVSSMIVISITESATEKKEKALVEKKKSIESRKLIFTRAKQYAEEYEAQAGKQARPEKFEIPAKIKLTLQPWTSSLRGGHQEGIRDGPCPVVQPVTLLLQFFKDRGDMHSRYIPQQDYFSEGLYTFDIGQNDLAGPLGCLPQNIALFGKDPSQLDELHCVAKHNRAAKLFNLQLHALCTKLRAEFDGASITYVDIHTIKYSLIANYSRYGFEHATQACCGYGGPPLNYDGNVPCGHTVSLDGKMVTAKGCSDTTEFVNWDGIHYTEATNFYIASQILTVKYSDPPFVDKMSFVIKPRF

SEQ ID NO: 79441 - protein, 210 aa, Zea mays
  Coding DNA Sequence Number=SeqID_36066
MNLIFWLLHLSEGLSKYDVSCTACVNQDIVDQKSFDNTRDNHGIVVWVIFELKVLLGEAGSEDEPPVIGSTSFGSEAAPAWSLNEAISSKSGKIETISNYKCTFGLEGDESTSVTQKQMPSQREQYGGTVHLFIGTGYNPYKITYMPFTFGDNSIALYRGLNGLFIFKSVPFSANMPKLSCFTASALCQPLYLLSFSLSDTSPKIPAHTL

SEQ ID NO: 79442 - protein, 155 aa, Zea mays
  Coding DNA Sequence Number=SeqID_36067
MGDPVSGRMRDKVHAREILDSSLGSLLLVLLVDSSLLGDEHSSLLGDEHAGELVGGEESGLSRAQLTNQTGQRDSPGIKEGGRPKSGEVDLGFPVKFRRVRGLGKLHKLMAKLTEWLARLGSNWGGLATVAEALVAMAGGKELRTGVWPVKVSMG

SEQ ID NO: 79443 - protein, 128 aa, Zea mays
  Coding DNA Sequence Number=SeqID_36068
MSEGLHANISAFARRKSTITSSYLGSSWELIRNVISPELLGSRGTVFVASAGSKPTGVERDGLRCFHRLEATDMPLRVGNLPYKVLQVDNQRFGLYECVGVLNALEVALIDAAIHGADGDDACWSRHL

SEQ ID NO: 79444 - protein, 58 aa, Zea mays
  Coding DNA Sequence Number=SeqID_36069
MAKLTERLARLGSNWGGLATVAEALVAMAGGKELTGVKDGRLVGEGFELGIKVNTPGL

SEQ ID NO: 79445 - protein, 98 aa, Zea mays
  Coding DNA Sequence Number=SeqID_36070
MNKLHEECYRLVGFDAGERSDLDPLGEFIDGNQQAPNLFAIGFHSCIMAAQVLYDLVNDELGVPLDIEAPDTELYGDAQAIDQGFVLGHVVGYNEVEP

SEQ ID NO: 79446 - protein, 139 aa, Zea mays
  Coding DNA Sequence Number=SeqID_36071
MAQPTPREDFCLNQVGNLISISTTGNLDIIPRQGRQRPWNRVFLLQKQPIEGVSGSLGRWISDQQSRLDRDLMVSLSGGFPSRQQWRRSCPRWRFAGDEGEGTRGPGAPGRAQGGSGEYGERDYGHRTSTGALEGGVPW

SEQ ID NO: 79447 - protein, 419 aa, Zea mays
  Coding DNA Sequence Number=SeqID_36072
  Gene Ontology: Mol. function=hydrolase activity, acting on glycosyl bonds; Cellular component=extracellular region; Biological process =cell wall organization and biogenesis
  Homolog annotation: Hit_ID=A2YCZ9; Match level="QueryCoverage=74%, HitCoverage=74%, E-value=1e-122, Identity=69%"; Hit description =Putative uncharacterized protein
  Pfam annotation: Domain name=Glyco_hydro_28; Domain location=71-396; Score=306.1; E_value=6.7e-89; Accession=PF00295.8; Description =Glycosyl hydrolases family 28
  Subcellular localization annotation: CTP_CleavageSite=23; ConfidenceScore=5.06e-01
MGQSIQNVCLANNATFLSALLLLAVTTSGGPSLQCCLARSETHRRPPPTPPDGPHHPPAAPAFADAWSAACAAEASTVLVPASYVFLVGPIAFTGGDSCEPNVVFQVDGTILANTGSTAWRSGYATQWLEFKSVRGLTIQGCGVIDGQGSHWWSRNPLVDQGQTTTALRVYQGDNVTVTGITIRSSPKFHLTLDTCRAVEVHGVTIASPGDSPNTDGIHLASSVGVSIHHTTIACGDDCVSIQAGCSDVSIRNVYCGPGHGISVGGLGKGGATATVSDVTVQDVTFNHTMTGVRIKTWQGGSGSVKNVRFSGVRVSAVKTPIVIDQYYCDHTACTNQTSAVAVVGAAYQGVAGTYTQRPVYLACSDAAPCSGIHLADIQLQPVKDSGYRVQGPFCWKAHGDEMRPVEPPVDCLITAGAP

SEQ ID NO: 79448 - protein, 693 aa, Zea mays
  Coding DNA Sequence Number=SeqID_36073
  Gene Ontology: Mol. function=ubiquitin-protein ligase activity; Cellular component=ubiquitin ligase complex; Biological process =protein ubiquitination
  Homolog annotation: Hit_ID=Q69Y81; Match level="QueryCoverage=93%, HitCoverage=84%, E-value=0.0, Identity=63%"; Hit description =Armadillo repeat containing protein-like
  Pfam annotation: Domain name=U-box; Domain location=202-274; Score =85.2; E_value=2.2e-22; Accession=PF04564.6; Description=U-box domain
MPVGSRHWHIMLPVVSGGCERGYTILLAGGGYSLQTAYLPTLDYLSQVADVHNDLRDLKFIADPAEEDAGKVILEMLRHSEVSEQTELQTFLEAASKLNITSPKAVLIERRAIKKLLAKINGTDHKKEGILKYLLYLVRKYGKNVKPETDEKNQNLNVATEVLSLDSVVNVINTAEICISATESANMIYDGQSSLSGATTPPQELCCPLSLKLMRDPVIITSGQTYERENIERWFSEGYDTCPRTNMKLKNFTVTPNTCMKAVIHNWLKDHELESTDLPKQFQNYYSVSSLHNISAPLIIEKNRDYTVDYSSSSFGLSGASYISSPMRETEQSKTSFDQFYSNANFQLYLSFCNFDKAMFLGFFHELSELPFELQRKAVRDLKTSLSGENEIWHSMVYNGFFEAFHEFLKNDSGIHTLQARRAGIQFFLAFLSSGRARIPSVCEDVVLLIASLHDSEFKQEALLIVHELLQEPSCPKSSLMASILSPSVFGALDSGETKCLDLALQIICKISSDNDIKSYLLSSGIVSRLSPLLGEGKMTECSLKILRNLSDVKETAGFIIRTGNCVSSISDHLDTGSHSEREHAVVILLGVCSHSPEVCSLSMKEGVIPALVDLSVSGTKVARDCSVKLLQLLRNFRRCDQFSSSCSRELAVDHVSENTRNGSICMQPISKSARYISRKLNLFSKPRSLTLA

SEQ ID NO: 79449 - protein, 658 aa, Zea mays
  Coding DNA Sequence Number=SeqID_36074
  Gene Ontology: Mol. function=glycine hydroxymethyltransferase activity; Cellular component=phagocytic vesicle; Biological process =one-carbon compound metabolic process
  Homolog annotation: Hit_ID=A3CB05; Match level="QueryCoverage=23%, HitCoverage=36%, E-value=3e-68, Identity=80%"; Hit description =Serine hydroxymethyltransferase
  Pfam annotation: Domain name=SHMT; Domain location=79-337; Score =22.7; E_value=1.1e-17; Accession=PF00464.10; Description=Serine hydroxymethyltransferase
MSCFVCFGSAAQDEEPKKLAVAGARKDATPDRAVARVGSAGYTAKEIYFKHWDLQGPVIDSSDVHRLRNFIKNVYVERRYSDQRIGEHLAQAKGNQDSYGNSNADSSPGVLRSAYVETYEDNHDLKRTKESLSENQNNLDGHPTAILSKLYLDCRRYYIYFGKEAANPFEYCDVVTTTTHKSLRGPRAGMIFYRKGPKPPKKGQPEGAVYDYEDNINFVVFPSLQGGPHNHQIAALAVALQQTMSPGFKAYAKQVKANAVAIGNYLMSKGYKMDLRPLGLTGNKVEKLCDLCLITLNKNAVFGDNSALSPGGVRIVSKSVQDQAGGEPTVGVVAEVKPETDRGDHEDGKSVVSESESDEDSDGSGSEDSEDSEEERRREEERTRRSKSYTYFIGYGTASELQTSMIETLEAVEIEKQRHHNTRMEALARLARLEVTNGELAKSLAREQWELEVQVDQVAQLREEVELKKLAQDKYRRKLTKIQKTSAPPVDEIESLRRFKLEEEIVDAEYTLTCDRIVKDKDSGYHQVTPPPYIDFADRCLNSNGGATNNIYQFRADLCRTHKFDGHVTPSNLTVRTWVPSNLWEKIRRPPSNLKTHVLNVKFDGTHVLNVKFDGTHVLKVKFDGAVELTSLSSSKNRRRLYSSVNPRSYGKFDGLLH

SEQ ID NO: 79450 - protein, 90 aa, Zea mays
  Coding DNA Sequence Number=SeqID_36075
MAAESLVFSLSDLSSLPWRWMPVLVAGAPPKSWGNRGGSRSLYPRGHRHAATKERKADLELHGFRRSGCGHGEDRPDMQGPPMQKRKDDN

SEQ ID NO: 79451 - protein, 144 aa, Zea mays
  Coding DNA Sequence Number=SeqID_36076
MSSPTPANGGDNRFSFDYLSHEGFPSMLWEVLCSTGYPTHPLYMVQLYEEHRPGRRSLDSETVGFRVDDTTEAAALKALTTFCGYHPLEMMMHPLGLFPAEKRDDPMWCSKALQSDAMTHLTGLAQATKITLNNREDFVVNLSS

SEQ ID NO: 79452 - protein, 127 aa, Zea mays
  Coding DNA Sequence Number=SeqID_36077
MGKGTKRKREPTPPSDDFGDSEYSEEEFSSESEGSPAPRSGLEGSDESEFSSDEEDSDGGEDEDDDDDDDDDDDGGDGDGDGSNSGGGSGGKGSTRGGSSTGSTRGGSSKGSTKGGGGKGSGSKASG

SEQ ID NO: 79453 - protein, 255 aa, Zea mays
  Coding DNA Sequence Number=SeqID_36078
  Subcellular localization annotation: CTP_CleavageSite=84; ConfidenceScore=5.19e-01
MGGGAGVARGAGSCSVPGLQTRVASEPLAAPASATAAGRGSSAGAIAGAGHGLTSNFSAFCPSLPHKFWHGRGPPGSGIHPEVSVAAVRPPGAEVIDVAAAGAGDSAPFVGLPLLRRPSPSEWGCSYLRRGNRSSVCNGTSDASVFVHCGCRGLNILVQETPWPLFDEPRPGVAISVRTEAELARKWEPGWPEPSRVARQRGRRRSRSAEVPGRAGALGRWLAEAPGVTGRAACSGRIPGEVPDRAAVRGWVGPR

SEQ ID NO: 79454 - protein, 144 aa, Zea mays
  Coding DNA Sequence Number=SeqID_36079
MGKDKKGKGSSRRSGDKRKREPIPSSEDFGDSEYSEEEFSSESEGSLVYASPPASSDDSDDSQGIAAEGSDESKFSSDEENSSDSSEEGSGNDGDDEGDSGDGGDGGDDGDDGGKGGGGVGSGKGGDDRKGGSSNKASGKASLA

SEQ ID NO: 79455 - protein, 282 aa, Zea mays
  Coding DNA Sequence Number=SeqID_36080
MAHLEVRSTCGGEQPKFGEVDLTVSAGQGLGSILERLHGLSGKLSKGSGKIGGLRESLATAIGLRWTRRVVGRSLELRAGSGKLGTCSSGFDLGLVSYEEVKLGLLPSWNPRPKQSQIMSYNFGLISNFARVCLENFGAILLFGPCGFEFWNKVNVVDLCSIALKKKVVMVLAFPFFLKLNMVKHRISRASWSLGRSFPHAEPWPDGLSHRRKRAAPLVVVARPAQAISGQAGTVLGRGERRGCRGPRSCALPRRRRAPLAGQFFLPSCYLEVEEKGPSRIF

SEQ ID NO: 79456 - protein, 72 aa, Zea mays
  Coding DNA Sequence Number=SeqID_36081
MAMMGSTSEKMYLCQVPNFGFEMIKLRLGRLIPEWTTHNGSGEMARVVCTLRGKRLDGGVSVLSVGVNPIWS

SEQ ID NO: 79457 - protein, 30 aa, Zea mays
  Coding DNA Sequence Number=SeqID_36082
MPVAVVWGLIQQRRPHCDFFAPRCRNVFTA

SEQ ID NO: 79458 - protein, 265 aa, Zea mays
  Coding DNA Sequence Number=SeqID_36083
MAQKEHPRSTPAARCPIDEDDDDPSASTSAAILPPPNNCPPDPAATPALRQPPAVTPAAVVRPQHPPSTPAARCPIDEDDDDPSASTSAATSVTPPHHHGTERLGDLLDHGWARADRQFTAAGFDDVVLLWERDDEPVGAVRVRRMGPRGGQTGLPDPTPLPPAHITPTLPSLPPPPDAPTRNRAAPKTDVSWLQRWVPYDLDPSHPTAALAPIPSPTKSIDHIVHRLCNLALDDDDPSSSSTRHKPNVACISSAQGIHHPYRPT

SEQ ID NO: 79459 - protein, 211 aa, Zea mays
  Coding DNA Sequence Number=SeqID_36084
  Subcellular localization annotation: CTP_CleavageSite=51; ConfidenceScore=5.46e-01
MSSRSLMHCVFPPSKPPDGGYPPSFRLIVGGTQLRGSWYLSAIVRLQGFSSASPAVPPRRRSPETVTTSSWVGRSKPGCDLGPTLSFKDVHHPRWGGCRAEPELYLPRGFVGHPLLRRSRERALAGPVGGPDFDNTGLVNGGRRHPQRVELVGLVPGGPFCRKAAAAPCAWGDRPRCRALLGRRSCSGVVLPLHRDGAFTRRPVPHSSGRI

SEQ ID NO: 79460 - protein, 32 aa, Zea mays
  Coding DNA Sequence Number=SeqID_36085
MGVPNLLLIPMWVLHLLLIPMGRKTYPYCFSR

SEQ ID NO: 79461 - protein, 148 aa, Zea mays
  Coding DNA Sequence Number=SeqID_36086
MACLGLGGRRKHTLQDNPILQARISIVEGSSSTLSVDYTFGEGLLQESGSSRRLGWSPRGLGQLSLEDISPARGLGRSTPASVLLTDDPARLRPTKSSFRANSASVRADTATPGFGSSKSGRGVPLTKQENPRTTRPTEPRDSYASGI

SEQ ID NO: 79462 - protein, 382 aa, Zea mays
  Coding DNA Sequence Number=SeqID_36087
  Gene Ontology: Cellular component=cellulose and pectin-containing cell wall
  Homolog annotation: Hit_ID=A3AV74; Match level="QueryCoverage=84%, HitCoverage=67%, E-value=1e-122, Identity=69%"; Hit description =Putative uncharacterized protein
  Pfam annotation: Domain name=DUF642; Domain location=47-382; Score =612.9; E_value=2.9e-181; Accession=PF04862.3; Description=Protein of unknown function, DUF642
MAGGTRSRCPVLLLLLLGVTARLASGVVSDGLLPNGNFELGPAKSDLNGTRVMNQNSVPNWEILGFVEYIGSGQKQDDMILPVPEGACAVRLGNDATIRQNLNLIRETTYSITFCAARTCAQAERLKVSVAAESGVLPIQTVYTSNGWDSYSYAFRARHSTAWFSIHNPGHEDDPACGPLIDSVAIKALNPPHLTKESHTAGLSQRSEHADNMLRNGDFEEGPVIFPDTAWGVLVPPMSEDDVSPLPGWMVMSDTKVVKYVDAAHHAVPRGARAVELVAGREAALVQEVRTVPGRHYRLSLAVGDAANGCEGPMAVEAYAARATLRTTYESRGNGGSKRAVVDFTAIANLTRVVLQSYNHHMKPDGTLCGPVVDDVSLVGLR

SEQ ID NO: 79463 - protein, 375 aa, Zea mays
  Coding DNA Sequence Number=SeqID_36088
  Gene Ontology: Cellular component=cellulose and pectin-containing cell wall
  Homolog annotation: Hit_ID=A3AV74; Match level="QueryCoverage=85%, HitCoverage=69%, E-value=1e-125, Identity=71%"; Hit description =Putative uncharacterized protein
  Pfam annotation: Domain name=DUF642; Domain location=42-366; Score =624.5; E_value=9.1e-185; Accession=PF04862.3; Description=Protein of unknown function, DUF642
MEGRASSRRGVLLFLLVGVASANPDGLLPNGNFEQGPDKYQMNGTWVIGRKSIPCWEISGFVEYIVSGQQQDNGMVVAVPEGARAVRLGNDASIRQRLTGMTRGTSYSVTFSASRTCAQAEQLNVSVAPESGVLPIQTVYTSSGWDSYSYAFRARHSAAWLVIHNPGVEEDPACGPVIDSVAIKALHPPSRTAKDNMLKNGDFEEGPYVFPDTPWGVLVPPMDEDDVSPLPGWTVMSDTKAVKYLDAAHFAVPRGSRAVELVAGTEAALVQEVRTTPGRSYTLSFSAGDAADGCAGALRVDAYAARGRLPVSYESRGTGGFVRNELEFAAVANLTRVVFQSMGHYMKPDGTLCGPVVDDVSLVAVHKHAARRLFM

SEQ ID NO: 79464 - protein, 190 aa, Zea mays
  Coding DNA Sequence Number=SeqID_36089
  Gene Ontology: Cellular component=cellulose and pectin-containing cell wall
  Homolog annotation: Hit_ID=A3AV72; Match level="QueryCoverage=85%, HitCoverage=54%, E-value=9e-41, Identity=53%"; Hit description =Putative uncharacterized protein
  Pfam annotation: Domain name=DUF642; Domain location=21-186; Score= -106.3; E_value=1.9e-07; Accession=PF04862.3; Description=Protein of unknown function, DUF642
MAYRRQLPNGNFEDAPARSQLNGTQVLGLYAIPRWEVSGFVEYIGSGQRQGDIIHSSSRCRREPTPCGWGTRPPSGSGWPCRGARATPSPSAPRAPAPRPLNVTVAPDSDVLPIQTVYASSGWDSYSWAFEARHGAVTLIVHNPGVSEDPACGPLLDSFAIKALRPPPVPTKSKRPWRHIVVLELGRRNN

SEQ ID NO: 79465 - protein, 171 aa, Zea mays
  Coding DNA Sequence Number=SeqID_36090
MNEDRRVDSTPASLQKTVGTPHVSLTHDVRNPQITGTSSGYLYVRWAEDPLDTDVWLRVVESKFPLLNGDCSNAAKPVDHIVEWGEFKAAFRGHHIPAGIMDPRQAEKKRKTPIMAGPSAQPQRFWIVSDTRSRGPQQQQGRWVIRPQQQQQQAPNRSQPPVQRNNNQPQQ

SEQ ID NO: 79466 - protein, 257 aa, Zea mays
  Coding DNA Sequence Number=SeqID_36091
MEKDRQDDAQKHQAVVRIADPMREAKRARVSVKAAAFGSSKPVPAAKPAAPGHSKASASEKATASSGSKAPPGGPVKGRGSGEGQLAVVPPLVATTSPTAVVGAKATEGSVAVAVAAAEACGRLRRPRHVGCLDCGRCCRGRASLGAACGCCAGEVGCGKQERRLSEKVAAMEAEKVDLRCHLAEERREANKAIADAQAAQAEAKVARAEGSLARQRAEELEARFNALRSRMEKAEASTHAEVERTHCGGTVRIILT

SEQ ID NO: 79467 - protein, 113 aa, Zea mays
  Coding DNA Sequence Number=SeqID_36092
MAQWLTRSTLAGGRRESGDRGLASPAKQTSIPRSGSFTEVCSVFSEGRTGLGKAWLAGLRRQGLGWPRTRRARANDARPSRKRANLGKNPVRVFSWHLGLSLIRESPWQICPR

SEQ ID NO: 79468 - protein, 198 aa, Zea mays
  Coding DNA Sequence Number=SeqID_36093
MAQWLTRSTLADSRRESGDRGLASPAKQTSIPRSGSFTEVCSVFSEGRTGLGKAWLAGLRRQGLGWPRTRRARANDASKALTLLLLKFLPHVIIVISAKFVDAYRELGARTADFEVPGQEAVLRFLAWLQKELLVLPTIVTGFMSFASLVTCEGAMNALSREGCRHYEVFDQADENFEREIFKVEDPVVKQSGRGTLR

SEQ ID NO: 79469 - protein, 69 aa, Zea mays
  Coding DNA Sequence Number=SeqID_36094
MTYMFIAFSIDCNLADGEYVLMPEQGAAQEVLLTQGSVIEPIVVVRGNEMVLVTHQGKWEVAAHPPSLL

SEQ ID NO: 79470 - protein, 26 aa, Zea mays
  Coding DNA Sequence Number=SeqID_36095
MRLHTLRDDVVLYSQRCLLLIKGSGK

SEQ ID NO: 79471 - protein, 176 aa, Zea mays
  Coding DNA Sequence Number=SeqID_36096
MEERVEGLTDGEIAPVRCPGRSGKSRQSCRCAPSEGLDPCLEKLHSPMGTLSIGSVRLGVSGNGWSRWPALGWLGRATQSSQELRTGSGQRGVCAGEHQCALWRLGTESSMRQRREWSSSSVDWLQIFAIMTMIPLRDLFTRPSFVVYLWWLMGFVDWSPKIWGFELGIKVNVLEF

SEQ ID NO: 79472 - protein, 82 aa, Zea mays
  Coding DNA Sequence Number=SeqID_36097
MPKLPRAQLRLSSILRSLCVFSYNNFDLSEGFVSEDCNLTDGEYVLILEQGVAQEVVPESALEPSTEDLPAPAFEGKPQFYA

SEQ ID NO: 79473 - protein, 190 aa, Zea mays
  Coding DNA Sequence Number=SeqID_36098
MVVMGSTSEKMYLYQLFEEHRVPRCRVRMTLEPHPLQLGWRSLDSESFDFRAKDTIQSMALHVLTIFCGFHPLELSTHPIGLFPAEKEEDPMWKDRVEHAKDVWALYPGHTAHLPVRCMSALYRLQALRGEAMSQLMGLVESTKITLDNREDLVVDLSTELVEKDLQVEQMDYQIQELEDQVEVRENTIE

SEQ ID NO: 79474 - protein, 620 aa, Zea mays
  Coding DNA Sequence Number=SeqID_36099
MSFVLFDYFEKWILKTTEYTRHTLQDNLILQARVLTLEGGSSTLGIDDTFGEAIAARVFSGNPARAGGSGRSPRGLDQPSSEGAIREHEDMVTFQGDQRAKGAGSHAGGVQPRQVGALLRLPTRPAWRPRPTCHATGAPNASCMRLHRHLRHHRASSIAEPIPRLEATQRMTQQRQPGAAVSAAKNGPAVMTVAGGREQRSHRQPSSRPIQGQRENPLSRREDNAPVFCSSNGSRTRNRRPANHSPRRINSAAGQAAPLAGEAGDASPSPLRATLLIRGSKAGPPEGFDSRLRSRGPYTHYWSEVRRPAPRKGSTAASGYSGSAPITDQGGNDLVTESHQREASSPRTPSLGDRVRQITRSSPETPCSAPIEGNMALPPSSLRKGDTGAVNIPARELGTRPYTRATASSHEGTTRPAEALREALRPRRSETTPPRPQGLHPESALESTHWNKTQPRKAGPLAKKCDESLQASANTPFEARGLLSGTIIRGTLKAPNSQLVTPISIKLQRPDGRHSQSDRGHFAAPLTDLTEGQRRLRRSDCGATLQSETDRQSGPAEGTIGSSASPDPGLGLGLSPGRRRTPLRPTQGSDLGSAPEDDELRSARPRARTSLRPTQGSDSG

SEQ ID NO: 79475 - protein, 256 aa, Zea mays
  Coding DNA Sequence Number=SeqID_36100
  Gene Ontology: Mol. function=carboxyl- or carbamoyltransferase activity; Cellular component=ornithine carbamoyltransferase complex; Biological process=amino acid metabolic process
  Homolog annotation: Hit_ID=Q8SA97; Match level="QueryCoverage=28%, HitCoverage=20%, E-value=4e-16, Identity=49%"; Hit description =Ornithine carbamoyltransferase
MAPPVDVAGLRPRLGDVEAPPRPRSSLSSVAEPESEPWVGWSGVRRLPGFSPSPSPGSGGAEFAVFRDLARVRALGRAERSSSSSGAEPKSEPWVGWSGVRRLPGLIPSPSPGSGEAELPMVPSAGPDCLSVSLCQVAPQSERRRRRCPSVRLLYADGGYQLRIRSLEGTPNYGPRHLVNCVSELMLGAMNALMIRNLGEDQQGLGKGLGVEEEKQGRHNRKEIKSDSAVTPSRVPGPVCTKMDAQDASELRLRRT

SEQ ID NO: 79476 - protein, 102 aa, Zea mays
  Coding DNA Sequence Number=SeqID_36101
  Gene Ontology: Mol. function=kinase activity; Cellular component =ornithine carbamoyltransferase complex; Biological process=amino acid metabolic process
  Homolog annotation: Hit_ID=Q6QP54; Match level="QueryCoverage=70%, HitCoverage=25%, E-value=7e-27, Identity=81%"; Hit description =Putative kinase
  Subcellular localization annotation: CTP_CleavageSite=52; ConfidenceScore=5.16e-01
MEPGGGTAIGAVESLLTSSCFQYAGRHHRLSGGASQMGHRSCFLRPESARGRAMMAPPVDVAGLRPRLGDVEAPPRPRSSLSFVAEIESEPPGSGEAEFVVF

SEQ ID NO: 79477 - protein, 49 aa, Zea mays
  Coding DNA Sequence Number=SeqID_36102
MAENLPSPRRLLPPLRISSAGKPFFLHGCSSAPNGFNILQPTLGVMLGD

SEQ ID NO: 79478 - protein, 97 aa, Zea mays
  Coding DNA Sequence Number=SeqID_36103
MSTVPIDSPFAARPHRLDIQCSTDPDCRRAVAALVPTISRMGDPVSGRMRDKVHARLHSETQTFKSIDPRLSGKVSSDLYQKGRSSKDTKVDTVPKL

SEQ ID NO: 79479 - protein, 90 aa, Zea mays
  Coding DNA Sequence Number=SeqID_36104
  Subcellular localization annotation: CTP_CleavageSite=17; ConfidenceScore=5.16e-01
MAENLPSPRRLLPPLPLSSAGKPFFSPWLVPDVALMATSPSTSTAEPSLVIGGHKKVVDNFINLLVLKVDSHKSDRLEVMLFISEVALFA

SEQ ID NO: 79480 - protein, 96 aa, Zea mays
  Coding DNA Sequence Number=SeqID_36105
  Subcellular localization annotation: CTP_CleavageSite=26; ConfidenceScore=5.01e-01
MSKNTRDTRFIPRFGHTTKVPYFLVEAPTKSRVSFNPNPPFADHKGQAHTIIFAQTSGRLAGKSEQCKNRLNRFPPDKNRLSVRLSVQLNQYLNTS

SEQ ID NO: 79481 - protein, 61 aa, Zea mays
  Coding DNA Sequence Number=SeqID_36106
MAGAWVARAGGAELARAKDRVGTVGVWRLMGFVDWSQRYGVIKSGGFGFGMKVFSHDSVKM

SEQ ID NO: 79482 - protein, 57 aa, Zea mays; identical to SEQ ID NO: 45644
  Coding DNA Sequence Number=SeqID_36107

SEQ ID NO: 79483 - protein, 226 aa, Zea mays
  Coding DNA Sequence Number=SeqID_36108
  Gene Ontology: Mol. function=structural constituent of ribosome; Cellular component=ribonucleoprotein complex; Biological process =translation
  Homolog annotation: Hit_ID=P49397; Match level="QueryCoverage=91%, HitCoverage=92%, E-value=1e-98, Identity=78%"; Hit description=40S ribosomal protein S3a
  Pfam annotation: Domain name=Ribosomal_S3Ae; Domain location=11-188; Score=360.7; E_value=2.5e-105; Accession=PF01015.9; Description =Ribosomal S3Ae family
MAVGKNKRISKGKKGGKKKTVDPFSKKDWYDIKAPSVFSVRNIGKTLVSRTQGTRIASEGLKHRVFEGMNFTTDKLRSLVKKWQTLIEAHVDVKTTDNYMLRLFCIGFTKRRPNQVKRTCYAQASQIRQIRRKMVEIMINQASTCDLKELVSKFIPEVIGKEIEKSTSSIFPLQNVFIRKVKILKAPKFDLGKLMEVHGDYKEDVGVKLERPVEGDEAGQEVAAAE

SEQ ID NO: 79484 - protein, 99 aa, Zea mays
  Coding DNA Sequence Number=SeqID_36109
  Gene Ontology: Mol. function=phosphopantetheine binding; Cellular component=mitochondrial respiratory chain; Biological process=fatty acid biosynthetic process
  Homolog annotation: Hit_ID=A2XGQ6; Match level="QueryCoverage=59%, HitCoverage=43%, E-value=7e-25, Identity=94%"; Hit description=Acyl carrier protein
  Pfam annotation: Domain name=PP-binding; Domain location=24-92; Score= 49.2; E_value=1.4e-11; Accession=PF00550.16; Description =Phosphopantetheine attachment site
MDMKFLLLLLLALLPTQFCTTGRVAITQHCNSIDRLMLSVRVTPDAHFKNDLGLDSLDAVEVVMALEEEFRFEIPDNEADKIDSVKVAVDFIASHPQAK

SEQ ID NO: 79485 - protein, 133 aa, Zea mays
  Coding DNA Sequence Number=SeqID_36110
MAVGIVVAHRPRRSDGGIGIGIAGAMVVLVVFALDFEKNREGERVRVPRERQRKEDHASFVDRFCGRKSQPIAIPGRLRRLAALGTSCISGQQRAEPWVRSDQDRQVQPTNHQTCTVNEVNRLIDRRTRSAWL

SEQ ID NO: 79486 - protein, 174 aa, Zea mays
  Coding DNA Sequence Number=SeqID_36111
MDPYAERGMEHHHHHQYGPPPPQPMYASPYGQPPPPPMYQQPYGQPVYASPYGQPPPPPAMYPPPYAQPPPPPPRKTGASFAEGWVCRNLLLLPHGRMLLIVWSTTSPRNDVFLLAWVRVPISEEINHRVEQLVVAWRRLHLCTGNEAGVARKADKRSNHDRLTAVFLHEVVYR

SEQ ID NO: 79487 - protein, 283 aa, Zea mays
  Coding DNA Sequence Number=SeqID_36112
  Gene Ontology: Mol. function=structural constituent of ribosome; Cellular component=ribonucleoprotein complex; Biological process =translation
  Homolog annotation: Hit_ID=A2ZJS3; Match level="QueryCoverage=90%, HitCoverage=27%, E-value=1e-118, Identity=84%"; Hit description =Putative uncharacterized protein
  Pfam annotation: Domain name=Ribosomal_S3Ae; Domain location=11-245; Score=466.6; E_value=3.2e-137; Accession=PF01015.9; Description =Ribosomal S3Ae family
  Subcellular localization annotation: CTP_CleavageSite=71; ConfidenceScore=5.20e-01
MAVGKNKRISKGKKGGKKKTVDPFSKKDWYDIKAPSVFSVRNIGKTLVSRTQGTRIRSFARLFVGTTIQVSLQEFVGEIASEGLKHRVFEVCLADLQGDEDQAYRKIRLRAEDVQGRNVLTNFWGMNFTTDKLRSLVKKWQTLIEAHVDVKTTDNYMLRLFCIGFTKRRPNQVKRTCYAQASQIRQIRRKMVEIMINQASTCDLKELVSKFIPEVIGKEIEKSTSSIFPLQNVFIRKVKILKAPKFDLGKLMEVHGDYKEDVGVKLERPVEGDEAVQEVAAAE

SEQ ID NO: 79488 - protein, 277 aa, Zea mays
  Coding DNA Sequence Number=SeqID_36113
MCLHLSGEWEQQEEDKIGDDTAHPEYSNWDEEDHVQKTNGDEEATSKDECVKDSTKTNRKNKTGFKTEEQKETEVLPGLAHQTVRCGTGQCPAQPTIIHRTVRCTTGQCPVLQSEAALDWPASGKWKAAPLKFTGLSGVHRTVRCAPDCPVRQRSNDYLAPTVDSDSEQCATVHAAEVRAEDQRGTGLSGVHRTVRCAPDCPVPHEDKASNGRPAPTPTDRMTWLAHRTLSGVHRTVRCAHRQQPSPTATFWLVAINTTPTGHFKVWEFKQQSKSSS

SEQ ID NO: 79489 - protein, 128 aa, Zea mays
  Coding DNA Sequence Number=SeqID_36114
MNKNTRDTRFIPRFGHTTKVPYFLVEAPTKSRVPFNPNPPFADHKGQAHTLIFAQTSGSEVRGVRDQLNCPSGPVQPVLTSEFRRENPSSTARRQVQLLKKLNSAEVKFSWKAQLQLKKFSCFSARTL

SEQ ID NO: 79490 - protein, 328 aa, Zea mays
  Coding DNA Sequence Number=SeqID_36115
  Gene Ontology: Mol. function=hydrolase activity, hydrolyzing O -glycosyl compounds; Cellular component=cell surface; Biological process=carbohydrate metabolic process
  Homolog annotation: Hit_ID=A2ZJS3; Match level="QueryCoverage=72%, HitCoverage=27%, E-value=1e-124, Identity=84%"; Hit description =Putative uncharacterized protein
  Pfam annotation: Domain name=Glyco_hydro_43; Domain location=18-280; Score=-103.0; E_value=0.00014; Accession=PF04616.5; Description =Glycosyl hydrolases family 43
MQDATEDVGEVGAAAGGGGEVVAAGVVVDWEEDRRDRDTRLSRALSPRAAGPRIRNSYPPSVFSGLWRVSFSFLTTNFGKPFPRLTSLEPKVIYNDRTGKYVMWMHVDDANYTKASVGVAISDSPTGPFTYLYSKRPHDCESRDMTIFKDDDGKAYLIYSSEDNSELHIGPLTDDYLDVTDAMRRLLIAQHREAPALFKHEGTYYMVTSGCTSWAPNTALAHAATSVMGPWETLGNPCVGGNEVFRSTTFFSQSTFVLPVPGLPGSFIFMADRWNPSDLRDSRYVWLPLTIGGVPDEAADYSFMFPLWSRVSIYWHRRWRLPEEWRDY

SEQ ID NO: 79491 - protein, 315 aa, Zea mays
  Coding DNA Sequence Number=SeqID_36116
  Gene Ontology: Mol. function=structural constituent of ribosome; Cellular component=ribonucleoprotein complex; Biological process =translation
  Homolog annotation: Hit_ID=P49397; Match level="QueryCoverage=71%, HitCoverage=92%, E-value=2e-86, Identity=68%"; Hit description=40S ribosomal protein S3a
  Pfam annotation: Domain name=Ribosomal_S3Ae; Domain location=81-277; Score=297.7; E_value=2.3e-86; Accession=PF01015.9; Description =Ribosomal S3Ae family
  Subcellular localization annotation: CTP_CleavageSite=62; ConfidenceScore=5.09e-01
MPRSTHMGHTASCASIRSCVPADRMIEPGNPRIVYSSPLCLRSAFSRRAADNSLPSETPSTSAAAAAAATMAVGKNKRISKGKKGGKKKTVDPFSKKDWYDIKAPSVFSVRNIGKTLVSRTQGTRIRSFARLFVGTIQVSLQEFVGEIASEGLKHRVFEVCLADLQGDEDQAYRKIRLRAEDVQGRNVLTNFWGMNFTTDKLRSLVKKWQTLIEAHVDVKTTDNYMLRLFCIGFTKRRPNQVKRTCYAQASQIRQIRPSSHFKTSSSARVKILKAPKFDLGKLMEVHGDYKEDVGVKLERPVEGDEAGQEVAAAE

SEQ ID NO: 79492 - protein, 81 aa, Zea mays
  Coding DNA Sequence Number=SeqID_36117
  Homolog annotation: Hit_ID=A2XGQ6; Match level="QueryCoverage=55%, HitCoverage=33%, E-value=2e-12, Identity=75%"; Hit description=Acyl carrier protein
MAAARSLLLRHLRLAAAPSAASVRPTASLHEALWGQRWMSSEDAKGSFLDKSEVTERIIKVVKSFPKIDDPSKCAMQYGYR

SEQ ID NO: 79493 - protein, 69 aa, Zea mays
  Coding DNA Sequence Number=SeqID_36118
LYGLKVGDEFGDEWEFGGPSGGGACDVGASGDGSRDGVMHEQAAPNPPLRPRSTRLKKVHVKELYKVKV

SEQ ID NO: 79494 - protein, 388 aa, Zea mays
  Coding DNA Sequence Number=SeqID_36119
  Gene Ontology: Mol. function=oxidoreductase activity; Cellular component=endoplasmic reticulum; Biological process=electron transport
  Homolog annotation: Hit_ID=Q94EV6; Match level="QueryCoverage=88%, HitCoverage=64%, E-value=1e-151, Identity=78%"; Hit description =Cytochrome P450
  Pfam annotation: Domain name=Mito_carr; Domain location=3-123; Score =4.5; E_value=0.0012; Accession=PF00153.18; Description=Mitochondrial carrier protein
  Pfam annotation: Domain name=p450; Domain location=44-388; Score= -60.1; E_value=4.3e-10; Accession=PF00067.13; Description=Cytochrome P450
  Pfam module annotation: Pfam domain module=Mito_carr::p450; Domain location=3-123::44-388
MGTGGVGLVAAALTVVVVTMLWTVLVRLVWRPYAVARAFARQGIHGPPYRVFVGSSKEVQAMRAATSGDTMDRTSHDFIPRVMPQYHAWMTLYGKVFLMWSGSTPTLAVGSYDMVKRVLFDKSGLYSKTDPGPTILSLMGMGLTFTNGEDWSRHRRVVHPAFTMDKLKSMTGAMVACAAELIRAWEARAAARGEKVTTVEVGQQFKELTADVISQTAFGSSYRQGKEVFVAQWELQYIAFSVFNNVRVPGMQYVPTKANMRRWQLERTVRGTLMAIIDERLAAAKEGWGYGSDLLGLMLEANNAGDDGKGQQTMSMDEIIDECKTFFFAGHDTTSHLLTWAMFLLGTHLEWQQRLREEVIQECGSAEVPLDGDALNKLKLVSLLSPPP

SEQ ID NO: 79495 - protein, 22 aa, Zea mays
  Coding DNA Sequence Number=SeqID_36120
MYDSWTGPTMMRIINFMASCYD

SEQ ID NO: 79496 - protein, 518 aa, Zea mays
  Coding DNA Sequence Number=SeqID_36121
MARGLGPTRHETGPEQKKPNRRARCMQPPSGYEHSSTFAQTSGRKGGQPCRRHATTPSGRAPPTSNAPSMGAHAHASRNRCAGCNMRATASPLAPLPRLPDCGTSTATRGNPAYDPAVPARRDGQYGQKWAGSDGGGRRVGAAVTSSAKLASHPGAERRRLWQGKRVTLRLRHNDRVKKGNRLRASLLIRGSKAGPSEGFDSRLRARGLHTHYWSEVRRPAPRKGSTAASGHSGSAPTTDQSGNDLVTESHQREASSPRTPSTGDRVRQITRSNSPETPCSAPSEGNMALSPPSSLRKGDAGADQSIRRTRSRLTRAQPRARAADPGGSPSRPRPPSSDEHTSGSPEAQSSPRSNPGRIATPTDQIAGAFNAKGSDSGSAPEDGELRSARPRARTRAQSRKTANSASPNPGLGLGLSPGRRRTPLRPTQGSDSGSAPEDDELRFARPQGSDSALASADSLRLARPRGSDSASEDRLDLDLGGASTSPNLGHGPTTQAMMVPRTLYDDGGSQPPYGSKR

SEQ ID NO: 79497 - protein, 199 aa, Zea mays
  Coding DNA Sequence Number=SeqID_36122
MRSWENATGQWGPLLSPCCARAKDLCRWAPVVSPIPFLWSERWGAKTEVAPWPSANPGRLCVRAFGALAGDPTRQSSFCPRTDCTRYVVGPARVAFFLTRITRDARTTDSAKIFTGRIFLLPQKGMRVLEQSSSSTSTTVVEARLGGGKRTGRAIEYIKHLKILGVRGLLPNDEYFLAGARCAATGPNAWRSASPTPKS

SEQ ID NO: 79498 - protein, 138 aa, Zea mays
  Coding DNA Sequence Number=SeqID_36123
GSDSGSAPEDDELRIARPQGLNSALASTNGLRLARPRGSDSTLASEDRLDLDLRGASTSPNPGLRPTTSQEAPSLPYPKLTQATGNKTGVPSGSPRLQRSSDGHDTTRTGCQNLSGCHDGMALLQRVGRAGKDGTALA

SEQ ID NO: 79499 - protein, 331 aa, Zea mays
  Coding DNA Sequence Number=SeqID_36124
MYCRVSGAPLRACLTSTRSGAHLMPLKEKRAALHLCHNDRVKKAGPSEGFNSRLRALGLRAHYWSEVQRPAPRKGSTTASGHLGSTPTTDQGNDLVKESHQREASSPRTPSKEDQGSDSGSASEDDELRFARPQGSDSGSAPEVDEIRFARPQGSESGSAPEDDELRFARPQGSDSALASTDGLSLARSRGSDSTSASEDRLDLGGASTSPNPGLGPTTSQEAPSLPYPKLTQATGNKTGVPSGSPRLQRSSDGHDTTRTGCQNLSGCHDGIALLQGVGRAGKDGTALADPPGSKRRHGYNSPDCLVCESRTQPTVDSVISGCHICPANGH

SEQ ID NO: 79500 - protein, 390 aa, Zea mays
  Coding DNA Sequence Number=SeqID_36125
  Gene Ontology: Mol. function=oxidoreductase activity; Cellular component=integral to membrane; Biological process=electron transport
  Homolog annotation: Hit_ID=Q94EV6; Match level="QueryCoverage=91%, HitCoverage=66%, E-value=1e-166, Identity=82%"; Hit description =Cytochrome P450
  Pfam annotation: Domain name=p450; Domain location=74-390; Score= -81.5; E_value=6.3e-09; Accession=PF00067.13; Description=Cytochrome P450
  Subcellular localization annotation: CTP_CleavageSite=9; ConfidenceScore=5.09e-01
MGTRGVALVAAALGVVVVTRLWTVLVVRLVWRPYTVARAFTRQGIRGPPYRLFTGNSKEAMAMRAATSGDTLDLSSHDFIPLVMPQYRAWMSLYGKVFLTWSGLTTPALFVGRYDMVKRVLFDKTGLYGKTDPGPIILSLLGRGLVFSDGEYWSRHRRVVHPAFAMDKLKSMTGSMVACAAEVIRAWEALAVARGEEEVTVEVAQQFTELTADVISHTAFGSSYRQGKAAFLAQRELQSIAFASLNSARVPGMQYLPTKANARRWQLERTVRGTLMAIIDERLAAAQEARGYGTDLLGLMLEANNGGGDGKSPQQAMSMDEIIEECKTFFFAGHNTTSQLLAWATFLLGTHPEWQQRLREEVIRECGGAEVLLHGDALNKLKLVSLLDTP

SEQ ID NO: 79501 - protein, 186 aa, Zea mays
  Coding DNA Sequence Number=SeqID_36126
  Subcellular localization annotation: CTP_CleavageSite=45; ConfidenceScore=5.48e-01
MQAACNRAKWARFSDSQHAQHGGPGPRVMQPARRMLRACDCTATCATTAPPRLRNQYRDSRRPGARPSSASLARRRSGRRFAFAIMTASVKGSGKGETPKGILPREGTRLRASLLIKGSKVGPSEGFDSRLRSRGPYTQWSEVRRPAPRKGSTTASGYTGSAPITDQGFEGWPPKGSQPPQTPSEG

SEQ ID NO: 79502 - protein, 191 aa, Zea mays
  Coding DNA Sequence Number=SeqID_36127
  Subcellular localization annotation: CTP_CleavageSite=44; ConfidenceScore=5.49e-01
MSSCSLMHRVFPPSKPPDGGYPPSFCLVVGGTQPGCTPRRRSPKAATTSPWVGRSKPGCDLGPTLSFKDVHHPRWGGGRAEPELYLPRGFVGHPLLRCSRERALAGPAGGSDFDNAGLVDSGRRQPQRVELVGLAPGGPSCRKAAAAPCAREDRPRCRALLGRRSCSGAVLPLHRYGASARRSVPHSSGRI

SEQ ID NO: 79503 - protein, 221 aa, Zea mays
  Coding DNA Sequence Number=SeqID_36128
  Gene Ontology: Mol. function=protein serine/threonine kinase activity; Biological process=protein amino acid phosphorylation
  Homolog annotation: Hit_ID=Q6K6B8; Match level="QueryCoverage=59%, HitCoverage=17%, E-value=2e-54, Identity=80%"; Hit description =Putative receptor protein kinase PERK1
MRLYYLAQHQVHQKPLKRDRLDLEFPLHILRVHYLQDLLSGVYFLLILEGVDARHHSHKHPHHRESNQGPSPSSAPTPEGCSSYICTEPLTATPIGSPCGCVEPISVIVDLDLAPYLLFMSIAELEVEVAAGTFLKQSQVKIMAAVASIQDDQKTRVTIYLVPLREQFDTYTASLISDRFMEKKVQINSSIFGDYKVINISYHGLQSPPSSLPGGSDPSGN

SEQ ID NO: 79504 - protein, 408 aa, Zea mays
  Coding DNA Sequence Number=SeqID_36129
  Gene Ontology: Mol. function=DNA binding; Cellular component=nucleus; Biological process=regulation of transcription
  Homolog annotation: Hit_ID=Q94CL7; Match level="QueryCoverage=79%, HitCoverage=71%, E-value=1e-20, Identity=31%"; Hit description =Phosphate starvation response regulator 1
  Pfam annotation: Domain name=Myb_DNA-binding; Domain location=243 -290; Score=40.1; E_value=8e-09; Accession=PF00249.22; Description =Myb-like DNA-binding domain
  Subcellular localization annotation: CTP_CleavageSite=87; ConfidenceScore=5.36e-01
MQPYINHESDSQWKSSPCLSSAITPVPAFSEATFPIFTEQRSSFAERKLPVSSVASIGTSMAAYDTMSTHMLASNFTNESPNRQLCSGSYVTEPSDPDTPLLATHSSLMADSTPLFVDFSEVSEHICLNQGQLLGLFDYPASVDFYKSKNMTIFGQQIQDTITVDPNTHLTPQNELFSGSSMQLQKTVGSAESVLKTVDARSATPQSYLYCHTESERSVPEPFNCDKLGADSLPFSNTAPKPRMRWTPELHECFVDAVNKLEATPKAVQKVMKVDGLTIYHVKSHLQKHRIVQHRSETSGGVPGRRGSHTEVDDDSIPQSKGEGGVEGGLVSQIGLQKQLHEQLEIQRRLQLQVEEHNKYLETVIAKQNESLKKLRALRGFRDRVRRVLQDSEAPGVRAHCAQAQQRS

SEQ ID NO: 79505 - protein, 146 aa, Zea mays
  Coding DNA Sequence Number=SeqID_36130
  Gene Ontology: Mol. function=electron carrier activity; Biological process=electron transport
  Homolog annotation: Hit_ID=A2XAY2; Match level="QueryCoverage=30%, HitCoverage=41%, E-value=1e-09, Identity=59%"; Hit description =Putative uncharacterized protein
  Subcellular localization annotation: CTP_CleavageSite=43; ConfidenceScore=5.10e-01
MAAAAMGLVRELLQPQGTTSTRRLCSTGVGVGVAAGFLSAGTVASASSACPAYPWSQDGARGGHKVFMQHDCAACHSGLPYAGLADEALAAGGEVEAKAAEIVVVHDHEEEAALTTATTLHGGACPPDLSAVTKFLQSYVRIPQAP

SEQ ID NO: 79506 - protein, 335 aa, Zea mays
  Coding DNA Sequence Number=SeqID_36131
  Gene Ontology: Mol. function=membrane alanyl aminopeptidase activity; Cellular component=cytoplasm; Biological process=leukotriene biosynthetic process
  Homolog annotation: Hit_ID=A2XNE7; Match level="QueryCoverage=50%, HitCoverage=27%, E-value=4e-86, Identity=89%"; Hit description =Putative uncharacterized protein
MGIGWRGLNRMMERFKDNMEFTKLKPKMAGIDPDDVYSEVPYEKGFQFLWRIEREIGRPTFDEFLKKYIATFKFQSIDTETFLEFLKTNVPGIENKIDLHLWVEGTGIPPDAMEPDSATYKKICSLAAEFKSGKLPSEYEVAKWSGQEWELYIENLPADVEASQISSVLLHMTIVIDKILEKGTVEYLIVHTAILEYFTIADKTREGLKLGISCLKYGSAKMIAKIVVVCNDAIIGHSEHQYVATGMPTKAALKHNASTSAAVEAEARGWASVGVGQRDAKQTVMEEASPETVEEPLLVSAIRGKKVERAPIWLMRQAERYHTVPRSCLHMRYKV

SEQ ID NO: 79507 - protein, 231 aa, Zea mays
  Coding DNA Sequence Number=SeqID_36132
  Gene Ontology: Mol. function=RNA binding; Cellular component=exosome (RNase complex); Biological process=rRNA processing
  Homolog annotation: Hit_ID=A7PZ33; Match level="QueryCoverage=82%, HitCoverage=97%, E-value=6e-74, Identity=72%"; Hit description =Chromosome chr4 scaffold_39, whole genome shotgun sequence
MAATAMDHDGGDDVVTPGELLGNSLTLAAGRGAYADGRSVRASVTGRRRIVPPAPGSDDQRSTVEVVGHKAHGAVPQPGSVVIARVTKVMARMASADIMCVDSKAIREKFTGMIRQQDVRATEIDKVDMYQSYRPGDIVKAMLSLGDARAYYLSTAKNELGVVSAQSIAGGTLVPISWTEMQCDLTGQIEQRKVAKVVAVYKLWTSDTRSLGGLPNSATPNFITAALSMGF

SEQ ID NO: 79508 - protein, 546 aa, Zea mays
  Coding DNA Sequence Number=SeqID_36133
  Gene Ontology: Mol. function=serine-type peptidase activity; Cellular component=mitochondrion; Biological process=proteolysis
  Homolog annotation: Hit_ID=Q8S3I9; Match level="QueryCoverage=59%, HitCoverage=80%, E-value=1e-149, Identity=83%"; Hit description=D1 protease precursor
  Pfam annotation: Domain name=PDZ; Domain location=222-307; Score =25.8; E_value=0.00016; Accession=PF00595.15; Description=PDZ domain (Also known as DHR or GLGF)
  Pfam annotation: Domain name=Peptidase_S41; Domain location=342-513; Score=233.1; E_value=6.5e-67; Accession=PF03572.9; Description =Peptidase family S41B
  Pfam module annotation: Pfam domain module=PDZ::Peptidase_S41; Domain location=222-307::342-513
  Subcellular localization annotation: CTP_CleavageSite=74; ConfidenceScore=5.73e-01
MVWPTHASRRVAVAQPPSPPGKVQPRQSGGPDSLAAQSSVAIPSSSSSIAELVVSPQSALGNSVAIIYSSAPLLAEEFVPPIWSWKSVDPRKREASTSLVSVPFEKPSPGRSRIDLGTPAPPTTAGCSLPFRSNEAMLQEIHRVFGEWTVRFQIDAANKENAVPLLFTDGHFARQPQPVLQGHERAAARWGIQALHVRWWFRTRRFRGGARHVHLGSFLYSTVMKSGTQGALTGVGLSIGYPMAINGSPSGVAVMTATPGGPAEKAGILPGDTILAIDNRSTEDMDIYDAAERLQGPEGSSVDLSIRSGTNTRHVVLKRQTVNLNPVRSRMCEIPGSKDSSKIGYIKLTTFNQNAAESVKEAIKTLRDNNVKSFVLDLRNNRFEPAEIGIGGLFPEGIQIAKIWMDKGVIVYICDSQGVRDIYEADGADTIAASEPLVVLVNKGTASASEILAGALKDNKRAVVYGEPTYGKGKIQSVFGLSDGSGLAVTVARYETPAHTDIDKVGVIPDRPLPASFPTDEDAFCSCLRDSTAACNLNAAQLFAKS

SEQ ID NO: 79509 - protein, 506 aa, Zea mays
  Coding DNA Sequence Number=SeqID_36134
  Gene Ontology: Mol. function=nucleic acid binding; Cellular component= intracellular; Biological process=negative regulation of cell cycle
  Homolog annotation: Hit_ID=Q6K6C0; Match level="QueryCoverage=91%, HitCoverage=97%, E-value=1e-139, Identity=57%"; Hit description =Diphthamide synthesis DPH2-like
  Pfam annotation: Domain name=Diphthamide_syn; Domain location=86-397; Score=357.7; E_value=2e-104; Accession=PF01866.8; Description =Putative diphthamide synthesis protein
  Subcellular localization annotation: CTP_CleavageSite=75; ConfidenceScore=5.41e-01
MDAGDASTALALTAAEPSPPSPNRRGKRPTNPPKRFVHTPIPPSILSDPTLAAAATSLLPANYNFELHKTAHRIRSAAARRVALQLPEGLLLFALPLSHLLAPYLEPGADNDVLVLADATYGACCLADRPARALAADLLVHYGHSCLVPVTASLLPVLYVFVEIRVDAARLAAAVRAAFPDPAAAPRLAIAGTVQFIAAVHAAREMLTVEGYHDIVVPQAKPLSAGEILGCTAPTLKKSEEVGAVVFVADGRFHLEAFMIANPGVKAYRFDPFLGVLVLEEYDHVGMKQARKAAVLAARKAKSWGVVLGTLGRQGSTKVLDRVVEHLEEKELEHTVVLMSELSPARMELFGDSIDAWVQIACPRLSIDWGEGFKKPVLTTFEFDVALGYVPGWWEKGSRGCGSECGVGCCSGSGTRGNCNCSDGDYGGDYPMDYYSQDGGDWNSCYMKKKPSTGERKLRVRIGKCSTFLQTLPSLNHNYMTQYLVRLNIKKQLYKLDYGGKVGGNT

SEQ ID NO: 79510 - protein, 557 aa, Zea mays
  Coding DNA Sequence Number=SeqID_36135
  Gene Ontology: Mol. function=S-(hydroxymethyl)glutathione dehydrogenase activity; Cellular component=cytoplasm; Biological process=metabolic process
  Homolog annotation: Hit_ID=P93629; Match level="QueryCoverage=100%, HitCoverage=100%, E-value=1e-123, Identity=89%"; Hit description =Alcohol dehydrogenase class-3 (EC 1.1.1.1) (Alcohol dehydrogenase class-III) ...
  Homolog annotation: Hit description=(S-(hydroxymethyl)glutathione dehydrogenase)
  Pfam annotation: Domain name=ADH_N; Domain location=36-189; Score =122.4; E_value=1.3e-33; Accession=PF08240.3; Description=Alcohol dehydrogenase GroES-like domain
  Pfam annotation: Domain name=ADH_zinc_N; Domain location=220-514; Score=37.5; E_value=4.6e-08; Accession=PF00107.17; Description=Zinc -binding dehydrogenase
  Pfam module annotation: Pfam domain module=ADH_N::ADH_zinc_N; Domain location=36-189::220-514
MASPTQGQVITCKAAVAYEPNKPLVIEDVQVAPPQAGEVRVKILFTALCHTDHYTWSGKDLMAHCKTFSYFPSLTGDGAISCNDPEGLFPCILGHEAAGIVESVGEGVTDVQPGDHVIPCYQAECKECKFCKSGKTNLCGKVRSATGVGVMMNDMKSRFSVNGKPIYHFMGTSTFSQYTVVHDVSVAKINPQAPLDKVCLLGCGVPTGLGAVWNTAKVESGSVVAVFGLGTVGLAVAEGAKAAGASRVIGIDIDNKKFDVGMVYVLRNYVLRLLFFSYVVYQLVKWENSNFLCFQCTERVHFLVQVVEPVNKLGPLTSVAFVSIKKGQTEVGSRKGITEASPTPAIFVERLHFLSNVEQKISKVIFCRANSINFYNENLDATTVVTESEWLDSSEFPEPDFYFLVNIFPVVKAKNFGVTEFVNPKEHDKPIQQVLVDLTDGGVDYSFECIGNVSVMRAALECCHKGWGTSVIVGVAASGQEIATRPFQLVTGRVWKGTAFGGFKSRTQVPWLVDKYMKKEIKVDEYITHNMNLADINDAFHLLHEGGCLRCVLAMQI

SEQ ID NO: 79511 - protein, 296 aa, Zea mays
  Coding DNA Sequence Number=SeqID_36136
  Homolog annotation: Hit_ID=Q6K6C2; Match level="QueryCoverage=83%, HitCoverage=83%, E-value=2e-67, Identity=57%"; Hit description =Putative uncharacterized protein P0643F09.3
  Subcellular localization annotation: CTP_CleavageSite=51; ConfidenceScore=5.70e-01
MATAVLRRPFLAALLLPAAGGASGTSSWFRPRRRRSSPSVRAVSSDSPKPVASTSSPTGGDSPDEEPPVLPLLQELADCLILPPKLLAQLPSDLRLDLNDAAFDLSNGPVLDEVPKNSAFSNWIHARGFSTTKHAYNAHFFAETYVAFGKRLVSAGRRFQSMGQYNQGELKKIAETMIKNGKLLSKHPVVQSDVQAMKEKRRLKFGELEFGVTAQSATIGSAVAAIFGLISWQLARGVQSIPDNTTQYTNDNALQLAKSLKTALLVLGYTSTGLSLFAAFGLLLLAQQINSENKSE

SEQ ID NO: 79512 - protein, 161 aa, Zea mays
  Coding DNA Sequence Number=SeqID_36137
  Gene Ontology: Mol. function=structural constituent of ribosome; Cellular component=ribonucleoprotein complex; Biological process =translation
  Homolog annotation: Hit_ID=P49690; Match level="QueryCoverage=100%, HitCoverage=100%, E-value=5e-70, Identity=83%"; Hit description=60S ribosomal protein L23
  Pfam annotation: Domain name=Ribosomal_L14; Domain location=19-161; Score=159.7; E_value=7.9e-45; Accession=PF00238.10; Description =Ribosomal protein L14pL23e
MSKRGRGGSAGNKFRMSLGLPVAATVNCADNTGAKNLYIISVKGIKGRLNRLPSACVGDMVMATVKKGKPDLRKKVMPAVIVRQRKPWRRKDGVYMYFEGSLFYVNSVASILYTIRSDHPNNAGVIVNPKGEMKGSAITGPIGKECADLWPRIASAANAIV

SEQ ID NO: 79513 - protein, 157 aa, Zea mays
  Coding DNA Sequence Number=SeqID_36138
  Subcellular localization annotation: CTP_CleavageSite=76; ConfidenceScore=5.02e-01
MGGVGAGSLALLRLLLLLLLRAEASALHGTKPSTLPFTVPVGLSCPVPSRSILPCVRSPLRIPRGCSPWGGAPALRASGGRGFRAPFRISPKPPRPCRARCSCSCSCRRASLPSQARSRPLLELPFLITAQRMVFALCEDLTTGERRKVYEYCRGFS

SEQ ID NO: 79514 - protein, 987 aa, Zea mays
  Coding DNA Sequence Number=SeqID_36139
  Gene Ontology: Mol. function=transferase activity, transferring glycosyl groups; Cellular component=endoplasmic reticulum
  Homolog annotation: Hit_ID=A2XB01; Match level="QueryCoverage=98%, HitCoverage=98%, E-value=0.0, Identity=74%"; Hit description =Putative uncharacterized protein
  Pfam annotation: Domain name=C2; Domain location=270-340; Score=16.3; E_value=0.0042; Accession=PF00168.21; Description=C2 domain
  Pfam annotation: Domain name=C2; Domain location=422-513; Score=60.4; E_value=6.1e-15; Accession=PF00168.21; Description=C2 domain
  Pfam annotation: Domain name=C2; Domain location=596-683; Score=56.1; E_value=1.2e-13; Accession=PF00168.21; Description=C2 domain
  Pfam annotation: Domain name=C2; Domain location=7-99; Score=84.8; E _value=2.9e-22; Accession=PF00168.21; Description=C2 domain
  Pfam annotation: Domain name=PRT_C; Domain location=833-987; Score =369.6; E_value=5.3e-108; Accession=PF08372.1; Description=Plant phosphoribosyltransferase C-ter
  Pfam module annotation: Pfam domain module=C2::C2::C2::C2::PRT_C; Domain location=270-340::422-513::596-683::7-99::833-987
MAKAEKLVVEVVAAHNLMPKDGQGSSSPYVEVEFEHQKRRTRARPKELNPVWNERLVFPVSDPDDLPYRAIDVGVYNDRGAAVGGGGAPHGRNFLGKVRVPSAGVPAPGEEAVPQLFTLEKRSLFSHIRGEITLKIYRVNSGDVVVKSKQEKPAKAVVVGPEVVAAPTVTGPKKQPHSHPHPPPPQQQHQRHPLAAVQPPPEPPMDVMPQPPVPMAMKPVAMHADPYPVPPMFSGPADFSLKETRPRLGSGVVADKASATYDLVEQVEYLYVRVVRARGVPMATEAVAEVKLGNYRGVTPAVPSHNWDQVFAFSRETIQSSFVEVFVRARGSDDHVGRVWFDLSEVPRRAPPDSTLAPQWYSMEDRKGQRGGAEVMLAVWFGTQADESFAEAWHSKAAGVHGNGALGSIRSKVYVAPKLWYLRVSVIEGQDLFPMDKGPLAIGRFPELFVRAQVGSQIMRTRPAPVVSTRGPASPFWNEDLMFVVAEPFEEFLVLSVEDRVSPGRDELLGRLVVPVSAIERRWDWKPVVSRWFGLDCGTGGGGNVAGNSVHRFGSRRVHLRLSLDGGYHVLDEATAYSSDLQPTAKQLWKPHVGVLELGVLGATGLMPMKSRDGGRGATTDAYCVAKYGQKWIRTRTIVDSLCPRWNEQYTWDVFDPCTVITVVALARSVSGSRHWRLIGCIPHAYPLLMLHPTGVKKMGELHLAVRFACGNAGNMFHAYAHPLLPKMHYAEPLLVRQVETLRCQATNVVAARLGRAEPPLGKEVVEYMLDHRSSLWSMRRSKANFFRLINVLSGPVAIGRWFELVRSWQRPVHSCLAVFTFLVFLATPELVLPTAFLAMAFAGLWRYRGRPRHPPHMEMRLSHADGATADELDEEFDTFPSTRGDVVRFRYDRLRSVAGRVQTVVGDIATQGERMQAVLSWRDPRATLLFAVACVAAAVIAYCVPTKVMVGMWGLYAMRPPRFRSRMPSPLMNFFRRLPSRADILL

SEQ ID NO: 79515 - protein, 61 aa, Zea mays
  Coding DNA Sequence Number=SeqID_36140
MAPAMQLASPVFQCLPACRLQQQDSGREEEAGPPVVSCPVLPASALVLPLRPADPAGCSLH

SEQ ID NO: 79516 - protein, 243 aa, Zea mays
  Coding DNA Sequence Number=SeqID_36141
MAERYQLPRSCIPPTTRQKDGGYPPSGGLEGGKTRCIRKHEDMVAFQGGHPPFKGGSPYLRPQPSWAESSPTHSKVLLLRRGGWVPHAMQAGSEQKKPNRHAWPTRHATGALNASCMQLHRHLRHYRASSTAEPIPRLEATQRATQQRQPGTTVNTAKYGPAVMAVAGGQEQRSRRQASLRPIQGRRENPLSRREDNAPVFRSSNGSRTRNGRPANHSPRRINSAAGQAAPLAGEAGDASPSP

SEQ ID NO: 79517 - protein, 24 aa, Zea mays
  Coding DNA Sequence Number=SeqID_36142
MSSAMGAAGAVVLMQSMGRKLNLV

SEQ ID NO: 79518 - protein, 168 aa, Zea mays
  Coding DNA Sequence Number=SeqID_36143
MAPKRANSKAAPSVDEAAKAALLAEKKGKALADNTRQGAGEDEAHSKRHRNDQHTLEGTLCTCSSEGQPQVPPPGFAPPAGEDAAEDGEVLGVSTEEQLQLRALRLINRNLQKQKEILEVKRQHVTVQAKLRQMIRDEEQRAQELEQEIALLQREGQHDLQQHGPPLQ

SEQ ID NO: 79519 - protein, 68 aa, Zea mays
  Coding DNA Sequence Number=SeqID_36144
MARVARTLLAKDRLKGVKFHCKNVGHAVAEPDNVLLAVGCEPRQAPVVAVVTTKPRRLGSDMLKQQKS

SEQ ID NO: 79520 - protein, 99 aa, Zea mays
  Coding DNA Sequence Number=SeqID_36145
MRIANDAHTAWRATAIECRGEAREVASTPGEAQAANRAREKELAGAPRRGSSTLGRPSREHVLRRPASRGPGHELKLEAEQREAGLKTARAWCYRWPGS

SEQ ID NO: 79521 - protein, 60 aa, Zea mays
  Coding DNA Sequence Number=SeqID_36146
MGEDRSRDGVGASTAALGSREAPIVPDFSAAREMSSLRLGGLDLDEFRSLLEHSTREQFE

SEQ ID NO: 79522 - protein, 133 aa, Zea mays
  Coding DNA Sequence Number=SeqID_36147
MPPAPQGIPAAGGDPDGDDDNDAGGSSSHNMELSEEQESEGWIARSITRDATRGCHFHDALDTLLRRAFDRHTWSIKYCCVVYQHHRGLYPDQWEATCLVHRPDNDLWGVEAFLEHYSITERDTAEAAMQDAA

SEQ ID NO: 79523 - protein, 134 aa, Zea mays
  Coding DNA Sequence Number=SeqID_36148
MPNWLRVGVNKENQTREWTSELGRLSASSSGLGDQDGGRRSPMRSSSEGRARKRVSLREMGQGSECGCGWGSKESWVRGKATFLGISACVRAGPRRFVGEGGADWAVPRRSEGESGRAAKRFSVLDRTGLRGLL

SEQ ID NO: 79524 - protein, 91 aa, Zea mays
  Coding DNA Sequence Number=SeqID_36149
MELPLDAQSSGRRLDVDERVEQCRAVAGVLHVLARFVQVLQMQHLRAADVLHVLTWFVLVLQMQLKDRELQFMMEVFTSVEGLQDEGIARE

SEQ ID NO: 79525 - protein, 265 aa, Zea mays
  Coding DNA Sequence Number=SeqID_36150
MVRREPMLSAPRWWLGSSTAVDSITNSDFHRSSTKPPTVLDGNLSPEPRLISKPENEEDKNIKIILLLIKLSLIPIFACQLSKSMQCQCVGLNSRADVYEAIRGEETRSSLISGILVERLVEMKRFISGRDFFSGGCLDDPPANQFQTSSKRKRVYVEPQNQEFKMDNEKTYSQKIKAVDARQGKLQRTNRLATTHKARQFELERDITFDNTKSANSSKSMTKEATYNSLNEEASKQQVKLKEKSTTTFDKTKCATTSKIEDDKN

SEQ ID NO: 79526 - protein, 46 aa, Zea mays
  Coding DNA Sequence Number=SeqID_36151
MEIGIRIKVWYRSLEDMVAGVTWPSILPLGWIVEWDPTSAEEEHEE

SEQ ID NO: 79527 - protein, 252 aa, Zea mays
  Coding DNA Sequence Number=SeqID_36152
  Homolog annotation: Hit_ID=A2XE67; Match level="QueryCoverage=86%, HitCoverage=84%, E-value=9e-55, Identity=53%"; Hit description =Putative uncharacterized protein
MSESDGCALRRPPTAAEVVGRLKDDGDFDALRRAIVRKVKDNMEEVLAFKGLPLSDMCRGSPKVSLYPTHVEIHQRFSDRKEILRNKIISEVKQSVVLQEDGSERMKLKDLSDAIFQDIGSKIMGQISDEVWNVIQSNETDIQGTVKAVYNRILNPEKVSEPSPKKLKQRGKEEQVLPTKTATSVAVEAEDDDPEEPPGFGFNNTQRNDIGATKPQMSLENGNEGKPNGGEPATISNPGDEEEDPEVPPGFG

SEQ ID NO: 79528 - protein, 197 aa, Zea mays
  Coding DNA Sequence Number=SeqID_36153
MTSHGSSDEGNAQSHTDGLVREGFPRILWEVLQGAGYTTPPQYAVQLFEKHRVPHYRKEDNPMWKDRVEHVKDIWAIYPGQTAHLTMRCMNALYRLQVMRGEAMSHLMALLEATKITLDNKEELVVDLSTEMVEKDLQVEQLSNEIQELEELVGTRENTIEVLEDQLINTQQQLAEANQHLDMHHQEIQDMEANEDV

SEQ ID NO: 79529 - protein, 60 aa, Zea mays
  Coding DNA Sequence Number=SeqID_36154
MDGGLFSKKSGVGDLFSNAMGQEQGNIENVNRNNVELQMYLQLEGDESTSVTQKANAKSA

SEQ ID NO: 79530 - protein, 128 aa, Zea mays
  Coding DNA Sequence Number=SeqID_36155
  Homolog annotation: Hit_ID=A2YP58; Match level="QueryCoverage=28%, HitCoverage=6%, E-value=3e-09, Identity=78%"; Hit description =Putative uncharacterized protein
MSQSDTAAGVEQWLKFILKAIFSTPSSYQYSIEHESQRLARIRARGRQRRAFKSTFDLLRLEIDSWQENNSEDDISFFLVSKATAPGLEAKLGNLAPAYSAAGRIAPYFVERFQFDIGVSHPYTINLK

SEQ ID NO: 79531 - protein, 106 aa, Zea mays
  Coding DNA Sequence Number=SeqID_36156
MVSFEHEYGRAHGKEIKGGPRCAFMGPSGGWRAESDWGTIRWAMVVGASDDEEARIPTDFDECVSRQDLEANNKLLKEQMEETVHKSVHDAFINMDLGRTYERLDR

SEQ ID NO: 79532 - protein, 247 aa, Zea mays
  Coding DNA Sequence Number=SeqID_36157
MSLSNYPHARSARHRGLHAHDTHRGCACPHSSPFLDAQCPTRSPSPSLAHSQPPALALPCVHTQGALPPFAVVSCPFYGRCRALAVYVASMSFASSPATRDTPRFAPSPSISLGPRSPIHSLPSHSSTAVDPCPHRAPDAVRESSSLLSRPIPSALGAPVCLASGDCVAESAFGAAPGRPEKFVEPEPSICDPVASTPRALGTSLTHGPRVDQTVGTSPYPFAWYLRTQVGITADQNNTKVDKAPKV

SEQ ID NO: 79533 - protein, 22 aa, Zea mays
  Coding DNA Sequence Number=SeqID_36158
MARRRSQKNKKTQENKEGDKCF

SEQ ID NO: 79534 - protein, 21 aa, Zea mays
  Coding DNA Sequence Number=SeqID_36159
MAGKQRRSLRSDCRVSHPGND

SEQ ID NO: 79535 - protein, 156 aa, Zea mays
  Coding DNA Sequence Number=SeqID_36160
MSGSGVPKPCVHANVAVGGELGPCTCDGVATGGAPESCRSTASSAARILLTSPCCRKGLRATCVMVHVGHHHYPSLGPSPGSVEAETSLEAEAEVGRGRDSSRDRGRGRVRGSGEAETSSRGRSLRSGEAETSSRGWSMRSGEAELPIAPEAKLDG

SEQ ID NO: 79536 - protein, 44 aa, Zea mays
  Coding DNA Sequence Number=SeqID_36161
MPLRVFSLVGLIVILYMKKFMYCTHNYTPVYLWILSGQKSDLLK

SEQ ID NO: 79537 - protein, 43 aa, Zea mays
  Coding DNA Sequence Number=SeqID_36162
MAMMGSTSEKMYLCQDRADVGLMIEDPLTGHMPRHGLTLPWAD

SEQ ID NO: 79538 - protein, 133 aa, Zea mays
  Coding DNA Sequence Number=SeqID_36163
MDQRLGRCGERVRGRQGAGWLIGGAMVGPGLLVSGTGQAQARASTRDDGRGLPNGDPERRWLARCAALTRGTRGSTGQRPREGKRRGGQGEAARWATAIRVVFNPEPGAWPAMPDGEGGLSGARGPRPGRRSH

SEQ ID NO: 79539 - protein, 83 aa, Zea mays
  Coding DNA Sequence Number=SeqID_36164
GNPRLSSMVNLVTVLNTELDHTLDELGKAQAEIAELRAERVERCHQEDGSPAPVGTRHPYCSPHHGRYAYGTPDYRTWINLEL

SEQ ID NO: 79540 - protein, 109 aa, Zea mays
  Coding DNA Sequence Number=SeqID_36165
  Homolog annotation: Hit_ID=A2YU74; Match level="QueryCoverage=60%, HitCoverage=14%, E-value=3e-08, Identity=43%"; Hit description =Putative uncharacterized protein
MPLITLHVVAASKGKAVRKIIQHFLEALKIYDIYQVTRYSAKNAKAHNAAAANDGQTVAKEGEEKVKMHTHSYCCLDYAQEFKRGVMLWRRSPDRMCLDFGGIIATYVI

SEQ ID NO: 79541 - protein, 146 aa, Zea mays
  Coding DNA Sequence Number=SeqID_36166
  Gene Ontology: Mol. function=RNA polymerase II transcription factor activity; Cellular component=transcription factor TFIIE complex; Biological process=transcription initiation from RNA polymerase II promoter
  Homolog annotation: Hit_ID=A2YU74; Match level="QueryCoverage=54%, HitCoverage=17%, E-value=2e-15, Identity=59%"; Hit description =Putative uncharacterized protein
MMVAGGVREIDEERRRTPGADDEGMSEGDTDASLGLHRGGGEGGVEDCVAGVGNTETLTILPLWLVKLAARAFYDDVSMKGDNQPKTSRGDNRGMAVVVLDALTSLEGSVVTEFCLGKRLQPRLRSITSCYDRPPLQAPDHSRGNG

SEQ ID NO: 79542 - protein, 136 aa, Zea mays
  Coding DNA Sequence Number=SeqID_36167
MVAEGETVALEFTPIAERCLQYLGKTLKKKAASQGQRRCPISSYFCFDTYHRRSHDLIFNGKSISGDYSLKGQMNEGKSMSRATGQLRETKVPFPVFCLIQWHISPYDLIFNGKSISGDYSLKGQMNEGKSMEQSN

SEQ ID NO: 79543 - protein, 124 aa, Zea mays
  Coding DNA Sequence Number=SeqID_36168
  Pfam annotation: Domain name=zf-CCHC; Domain location=33-50; Score =20.5; E_value=0.0012; Accession=PF00098.14; Description=Zinc knuckle
MESLVYEELAPMANRFMWFHNNCQNRQRGGSKDGCFNCDDPDHSVANCPKKGKHEAAILSSTVFMGGLAVSCVSLLVLVARPGSGETSLEAEVGSAHGYATMPRVVGRVIKVVSCGIRGRVGGI

SEQ ID NO: 79544 - protein, 78 aa, Zea mays
  Coding DNA Sequence Number=SeqID_36169
MAWRECMFVNSIFAVLMDRQFPLAIAVIVGEGWYRPCQRRAASVPRSGSLLEKKRKSRDLYGGVSETVEQCKGFFKEF

SEQ ID NO: 79545 - protein, 94 aa, Zea mays
  Coding DNA Sequence Number=SeqID_36170
  Gene Ontology: Mol. function=RNA polymerase II transcription factor activity; Cellular component=transcription factor TFIIE complex; Biological process=transcription initiation from RNA polymerase II promoter
  Homolog annotation: Hit_ID=A2YU74; Match level="QueryCoverage=68%, HitCoverage=13%, E-value=2e-27, Identity=89%"; Hit description =Putative uncharacterized protein
MVEEGVNSAIILGGWSLWLHRNRYSAFDALQLVSYTDEYFHCETCNGELVAEDDKLASEEMGDGDDNVRKRRREKLKDMQQRIEVSPQLSLELF

SEQ ID NO: 79546 - protein, 204 aa, Zea mays
  Coding DNA Sequence Number=SeqID_36171
MGSGAAPPSLVWAGVGAGVGHWSFAARVRSRWCQPGGRGPPVRYEFLADGDPLPLGHYTPWLCSTTYVQLSLIDLGGCAAHTDVRRSFAWVDSFSARLEFLTDVSSPPPKRHLPWAGLVTTSHSGKKPHYDPPYCTPRIALIGLEFGARGVCGPNAGGEEIDFGCIEFGPSDLDPVAVISIPVRDPTAIDHQYPFDFVDLYMSP

SEQ ID NO: 79547 - protein, 174 aa, Zea mays
  Coding DNA Sequence Number=SeqID_36172
MDRHCSLSSAPSRAALTLRELSAHCSRCQPTVEVDCCAGDRCFAWHTGQSGDPPDSPVNYSGARPQKPEVTAAEEKGRGAYQRRGCSGEGSGKVRGSLAITSRLGTGSCNVTKSPVSDSRVPRTNCAKIVSNGFGLSSNFTRACSRKFGATFIFGLYGFEFWKTGNTSELGKGF

SEQ ID NO: 79548 - protein, 65 aa, Zea mays
  Coding DNA Sequence Number=SeqID_36173
MGGQLGFWVGRPANDGIEREVNLRNVELDVLSAEVLLSPECNRECDAPKGIHQLRAYSREWARGS

SEQ ID NO: 79549 - protein, 95 aa, Zea mays
  Coding DNA Sequence Number=SeqID_36174
MAMVNTRRGGGIDLPPNRHTRWIYRQPQPQPAEMNPPNSPPGGVDPLIVAQMRMMQQMADTMADMRAQMQQECQEMRQEREEIRQELRQEREEIR

SEQ ID NO: 79550 - protein, 164 aa, Zea mays
  Coding DNA Sequence Number=SeqID_36175
MGSGAAPPSLVWAGVGAGVGHWSFAARVRSRWCQPGGRGPPVRYEFLADGDPLPLGHYAPWLCSTTYVQLSLIDLGGCAAHTDVRRSFAWVDSFSARLEFLTDVSSPPPKRHLPWAGLVTTSHSGKKPHYDPPYCTPRIALIGLEFGARGVCGPNAGGGRHHCG

SEQ ID NO: 79551 - protein, 144 aa, Zea mays
  Coding DNA Sequence Number=SeqID_36176
  Homolog annotation: Hit_ID=Q5VP43; Match level="QueryCoverage=47%, HitCoverage=57%, E-value=6e-13, Identity=58%"; Hit description =Putative uncharacterized protein P0036F10.27
MADNANLPPTWATTAGLGFLTLNSRVAIYRVWGDLVSILLVTGSYAALLLLFRCLRDYERAAPGSQPERGRGAVWLLTVAFAWKVAAAMPSAAASAVIWALAVGALRPWIGMRMDCNIPGVYIPLDNEYGFKHVISVNETDAKI

SEQ ID NO: 79552 - protein, 96 aa, Zea mays
  Coding DNA Sequence Number=SeqID_36177
MEEGRRWEKLGWRPGHHRRGSKEGAAGSWGQAAAMDAGTQSARQKKPLGWARSEQRSRGAAGESAMGEGEGEREACGDCSASCAQGREEQGARRWR

SEQ ID NO: 79553 - protein, 189 aa, Zea mays
  Coding DNA Sequence Number=SeqID_36178
  Subcellular localization annotation: CTP_CleavageSite=22; ConfidenceScore=5.13e-01
MGIKAMRAKRTRWRAGNRASIRQGKRRARQHAKRRQSNRQQSVGEFNEHDHSRVLTRRTRRGNLTRVEKQHGTVEQGPSASEQGNFALTTEELQRGSTRAAGANVVQAGANQGRAKSGTAWLGTRPTGELEGARLRGDQGAAQERATQGGLEGNPGAERRGNAATRDLQEYGDAKQQSKSTGEEETDRT

SEQ ID NO: 79554 - protein, 106 aa, Zea mays
  Coding DNA Sequence Number=SeqID_36179
MAANTQTNSDQHVFSPMLPRRGGVHRPWWRSDADPRSNELEPHYSHRWGHVRLPCDTVGLPSLNPDPEQQHPFGFARGDIHLIVLGAVFCAPIAVEYEPMEEEGGG

SEQ ID NO: 79555 - protein, 128 aa, Zea mays
  Coding DNA Sequence Number=SeqID_36180
MARSLLEALGSHGKQGRRLRGEGGAGCGLGEKEPKEKEVLVEDLGQRNHSLCAVLLPLRVDKIFSGECCAAVWAVPAGRVCGEKQLRPPASGSKDNAFGGSAMAPPCQTTRRRWTSIEEETLWPWISY

SEQ ID NO: 79556 - protein, 86 aa, Zea mays
  Coding DNA Sequence Number=SeqID_36181
MVHANWVSSRGVLLPLRVDKIFSGECCAAVWAVPAGRVCGEKQLRPPASGSKDNAFGGSAMAPPCQTTRRRWTSIEEETLWPWISY

SEQ ID NO: 79557 - protein, 154 aa, Zea mays
  Coding DNA Sequence Number=SeqID_36182
  Subcellular localization annotation: CTP_CleavageSite=51; ConfidenceScore=5.30e-01
MAGKKRTPGHHRSTVTASGFSSHGGAMLTPGELPPPTPGSPTLDPNTRYTVSSTREAEGLAGLTRNNDARRGEPRSDLDALWCGTPTSQARPTVNTPKSWRGDPSKRGWGFTGLGRVEQGQGERRPQGRGGPTPMARCDSREKYGHRREEMGKK

SEQ ID NO: 79558 - protein, 16 aa, Zea mays
  Coding DNA Sequence Number=SeqID_36183
MAQPLTSLSLGFALLD

SEQ ID NO: 79559 - protein, 405 aa, Zea mays
  Coding DNA Sequence Number=SeqID_36184
  Gene Ontology: Mol. function=nucleic acid binding
  Homolog annotation: Hit_ID=Q338V7; Match level="QueryCoverage=61%, HitCoverage=32%, E-value=2e-16, Identity=29%"; Hit description=Zinc knuckle family protein, expressed
  Pfam annotation: Domain name=zf-CCHC; Domain location=312-329; Score =22.0; E_value=0.0007; Accession=PF00098.14; Description=Zinc knuckle
  Pfam annotation: Domain name=zf-CCHC; Domain location=337-354; Score =8.9; E_value=0.07; Accession=PF00098.14; Description=Zinc knuckle
  Pfam module annotation: Pfam domain module=zf-CCHC::zf-CCHC; Domain location=312-329::337-354
  Subcellular localization annotation: CTP_CleavageSite=27; ConfidenceScore=5.05e-01
MSSDSNLFVDAHDLWTKIKLKFFKSICTASAPSIAGGTNLSKGEEQERWTPSDGSSSPTSSSSTSYKCLIANNDSGGESNDEEEYEDDSEDESSSPQGTFSCIASTDNNDRENETYDVEEEEIRRFYTHLNKEDKALLVKLLRRNKEQGETLLRLEETLIKTNDSLEKMTKEHEELKCSHDNLVQRELVDDHIMLDIAHEVVTTSLNLCESRSGTSDQLVKVLSCADLHCPKKGQSLIEKQVVGSKRKLLRNKKQRQLRSRRHARLSQDIYKHVVNKLEEGGTAARVKLREKEAPKTINMNKEKEQKEKRKRRCFKCNELGHLIASCPYKDKDEGMRRCFGCNDKDHMITACLLMKNQTCAPSRMTLTKKKDKQQASCQVEQHFSYMCGEHGHLPKVISLESFNG

SEQ ID NO: 79560 - protein, 103 aa, Zea mays
  Coding DNA Sequence Number=SeqID_36185
MAKPGHTTPGRLLRKQQPTRLTRFRLATSESSRVGFGGLDDNPIKGLTKTTDQAKDGGKNSFEVPSAREKVKETRNPKPGVKKKTCKVKVDRVKSYGASRITT

SEQ ID NO: 79561 - protein, 327 aa, Zea mays
  Coding DNA Sequence Number=SeqID_36186
  Homolog annotation: Hit_ID=A2XZM1; Match level="QueryCoverage=57%, HitCoverage=95%, E-value=7e-57, Identity=60%"; Hit description =Putative uncharacterized protein
MKSKVKSFNRVQAFLNSDQNRCAMKLLSAYEEDDAKEIKRIAQSSAFNHLDHVAKSQVGEKIMVKVVFISISMLSAAFYFYVCKVRLANIRMPPPDLLHLIHLQLLYFCIVDINSARCPLLTCYQIQVAAEGSKQREMKLRVVCRKLYDYVRYDLKEIAFPSSLPDPPHIKKRPKLSWHERWCILKEATRLYGASWVRDIGPELRPNDYKKAAEDVEEQSSNGSHPSSGSDRKGKASSEPTVLEDLAVAARGGAETLKPALRRIYMARASTYTDAMKNFVETYQEGLKDQLQEKAHGGEGGGGGGRYHHQEQKEHGNEDEASKPPPP

SEQ ID NO: 79562 - protein, 150 aa, Zea mays
  Coding DNA Sequence Number=SeqID_36187
MGEWSLEMNEFIETWHPEMAPPKQTPRMRVGPRGVPKHQLASCTVETGSSSHTPPLQTDSDRRAPQSQVEQLQQNLNASLNERCLDVAHIMEILAEKKQLQKKLAEQKEQLAAIMRENPSSTARRQVQLLKFNSAEKAQLQMKKLNSADV

SEQ ID NO: 79563 - protein, 62 aa, Zea mays
  Coding DNA Sequence Number=SeqID_36188
MDAQYDVTQEWLDRVKIARKGLEELSKDVDPRAIDLAMRITERMFLKMKEDEAKNKIEEEKK

SEQ ID NO: 79564 - protein, 193 aa, Zea mays
  Coding DNA Sequence Number=SeqID_36189
  Subcellular localization annotation: CTP_CleavageSite=39; ConfidenceScore=5.22e-01
MGKPGPSLLMLLLCRVTTLVPTITGMGVSVSSRMRGKVCCQVHSGLCVKNHRKRPTGYLVVIFPKFKVKKCKESKKGSPWSLVYVRRRSGEVRRHRSGVSGEVELNPWLWKLHRGVAPCTSLFRYFFVLVKSGKNRDHIGAYYFQTRPDPTVVYIPTFGGTRWENWRSEWVIASAEANDRLVLPSDGPALDRK

SEQ ID NO: 79565 - protein, 215 aa, Zea mays
  Coding DNA Sequence Number=SeqID_36190
  Subcellular localization annotation: CTP_CleavageSite=59; ConfidenceScore=5.01e-01
MLRLLLLLLWLLLLLLVPLGGGSETSDPSARRSLRRLSSSDPLGGGTCGGTACSPFALVQGAGGHGGSGTASHISELGTSSRRIGDPDPAVGVPAASLANRHAALVEGRQRGQDRRPQAWVIAERRDVLGEYQGLRDESFPSNPSHQKCQLVLGQISARRALDPADVIRAGEPAAQARSPLQRRDPALQEITDHVHQCQAARSQTLDPVQYGQEL

SEQ ID NO: 79566 - protein, 141 aa, Zea mays
  Coding DNA Sequence Number=SeqID_36191
MEATRKDLEDLQADHRVGVQRIAAWAGEASTTLVPLGMSPILVSELPTSISDTLLVLDSTVDRLRRLDQILGAHLEAEGGKLCWEVVEYVLTCFWSHDPAISLAPVIVGPVAAIEDSAREGVQDAVELVAERFQRDPAGEL

SEQ ID NO: 79567 - protein, 722 aa, Zea mays
  Coding DNA Sequence Number=SeqID_36192
  Subcellular localization annotation: CTP_CleavageSite=46; ConfidenceScore=5.63e-01
MARDVAKSAAPGASKPPTGAKSATPVPSKPLLVVPVPERRPLSPSRAAETEVGKVGASMDISVADYLLGGVSIFDVHTGRGLVGSEARQLVVAPTSVAAGSVAVVTGMMGSAQDPWAQFCASGEISSTAAFFARGGLSTQQLKHSSLPEKRRLEGRNERLRTQLSEAMRDKSAAESKSRNLMDKLSTAESKKEELGRRLAAEKEDADKACAEAHAVRAEAKLACTEASLALQRAAKAEANHQSLHGHLDKTEASTHTGVDRARALLVDAYRQLGARTAPFDSSGKEVGLRFLGWLHEELEVLLSIVTGLMSFASLITCEGAANALSHEGCRHFEVFNRSDEYFNHEIFQVEDVVLKRSAGALYDRMWGPHRQDTVQERSDWAMEQMANDEEIKDLGDLKSATPLAEGARAGAEDQLAPLTGVGEDDPAAAVALPEDTTGAAALAFEDPASSASPTQVPTSGPAQATSTDGINFVAVVNEVPAKEGFSGSESGPFSSDGGGFESPFSWTEESSDEDLDYFAALDVAVVESSPRLGMSEALDPPAGERIECHQRRVVAKHSVGKSSRSGRRRRMGLEQTRLRVDRGSIQKVEGCESGCPALCRVEGPYYSRQLVDPFALFVVKKPFLDGGKKFSIVTLNNAVGLWVVHRGEDRLGADEKAEISEVLVVELFAVVDCEFGRDSEAANNVFQKNFCVVFDAMVNTALASIHFVKYSTATKANLRFP

SEQ ID NO: 79568 - protein, 101 aa, Zea mays
  Coding DNA Sequence Number=SeqID_36193
MAQRLTRTTFAGERKESGEGFVFPTTHYRLRVEPSDFGSRAESCRLGNVAVSQGGVPRQIPAKIMSNGRILLPNFSRVCSRFEFWKTENTAELYKGLKIQF

SEQ ID NO: 79569 - protein, 207 aa, Zea mays
  Coding DNA Sequence Number=SeqID_36194
  Gene Ontology: Mol. function=histone deacetylase activity; Cellular component=nucleus; Biological process=histone deacetylation
  Homolog annotation: Hit_ID=A2XF24; Match level="QueryCoverage=76%, HitCoverage=15%, E-value=4e-60, Identity=71%"; Hit description =Putative uncharacterized protein
  Subcellular localization annotation: CTP_CleavageSite=23; ConfidenceScore=5.36e-01
MTQAPMPPIQDSQLLPKPYRVLRAQLCWVSGTSSFSCVACPTMTLLKCISGLSTFYYQLKLLGSTGFHKNKDSLLRDQTGVALGHELTDKMPPNEYYEYFGPDYTLHVAPSNMENKNTRHQLDDIKSKLLDNLSKLRHAPSVQFQERPPEAELPEQDEDKENPDERHDADSDVEMNDAKPLQDSGRRGNLRMKKESAETHAIGQMAL

SEQ ID NO: 79570 - protein, 175 aa, Zea mays
  Coding DNA Sequence Number=SeqID_36195
MKCTHFHNLRRSINLRYVAEEDSSARGCTPATRHKPGDDLSPRSQKPEEEGYQPNTSRGGARPGNQGPRSHSSAGAKEKRRICPGWSTFRRRSMKPLKKYATLPKMTMTEGLSTGNFVRRAHSTKKNGMMTSIMVALPLMMLLLWQQNCRLSHDHNPTSHLSCPCMMGTRIQSNS

SEQ ID NO: 79571 - protein, 433 aa, Zea mays
  Coding DNA Sequence Number=SeqID_36196
  Gene Ontology: Mol. function=pectate lyase activity; Cellular component=extracellular region
  Homolog annotation: Hit_ID=A2YEF0; Match level="QueryCoverage=93%, HitCoverage=93%, E-value=1e-173, Identity=69%"; Hit description =Putative uncharacterized protein
  Pfam annotation: Domain name=Pec_lyase_C; Domain location=163-350; Score=292.0; E_value=1.1e-84; Accession=PF00544.10; Description =Pectate lyase
MVDGFRWIRPGSFVLYLVFFFLSAALSEANIGDFDEYWQQRKLMADAAAEATSVEKEDIGTRREMMGTTTRKSKFSGPCRATNPIDRCWRCRQDWATDRKRLARCAKGFGRNTTGGLAGKFYVVTDGTDDDVVNPRPGTLRWGVIQIEPLWITFAKTMIITLKEELIIRGDKTIDGRGVQVRITNGAQLTLQFVNNVIIHNIHINDIVSSNKDGGYVRDSPDHFGWRTVSDGDGITVFGSTNVWLDHLSLSNCQDGLIDVIAKSTGVTISNCHLTNHNDVMLFSSSDKHPEDQIMQITVAFNHFGRGLVQRMPRCRWGFFHVVNNDYTHWLMYAIGGSKAPTIISQGNRYIAPPNLAAKQVTKQHDTPESVWKNWVWHSENDLFMEGAYFTVTGGQINRQFNKKDLIKPRNGSYVTRLTRYAGSLACTPGKPC

SEQ ID NO: 79572 - protein, 60 aa, Zea mays
  Coding DNA Sequence Number=SeqID_36197
METLSVEYQQEFEEYKEQLIKEAHAKFLINFKVDRNHKVETKENMHDSSAENWLDQAQPL

SEQ ID NO: 79573 - protein, 154 aa, Zea mays
  Coding DNA Sequence Number=SeqID_36198
MDDLSTMTPTIVIGKIAAFEMSRKWVDKRSQLFQDHMLLHVMKEKARRRLPLQVPQVKMRRKKKVVMMKIINHQHHPLRTKKQSDTSERSRIFSLTLTGKSKEREDASHAGRRATSGTAVQIWPNPQRGGTKAMRLQVLKLGMTLQEKMNPKDA

SEQ ID NO: 79574 - protein, 77 aa, Zea mays
  Coding DNA Sequence Number=SeqID_36199
  Subcellular localization annotation: CTP_CleavageSite=70; ConfidenceScore=5.52e-01
MAAAMAGSPWPPARPRPGRAPPAAPGRALAPRPAAPPPMRARPPGQPDPPPPPARSPGRRFNRAGSAAPAAQLGRPA

SEQ ID NO: 79575 - protein, 179 aa, Zea mays
  Coding DNA Sequence Number=SeqID_36200
  Subcellular localization annotation: CTP_CleavageSite=72; ConfidenceScore=5.55e-01
GKSSVSHTDGHNVFTISSSFHLAPHVVVVPGCQSKIPSSSRLTNAHDNSHRGTSTLFLRLRGVLKCEGGPPRCADRAEGDVGMVLGVGGIQRDVDLDDVDPPPHGGCGGGGGAVERPVEGGWSRGRWEERGNQGILRLPWIRLAAEVREVVPSVGSTHAASDHAQSTVVAGHGLGFFRR

SEQ ID NO: 79576 - protein, 365 aa, Zea mays
  Coding DNA Sequence Number=SeqID_36201
  Gene Ontology: Mol. function=DNA-directed RNA polymerase activity; Cellular component=DNA-directed RNA polymerase III complex; Biological process=transcription
  Homolog annotation: Hit_ID=A2XUZ9; Match level="QueryCoverage=85%, HitCoverage=28%, E-value=1e-153, Identity=89%"; Hit description=DNA -directed RNA polymerase
  Pfam annotation: Domain name=RNA_pol_Rpb1_2; Domain location=99-265; Score=370.0; E_value=3.8e-108; Accession=PF00623.11; Description=RNA polymerase Rpb1, domain 2
  Pfam annotation: Domain name=RNA_pol_Rpb1_3; Domain location=268-365; Score=6.5; E_value=5.5e-05; Accession=PF04983.9; Description=RNA polymerase Rpb1, domain 3
  Pfam module annotation: Pfam domain module=RNA_pol_Rpb1_2::RNA_pol _Rpb1_3; Domain location=99-265::268-365
MQRLPNALSRAAHVAGASAPGIYFGIGIGIGKVEFQRLDVHGIRNWKSIPIPLDCWQYLQLQVVEYVNSDAPSLPESQHRGLVQRLKGKTGRFRGNLSGKRTEYTGRTVISPDPNLKITEVAIPVLMARVLTYPERVSNYNIEKLRQCIRNGPFKYPGANFVTQPDGMKQSLKYGDRRITARDLKCGCIVERHLEDGDVVLFNRQPSLHRMSIMCHRARIMPWRTLRFNESVCNPYNADFDGDEMNLHVPQTEEARTEALMLMGVQNNLCTPKNGEILVASTQDFLTSSFLVTRKDTFYDRSSFTLLCSYLGDGMENIDLPTPALIKPVELWTGNGNKDGLYSVLLRDYNSHAAASCMNRLAKFR

SEQ ID NO: 79577 - protein, 305 aa, Zea mays
  Coding DNA Sequence Number=SeqID_36202
MGHGRPLGLPVSSSLETPCSAPSKGNMELSPSSLWKGDAGARHRKLCFARLQGSDSGSAPEDDELHFARPQGSDSGSAPEDDELRFARPQGSDSGSAPEDDELRFARPQGSDSGSAPEETNSASPDPRARTRAQPRKRRTPLRPTPGLGLSPGLSRRSPPRPTQGLGLDFGLGRQTRLRPRRSLHLAQLRARTDHVTGGAIITLPQADSGYGEQDRCPIWLASPDKLQRSSDGHDTTPTGCRNLSGCHDGMALLERVGRMGKDGTALAQGRSLPPAWTLEENILFSPVMWFVHPLSMIQLEPPDA

SEQ ID NO: 79578 - protein, 55 aa, Zea mays
  Coding DNA Sequence Number=SeqID_36203
MTKEAGQGSGSSERMGGVMKAGEQREDKEGESFVRFGHGGGLTPSGITVKKKEIG

SEQ ID NO: 79579 - protein, 110 aa, Zea mays
  Coding DNA Sequence Number=SeqID_36204
MEHRPGLERLPENSHLELDGKLFVNTQQAPTWRANYRRFDPGGSLDRRVNCRRVPQPRWVELSREANSRGRRRYFYRGIRNHARSRLILVGAPTQREAHARAKHHGRVTP

SEQ ID NO: 79580 - protein, 144 aa, Zea mays
  Coding DNA Sequence Number=SeqID_36205
MKKIPAPSREIKEEAASTPPAPPPSEELQGSVPFEEEFDPVLPSQSPPEEGSDSGSAPEDDELRFARPQGSDSGSAPEDDELRFARPQGSDSGSAPEDDELRFARPQGSDSGSAPEDDELRFARPQGLDSGSAPEDDELRFARP

SEQ ID NO: 79581 - protein, 122 aa, Zea mays
  Coding DNA Sequence Number=SeqID_36206
MPRNMVNRGLYPSRDLRRGLPFRLWWVQVRSLHDGSRVSEALYNKAMTSHGSSEDGNALSHTDGLAREGFPRILWEVLQGAGYTTPPQYAVQQFEKHRVPRCRVRMTLEPHPLQPGWRSLDS

SEQ ID NO: 79582 - protein, 150 aa, Zea mays
  Coding DNA Sequence Number=SeqID_36207
MTLVLWDLMFMLNAACFTVKDLPKKSSLKQEMERDGHKVDRHAVHERKSKAMPEGYEQKQEMNVVYLSVMPSTQRGLVLALKRKTHPTLRVPFIPKTKAMVEELLKEYDNVCTLRVRNYVLFLYASYFNRTRIGPYLKISINRYIPEECI

SEQ ID NO: 79583 - protein, 214 aa, Zea mays
  Coding DNA Sequence Number=SeqID_36208
MELITGAATATPWMVVFQESMEKDGNLSRNLARIASGLRMEITNRGQWSFLRELDARGTGCGDYGLDLAAAPSTPPFNRGRDWMQEELDAGGTGCGRELDAGGTGCGRGMEMGSGREELDPAVAPLMVRPRDGSGILPLRELDAAVAGWKNWIAPREGLAARWNWDAAASRGRDWIDSCGINGAAAGCGREAAAGEGGLREAERAPPRGCGRLQ

SEQ ID NO: 79584 - protein, 77 aa, Zea mays
  Coding DNA Sequence Number=SeqID_36209
MAGGNKLAGAKERWLAGEEIWSQEIWSVSLPKPEANPRKTLGDTGVSQPSPLKGISSRDSGQSPCRVKRRVRLIGNG

SEQ ID NO: 79585 - protein, 192 aa, Zea mays
  Coding DNA Sequence Number=SeqID_36210
  Subcellular localization annotation: CTP_CleavageSite=31; ConfidenceScore=5.21e-01
MALASFATTSFTIVLLFSLPSCLHLRATPFSAEGVGACAPPPYSSDTSHDTDSRSGYCTSTRTFHIMRAPSFSPSSDVSFVFLAFALFFLPNLLPPPTVATVSRPTLVDVGTTRVGHAPGLSPCVPSRRTWWRLPHLGYLGNEESRYVRLFPSPPALRNLGSGEGEGWGSLICCLWYQCVHKKYYAKSGDNQ

SEQ ID NO: 79586 - protein, 452 aa, Zea mays
  Coding DNA Sequence Number=SeqID_36211
MPLIKVYNNDSDPYGLKGHSIFKSVRPFVFGYAVVPKLRKRCHRHHVQAASAEAVSFCRTFGDKAWSQHRQWGSVYVARSAKVDLSLGEECGGNETDGSGYDYGVGKWYSFRLERMARLRHTARKSVIPFLPSRLAERPLRRPVAGQSSHLERLHHRLHEEQERRRQEQQGSSFSLHQEIESVRSCSPVLPLEAPPAPPLGTPASGVAAGGDPDDGGGDDSSSHDTDFSADQEPEGWVARPITRDAARGCHFHDALNTLLRRALDRRTWSIEYRCVVYQHSRGVYPDRWEATCLVRRPENSLQGAEACSEHYSISERDSAEAAMQDAARRALSHYCSVLGGVADGLNLKYYPRRPSGSTGGVIVSPIGEDNPRLSSTVNLAAVLNTELDHALDELSRARAEIALLRAERAELRHLDDGSPAPVGTQHPYRSPRRGRQSYGNPDCKTKINLEP

SEQ ID NO: 79587 - protein, 154 aa, Zea mays
  Coding DNA Sequence Number=SeqID_36212
MTLDGHCVWVAVVWVVCVPCIGFGGFFLDYTLMIIIHALQIDEPFFLLRKPDWGPAKRKKATTASTGTSIVIVHIPTRMLFPALPPRATDKTNEAAGNKRATSKTTATSKKSKSSSSASTASVRRSGTGSNQPETSRLEPVPLSILYPTSVEPQ

SEQ ID NO: 79588 - protein, 160 aa, Zea mays
  Coding DNA Sequence Number=SeqID_36213
MAGLAGDGPGASADPRKILETNLKRKTRAELTLGVIHRSELPYQQVEKCSRDRADLCFREGDEVRRDDGGGRARDQLAATCSGGRSLAATPAARTREERLRLTALVAGAWGRRGESGIRRRLGPGARRTAKRVGGAEESRRRGVRGSGGSGCRGFLKLTI

SEQ ID NO: 79589 - protein, 246 aa, Zea mays
  Coding DNA Sequence Number=SeqID_36214
  Gene Ontology: Mol. function=nucleic acid binding
  Homolog annotation: Hit_ID=Q10F39; Match level="QueryCoverage=23%, HitCoverage=7%, E-value=3e-11, Identity=58%"; Hit description =Argonaute-like protein At2g27880, putative, expressed
MRFWRMVGFGKLPKYHQDPTTEELAKTLDCWPSMNYYITGCRYVLMPWKFNGCHALFVIDHVKKHVTFIDFTPTQDWCKHMPYKRFAEAIIMASKKYKIAYSKIRSGWAEDIFKWEHTIQTGVSIDLRGFNTSYLVLQAMAMWGNDRRLKFVGSIQCRLGNSYNILEENPWQLYATIRVIKMSRPMEVPPAYYAHLAAFRARHYMDDDLSDQGSSSVASSRMKDGVVPVKHLPKVMESDNQFMFYC

SEQ ID NO: 79590 - protein, 74 aa, Zea mays
  Coding DNA Sequence Number=SeqID_36215
MGKISRRSHLRDQTYKTMIFGYEAYPQQGLKGIYDEKGMIVTKVAVASKLCTRELRLNRGKRNRLKGENGIQSS

SEQ ID NO: 79591 - protein, 92 aa, Zea mays
  Coding DNA Sequence Number=SeqID_36216
MGAFRFLGRSVFNLTNRMAIKVDENHVWNHVVHLVYMRLRHPNVDAPQPGPASASERSPPTTLFRFRTLEACESRTADSNFGIGLPYTITPE

SEQ ID NO: 79592 - protein, 315 aa, Zea mays
  Coding DNA Sequence Number=SeqID_36217
  Gene Ontology: Mol. function=transcription factor activity; Cellular component=nucleus; Biological process=regulation of transcription, DNA-dependent
  Homolog annotation: Hit_ID=A2Y9M2; Match level="QueryCoverage=64%, HitCoverage=61%, E-value=8e-28, Identity=43%"; Hit description =Putative uncharacterized protein
  Pfam annotation: Domain name=AP2; Domain location=99-150; Score=77.1; E_value=5.6e-20; Accession=PF00847.11; Description=AP2 domain
MVEAAAVSRSRPKIKQEPAETTAICKLVRVFCDDRDSTDSSGDEAAAGGGAGAAAGARKFLVEISVEKHQPRCNAMAPAGRAAGGGKRKAAAAGTPAEPRYRGVRRRPWGRYAAEIRDPHKGERLWLGTFDTAEEAARRYDSETRRLRGPSAITNFPATPDDRVPLPAPALSLHGVAAVGEHSSAEEESCDESQLVVGSPVSVLRAMPDETARATLPPKIADAAAGCATKKDAPDGRGGLSPFSADDALLPQLGEDAFSFGGVPFDDDLPTPQLGLDYLAADPALDLGSLPMWPGVDGCRFSDIGDDDLFSLPAL

SEQ ID NO: 79593 - protein, 571 aa, Zea mays
  Coding DNA Sequence Number=SeqID_36218
  Pfam annotation: Domain name=DUF569; Domain location=389-488; Score= -31.1; E_value=0.00068; Accession=PF04601.4; Description=Protein of unknown function (DUF569)
MSEKPEKQRTPAREKPAPVAVVGLQPPRAMGCLLPDQAFVRLRNRTYGMYLYAHEDGAAVVLKPHRACLQTVWQLHRILRADRNLNYILFRSAAYGRYLTLSRETSPIYPGHSHQVNHTFQGVYETPMQDDVLWVIASADNLHAVIFHATYRVLRSSPSNMLLFGHAFVVGDIYHPVNYGTTIHWTVEEIPVRPEPPVIHLPTDDHYYFGSEVYVLLAGLVFVDLLLLIWFALGDDHGNVNPRSRGCWLFYGNCLLQLRADLAKLLKEPADCITLCVRAGSQGRLTPLVIDLPSNDSDMEIIVLTTMSPGFSFETCGWIKFLRKKANEWTAGISSNFKSWNTPPCSLGPSLGAEKQRTPALSSPQRARNPPPSPFPPPQEKHHHLGRAMNRFPDRGFVRLRNRAYGTYLFADDDGAGVMLKPHRASLQAVWQVDRVVRRGRGYIVLRSAAYGRHLICATGTSWVDQSHEAYHTVQGNYNNPEQVDILWAPVHRLDNVHVVMLQGLDCQRILRACAPNTPFFRYVFVDAFQRSTNYGTMADWTVETIPVRPAPTVIPLPVPPLTEVSSPSPA

SEQ ID NO: 79594 - protein, 174 aa, Zea mays
  Coding DNA Sequence Number=SeqID_36219
  Gene Ontology: Mol. function=DNA binding; Cellular component=nucleus; Biological process=regulation of transcription, DNA-dependent
  Homolog annotation: Hit_ID=A2XRA1; Match level="QueryCoverage=71%, HitCoverage=57%, E-value=2e-46, Identity=63%"; Hit description =Putative uncharacterized protein
MATRRLRPQPTGSQTVSDLKTEERKQKLSRYRKKKIKRNFGRKIKRQHEWLPKGWVMEVRAGGEKADKMYKFYVYSITGLRLLSKQDVLLYINEAKVSGCDTNGQCDTTSEDNILSKVDFRPSGLPEGWVKELVYRKTMEGLIKRDPYYTDPASSYTFRTLKSALSFLETGKTW

SEQ ID NO: 79595 - protein, 254 aa, Zea mays
  Coding DNA Sequence Number=SeqID_36220
  Gene Ontology: Mol. function=isomerase activity; Cellular component =endoplasmic reticulum; Biological process=cell redox homeostasis
  Homolog annotation: Hit_ID=Q5EUD0; Match level="QueryCoverage=53%, HitCoverage=28%, E-value=2e-47, Identity=71%"; Hit description =Protein disulfide isomerase
  Pfam annotation: Domain name=UIM; Domain location=219-236; Score =17.9; E_value=0.038; Accession=PF02809.11; Description=Ubiquitin interaction motif
  Subcellular localization annotation: CTP_CleavageSite=43; ConfidenceScore=5.31e-01
MAAAWAGLAGFVARRGAVGVSGASHGASVPVGAQKLRVAAALRAMGSAVAFVKLDGERYPKAAAAVGVKGFPTVLLFVNGTEHAYHGLHTKDAIIIFKNFEVLMRYEMLDAEKMYRFQVLVCSKYHEEFVKAATTDNEVQFVETSDTSVAKVLFPGIASEEKFVGLEPEKFEKFYRLLEDLLPYLDKGPKGHRAAQPQKRPRKVDQEASTGKQGKIAVEDEDEELARAIAASLEVVIEASDASDDDMAEAEPED

SEQ ID NO: 79596 - protein, 77 aa, Zea mays
  Coding DNA Sequence Number=SeqID_36221
MKHKTAALKLTQRFLSKDLKWERQEMCERERKERKPQLNCPEASSAGLKKLNSAEVKFSWKAQLQLKKFSCFSARTL

SEQ ID NO: 79597 - protein, 171 aa, Zea mays
  Coding DNA Sequence Number=SeqID_36222
  Homolog annotation: Hit_ID=Q5WA79; Match level="QueryCoverage=41%, HitCoverage=34%, E-value=2e-07, Identity=46%"; Hit description =Putative uncharacterized protein P0681F10.35
  Pfam annotation: Domain name=DUF569; Domain location=1-140; Score= -16.1; E_value=3.7e-05; Accession=PF04601.4; Description=Protein of unknown function (DUF569)
MECFPDQALVRLRSLVHDTYLHAENDGVGVSMNPHRAYLHTAWWVHRVRRDDRDYILLHSAAYGRYLALSRETETSRIYTGHHANLTVQSDYEATEQDDVLWEADTVTNVIVVMLHASHRDRLLSVSPSNTSAFRYALVVDSAYRVSCGSAAFWEVETIPETRTARHSPPN

SEQ ID NO: 79598 - protein, 436 aa, Zea mays
  Coding DNA Sequence Number=SeqID_36223
  Subcellular localization annotation: CTP_CleavageSite=2; ConfidenceScore=5.53e-01
MSSSSLKRRVFPSSKPPDGGFPPPFRLLVGGTQLHGSWYLSAIVRLQGFSSGSLVAPFRRWPPKTVTSSSWMGRGKPGCDPALSIGCVRHPRWGGGRGEPGLYLACGSTNHLLFQLLVVAIVLPRCDGVVLQSCRGRRTVAVQLGCNIPSSPSHSGRGWQRGSTGALGSGPLFGFDGLFASLEWDREQEPSGDCVHLGPWLPLQRSLASLPAFVASQARGRSYHRGWDRSPVCDGTLDASEFVHCGCRGLNESLGPFGLAVWGSSSLVEETPRPPFGGPRPGPTPKSISRGLGSGWRPWKPVDRGPRGNRLSRLLGPDSRRSPWTAAPPEAGSGFAEDVVDAEGATAPFSVKTRACKIRSSCSVCFLRPPRPEEHTLAALAKLRLFSSCFEHLDSVDNRDKVMSEVSVSRRRRSPSARSALAAYVYLVVSRIRFPK

SEQ ID NO: 79599 - protein, 40 aa, Zea mays
  Coding DNA Sequence Number=SeqID_36224
MNPRRCAFGVLADIDPDGIKSIQNVGVPTCKLEMQKFLSK

SEQ ID NO: 79600 - protein, 67 aa, Zea mays
  Coding DNA Sequence Number=SeqID_36225
MEQGHLASAYSTGSGRLDTGIVPKALSCGLDYKLVTKFADEVMMLGSMDASLVIPPVIFLVSLYFDE

SEQ ID NO: 79601 - protein, 83 aa, Zea mays
  Coding DNA Sequence Number=SeqID_36226
  Subcellular localization annotation: CTP_CleavageSite=63; ConfidenceScore=5.80e-01
MPGSGAGPPPRPRPLARPAPPARPARPPPAPPALASRAARRRLSRPGSAAPARPAPGGFNRPRAASPQLGREKMRGERERVRE

SEQ ID NO: 79602 - protein, 315 aa, Zea mays
  Coding DNA Sequence Number=SeqID_36227
  Gene Ontology: Mol. function=transcription factor activity; Cellular component=nucleus; Biological process=regulation of transcription, DNA-dependent
  Homolog annotation: Hit_ID=Q84J59; Match level="QueryCoverage=99%, HitCoverage=100%, E-value=1e-111, Identity=68%"; Hit description =Branched silkless1
  Pfam annotation: Domain name=AP2; Domain location=59-110; Score=74.3; E_value=3.9e-19; Accession=PF00847.11; Description=AP2 domain
  Subcellular localization annotation: CTP_CleavageSite=54; ConfidenceScore=5.16e-01
MMNTRACGSGSGGRNDQTMMGFSEHPKPAASGQAQPSPPSSPSERPPAGRGRRRAQEPGRFLGVRRRPWGRYAAEIRDPTTKERHWLGTFDTAQEAALAYDRAALSMKGAQARTNFVYTHAAYNYPPFLAPFHHPSSVQQQHYGAAPHVGSYGHHHYHHQGSSAAVVGASSGECSSALPPVERADGTLLLDRGGGGGHHHHHHHHPEFLFASADDNSGYLSSVVPESCLRPRSSAAAVEDLRRYSDADAYGMGVGLREDVDDLAQMVAGFWGGGAGDADQLCGGGFPSGGAGDSMAVASSQGSSDGYSPFSFLSH

SEQ ID NO: 79603 - protein, 122 aa, Zea mays
  Coding DNA Sequence Number=SeqID_36228
  Gene Ontology: Mol. function=hydrogen ion transporting ATP synthase activity, rotational mechanism; Cellular component=proton -transporting two-sector ATPase complex; Biological process=ATP synthesis coupled proton transport
  Homolog annotation: Hit_ID=A7LIT9; Match level="QueryCoverage=67%, HitCoverage=63%, E-value=2e-36, Identity=91%"; Hit description =Vacuolar proton pump subunit F
  Pfam annotation: Domain name=ATP-synt_F; Domain location=34-107; Score=52.2; E_value=1.8e-12; Accession=PF01990.8; Description=ATP synthase (F14-kDa) subunit
MGHTVSYLGRFLLMDLTLMQIILNDAFTLYLVTISVTRISKTTVKQIEDAFKEFTTREDIAIVLISQYIANMIRFLVDSYNKPVPAILEIPSKDHPYDPAHDSVLSRVKYLFSAESVASDRR

SEQ ID NO: 79604 - protein, 304 aa, Zea mays
  Coding DNA Sequence Number=SeqID_36229
MMEIEKDLRQNLRNRDERTFLRTKIELCMITGRISIEEPNLGKILHTITAMGPVTIMDNVQINLSYRTARTVNTKNSGHKAMFCFSIHIPSDKGKESKPDDSMELDPATIDSQEELVDYELDPLEQEKLEVKIIDQNFKERTKKLSNVLNNDSSAIHLPPDWKNMDMVPDTSHTTDKEKQSSDILKVGEANQGRVITKISAIATRSSSRVADLGEGNCDIKSGTSSLTAFSTSDPESLMHFTSFCNIKLGHDLVESLDTIPTIQDQEAANAAWAENKVRTVQSKDWVDVNNASNEEALLTFSEL

SEQ ID NO: 79605 - protein, 160 aa, Zea mays
  Coding DNA Sequence Number=SeqID_36230
  Subcellular localization annotation: CTP_CleavageSite=40; ConfidenceScore=5.47e-01
MKKTWLPYERSLPPFKGNFPYVRPQTPRVESSPTRSKALPCDSGAGSRMSCKPAQGRRSQTAAHGTGEGGYPERDPSPRRNRALSPPLLIRGSKAGPPRVQQPPQIAWARHPLLVRGSKASPPKGSMAASGYSGSAPITDQGFEGWPPKGSQSPQTPSEG

SEQ ID NO: 79606 - protein, 41 aa, Zea mays
  Coding DNA Sequence Number=SeqID_36231
MDLVRGQLPGPTGVLGASRDAVARACDLGRGSVIVRLGCWG

SEQ ID NO: 79607 - protein, 275 aa, Zea mays
  Coding DNA Sequence Number=SeqID_36232
  Gene Ontology: Mol. function=ribonuclease activity; Cellular component=exosome (RNase complex); Biological process=rRNA processing
  Homolog annotation: Hit_ID=A2XC17; Match level="QueryCoverage=53%, HitCoverage=13%, E-value=2e-26, Identity=49%"; Hit description =Putative uncharacterized protein
  Subcellular localization annotation: CTP_CleavageSite=22; ConfidenceScore=5.22e-01
MLQSKSFVKKTKQGRIQKVTARANAVVSRGAPPNPTPLPDAVVASSQVVREHYLRDDIYCSFIPCTACAAAAERKLSAAAAAILVIDTNVVLHQIDLLENPAIEDVVLLSVVLDEVKNKNLSVFNRIKALCINKARRFYVFANEQHRLCGMFDSANNIPLALNINPKKYLKLMKHPHYQVSKKSSGFTSNMLIVCTNWHPDQSAPARPERTPFSFKDPVPDTKPASTGVEVAVAPFWNTEKVISAKKHITEVSDDRWAQGAVCFSDVSSLSTLNG

SEQ ID NO: 79608 - protein, 1357 aa, Zea mays
  Coding DNA Sequence Number=SeqID_36233
  Gene Ontology: Mol. function=zinc ion binding
  Homolog annotation: Hit_ID=A2YPS4; Match level="QueryCoverage=98%, HitCoverage=88%, E-value=0.0, Identity=56%"; Hit description =Putative uncharacterized protein
  Pfam annotation: Domain name=zf-CW; Domain location=555-603; Score =64.8; E_value=2.9e-16; Accession=PF07496.6; Description=CW-type Zinc Finger
MDDDAELEEGEACGDDTAFVDPDVALSYIGMSQKPPAVTVSSTPQSNGPMVPFSGDSIKKEIRPTTKAEGGSVSHDSYGPLKCHDQNRLKVRIKVGSDNVLARNNADIYSGLGLDISSPSSIEDSPDGRGSLSPEVNNVPHESPQTILQIMTCFSVPGGFLLSPLPANILQLTKKVVASSKKWESNVHIESVQEPYEGHTTKKVKSDAKKKKLIDAKNSKNRNDISAVMKKEIDIETVAGQKIVSEALNISLLSDPRAMDAKGENRLEVEPAENNLAGTRDARLKERSTKTNSMPIIVEPAKAEATECLENSSFGSSEMDFSAVKAESKSKAEKGEATLEERNTTNGKDLISDRKQEKKMKPESKYNASNFEVSNVINERGPAVSRSMGKVSGKEALPYDTNEENSSKNEVKKMQREQKTNASRSSDFLEDEKHIRSSAAVKERKSDMQSKSSHTGKKPKTKSHRDVRDNLPEGSHGSKEKDTLENESAFGDLRPKEKPWKYDIERDSDAPGISRREISSSVKHDKHLASEEQKMHIPPPSTVSTANAAPVVIKEHWVSCDICDKWRLLPYEMNPSDLPKKWKCSMLYWLPGMNRCEISEEETTNALNALYVPAPANGIPAVGHPHVASTGLVTSSTPNMNGHIEQNRKRKNIPSDGNFVAEGSHLTQVSGHPMSNQHAPSKTKTYTDGIQYSAERHSVSKSVDPIIEKKRSKSKHHSSYSDGGDLVERPKKHSKVKNKRDLDHDEYKASKKIRKEERHHFDVDRILGSDLASGDVPDEAKALPAKSATSKGSGERTDLSSSKQKSASRHNRLETSKKARQDDLVGPEDESKGYFHQSDVQRSDLSSKKRIVKEWEESQHNSVAHVSKGAVKETYRDQNLKEAKLKSLNSEELFSMTSTKPPKVQHADQVLSYDGGRMNSELVEDNTLFSGKRGLPEQEKSLSDQALDLGEPASDVAYIQTSAVTSSSSKASVSQKKKQTTQAMKTSPIEPLSSSPRRNSNIDKVSVPHSRISGKDGSLNANSATVPIMAKQLNTEVRVASNDQRSSEPVSVGSPRRKSDRDNGLVQLTQGHASDGFHLERGFNEDLQPESGRKDSNVKSSHIPKASHHLHSGEKNNYNTDGSPMQPGKHPVDPKTSVLDKCDSSMHESNKSTNSLQDRNGSTHCPPDGNPLLGLPSGKEKSYINSNKQDSQKPKPQMVCSPLKENKLDSHSTPLKPNGSKLTPQSRQYNAQNGGRHGTAKHAIPSPADTSSPARKDNTSTAYALKEARDLKHKANRLKVFLLQFDAMPGEGKELESTRLYFESALKFLHVASLLEPPSFDGLKQGDAAQSMYSDTAKLCKLYIALLDLELKCFCIA

SEQ ID NO: 79609 - protein, 79 aa, Zea mays
  Coding DNA Sequence Number=SeqID_36234
MLGFSGQRGGISALGECFHKRRDTLIKGELANKRFGAQGRWSMAEVKVMRAHADGQRAVKYECWDLADGPEQRVTNRGG

SEQ ID NO: 79610 - protein, 28 aa, Zea mays
  Coding DNA Sequence Number=SeqID_36235
MGKVLTSDEDMMKPDHDMVRSAVISQLW

SEQ ID NO: 79611 - protein, 79 aa, Zea mays
  Coding DNA Sequence Number=SeqID_36236
MAMMDSTSEKMYLCQVPDFGFLNDKAETGQTNTRKANMQWEWRDGESSVYPPWKEAGRWCICALGWREPGLVLRNPVAS

SEQ ID NO: 79612 - protein, 962 aa, Zea mays
  Coding DNA Sequence Number=SeqID_36237
  Homolog annotation: Hit_ID=Q7XBD4; Match level="QueryCoverage=22%, HitCoverage=22%, E-value=6e-08, Identity=26%"; Hit description =Cinful1 polyprotein
MIGDEVAQFGSCTFTSKTGKTTMQVVELVPCARNKWGNWNEFWFYVAEGTVEDHEGLPVSEMCSHFYSAYPPFEVAEEDADEGALRCAAGLSSGRDLVEEFVAYGVWPLAHGWALGEVCPRQMPFHGGRVVRSPAFAVNLRSRDPAAFVREAEDGAVRLVGRYVPRTEGQRSWEIRGSNDRLNRVFELNQLPYDGYPGQDDVDRRGKKPVVETRDDPVPAAAPSSKKRKLGTAMGGLGVSDGFARELMRTCAAPGGRMSSPELRESSARMLRVTGGCWPRNVPIPRAAGEDFFTSRMVREWRVFPYGRNIAAVVSAVMDKDRQGAAQKRQAVVRLIEARPKRQRGAAKAAALGGGKPPLAAKSGVPASSKAPEATTGAGGSKSTKVVPPSSRVPEVAKAARALPSPGKRVADFATDISVDDYLGGSDEGQLAIVAPAAATTTAAVVPKAKGGALSAGGEVLALAAVRDEAGAVSRRLKEVKEALSQAADFVDRTASGALMAVVSAEVERLRTQHADAVHEKSVADSKCRKLADKVAALEREKADLRCQLAGERRETNEALAKEQAAQAEAKLARAEGNNARERAEQLQERLTALESRVERAEAASRAEAERTRKQLMDTYHEMGARTGVYVVCLPGHLRGAMNALSREGCRHFEVFDQANEDFERDIYKVEDPIVKDSAGAIYDQMWGPHGREVVRERAETARAQAARGERVDDFGALNSALPDPESIPAEAVTGAALEPPPETAEGAPNAPAAAAAVGDLPPETAEGAPDAPAAAAPSAEDPATVAAEATAEATAEAPATAGSSQVQDFGPTHATATTKFLAASTVDGGNKCDGSASEFSDFADSGSSVEWTEESSEEDLDYFAALDVAAAEASPHATDAEDVPGPSTGRRRRRAVAKRRVSEAEGGRLRVSRAGRQELLSLPATVSTGEGELRSLFAGGELRIMLFNYREMGIIPKVEPM

SEQ ID NO: 79613 - protein, 78 aa, Zea mays
  Coding DNA Sequence Number=SeqID_36238
MAHRSCFGPPETRSPPFSPLCSCIHGLFPAIEFAVAPSPSLPNFSDPDATLACACLNSGDLTAVERSGAASRTSVSPV

SEQ ID NO: 79614 - protein, 298 aa, Zea mays
  Coding DNA Sequence Number=SeqID_36239
AVEEERGGGAYRRRDCSSEVVDGVGEVLRVTAMCGSPSGMVGVGRSTCTGGEARRRRGVRPNQGTIGQSNGSASFTRDQGRYVCKESENDSLDCSVYARRRATEVRRGRSWVSGEVLSCPSAWKASWATDEANQRVGATWKRLEGAGHGGRGLGSGGGRRKGSPELRRGVWPARGSRPNAILWHVKEGLVRHDFVNGSIRIRAKDQGNINMKPMQLDAGCMASWNLQGLWRFVTAPTRGFAQRNELKRMADRTDHKLVRASEMELLTDGAHTSERMRESGGAAPCDSGSFWCRAARGM

SEQ ID NO: 79615 - protein, 360 aa, Zea mays
  Coding DNA Sequence Number=SeqID_36240
  Gene Ontology: Mol. function=helicase activity
  Homolog annotation: Hit_ID=Q7XD08; Match level="QueryCoverage=80%, HitCoverage=27%, E-value=2e-20, Identity=25%"; Hit description =Putative uncharacterized protein
MPNKPLSALTLQDRNAEVQIQVHRKWEFRGAVDNGPILHIDMILTDCTGNAIHCQIPSFLAATRGDEFQVGKIYKMTRFSVARAKSTYKPVDGDLMLYVKPYTTLELCHTSPSGFPLYVYHLTSYDKIDPDGSNARNFHGEVLLSGGAACHWYFNPSIEEAEAFYSRIESEKINIELPSLDKQEITPPSFPQREHHNLKYILSLNPHDVPDQGYECTLTFKASDGTEEAEMFAFDNVARTIIGKPCPTVVASFPDASAIPPEIAAIVSRKYTFIIEFNSQSFRFLEKTLLIKGIVASYGRMTSLPIVQEKDDVQLPLTPTKNKLITTAAESPSTPMSRLSTADSPSMPQKLTYSPAKNKP

SEQ ID NO: 79616 - protein, 66 aa, Zea mays
  Coding DNA Sequence Number=SeqID_36241
MPPPLSRMMSCFASGTALFLRDLTLLWTKPVNMLDELEQLLKGNSMVKELTPRTNDYLVSFRELIE

SEQ ID NO: 79617 - protein, 815 aa, Zea mays
  Coding DNA Sequence Number=SeqID_36242
  Gene Ontology: Mol. function=methyltransferase activity; Cellular component=cytoplasm; Biological process=regulation of transcription, DNA-dependent
  Homolog annotation: Hit_ID=A2YPT7; Match level="QueryCoverage=65%, HitCoverage=93%, E-value=0.0, Identity=78%"; Hit description =Probable histone-arginine methyltransferase CARM1
  Pfam annotation: Domain name=MTS; Domain location=198-329; Score= -78.9; E_value=0.0072; Accession=PF05175.5; Description =Methyltransferase small domain
  Pfam annotation: Domain name=Methyltransf_12; Domain location=213 -311; Score=10.8; E_value=0.043; Accession=PF08242.3; Description =Methyltransferase domain
  Pfam module annotation: Pfam domain module=MTS::Methyltransf_12; Domain location=198-329::213-311
MASSPDLFPNVAFSDVSAAAPAAEATAAFGLGATTGAPRLCLVKSGKDEAEPTVDIDLADAQVVAVIPVNVFKLGPMEWLCVCDESEAKAGVEEYILNGFMLTLSSLRQKSFSRAIKVVLRTEAESKAFSLAFQQWKHQVISGKAGERLENGSIIASKSKFDTKIEASSAKMYFHYYGQLLHQQNMLQDFVRTGTYYAAVMENRSDFEGRVVVDVGAGSGILSLFAAQAGARHVYAVEASEMAENAQRLMSGNPSLGQRITVIRGKVEEVELPEKADILISEPMGTLLVNERMLESYVIARDRFLAPDGKMFPTTGRGDCEQISREGEKDESRDSGSKGRQWRVIHMAPFSDEYLYVEIANKALFWQQHNFFGVDLTPLHGSAFQGYFSQPVVDAFDPRLLISPPIYHTLDFTSMKEEELYEIDIPLSFVASVGTRVHGLACWFDVLFNGSTVQRWLTTAPGSPTTHWYQLRCVLSQPLYVMAGQEITGRLHLVAHSAQSYTIYLTMSAKMWGVGAEQGGILQTSTGKLELKEPYYRLSQPQSYMLPQDQQQQQQLSSLQPHSSWLKPGSDLNLPGVRSVGKQQESYTRESRAGRSARSRSASNGAAGNGISRPSQPACFHQLWKRFPCVPCRLVVAKKLSSTGSIDLSTVVPKSVDRTCRQIFCCLTSKQNCEGCHASSFLPTVVPKTVDDISYVCSLIKIVLHSHPKFLEPGFDARHHRLWPTSGSALQFEPLAHRSIRAIREKKRHRPVTPLATCPSRSGYVSVPLQSVLAQPGRCRWRVPQIGRPDDAARPLYSPLSRPFRLLVLPAKQAA

SEQ ID NO: 79618 - protein, 295 aa, Zea mays
  Coding DNA Sequence Number=SeqID_36243
  Homolog annotation: Hit_ID=Q6QP51; Match level="QueryCoverage=28%, HitCoverage=37%, E-value=2e-21, Identity=64%"; Hit description =Putative growth-regulating factor 1
MVTTCNETTLPPVPMLRLLDCGTSAATRGSPTRDPTVPIECSGHESASRGGTEKGDILKGILLREGNGHRALLLIRGSKAGPSEGGSKAGPSKGFDSRPRTRRVRDDPGYVRYMAEARATLPSHFALSLTDLTGKQRRLPRSGCCANRLGETDNGQVKPRAQQEAPPRPTSRLGLGLGLGRRSPPRRTPGLGLDLGLGKSHILARPWASAPASASEEPPPRPTSGSDQPRHEGCIITLLLASSGYEGTRLASRQAYPAPTAVLLQGSRHFSDGHDTTSTGLETPPRRSRYYLYRA

SEQ ID NO: 79619 - protein, 151 aa, Zea mays
  Coding DNA Sequence Number=SeqID_36244
MQAACNCTKGAHPSDFDASSMEAQAHTSCNRRAGCYVRGTAPPLAPVPRLLDCGTGAATQGDPAHDPTVPTERFGHGSSQPREKARRLIWPKDRRHLWQAKRATLHLCHDDRVKKGTGKGDTLKGILLREGNGLQAPLLIRGSKAGPSEGF

SEQ ID NO: 79620 - protein, 22 aa, Zea mays
  Coding DNA Sequence Number=SeqID_36245
MARIACTLRGKRLDGGDEMTEF

SEQ ID NO: 79621 - protein, 64 aa, Zea mays
  Coding DNA Sequence Number=SeqID_36246
  Subcellular localization annotation: CTP_CleavageSite=49; ConfidenceScore=5.44e-01
MAAISQPAPSSSSSPSAATIDVALRAGPFIEMSRLVDSQPPMTSPISLRLSKNGERWCRLVIGK

SEQ ID NO: 79622 - protein, 116 aa, Zea mays
  Coding DNA Sequence Number=SeqID_36247
MTRTGKGRLAVDLGRGQGRWSYCFAPWTTERGRKGAMDQALRTYMNREKKRWGKMERGPGFLLAVEQGAESTQGGGGAMGERQRHGSLELGSLLAAVWEKEAGCFCAREKEEESGG

SEQ ID NO: 79623 - protein, 151 aa, Zea mays
  Coding DNA Sequence Number=SeqID_36248
MEGQRAPTGGMVARTRQEQGRGGWLSTLGAAREGGAVALRHGQQREGGRASWIELCAPTGTERRDGGGKWRGALASCWPWSKEQRARREVEAPWERGSAMGAWSSAPCLQPCGRRRQAAAARGRRKRVAARRIRWVGMENFQICKGEGSYL

SEQ ID NO: 79624 - protein, 174 aa, Zea mays
  Coding DNA Sequence Number=SeqID_36249
MESLLVGKMVTRMMVMIMLMVMMARLRHTVRKLVIPFLPSRLAERPLRHPVTGQSSHLERLHYRLHEEQERWRQELEQQGSSSSLQQEVKSVRSCSPVPPLEAPPAPPLGVLATRVAAGGDPDDGGDDSSLSHSIDLLEEQEPEGWVARPITRDAARGCHFHDALDILLRQALD

SEQ ID NO: 79625 - protein, 99 aa, Zea mays
  Coding DNA Sequence Number=SeqID_36250
MRSGNRGGEAEMVSEVGDELGVRLDATGRFPPVLQARSKVVQKIALTAWTHKADRTHPHPMQTELSKGARQSEIATEREWLTARDPPVGAETRDGCAGV

SEQ ID NO: 79626 - protein, 286 aa, Zea mays
  Coding DNA Sequence Number=SeqID_36251
  Subcellular localization annotation: CTP_CleavageSite=69; ConfidenceScore=5.62e-01
MQAACNRAKWARFSDSQHAQHGGPGPRVMQPARRMLRACNCTSTCATTAPPRLRNQYRDSRRPSARPSSASLARRIPSEGGIEPSDPVARGPGPADHPQLTGDTMFGAHRGQHVSFPPSSLRKGDAGAYVKKPSLSLIALSPCVEARGCSRKPGSGRTVDSVNIPARELGTRPYTRATASSHEGTTRPAEALREALRPRRSETTPPRPRGLHPAGALARTHRNKTQPRKAGPLAKKCDESLQASANAPFEARGLLSGTIIRGTLKAPNSQLVTPISIKLQRPDGCD

SEQ ID NO: 79627 - protein, 236 aa, Zea mays
  Coding DNA Sequence Number=SeqID_36252
  Subcellular localization annotation: CTP_CleavageSite=35; ConfidenceScore=5.34e-01
MTHACAYKTLPDFDYTLPRTLKPHRSLARRRLPVRSVSAAAQSLCHRRPASGAIPNSVQLSEKTVHTSVKLPEQGIGVCFAGEASPRSPELSTPPEYVDRVNHSTILRFLVHTVATLPREAHRALGLNQFAVVWPVYSPPTRTPACTCGPGDSGHPRRQAVPRRDRQSLPEPTPPFAGPPSPPDKKNRKYCNLADGEYILVTEQGAAQEVAPDPAPEPAPEDLSATALEGKPRFYA

SEQ ID NO: 79628 - protein, 155 aa, Zea mays
  Coding DNA Sequence Number=SeqID_36253
MTLEPHPLQPGWRSLDSESFGYRAEDTIEAIALHGLTTFCGFHPLELATHPIGLFPAEKEDDPMWKDRVEHAKDIWAIYPGQTAHLTVRCMNALYRLQVEQLSTDIQELEELEIQDQEANEDVDIEGGDEPASSVDTIGSGRPPSPESSVASFAH

SEQ ID NO: 79629 - protein, 88 aa, Zea mays
  Coding DNA Sequence Number=SeqID_36254
CNLADGEYILVPEQGAAQEVAPDPAPEPTPEDLPATALEGKPRFSGGDGCWDNLAVHLAHRVGLLSGTLPRLRRSMRSDGTGFPHLSV

SEQ ID NO: 79630 - protein, 69 aa, Zea mays
  Coding DNA Sequence Number=SeqID_36255
MAEASFHVFDASWHPGARSEHAHCNLADGEYILVPEQGAAQEVAPDPAPEPTQEDLPATALEGKPRFYA

SEQ ID NO: 79631 - protein, 171 aa, Zea mays
  Coding DNA Sequence Number=SeqID_36256
  Gene Ontology: Mol. function=amino acid binding; Biological process =metabolic process
  Homolog annotation: Hit_ID=Q651B4; Match level="QueryCoverage=80%, HitCoverage=32%, E-value=2e-52, Identity=68%"; Hit description =Putative uncharacterized protein B1331F11.3-1
MGIPSDGDDVVQIRHADAAGEPTVVTVSCPDKTGLGCDLCRAVLLFGLSVVKGDMSTDGRWCYIVFWLLPRGRRPVAVPWDLLKDRLLQLCPVAPPFGFGSHDAYLAAAAGLQDVPPPAPQLFLLKLCCFDRMGLLHGNASESTSGCCSVLCQVLGSVTTSYPSSKFEFLM

SEQ ID NO: 79632 - protein, 812 aa, Zea mays
  Coding DNA Sequence Number=SeqID_36257
MCLHYYSAYPQFEVAEEDADEGALRCAAGMSSGRDLIEEFVAYGVWPLARGWALGEVCPRQMPSRGGMLVRSPAFALDLHGRDPAGFVREAEDGAVRIVGRYVPKTEAQRSWDIRGSNDCLNRVFELNRLPYGGYPGQDVVDRRGKKPAAETEDDPAPAAAPSTKKRKLGTAMGGLGVSDSFAMELMGTCAAPGGRMSLPELRESSARMLKVTGGWWPKNVPIPRAVGEDFFTSRMVRDLGVFPYGRNIAAVVSALMDKDHQETVQKRRAVIRLPEARPKRARGTAKAATPGGSQPTLAAKSAAPGSSKVSEVVKAAGAGGTKTASAGAAKARELLSPRKRVADFGTNISVDDYLIGSGDGQLVVVPPAVATTVSAAAADFADRVASGALTAVVSAEVERLRAQHADAVREKSAADSKCRKLAEKVAALEGERTDLRRQLVEERREANQALAKAQSAQAEANLARVEGSLASQRAKEWETRFNALQARMERAEASTRSEVEQTRKQLMDSYRELGARIADFEVPDRESGLRCLEWLQEELLALPTIVEGFMSFASLVTCEGAMNALSPRRAARAENVEDFGALNSARPEAESNPVAAEAEVDPAPPLEAGEGSLAAPAAIVSGGGSSPTAVPRAEDPPKTAAERAAEDPTATGSSQVQDFGPAHATATANFVAASTVDAGNESDESASKFSGFGDSGSSVEWTEESSDEDLDYFAALDVAVAEASPRVADAEVVPGPSAGRRRRRAVAKRRVSEVDGGRLRVGRAGKQELLSSPAVASVGEGELRSLFEGEELRIMLFNYREIGIIPKAKPM

SEQ ID NO: 79633 - protein, 75 aa, Zea mays
  Coding DNA Sequence Number=SeqID_36258
MAARSRTMILLLGPAKISSGCPIKLLGECYGRETTLEREQSWDELTTGRRRSWLVGNRKGENEVATVSGGIGRQD

SEQ ID NO: 79634 - protein, 181 aa, Zea mays
  Coding DNA Sequence Number=SeqID_36259
MNVDEQGGFDGQGNERDRRAVRTELQRGSTDSGDERRPLATNGEGERTREEGASSAVGEREGARGGEGKGVRSDFIGRGRKRRGRPGSFKLSSTPSMKRGISGGVQTDEMKLPIMQRRTVGWAQFAARASVLGAARSDFLARVRSASGHEAAWCGLLGSVEVGLGLGAQAPGASGRRGSVA

SEQ ID NO: 79635 - protein, 114 aa, Zea mays
  Coding DNA Sequence Number=SeqID_36260
MGSHDGTSALRRFGEARRGDSRTDQWRSMGLLRWSGTAAQIGSALAADKRIGAMLQQSTRRSSEQGAIRESGVAAWRHGKLGLGHGKEGGRRKGSRLPCVEEEQGGRRVEEMVG

SEQ ID NO: 79636 - protein, 79 aa, Zea mays
  Coding DNA Sequence Number=SeqID_36261
MDDFEEFQDYDGLPFKTGCDTGGSAVGVVLARRGVLLGSRRLQASGDGQRRARGVEKGEGRGWEEQGEVGPGGSHMFER

SEQ ID NO: 79637 - protein, 27 aa, Zea mays
  Coding DNA Sequence Number=SeqID_36262
MAHEGMAWRDSSRLFLARQEQQQQEPV

SEQ ID NO: 79638 - protein, 121 aa, Zea mays
  Coding DNA Sequence Number=SeqID_36263
MNVNGNLQNGIGIQMGQIKAIEIKEIAEKGRNRKSETAEKKRNINHGFVGILCWNSDPVANPPRTELLRRKDPDGHEMEKVRSVNVDNNNSAITPKNDDMMPELLSYFSEESTSQIRKTEE

SEQ ID NO: 79639 - protein, 149 aa, Zea mays
  Coding DNA Sequence Number=SeqID_36264
MGKSNKRKREPTPPSEDFGDSEYSEEDFSSESEGSPAPVSPPVSSDDSDDSQGIALEVWTYIRAIERSGLEGSDESEYSSDEEDSSDSSEEGGGGDGGDDDDGGDGDDGDDGGDGGSRGGNSGSKGGNSGSSRGSNGGGSSKGSNKASG

SEQ ID NO: 79640 - protein, 122 aa, Zea mays
  Coding DNA Sequence Number=SeqID_36265
MDVPVAKPWMTRAHGSFSHYAKEEGARREGHRAERVEAAVALSVGGGSMRAMGGREPSFLRWGRRPPVLAARQEKKEGAAPRLMRCGGCRPWKAESRGHARQGGRGLAWGEEDREAVAAGNF

SEQ ID NO: 79641 - protein, 130 aa, Zea mays
  Coding DNA Sequence Number=SeqID_36266
MEKGSAAVEWRQEEGSTAAGQRELGAAADGRWEPKRWQFQGLGGDRVGEVRTGQGTIREKILGPLGPTSQWKDKGKPPPHLPHQTLAAPSSSLLSKVPFLSRSDLCRVGASLQLDFGGGKKKGGKGEDSR

SEQ ID NO: 79642 - protein, 56 aa, Zea mays
  Coding DNA Sequence Number=SeqID_36267
MVWSSRTSRVKGILSPWNNKTEIMFAWRLLRALRGSTTGVVGEGSEATIDQSTQNR

SEQ ID NO: 79643 - protein, 151 aa, Zea mays
  Coding DNA Sequence Number=SeqID_36268
MGKNKKGGSSSHHSGDKRKREPSPPSEDFGDSEYSEEEFSFESEGSPVYASPPVSSDDLDHAQGIAVEVWTYIRVIERSRLEGSDESEISSDEENSSDSSEEGSGGDGDDEGESGDGGDSGSGGNGDGKGDDNGGKGDGGSGKASGKAPLA

SEQ ID NO: 79644 - protein, 151 aa, Zea mays
  Coding DNA Sequence Number=SeqID_36269
MGKNNKRKREPTPPSEEFGDSEYSEEEFSSESEGSPAPVPLRESTDDSDDSQGLAAEVWTYIRAVERSGLEGSDESEYSSDEEDSDGGGEDEDDDDDDDGDGDGDGSGSGRGSGGGSKDGDGGDSRGSNRGGSNRGSTRGGGGGSSNRASG

SEQ ID NO: 79645 - protein, 61 aa, Zea mays
  Coding DNA Sequence Number=SeqID_36270
MEHCPGLERLLETAHLELDGKLFVNTQQAPTRRANCRRFKTGGRKGRIQVYNGGCSRVLRV

SEQ ID NO: 79646 - protein, 141 aa, Zea mays
  Coding DNA Sequence Number=SeqID_36271
MAPPTRASLHSLCVTGNLVPRVSAFVSIANGCTGVRGDGHSWDLGQAVARPWYKTVPWHASRLRFDPRQKLSHRARRRVLREKRRPGVLSCRAAGESPPRRRSVPCTRSCGSWLELLWEIERKLSFNFGCQATDEALAMVQ

SEQ ID NO: 79647 - protein, 194 aa, Zea mays
  Coding DNA Sequence Number=SeqID_36272
MRSLSRWRKPDLGKVSNWQALVDDSRYEVVAGLEYDRTVRWNSPDRLAWSRTVCASARKNKLKIWPALAKPFQQHTPLLIRRPSYFGRTLLYGHCDEWFWQSLCFGFHKPKLSACGAEVTQLSAIGYGAEIFFMAMFFSTVRTGKVNELRNLWHCGWWPVKIALVMDISCSSAHKFYEIYHKAELQIVPNKGRS

SEQ ID NO: 79648 - protein, 54 aa, Zea mays
  Coding DNA Sequence Number=SeqID_36273
MDYMVFKVAELDGAAMICHTNNKIKVSHNYISNFHIKMVKKIVDKRRDNDVMGQ

SEQ ID NO: 79649 - protein, 154 aa, Zea mays
  Coding DNA Sequence Number=SeqID_36274
  Subcellular localization annotation: CTP_CleavageSite=54; ConfidenceScore=5.27e-01
MEPGGGTAVGAVESLLTSSCFRKGAESRRRHRVRGAPSLPIRRSQPDGTPVSFPAARVSSGLGDVEAPPRPRSSLSSVVEVESEPLGRARRSSSSSRAEPKSEPWVGRSGVRRLSGLSPSPSPGSGGAEFAVFRDLARVRALGRAERSSSSSGT

SEQ ID NO: 79650 - protein, 128 aa, Zea mays
  Coding DNA Sequence Number=SeqID_36275
  Subcellular localization annotation: CTP_CleavageSite=54; ConfidenceScore=5.09e-01
MDALDQTPRPGQLSLAPSGGVAYVRGEGSLETRARARWGSQSNRKGLGRSGASAANMNAGTTPTQGHLRVAVHDEAVTLPHSGEELRTTEIREGKKTGIRMRKEENDPSNKSVKEQEQTFSQVTRWLE

SEQ ID NO: 79651 - protein, 240 aa, Zea mays
  Coding DNA Sequence Number=SeqID_36276
MVRVQALAISAVECHLEEAVLEALLCGLPEISVADFDIVRSDEVPSVGLLDGREVSLPISQEVTALVSRLGDPAPAPEGVAVGSSPAVSMEVRIGLSVPRVDDVVAMRTILFIESKQDGPITLEVSGADVGKVMPTETVVVEDAILDQSHEGAMVTLADVKIPMEVALQLGDLYSSALVTSSLMALANSTASGRVLPVLALPLPMFLADLQALQWGQPGVFGVLRKGEYTLTYSANVPFG

SEQ ID NO: 79652 - protein, 262 aa, Zea mays
  Coding DNA Sequence Number=SeqID_36277
MAGKKGGNGRRTIKGEKRKRPLTPPFEDFSDLELSEERTPPSSPGSPSSACTPDSMGLSVGKCAYLRGIKHVGLDDSKKSEEEEKYVEEDEDDGYDGSDEGDTTDRVSSGGGKDRDNDKGKGDDDDSSSGAATVVTARTMMAARAAMAATATIAVGVATAAATRARARAVTTMTMPVLFLESIRILDYGNTSTIANRYHFLFAESFSVFVSNPPIRGECGGAGHRAWRLKFVIAIHHGLPEVASRPTFPYNAQLMTLRLKLF

SEQ ID NO: 79653 - protein, 266 aa, Zea mays
  Coding DNA Sequence Number=SeqID_36278
  Subcellular localization annotation: CTP_CleavageSite=36; ConfidenceScore=5.60e-01
MVAFQGGHPPFKGDYPYLRPQPSRAESSPTRSKALPCGAGAGSHMSCKPTQSRRSQTAVRGAHNRPAVTSDPPLLPRPTGERGGQPCRRHATAPSGRASPTPNTPSMEAQAHVSCNRRAECFVHATAPPLAPPPRLLDCGTNTATRGDPAHDPTAPAWRGDNAPVFRSSNGSRTRNGRPANHTPRRINSAAGQAAPLAGEAGDASPSPLRATLLIRGSKAGPLEGFDSRLRSRGPYTHYWSEVRRSAPRKGSTAASGYSGSAPITD

SEQ ID NO: 79654 - protein, 181 aa, Zea mays
  Coding DNA Sequence Number=SeqID_36279
  Subcellular localization annotation: CTP_CleavageSite=34; ConfidenceScore=5.10e-01
MGDTHRLSASSLEERNSTGVARLYPPPPRRRSPKTATTSPWVGRSKPGCDLGPTLSFKDVHHPRWGGGRAEPELYLPRGFVGHPLLRCSRERALAGPTGGSDFDNAGLVDGGRRQPQRVELVGLAPGGPSCRKAAAAPCAREDRPRCRALLGRRSCSGAVLPLPRYGAFTRRSVPHSSGRI

SEQ ID NO: 79655 - protein, 142 aa, Zea mays
  Coding DNA Sequence Number=SeqID_36280
MEGRGMSIIKDGAKARIGTDRERMQPRHNLQGVKEGGAVNDELDMVLSPNMDGKEEASKGRFKVTTDKDVGEEVNRHETKDISTTKDGVKTGPTSGKEEDTSKGQIGSEVITDKGVREKMKTLKSQWYEYNKEWSCVQAYTR

SEQ ID NO: 79656 - protein, 110 aa, Zea mays
  Coding DNA Sequence Number=SeqID_36281
MRVVRDALGQVIREVLCWVLVFGHWETEASVMAPIFSLRDLGTGIVPWLFPEGRGIGFGTSDGLYAMVISNIRIVRTRGKSHVVRPFQFTLEVINGESRSSGRKGIMAHG

SEQ ID NO: 79657 - protein, 206 aa, Zea mays
  Coding DNA Sequence Number=SeqID_36282
MALLRTVVGGGRSASLEPERRRVKGAAEEKEQQDDGRLGFYGARKAEFKKRRPRPPFIGGARLFGKPAIRQAATLRETRNPTVRRPSTVTSKTPAEPLRARAASPPSSDVFGTRCLRAHASLTQDAGHSDTYKYPRTVPVRGEINSAIAPVHVTLLSPPFTLVGLLAAESKFQHGRVAGPDLPHGGCSRHHFERLGSNEVLASDTN

SEQ ID NO: 79658 - protein, 25 aa, Zea mays
  Coding DNA Sequence Number=SeqID_36283
MAAHRRPDWAKPKARARASSGARKG

SEQ ID NO: 79659 - protein, 209 aa, Zea mays
  Coding DNA Sequence Number=SeqID_36284
  Homolog annotation: Hit_ID=Q6BTJ4; Match level="QueryCoverage=97%, HitCoverage=21%, E-value=1e-07, Identity=30%"; Hit description =Similar to CA1621|CaIFF6 Candida albicans CaIFF6 unknown function
  Subcellular localization annotation: CTP_CleavageSite=44; ConfidenceScore=5.12e-01
MTATSLWRSSTGRGSEDIRKPSKSAPGVISQSGSRRSIKGKHPPAMNGGDHSRSEDSATRVTPTAVPLDGVRLTAAKSGLGCHRKLRLARPQGSDSGSAPEDDELRLARPQGSDSGSAPEDDELRLARPQGSDSGLAPEDDELRLARPQGSDSGSAPEDNKLHLARPQGSDSASAPEDRLDLDLGGASASPDLGLGPTTSQEGPSLPYP

SEQ ID NO: 79660 - protein, 104 aa, Zea mays
  Coding DNA Sequence Number=SeqID_36285
  Gene Ontology: Mol. function=kinase activity; Cellular component =ornithine carbamoyltransferase complex; Biological process=amino acid metabolic process
  Homolog annotation: Hit_ID=Q6QP54; Match level="QueryCoverage=59%, HitCoverage=29%, E-value=2e-16, Identity=57%"; Hit description =Putative kinase
MAPPVDVVGLRPRLGDVEAPPKPRSSLSSVAEVESEPLGRARRRPSAEPESEPWVGRCGVRRLLGLSPSPSPGSGEAELPMAGQWSGEVMAVTSALSAGGRASG

SEQ ID NO: 79661 - protein, 411 aa, Zea mays
  Coding DNA Sequence Number=SeqID_36286
  Homolog annotation: Hit_ID=Q6J9V9; Match level="QueryCoverage=23%, HitCoverage=34%, E-value=9e-10, Identity=41%"; Hit description =Putative uncharacterized protein
MRRKDGGYPPSGGLEGGKTRCIREREDMVAFQGGHPPFKGGSPYLRPQSSRAESSPTHPKDLPCGAGAGSHTSCKPAQSRRSQTAVRGAYNRPAVTSDSPLLPRPTGERSGQPCRRHATAPSGRTSPTPNTPIMEAQAHASCNRRTECFVHAPAPPLVPLPRLLDCGTNTAGRSSGPVISQAHVPSGGSERTLSHGVKTTRLTGGASGRRSGRRFAFAIMTASEKGPGKGDTPKRILPREGTRLRASLLIRGSKAGPSEGFDSRLRSRGLYTHYWSEAGPRRVHSRLRRRARDDHGYVRYITKARAALPSSPETPCSAPIEGNMALSPLLLAERRRRGVCKKVESVPDRPLALCRGSGAALANLAPAKPLTASTYQPENLGPNRTPGLRPARMRDDQTSRSITRGIKTSEE

SEQ ID NO: 79662 - protein, 74 aa, Zea mays
  Coding DNA Sequence Number=SeqID_36287
MACCGRHRDELRHEAITTMAQRTRCRETEDETTNSKHGEYRGEHVEEDVEMDSNMKLPPWTPLQIHAHRWSVTP

SEQ ID NO: 79663 - protein, 213 aa, Zea mays
  Coding DNA Sequence Number=SeqID_36288
MARPPLHSATTAGAGTTWTPRVRQALGEHGRYCARPRDVRGVGAAGGGACGWVAQGGMGRMGKRRTGVAGGGRRGWVALAGVGHGAAKERVVGENRAARPHVREADWEARGGSRWAGGERVRLGGLARARRATGTVGWPGVGEGAVGLLARLGGPVRGKGWGLLGREHQPLHQVADHPALGCGPFAPPQRALMPVLLTVIGVRIGANTHKYRY

SEQ ID NO: 79664 - protein, 276 aa, Zea mays
  Coding DNA Sequence Number=SeqID_36289
  Homolog annotation: Hit_ID=A7PDN2; Match level="QueryCoverage=26%, HitCoverage=3%, E-value=2e-07, Identity=44%"; Hit description =Chromosome chr11 scaffold_13, whole genome shotgun sequence
MGFSQEGQTTPAGMRGGIDGVCRGKAYADYGAVWFVAKYVTLCLSEHYWVKKSGQGHNLLSGFFCKTPQPMGAVDCWPHDHILRAKIRSAEGRTDDRGPLPAFVVVMVVDYGGREPMMRRSSVRPSKLISYDHLKGDPDLGGGTNSPIFVDILNTVVASIKHSLTGDNSDVSPSNIIEPTWETLPAEEQIQFKEHKEQLIQEAKAKFLANFKVGTNNKVVRQRATDLASLRPTTATPKAQELVRFRMCDLVTIQAIESVGKLVSISCVAKWTNSRK

SEQ ID NO: 79665 - protein, 875 aa, Zea mays
  Coding DNA Sequence Number=SeqID_36290
MKLWKETSRSSKITTSSRCGVFELNQLPYDGYPGQDEADRRGKKPAVETGGDPALVAAASSKKRKLGTAMGRLGVSDSFARDLMRTCAAPGERMSSPELRESSARMLRVTGGCWPKNIPIPCAAEEDCFTSRMVHRWKVFPYGRNIGHVVWAVMDKDRQGAARKRQATVRVHEARPKRHRGTAKAEASGGGKPPLPTKVGASAPGKAPETTVGAGGPKLSKVVPSASGVAEAAKAARSLPLPGKRVADFGTEIDVDDYLGGSDEGPLALVVPGAAIATAAPAPKAGGETLGAGGEVSALALVRDEAGVATRRLKGATEALSRATEALSQVADFTSRTASGALTAALSAEVERLRTQHADAVREKSASDSKCRKLAEKVAVLEKEKADLRRQLAGERREANEAIAKEQAAQAEARLARAEGNIAKELAGELQRRLTAQESRAEGAEAAMRAEAERTRTQLMTSYRELGVRTGDFEVPEREAGLRCLEWVQEELQELPTVLAGLMAFTSLVTCEAAMNALSREGCRHFEALDQVDEDFGRDIFEVEDPMVKESAGALYDRMWGSYGREVVRARAEAARAQAERGERVDDFGALNSELPESETTPAEAATGVAPGPTPETAEDAPGAPASAAAGEDLPPKVAEGAPDAPAATVPSAEDPAEAAAEAPAAAGPSQVQDFGPAHATAATEFLAASTAEDGNECGGSVSEFFDVTDSGSSVEWTEESSEEDLDYFAALDVAAAEAAPHAADAPGVPGPSTGHRRRRAVAKRRISAEEGARLRVSRAGRQELLSLPAASGVGEGGSCDRLRIFARLCLVRLHLLGDFCADSLRDRLRFCALVVLSPAAPLGDFCADSLRDRLRFLRTCCAKSGCTLRRLLRG

SEQ ID NO: 79666 - protein, 428 aa, Zea mays
  Coding DNA Sequence Number=SeqID_36291
MRRKDGGYPPSGGLEDGKTRRIREEEDMVAFRKRPTRHATGAPDAACKQLHCHLHHHRASSVAEPIPRLEAAQRTTQQRQPGAMVNAAESGPAVMTVAGGWERRSRRRPDSRPIQGQQENPLSLREDRAPVIRSSNGSRTRNGRPANHSPRRINSAAGQTALMAGEAGDASPSPDRERGIPRKGSFPVKEPGSEPPLLIRGSKAGPPRGSTVASDRVGPTPTTGQRLAPEGFTVASDAERGMTRGDRVRQITRRYFWACLWAPSRPPTNGARTSTRITPLQLTGDTMFGAHRGARTRAKPRKTANSAPPDPGLGLGLNPGRRRTPLRPTQGSDSGSAPEDDELRFARPQGSDSALASAEQPPPRPTQGLGLGLVHGRQTRPRLRRSLHVARPRAQASHVNRKRHHHPTPSRLGPQRTRPVSHLASSAR

SEQ ID NO: 79667 - protein, 184 aa, Zea mays
  Coding DNA Sequence Number=SeqID_36292
  Subcellular localization annotation: CTP_CleavageSite=81; ConfidenceScore=5.71e-01
MTSGQTLLRQGPRPRPHSRGKDKLSKPKSRRPGVQMAAAISSVTRTSSAATTSAPTTAAICPPANPHSGPPGQASTDLCAEASYRSKGRTAQEHERRPSSARRLGRSPGPPPTTRGLGPTRHASWPMTEEAKPPRAERVTAQRLQALLHLRLNQRAKGRTAMQAACNCTKGMHPFDFDASSMEA

SEQ ID NO: 79668 - protein, 295 aa, Zea mays
  Coding DNA Sequence Number=SeqID_36293
  Gene Ontology: Mol. function=1,3-beta-glucan synthase activity; Cellular component=1,3-beta-glucan synthase complex; Biological process=1,3-beta-glucan biosynthetic process
  Homolog annotation: Hit_ID=A2WV62; Match level="QueryCoverage=45%, HitCoverage=9%, E-value=3e-65, Identity=88%"; Hit description =Putative uncharacterized protein
IRPMVKPTKTILSLHDIRRNWFEFMPHTERIVVIFLWAPVVLIYLMDIQIWYAIFSSLTGALIGLFSHLGEIRSVEQLRLRFQFFASAMQFNLMPEEHLDAVHGGLRSKLYDAINRLKLRYGFGRPYRKIEANEQGRARKAGVVTRGGSSACATPERTHLRSRRCAHASVKPSTPCLQIGDSLSLRLWIEELSSSCHRIRELSSLRLRIKKPLSSRHRGAAAAVPSDEGAIVVVASDQRATTITSSDLDVTTAAPSDLGSTRQLRDRRPPPPSRVPRHRDLVRVNRMTAFGQGFT

SEQ ID NO: 79669 - protein, 217 aa, Zea mays
  Coding DNA Sequence Number=SeqID_36294
  Gene Ontology: Mol. function=transferase activity, transferring nitrogenous groups; Cellular component=soluble fraction; Biological process=biosynthetic process
  Homolog annotation: Hit_ID=P34106; Match level="QueryCoverage=100%, HitCoverage=51%, E-value=1e-100, Identity=76%"; Hit description =Alanine aminotransferase 2
VLAEDNQYDIVKFCKNEGLVLLADEVYQENIYVDNKKFNSFKKIARSMGYGEDDLPLVSFQSVSKGYYGECGKRGGYMEITGFSAPVGDESYASYKAEKDGILQSLARRAKALEDAFNTLEGFSCNKAEGAMYLFPQIHLPHKAIEAAKAAKKAPDAFYALRLLESTGIVVVPGSGFGQVPGTWHVRCTILPQEDKIPAVITRFKAFHEAFMAEYRD

SEQ ID NO: 79670 - protein, 67 aa, Zea mays
  Coding DNA Sequence Number=SeqID_36295
MGELGTRLTMRSHPAGRTEVVETSEDLGRMWVELAATPSRLPVKAACIYVSFTHFDYCKDYVDVSDI

SEQ ID NO: 79671 - protein, 83 aa, Zea mays
  Coding DNA Sequence Number=SeqID_36296
  Subcellular localization annotation: CTP_CleavageSite=17; ConfidenceScore=5.32e-01
MSHRAVALGRRTGRPRRAAALAGRAGPPRVRATGHGAARPCRRAAAENRAPARRRALGKRNRVGADVVMQAVRVEGLKLEHET

SEQ ID NO: 79672 - protein, 257 aa, Zea mays
  Coding DNA Sequence Number=SeqID_36297
MTSHGSSDEGNAQSHTDGLAREGFPRILWEVLQGAGYTTPPQYVVQLFEKHRVPRCRVRMTLEPHPLQPGWRSLDSESFGYRAEDTMEAIALHGLTTFCGFHPLELSTHPIGLFPTEKGGQPQCGRTEWSMPRISRLSTQATKITLDNREELMVDLSTEMVEKDLQVEQLSNEIQELEELVGTRENTIEVLGDQLINTQQQLAEANQHLDMHHQEIQDMEANKDVDIEGGEEPTSSLDTAGSGRPPSPESSVASFAH

SEQ ID NO: 79673 - protein, 23 aa, Zea mays
  Coding DNA Sequence Number=SeqID_36298
MGKPVPSLLMLLLSRAAWIKQSH

SEQ ID NO: 79674 - protein, 52 aa, Zea mays
  Coding DNA Sequence Number=SeqID_36299
MGKPVPSLLMLLLSRVTAFVPTITGMGDHVSGRVRGYVHCQVHSEFRNHHVK

SEQ ID NO: 79675 - protein, 56 aa, Zea mays
  Coding DNA Sequence Number=SeqID_36300
MALNSSNGAKDPAPDEGHSIKDLAYKASECRRSENTFSELVVEKRFKYSQRKVVPP

SEQ ID NO: 79676 - protein, 174 aa, Zea mays
  Coding DNA Sequence Number=SeqID_36301
  Subcellular localization annotation: CTP_CleavageSite=60; ConfidenceScore=5.35e-01
MRRQEDSTRSATVYPRGLRPSHLQVGPPRQNLLPPMAGNVESTSSPPVSSQNPLPSAPPRLMLLAHPNLAGALTVDLGDSMGPRVRGREPAKPGDQALGRVIARRRSNPAMGRHSFSSDPLSTTTSGKKASTEFAAISSTHSARESRIECCGHWIGNAPAMPAVVCSVPPGTGQ

SEQ ID NO: 79677 - protein, 309 aa, Zea mays
  Coding DNA Sequence Number=SeqID_36302
MGRGKPGCDLGPALSLEGVRHPRWGWERGEPGLYLPRGPAGHLFFQLLVVANILQLCGGDVLQPCRGRRTVAAQLGCNIPPSSSLSRRGRQRGPAGALWSGPLFGFNSWFASLEREREREPSGGLVRPGTMAAAAEVAGGSPGVRRPAGSPESLGSVGLVARGFSCSVKGTPRPPFDEPRPGVAVSARTEAELARKEDLVGRSLAGLPVSGTDAGVVLPRPRVGLTSSEDSWLRPRGDQPSRLPEPDSRRRPWQRWPGLGDDAVLQSGDLRIASPSEARSDLTEGVVDAEGAAAPFKRQDPSLQDRIVL

SEQ ID NO: 79678 - protein, 183 aa, Zea mays
  Coding DNA Sequence Number=SeqID_36303
  Gene Ontology: Mol. function=kinase activity; Cellular component =ornithine carbamoyltransferase complex; Biological process=amino acid metabolic process
  Homolog annotation: Hit_ID=Q6QP54; Match level="QueryCoverage=63%, HitCoverage=41%, E-value=4e-33, Identity=64%"; Hit description =Putative kinase
MGVREVEIPRPSCSSRALVGHKERIQPERFWHSAGVMSWPSEECWSLAEWPESARGRVMMAPPVDVAGLCPRLGDVEAPLRPRSSLSFMVEVESEPLVQERQRPSAEARAESEPWGRAERSSSSSGAEPKSEPWVGRSGVRRLPGLSPSLSPGSGGAEFAVFRDLARVRALGRAERSSPSSGT

SEQ ID NO: 79679 - protein, 226 aa, Zea mays
  Coding DNA Sequence Number=SeqID_36304
  Subcellular localization annotation: CTP_CleavageSite=24; ConfidenceScore=5.13e-01
MLLRFGRSVRRFGQGCFLAKTGPRASRKLVRRWRGASGETEILRGRLPLSEARLGRVVIVSFEWTDPDLIAPIRPLQLYADGGYQLRIRSLEAHLRMASSKEDTMKSLLKVLVDYAEDATKSLGGLVDHALDHMHDEEILARTLFAMKEKLDLLHQDALEAKVQAFPEIAKYDGDDISVEPTSPSTPPTVTEPSVDEEEFYCPDVSDEWYFSDSDRSTRNSYWNLY

SEQ ID NO: 79680 - protein, 117 aa, Zea mays
  Coding DNA Sequence Number=SeqID_36305
  Homolog annotation: Hit_ID=Q6QP51; Match level="QueryCoverage=81%, HitCoverage=34%, E-value=4e-13, Identity=49%"; Hit description =Putative growth-regulating factor 1
MAVIRGIPALELPINCSGVRLTTAKGATGSSASPDLGPRPQEEVFASPRPPGLGPHPRPRKVVSASPDPRARSQPRPREESRPRPTPASASEGVSASPDLGLGPTAQQGIHHYPTPS

SEQ ID NO: 79681 - protein, 206 aa, Zea mays
  Coding DNA Sequence Number=SeqID_36306
MAAPSLTSPDSEGRCRSATPTRGAGHYESIGKLNFTIGTPNAVITMMARPQDARSWSGALDDDVEALKRGGARWFHGIRVLRRAFRAKWLRPARQRKVRTRRHGFVGVCYGGKEHLPGFYSNPMANPPRAELSRRKNPDGHEMEELGLRDDGHVVTCERQLAVGVDWRNHHSRRTRGFPLGRHLDSTGEQSGRRIAERIRKRESKN

SEQ ID NO: 79682 - protein, 173 aa, Zea mays
  Coding DNA Sequence Number=SeqID_36307
MKRLLETTHLELNGKLFVNTQQAPTWRANCRRFDPRGGDALAVGVTSAREGERASLFVSPSSRVTTLSHEGPGPSFYRCKERVQGNDVSPVARSVRAQGRARRRLLLRPRPGSGEDAIPPEVEVETELWGRARRRPPSEAEGEARALGVGARRRPPPEVEAQGRARQSFLLRL

SEQ ID NO: 79683 - protein, 341 aa, Zea mays
  Coding DNA Sequence Number=SeqID_36308
  Gene Ontology: Mol. function=protein binding; Cellular component =Golgi apparatus
  Homolog annotation: Hit_ID=Q8H3E5; Match level="QueryCoverage=30%, HitCoverage=24%, E-value=2e-38, Identity=75%"; Hit description =Putative zinc finger POZ domain protein
  Pfam annotation: Domain name=DUF246; Domain location=82-340; Score= -134.2; E_value=8.2e-07; Accession=PF03138.5; Description=Plant protein family
MTYESGVQWWLVDISHWHPSPAQFDDAPSLLLLHDGTTISRYRADGGKEKQGILKLGKFIASEPFNVGGFDWAIYFYPDGKSGEDGVVYVSLFIALASEGTDVRALFEVTLVDQSGKGQDKVHTHFGRSLESDPYTLKYRDSMYAYLWWKEKVIDSYLKRKDGLCPLTPEKFAMTSFLTKKNCQAQLIYWDSKVSEADMDAMWKHPDVYKEWIKSGERRGNVRFSHDAKNMPYLSRVEVKDMIAFSCCVYDGGDEEKEMDAAREIGWRGKFTKRGRVGLMLRGMDFSNKTAIFLASGKIYKAEKNMASLLEMFPLLQTKETLASEEELAPFKVDGIEAALA

SEQ ID NO: 79684 - protein, 131 aa, Zea mays
  Coding DNA Sequence Number=SeqID_36309
  Homolog annotation: Hit_ID=A2YQE4; Match level="QueryCoverage=32%, HitCoverage=3%, E-value=3e-09, Identity=65%"; Hit description =Putative uncharacterized protein
MEFRKYTKGTWRVPSVVNGVDEDSSQELECIRKAIFTSSVNVINVRFMQIRVNVRPLELSTLYLLYLDAFEQLKMETSSSLEANKAMCYNSLFDILISEKFTMLCDVLGGAFHVSKPDDVKNRNRRCKRLE

SEQ ID NO: 79685 - protein, 262 aa, Zea mays
  Coding DNA Sequence Number=SeqID_36310
  Homolog annotation: Hit_ID=Q6ZC35; Match level="QueryCoverage=59%, HitCoverage=27%, E-value=1e-39, Identity=54%"; Hit description =Putative Hec1 protein
MGHGPASEDDDDGDDGSSSKASHTQLMRCSCSALAMHDSGGRLQKHVLLKRDNGDVGTIVGDLEKELEAKVSDTQCAAAEIQDLLKQVDAQPVNVKDVDRLRREMQAIEDDIANTEKGKAALEDKFWEVEAKLVTKLEELERHAHQFNQALKQLKPTVAFQYMIDSKGSSPAEMLGTGYKTVLKPALLAHAEENKRICLSNLENLNGLQKQLQGNAKLCCAVVGTFLGSGRSGDGLPRTDRDLTRRPTAVNEYSCGVDTLNI

SEQ ID NO: 79686 - protein, 314 aa, Zea mays
  Coding DNA Sequence Number=SeqID_36311
  Subcellular localization annotation: CTP_CleavageSite=80; ConfidenceScore=5.26e-01
MGAPGHCPVRQPRHPTVRVLTVSTIGALTAWATRQSGVASDSHCSLSGAPSGAALTLRELSAHCSCCRRPLESIVALGSRCSAGTPDSPVNYSGVRPQKPEGEEFEVNPPWCTGQSDSLRAITSRCINSHLGATRPIRLTQPTRAAPPPQGDTKETPLRITFPAKEMRPEPLTDQGFKVNPSVGLGNRPRAHGLRTLYRSGVHRLAPQQGSTTALEHRARNDYGYVRTLAEAQTTVPRYPETYSRPLERFVMYPIGGKHRALGPHRMGPGPHESPAGILGRISVPLADPYRTGLGPPLGLPINSSPEASCSLPT

SEQ ID NO: 79687 - protein, 113 aa, Zea mays
  Coding DNA Sequence Number=SeqID_36312
MVPSTFTNYDDERPRITATAPPRRLPCSNNYGLNVCASKHGPNLGRELRLLEVDLSLGRKLCLARARLRPTAPATTPRQSRRRLLRQLNYPSLYGCMLRGRLDQGIGRNLHLA

SEQ ID NO: 79688 - protein, 125 aa, Zea mays
  Coding DNA Sequence Number=SeqID_36313
  Subcellular localization annotation: CTP_CleavageSite=69; ConfidenceScore=5.22e-01
MGHGRPLGLPASSSPETPCSAPSEGNMALSPLLLVKRRHMGSQSDRSHFAAPLTGLTEGQRRLRRSDCCATRQSEADMQSGPASGTIGNSALPDPGLGLRLSPGRRRTPLRPTQGSDSGSAPEDG

SEQ ID NO: 79689 - protein, 103 aa, Zea mays
  Coding DNA Sequence Number=SeqID_36314
MRIRLKTMKKKIKKMSQLKRRTMIEGEMPMIKTRKMIKKNRVKDRHTQESIKRYKEITPVEDALRDSDWVLAMQEELNNFTRNEEWDFAQIVAKVPEGLPHPK

SEQ ID NO: 79690 - protein, 221 aa, Zea mays
  Coding DNA Sequence Number=SeqID_36315
MAEEGGDGEEATIGVDRCTWEPLFRWHIGQSGDPSDSPIFSRPKDDIININLAYKQIICNGFSKGCRIGFANFEAVGEEISPAGWRIAPTLNPKERRGLSVLLATRLVDQHTRAHEGLEWFGPPERNTLLHSEGGHAQRDWAPTCGLRDIKSIVLGSSNVCCRGNLLVSWRSRSAYPWRAGEASCRREDEYSVQLGTGALFASRPSRHAACWMTLMPSASG

SEQ ID NO: 79691 - protein, 218 aa, Zea mays
  Coding DNA Sequence Number=SeqID_36316
MVEGCQLPWGCTPPTAAGRRQDRRHHHECALPDGEVAGRYGLDADPSREHWRTPSGGPEGEGARWSQEERGMTTVREIDPFLKLRRNWRSNSGAQAHTSCNWHAGYRVQRNRTTACANATSSRGCHGILKRLASSPEAGPGATVGTLNQGYPLLQHEDAAPMRRLLATRRTAPDPTGWAGQRAPHGEERHHISGSGADKCAGLALHFPLRRRPAACGP

SEQ ID NO: 79692 - protein, 136 aa, Zea mays
  Coding DNA Sequence Number=SeqID_36317
MGSSCTSAHEEVFALVLTVGVRTRPSKNAAPTRTAYDVLYDLPVWLVPREKPWMWPTRARRDRRSCGGRAATLCPSGRRQRRRRHQSRPGRGANHAAADSATDGERPSPPNTEGRSGLLPTRRWGPNSAHPPPQHG

SEQ ID NO: 79693 - protein, 62 aa, Zea mays
  Coding DNA Sequence Number=SeqID_36318
MEWWSVQDFGYGTRLTGHTGSGSPYGTDIRSLEPAPRPSPIFVKLIVWVHGGRPYRVVVCVI

SEQ ID NO: 79694 - protein, 105 aa, Zea mays
  Coding DNA Sequence Number=SeqID_36319
MGQRTLAFTKLLIRDFLCNFLGKHRLLVVYVKDTGGGRFTAERLGGGIKQLRRGIKRSRRQYAGLEGAGEVLYLKAGSGDSSVAAMARRWPGATVADLRGCTGNS

SEQ ID NO: 79695 - protein, 460 aa, Zea mays
  Coding DNA Sequence Number=SeqID_36320
  Gene Ontology: Mol. function=sugar:hydrogen symporter activity; Cellular component=integral to membrane; Biological process =carbohydrate transport
  Homolog annotation: Hit_ID=A7QSY0; Match level="QueryCoverage=86%, HitCoverage=86%, E-value=1e-140, Identity=61%"; Hit description =Chromosome chr14 scaffold_164, whole genome shotgun sequence
  Pfam annotation: Domain name=DUF606; Domain location=238-357; Score= -52.6; E_value=0.064; Accession=PF04657.4; Description=Protein of unknown function, DUF606
  Pfam annotation: Domain name=MFS_1; Domain location=48-402; Score =16.7; E_value=0.0053; Accession=PF07690.7; Description=Major Facilitator Superfamily
  Pfam annotation: Domain name=Sugar_tr; Domain location=43-450; Score =130.1; E_value=6.2e-36; Accession=PF00083.15; Description=Sugar (and other) transporter
  Pfam module annotation: Pfam domain module=DUF606::MFS_1::Sugar_tr; Domain location=238-357::48-402::43-450
MDLEDQEAQKPLLVTAPGRIGDGSHLAESDAASSSSSIAVVVASTAVAVAGSFEFGISVGYSSPSQSGIMRDLSLSLAEYSVFGSILTIGAMLGAVVSGTVADRVGRRSHLSRFQSIYQRITPKNLRGGFATVNQFMICCGASLAYVLGTFITWRTLAIIGVAPCLLQLVGLLVTPESPRWLARFGHPGAFEAALQKLRGKGTDISDEATGIKDFTEKLQQLPKSKMLDLFQKDYIRAVTVCIQVGVGLMVLQQFGGVNAICFYASEIFVSAGFSSGNTGMLAMVAVQVYNLSSDLQIPMTGLGVILMDKAGRRPLLMVSAAGTCLGCLLVGLSFLAKEHHWGKDLNLVLALAGILIFGGSFSLGMGGIPWVIMSEIFPINMKGAAGSLVTLVSWLGSWIVSYAFNFLLVWNSYGTFFIFASICGLTVVFVEQLVPETKGRTLEEIQASMNSSLASPSDI

SEQ ID NO: 79696 - protein, 84 aa, Zea mays
  Coding DNA Sequence Number=SeqID_36321
MRRRRPYVNIHGSVRGRTNSDTLRGWVIARATHPSRIIPGDTLGGWVGRCGGSSEVEVESVFQGQGRVRAPGSGEAETVGGGQG

SEQ ID NO: 79697 - protein, 232 aa, Zea mays
  Coding DNA Sequence Number=SeqID_36322
  Subcellular localization annotation: CTP_CleavageSite=46; ConfidenceScore=5.11e-01
MALTGHASGADFDNAGLADGGRRQLQRVGLAGLAPGAPSCREGGCRAVRTGGPPKTSRAARAAFVFWGGPAFAPESLGSVGLAVRGFSCLVKGTPRPLFDEPKPGVAVSARTEAELARKEDLVDRSLAGSSVSGTDAGVDLPRPRAGLMSSGDSWPRPRGNQPSRLLEPDSWRRPWRRWPGRDDEVVLQSGDPRTASPSEARSDLAEGVVDAEGAAAPFNYRDPSLQDRIIL

SEQ ID NO: 79698 - protein, 176 aa, Zea mays
  Coding DNA Sequence Number=SeqID_36323
MGCSSVALLLLSLEEHGLVEIGTFQPSLGFKDFVVQAEVESELSRVSPPVWVGDPLLPPSFGGEWAQSSVLHLGNGCVVHRWLLSPPSRRGCTSTTRVQSVVDVVICSVSGSLAQLTLAPLSMLPPAAWFSWGPTLAGPRGFEWGSASELLGVRCPAGPPVWRLFMSPGMEPESRL

SEQ ID NO: 79699 - protein, 269 aa, Zea mays
  Coding DNA Sequence Number=SeqID_36324
MTVYIGSSPHHVEWSVTAAGHRFKDTCQVIARKALRALCQIYEEVADTPLIFFPPFQRDHLVWMARMRALEGQQPLEDDLTVVYLTTYLLTWMPSMISWLGTTQAKDEHVQKLMEAYLVTHNQCRAMRIQEPALSNPVQPMRGEDPHILECHPVSIRGEKKAWELLEGAIVLEGIPVSPQAMDKQEHPESSQDPLPELFEPLTMKKILAPSHEIKEEAASTPPAPPPSEELQEPVQLEEEFDPVLPSQLPPEEVINISSLLTHPGDISD

SEQ ID NO: 79700 - protein, 83 aa, Zea mays
  Coding DNA Sequence Number=SeqID_36325
MVKPQGEQLDPERRGKAGPDFYTEAESAFKESMAENLADAVARDPWRVWRCSAARHAVRYEEDATHIPGPRHREAYKWDRSSV

SEQ ID NO: 79701 - protein, 177 aa, Zea mays
  Coding DNA Sequence Number=SeqID_36326
  Gene Ontology: Mol. function=sequence-specific DNA binding; Cellular component=nucleus; Biological process=regulation of transcription, DNA-dependent
  Homolog annotation: Hit_ID=Q84V67; Match level="QueryCoverage=90%, HitCoverage=63%, E-value=2e-72, Identity=89%"; Hit description =Putative MADS-domain transcription factor
  Pfam annotation: Domain name=K-box; Domain location=25-122; Score =128.5; E_value=1.9e-35; Accession=PF01486.8; Description=K-box region
MLASSYACDLSMEGILERYQRYSFEERAVLNPSIEDQANWGDEYVRLKSKLDALQKSQRQLLGEQLSSLTIKELQQLEQQLDSSLKHIRSRKNQLMFDSISALQKKEKALTDQNGVLQKFMEAEKEKNKALMNAQLREQQNGASTSSPSLSPPIVPDSMPTLNIGYHASTELITALN

SEQ ID NO: 79702 - protein, 170 aa, Zea mays
  Coding DNA Sequence Number=SeqID_36327
MKAGEHREDKEGGCFVWFGHGGGLTPSEKGDRPPGTSNCITFESQRIGALHLRTDLSSLLTYTLIKYNHSRLYGQSLNLNLYSPNPRVMMAGEHREDKEGECFVRFGHGGGLTPFGIIVKEGELLGYFDAGTEFHLVGCSDDTAAAAEEIASGTGAGADADAGDLKGDLA

SEQ ID NO: 79703 - protein, 86 aa, Zea mays
  Coding DNA Sequence Number=SeqID_36328
  Subcellular localization annotation: CTP_CleavageSite=21; ConfidenceScore=5.07e-01
MAPEAGLGGCQPHPGGWLSSRSRAGGAVFLSGDLAKVASLRSLPELGLGESRVRPLLEEALGRGVNLPGSTVPARGWARARRDRVP

SEQ ID NO: 79704 - protein, 121 aa, Zea mays
  Coding DNA Sequence Number=SeqID_36329
MQAACNCTKGMHLFDFDATSMVAQTHTSCNRRAGYYVRETAPPLAPVPRLLDYGTGAATQGDPAHGPIVPTEHIGHGSVSRGRRAGDTFGRQSRRRFTSAMMTASKKERFTRLADITEHQR

SEQ ID NO: 79705 - protein, 116 aa, Zea mays
  Coding DNA Sequence Number=SeqID_36330
MARHMCCTAAHRPRGGIEEGNGAPMARLRLAGSAARERDMAAHRSKFMSQRRARGDAGREPLAALGTSRAGWLACWASRARTGIYARGIPPWPRRGMGEERVGRKRKEDLCAPGNR

SEQ ID NO: 79706 - protein, 93 aa, Zea mays
  Coding DNA Sequence Number=SeqID_36331
  Gene Ontology: Cellular component=integral to membrane; Biological process=single fertilization
  Homolog annotation: Hit_ID=Q5G8Z3; Match level="QueryCoverage=87%, HitCoverage=86%, E-value=2e-09, Identity=41%"; Hit description =Protein EGG APPARATUS-1
MKDDEGIGAMGAAVAFAAMGVFGIYFLWPVVGPASAGMMMKAPGAAGWVICRAVFEANPQLYFTILRTAGAAAAAATLSGCIDYSRARDWSSA

SEQ ID NO: 79707 - protein, 330 aa, Zea mays
  Coding DNA Sequence Number=SeqID_36332
MVTTSSMVGRSEPGCGLRPALSFKDLHHPCWGRGRAEPELYLPHGSVLARLGGSEWGSAGGQMASIVGAEVVAAEEVLVADGITATIRALGLRLFGFDSLSSPLEWGRGRGARRSSARPEVIAATVWPPGAEVIVAAAGAGVGEPPGESLGSVGLAARGCSWLVKGTFGRSAMSWSQRQRCQHGQRQRWLEKKLRRLEPGRAVHWQDRRRSRVAEAMSQADVLEGQLAEATERPVEPSARAGFPEETLAAMAQAWCRQKVMSERGFVPSSPRGRVGLCRGKADPSLMVRLYWHLALTVSQLVCSRLQNLGDDEWPFPGWRELVAPSGVLS

SEQ ID NO: 79708 - protein, 176 aa, Zea mays
  Coding DNA Sequence Number=SeqID_36333
  Subcellular localization annotation: CTP_CleavageSite=88; ConfidenceScore=5.58e-01
MGVIKVKAQSTQGTRSRLTRAQPRAKAADPGGFTSRPRAPSSNGHTFGSPEAQSSQRSNLGQIATPTDRIENSATCPAPTIVPLDRVRLTAAKSSLGHHGKLRLARPRARTQPRPRKTDSASPDPGLGHSLNLERRTPPRSTLGPRLDLDLRGASASPDLGLGPGTSQGAPSLPYS

SEQ ID NO: 79709 - protein, 156 aa, Zea mays
  Coding DNA Sequence Number=SeqID_36334
MVMGTCGRKTGRKDQVPLESRLEWCAGKRARRRGREGAVLDGKESGLAKPRWFRSSRCRVLIGRGGFGAAWRQLDRRIMTGIVIAGQKDGPSEAGVRVMRSSGRAGQGLVEPGVGRKGAVQCSSPAFQGRSGTRERDGKSNVAFAAGRLADGSTRV

SEQ ID NO: 79710 - protein, 127 aa, Zea mays
  Coding DNA Sequence Number=SeqID_36335
  Subcellular localization annotation: CTP_CleavageSite=78; ConfidenceScore=5.48e-01
RARAPGSGEAEVVRQRPGRSPSPGVRRSGVCRLPGLSPSPSPGSGGAEFAVFRVLARVRALGSGGAEFAVFRVLARVRALGRAERRLLLSEGKASGEPEMCPPLKGGLGPLQLYADGGYQLRIRRLE

SEQ ID NO: 79711 - protein, 60 aa, Zea mays
  Coding DNA Sequence Number=SeqID_36336
MARVSQEAIAEGASNAEAEQIVAEGGSENESEEDNSIPSPMKPSHIEFGKLRAPRGGVNR

SEQ ID NO: 79712 - protein, 103 aa, Zea mays
  Coding DNA Sequence Number=SeqID_36337
  Subcellular localization annotation: CTP_CleavageSite=70; ConfidenceScore=5.09e-01
MEKRWLEQPKSAQSGCTGLSGGAPDSVRCARLALAKRLLSGLRRRCTTINHRTVRWFTGLSGVPFTGELVALGKPSTTYGYNSPDCQCKGERLQVVEIPRKRD

SEQ ID NO: 79713 - protein, 299 aa, Zea mays
  Coding DNA Sequence Number=SeqID_36338
MACLRHTARKSVIPFLPSRLAERPLRRTVSGQSSHLERLHHRLREEQERQRQQREHQGSSSPPEQEVESVRRHSSIPQLEAPPAPPRDASAVGGATGGGPGGDPDDDGGSDHSTESSEPQEAEGWVARPITRDAAHGCHFHDALDTLLRQAFDRHTWSIEYRCVVYLHSRGRTQHDVHSPSTVPYSVGVTDGLNLRYYHRHPTGSTESVVVSPIGEDNPRLSSTVNLVAVLNTELDHSLDELSRARTEIAELRAELAERHHQEGGSPAPVGTQHPYRSPPRGHHTYGSPACKTRIDLDP

SEQ ID NO: 79714 - protein, 154 aa, Zea mays
  Coding DNA Sequence Number=SeqID_36339
MGRGKRGKGWTHRVDGKRKRPPSSPSEDFRDSEYLEEVSSEYDRPPAPAAPVASSEDSDDSMELSVEARVYRRSIECAGLSGSFDLEEVMGSYDSEEWSGGEGDDDNNDSSDSDGKGDDGKGNDKGNDKGGNDDGKGNGDGKGDGKANDIMLVA

SEQ ID NO: 79715 - protein, 142 aa, Zea mays
  Coding DNA Sequence Number=SeqID_36340
MGKNKKGGSSSHHSGDKRKREPSPPSEDFGDSESEGSRVYASPPVSSDDSDDSQGIAAEVWTYIQAVECSGLEGSNESEISSDEENSSNSSEEESSDDGDDEGDNDNGGDDGGDGDGDGKGDGGRGKGDNGSSKASGKAPLA

SEQ ID NO: 79716 - protein, 91 aa, Zea mays
  Coding DNA Sequence Number=SeqID_36341
MEERSTGTHLSAKGRLTARSQIGADSFLPKPDLASLELEQKVLLGCLLAEEQLVPVEFAAWNCHELGSNQTVQKELLLLLIVFNIPRSISR

SEQ ID NO: 79717 - protein, 273 aa, Zea mays
  Coding DNA Sequence Number=SeqID_36342
MAPKKRKQSATIPVIPPIDLNSQLPFAEICALNDRGLTIEVVVVVDFVFKNIQPLKDRVYPAYLYTRTTTDDAEVNVVLSMLAVAPVEGKKRKKILRRSSGLELGAEPTGSVLSGGLASANLKDDIENCDGARVGGHGLTMSAIDHALEEIIPEDLLLEPPETESVVVCTEVLDDIPLARQGYSALVCMIEGASASEGAAKDKLAQGDPDTGNPLLAVETEVSLSDALNIASTDTPSSDSVPNVLNSMSAQLKSCGAPVPDPVLSLMRWNPLL

SEQ ID NO: 79718 - protein, 126 aa, Zea mays
  Coding DNA Sequence Number=SeqID_36343
  Homolog annotation: Hit_ID=Q5NKP3; Match level="QueryCoverage=97%, HitCoverage=48%, E-value=3e-25, Identity=53%"; Hit description =Putative uncharacterized protein 9C20.7
EALVLASLIDDKNKFGDCQFDLRKQSYVVACAVVDDKLRRSRRLDVVQSGCTALSIIKQGTSRSSPTSANPRLFWAPHPTMMPSRCLAHRPPEAQPTTGVAERSLVGFGGLDDNPIIGLIGVLSVE

SEQ ID NO: 79719 - protein, 240 aa, Zea mays
  Coding DNA Sequence Number=SeqID_36344
MATPRCRSRRTERAGRGENVEGREERLTCDNRGDELPAPHDLDLGKDDRLCDGGVGLYKKSERGRRLPNSSSNVSQPSERGGCEYDEGKREEKRRAEGVTPEFGGYLKRNFIPPNSGCYRSNPLNRNLAPEIQEEASKEAGCSKPTDAILEDLLDMWVRTRTRFRCVTSIYWLMLITLSSLGLTTNPLNRSVDTHLMKVLPTLILTDLKELEVAKWTGARGKNSEKRGNYAKAIERQRER

SEQ ID NO: 79720 - protein, 150 aa, Zea mays
  Coding DNA Sequence Number=SeqID_36345
MATPRCRSRRTERAGRGENVEGREKERLTCDNRGDELSAPHDLDLGKDDRLCDGGVGLYKKSERGRRLPNSSSNVSQPSERGGCEYDEGKREEKRRAEGVTPEFGGYLKRNFIPPNSGCYRNTAKTYVNTTDRPKEKRAPSRTKRGPSGL

SEQ ID NO: 79721 - protein, 71 aa, Zea mays
  Coding DNA Sequence Number=SeqID_36346
  Gene Ontology: Mol. function=hydrolase activity, acting on acid anhydrides, catalyzing transmembrane movement of substances; Cellular component=integral to membrane; Biological process =metabolic process
  Homolog annotation: Hit_ID=Q8RW30; Match level="QueryCoverage=78%, HitCoverage=5%, E-value=8e-16, Identity=69%"; Hit description=Plasma membrane H+-ATPase
MDMFKLAIRYALSGKAWGTLLEHKIAFTAKKDCMREEQEAQWAMVQRSLHGLQMLEETGDSRRPPRAHQLP

SEQ ID NO: 79722 - protein, 204 aa, Zea mays
  Coding DNA Sequence Number=SeqID_36347
MYHHHAAANNHVPPKPPARQGLRFARQLGRLLQNLDHKLNKGGVGWGLRHVRSARWRKSARLPCWHFDEADDSIVWGPRHVRSTGWRKSAATSYLTSVVGAWRRCMGALGAKGSHLANKKTKYWGSTKEQRDNRRHLWSGAPDCPVCHRTVSGAPPDMSGAPEDSNSNSSPSGNSRGDSAIIHRTVRCSKEERSQELASFGNSL

SEQ ID NO: 79723 - protein, 188 aa, Zea mays
  Coding DNA Sequence Number=SeqID_36348
  Subcellular localization annotation: CTP_CleavageSite=48; ConfidenceScore=5.50e-01
MVLSALSLALPARTESPATAHRQPLPVLRSPSRSRPVLCLGEIRLAVSCSRHPSVCLPPLWFARSALTGAVLAQSELRHHRPVASLCHRHYPVTPVLPLEVSNLPAPLIRSLLPAHDCSPELPRAAVSLPRRVQHPLVLPHRHDAHGRVRQTALNAPELVPKPLEPRRGQSTRLRRALTAGPSDAEST

SEQ ID NO: 79724 - protein, 53 aa, Zea mays; identical to SEQ ID NO: 69746
  Coding DNA Sequence Number=SeqID_36349

SEQ ID NO: 79725 - protein, 180 aa, Zea mays
  Coding DNA Sequence Number=SeqID_36350
MELQQGSAMGVGRALLGGSAGGFSGRPGWEQGGARRRLEMVDWWPALEEEGVGSLELRLGIGHGGVSAHAQENRGEERDELDKQPMGEKGAGRWGCCSPPARGRRKGLAPMELRNRGAMEGAYAGASGPERPLATSREEQRAAGDTPAPWTPGRSFSAEEEGAGAPACCSPGTEKEEGCA

SEQ ID NO: 79726 - protein, 337 aa, Zea mays
  Coding DNA Sequence Number=SeqID_36351
MTLEPHPLQPGWHSLDSESFGYRAEDTIEAIALHGLTTFCGFHPLELSTHPTGLFPAEKEDDPMWKDRVEHAKDIWALYPGQTAHLTVRCMNALYRLQAVQGEAMPQLMALVEATKITLDNREELVVDLSTEMVEKDLQVEQMANQIQELEELVGTRENTIELLEDQLINNQQQLEEPNQHLDMHHQEIQDMEANEDVDIEGGVEPEPASSLDTAGSGRPPSPESSVASVVESKFPLLNGVCSDVAKYAAYHADTDEKKRDRFRRGLSTKLCDRLNTVRANSYNGLVNMAISQEDCITARQAEKKRKTPVAGPSAQPQRFRIVSDTQNRGPQHQQGR

SEQ ID NO: 79727 - protein, 48 aa, Zea mays
  Coding DNA Sequence Number=SeqID_36352
MALCGIWRGFDLFGSLEDMVAGVTWPSILPPGWTIEWDPASAEEEHEE

SEQ ID NO: 79728 - protein, 107 aa, Zea mays
  Coding DNA Sequence Number=SeqID_36353
MGKPGPSLLMLLLSRGGVPLDSPTRWQDGRPSHSSNHVLQRTLQWIKQSHLLREADDWNRVLSLQVTALVPTITGMGDHVSGRVRRAICGQVHSGFNNIMLKEEKLS

SEQ ID NO: 79729 - protein, 167 aa, Zea mays
  Coding DNA Sequence Number=SeqID_36354
MGRLEPRAEWESRLAGKVCNLCTVLETGISVVLTMARIRCTARKSVIPFLPSHLAERPLRRMVPGQSSHLERLYRRLHEEQEHRRQEQEQEQQDSSPSPQREVESERLPSPAPQPEMPPAPPQGIPPTGGDPDEDGDRDDDDAGGSSSHDTEHSEEPDGWIARPHNS

SEQ ID NO: 79730 - protein, 197 aa, Zea mays
  Coding DNA Sequence Number=SeqID_36355
MSLCRSSLEGSFGIISVLIFRRIKFEIRFEIENREYKKEIKEKEARWAVTATFWPIFLRRPTQPTSTRRSVVTLAQQAYLSATREHAPAQVFSASWALRLNTAITRARGHGLVHRVAATWGPPHMVFLFPNNLPPSLLRGRLNQSPPIAEFRTAGTWSPDLKGVFGLRNHRIQIEVVHHGFIPQIWWDDLIPHISTN

SEQ ID NO: 79731 - protein, 46 aa, Zea mays
  Coding DNA Sequence Number=SeqID_36356
MAGGNELAGAKERWLVGEGFELGIKVNIPDLGSRSEFQNYEIQNSQ

SEQ ID NO: 79732 - protein, 68 aa, Zea mays
  Coding DNA Sequence Number=SeqID_36357
MRLHILRGMKAEVILAFADICTHEEYMKCDITMLLLWFLPARDVSSHSCITQCRMTKLKSNDLKLDRR

SEQ ID NO: 79733 - protein, 82 aa, Zea mays
  Coding DNA Sequence Number=SeqID_36358
MDIADSDTLTDKVEVDLHMLHVLVLRGDWWKDESGSCEGTKWSDTLTDMDIADNDTLTDKVELSKQSELGRLGHASLVGFQL

SEQ ID NO: 79734 - protein, 331 aa, Zea mays
  Coding DNA Sequence Number=SeqID_36359
MAERYRLPRSCVPPTTRRKNCGHTPSGGSEGGKTRCISEREDMVAFQGGHPPFKGDSPYLRPQPSWAESSPTRSKVLPLRRGGWVPHVMQAGPEQKKPNHRARCMQTPSGYKQFSTFAQTSGRKGGQPCRRHATTPSGHTSPTSNAPSMEAHAHASCNRRAGRYVQATAPPLAPLPRLLDCGTSTTTRGDPAYDPAVPARRDGQCGQKWASSDGGGRRAGAVVTSSAKLTSHPGAGPGKGDTPKRTLLREGNRLRASLLIRGSKASPSEGFNSRLRARGLHTHYWSEVRRLTPQKGSTAASGHSGSAPTTDQGFVGWPSKGSQPPQTQSEG

SEQ ID NO: 79735 - protein, 358 aa, Zea mays
  Coding DNA Sequence Number=SeqID_36360
  Subcellular localization annotation: CTP_CleavageSite=64; ConfidenceScore=5.40e-01
MSSRSLMHRVFPPSEPPDGVCPQFFRLVVGGTQLRGSRYLSAIVRLQGFSSVSPAASPRRWSPEAVTTSPWVGRSKPGCDLGPTLSFKDFHHPRWGGGRAEPELYPPRGFVGQPLLQRSRERALTGPARGADFDNAGLVDGERRQPQRVGPAVLAPGAPSCREGGCRAVRTGGPPKMSRAARAAFMFWAVLPLHRYGASTRRRGQGCSSVRLEAITAAVRPSGAGESLGSVGLAVRGFSCLVKGTPRSLFDEPKPGVAVSAQTEAELARKEDLVGRSLAGSSLSGTDAGVDLPRPRAGLMSSGDSWPRPRGDQPSRLLEPDSWRRLRRRWPGRADEVVLQSGDPRIVSPSEARSDLAE

SEQ ID NO: 79736 - protein, 754 aa, Zea mays
  Coding DNA Sequence Number=SeqID_36361
  Gene Ontology: Mol. function=iron ion binding; Cellular component =integral to membrane; Biological process=transport
  Homolog annotation: Hit_ID=A2X7J5; Match level="QueryCoverage=96%, HitCoverage=95%, E-value=0.0, Identity=79%"; Hit description =Putative uncharacterized protein
  Pfam annotation: Domain name=OPT; Domain location=72-726; Score =581.6; E_value=7.8e-172; Accession=PF03169.6; Description=OPT oligopeptide transporter protein
MAPHTTGVGGGSGAEEEVSEAAAASPALRHRHAGKGEAEAEGLDGNGDAGADGQASLERVFADKAVPSWREQLTLRAFVVSALLAVMFNVIVMKLNLTTGIVPSLNVSAGLLGFFFVRMWTAAVERMGFLCHPFTRQENTIIQTCVVSAYGIAFSGRTANVQQRFQEMGDYLCFQVVIVRSDHLRHETSGFGSYLFGMSDKIAKQATEAKDANNIKDPHLGWMIGFLFLVSFIGLFALVPLRKIMIVDYKLTYPSGTATAYLINGFHTPEGAKLAKKQVKTLGKYFMFSFFWGFFQWFYTAGDECGFKNFPTLGLEAYNNRFFFDFSPTYVGVGMICPYIVNVSVLLGGILSWGVMWPLIAKKKGSWYLASVDDSSLHGLQAYMVFISIALILGDGLYNFIKVLIRTIAGFISMVQQNSKGMLPVSDNGSSMSATEALSFDDERRTEIFLRDQVPKSVAYGGYVVVAAISIGTLPQIFPQLKWYYILVAYVVAPVLAFCNAYGSGLTDWSLASTYGKLAIFVFGAWAGLSHGGVLVGLAACGVMMSIVSTASDLMQDFKTGYLTLASPRSMFVSQVIGTGMGCVIGPCVFWLFYKAFGDIGESGTEYPAPYAIVYRNMAILGVDGFGSLPENCLTLCYIFFAAAIAINLARDLTPHRVSRFIPLPMAMAIPFYIGSYFAIDMFLGSMILFVWERLNKAKADAFGPAVASGLICGDGIWTLPQSILALAKVQPPICMKFLSRSTNAKVDSFLGLS

SEQ ID NO: 79737 - protein, 80 aa, Zea mays
  Coding DNA Sequence Number=SeqID_36362
MERVDGGFPGLPLLGEAQMTFPRSGTPGWRRDGTRQWRGGEFAEANHRGNGVLRRRYSFPSRFSGRARAYETQRIKLNIR

SEQ ID NO: 79738 - protein, 72 aa, Zea mays
  Coding DNA Sequence Number=SeqID_36363
  Subcellular localization annotation: CTP_CleavageSite=40; ConfidenceScore=5.05e-01
MVWRTGLSAPDCPVCQRSNSYTAPTVVCNRTEKRYSARLRAQKSEQRQKAHRTVNSDYPVAQLSEAPTIGNQ

SEQ ID NO: 79739 - protein, 79 aa, Zea mays
  Coding DNA Sequence Number=SeqID_36364
MDLNMNGLLVDGNYISNLVLSVFHDPSVMDQEHGLHIKDVIDRLKLPDDVVSIVLVKGTEPLTGGTSATQFVALGRLLR

SEQ ID NO: 79740 - protein, 273 aa, Zea mays
  Coding DNA Sequence Number=SeqID_36365
  Homolog annotation: Hit_ID=Q8SA97; Match level="QueryCoverage=26%, HitCoverage=13%, E-value=3e-07, Identity=52%"; Hit description =Ornithine carbamoyltransferase
MEDMGGASVVHGKNDWAGWSCARGSSTMEFLRVGLLRGVDSGEGMCFLLWQWQDFCFHNRGIDRPDGSARDGTQGGETPEVGRGGDSSEVKAESDPWGRARRRPSSGVEAESEPWGRARRRPSSEVEVESEPRGRARRRPSFVVEVESEPGGRARRRPSSGVEVVSDPWGRARQRPSSGVEVVSEPWGRARQSPSSESRLCPSPGVGRGGVRLPSRGCVRALGSSEAESVFRVEVVSEPWGRARRSPSSEAETGGRAPGVGRGRASYGARGWT

SEQ ID NO: 79741 - protein, 147 aa, Zea mays
  Coding DNA Sequence Number=SeqID_36366
  Gene Ontology: Mol. function=receptor activity; Cellular component =endoplasmic reticulum; Biological process=intracellular protein transport
  Homolog annotation: Hit_ID=A2X0E4; Match level="QueryCoverage=100%, HitCoverage=56%, E-value=8e-63, Identity=74%"; Hit description =Putative uncharacterized protein
  Pfam annotation: Domain name=V-SNARE; Domain location=5-125; Score =89.7; E_value=9e-24; Accession=PF05008.6; Description=Vesicle transport v-SNARE protein
MEFEIQSLLGKLQDVNDAMSRCAASSATTTSVSQKLARHRDILHEFTQASGGMSPRVHLLRERASIHGSINQIDEVIGQAQSTRVALNNQRAMFGDIQGKVKQLGEKFPVIRGLLGAIKRKKSKDTIILSAVIAACTIFLIIYWLSK

SEQ ID NO: 79742 - protein, 905 aa, Zea mays
  Coding DNA Sequence Number=SeqID_36367
  Gene Ontology: Mol. function=cysteine-type peptidase activity; Biological process=proteolysis
  Homolog annotation: Hit_ID=Q8S456; Match level="QueryCoverage=73%, HitCoverage=97%, E-value=1e-113, Identity=35%"; Hit description =Putative uncharacterized protein 163K15.6
IARAILVHPPPPARFAVLHRRTPSTLIAAAVDSIVEPLPLSILRAPRHIGSHPRSLCRPDSKAAVSIMRKVDRPPTNPKRLIIESSQECFSVDIPRSTDMADPTNTPSDGDPLQHRKTGVAAAAKNIAMPNVDDDDDFEPPKKKCNISMDAPIRRRCNPGDVLASIQILNERQRQAIVRKGFSSILDMTIDAIGCRTLLCWLMQKLDPRYMTLRIGPDKELKITKQTVHQILGLPNLGGGKPLNINEANAAVTLRVSLNISKDEFVISKLQDRLRLGQDDDLSIRCFFLILFNRLLFPTASWSISFNEVVLTEEMERFPQIDWCHLIFSDLCEAAQRWHNKSINNVSATIYGCSIIVLFPMRPETFDEDPNQHDRLPNIIIQLPLMQDLMANKIQMLPVHQRQKFQAMLIDYDLEVGKIFASIKQCLNTIGTKQSNLAATFGELIDEVLRADESVTPNTQGQTVVGGTVDNDSGPVFDNTPIGSVSAPGLFLSELECARALRAYLCSRFIELDRNIIDFGEHRANCCDIQQSFGDGACLDNVFMQCFIECVRDDWSKHIPPLNAHQLILDVNVGIMVPMLRSGHWTLYVVNLQIGRIYVLDSNPYGPEMGGTILKNYHCIPMDLGDRKVSWARLMMSRLNLAIQNARPRSALPAFLKYPIELMNNCPTMKLGSNDCGFFVMRYMQNYDYMVGAMNAVIDPDNSEDIRSLVLHYLIFHRLDRNSSVAPTPMSSYASANPSSRLHYGSTSLKADDMTASSSGRSQTASRASVPSLLRRRLEAEVFCVGQIWARSGRDGPAHDLATVVDDTPAGNGFSPNRLRVMLLGVDKRRLGQDSAAMEEEDSGGGDYDTVLKAHARSGGGDYGTVLKAHARSGASDGGCVCFIPSTLVSILHSSRCCPSFWIIG

SEQ ID NO: 79743 - protein, 238 aa, Zea mays
  Coding DNA Sequence Number=SeqID_36368
  Homolog annotation: Hit_ID=A2X0E2; Match level="QueryCoverage=66%, HitCoverage=95%, E-value=6e-34, Identity=50%"; Hit description =Putative uncharacterized protein
  Subcellular localization annotation: CTP_CleavageSite=55; ConfidenceScore=5.26e-01
MSLAGSPERQAGNLPWNDTCSFRSRATLASLPGQASNWRGAETTLFAFSGVPGLRGATTKQVYERHFANKETKEFKDFHIAYVEFCKYFNTVMPGQDFDTPSTTVIQKFFEDEWKPEKNEEERKRKFLEFMRKKVREAKVDDSFFIAAGLAVPVAAVIGKRASGQIPYVKSVRLDLVPNVVFVPFVTLLGIMGATAWQMGNKSAVAQEDEDANEEEKKKETMKRAAGQQQQEEQNRSP

SEQ ID NO: 79744 - protein, 736 aa, Zea mays
  Coding DNA Sequence Number=SeqID_36369
  Gene Ontology: Mol. function=protein serine/threonine kinase activity; Cellular component=plasma membrane; Biological process =protein amino acid phosphorylation
  Homolog annotation: Hit_ID=Q6Z2M7; Match level="QueryCoverage=54%, HitCoverage=95%, E-value=1e-147, Identity=67%"; Hit description =Pentatricopeptide (PPR) repeat-containing protein-like
  Pfam annotation: Domain name=PPR; Domain location=415-449; Score=2.3; E_value=4.2; Accession=PF01535.11; Description=PPR repeat
  Pfam annotation: Domain name=PPR; Domain location=518-552; Score=2.3; E_value=4.2; Accession=PF01535.11; Description=PPR repeat
  Pfam annotation: Domain name=PPR; Domain location=554-588; Score =38.2; E_value=3e-08; Accession=PF01535.11; Description=PPR repeat
  Pfam annotation: Domain name=PPR; Domain location=589-623; Score=0.9; E_value=6; Accession=PF01535.11; Description=PPR repeat
  Pfam annotation: Domain name=PPR; Domain location=693-727; Score=5.4; E_value=1.8; Accession=PF01535.11; Description=PPR repeat
  Pfam annotation: Domain name=Pkinase; Domain location=1-216; Score =131.2; E_value=2.9e-36; Accession=PF00069.16; Description=Protein kinase domain
  Pfam annotation: Domain name=Pkinase_Tyr; Domain location=1-196; Score=-88.0; E_value=5.1e-07; Accession=PF07714.8; Description =Protein tyrosine kinase
  Pfam annotation: Domain name=efhand; Domain location=191-219; Score =29.9; E_value=9.1e-06; Accession=PF00036.23; Description=EF hand
  Pfam annotation: Domain name=efhand; Domain location=228-256; Score =21.8; E_value=0.0025; Accession=PF00036.23; Description=EF hand
  Pfam annotation: Domain name=efhand; Domain location=270-298; Score =28.3; E_value=2.9e-05; Accession=PF00036.23; Description=EF hand
  Pfam annotation: Domain name=efhand; Domain location=300-328; Score =26.0; E_value=0.00014; Accession=PF00036.23; Description=EF hand
  Pfam module annotation: Pfam domain module=PPR::PPR::PPR::PPR::PPR::Pk inase::Pkinase_Tyr::efhand::efhand::efhand::efhand; Domain location =415-449::518-552::554-588::589-623::693-727::1-216::1-196::191 -219::228-256::270-298::300-328
MTRPVAVEDVKREVKILKALKGHQNIVHFYNAFEDDSYVYIVMELCEGGELLDRILAKKNSRYSEKDAAVVVRQMLKVAAECHLRGLVHRDMKPENFLFKSNKEDSPLKATDFGLSDFIKPGKKFHDIVGSAYYVAPEVLKRRSGPESDVWSIGVITYILLCGRRPFWDKTEDGIFKEALASTLNEEELSDLKDQFDAIDIDKSGSISIEEMRHALAKDLPWRLKGPRVLEIIQAIDSNTDGLVDFKEFVAATLHIHQMAELDSERWGIRCQAAFSKFDLDGDGYITPEELRMHTGLKGSIEPLLEEADIDKDGKISLSEFRKLLRTASMSNVMASSAGCRLPPRISFNSLLAAAASSADTRTRALALPALALAHASGRVSLDSYALCSALRSAPSAAGTLHALAAKSGWLGSVFVSCALAASYGGSGRCLDARSLFDESPARNGVFGNAVLAAYVGAAEWAPVLRFARRFSELRLQVDWYTMTAVARACGEVANADLGVQAHGHAVRRLGGVEVDVFLVSAFVDMYAKCGLISQAERVFRLAQQETGGRGDVVLWTAMLNAYARHGQCKEVIRQYDLMLASGVYPDELAMLAVLSACQHAGEVVKGLNYFESMHADYGLVPTPEHYGCVVNMLCRAGEVTKAWEIATKDGCDHAIGVSTWGALLSACQVRLNVEVGRMAAQKAIELDPTNVGIYIELSNLYARACLWDDIDQLREVMKERGLEKDVGCTWVELGS

SEQ ID NO: 79745 - protein, 196 aa, Zea mays
  Coding DNA Sequence Number=SeqID_36370
  Subcellular localization annotation: CTP_CleavageSite=36; ConfidenceScore=5.01e-01
MEEHGGARPFTAVRPPEIPNPARPGPRRAAAAPMPSAVATRTNAPRPIPSYSKRARDSSETWEGELTEDGGGHRADHDGLRVCGGVESTATNSGAAGGLSSEIRLRPPSTRPKGAPGFLTPSTVVGTPGFACGGVTDHWVQAVSATEELRARSLADGWALVVGVVMPGGRADGKFPLEGKSQSTEFVKLEYGSGWS

SEQ ID NO: 79746 - protein, 147 aa, Zea mays
  Coding DNA Sequence Number=SeqID_36371
MERVEGGYPSGGEEEGGGGGQRGGKESHNLDNFFVSTIKSLLQVQLVSDANAIRNISNVIFQTHPFRLRGAIQCGFSDPFGRATHTVIRSTVAAIASQGFMDTSSTNQIAPVVCGSTKQSVKLIKKGWWFSSTALRTRILRLNIVQI

SEQ ID NO: 79747 - protein, 225 aa, Zea mays
  Coding DNA Sequence Number=SeqID_36372
MSTSPSDSSASFVSHSSSREPTLEWDPTAAYEKQAPLHWDADGWDFAVASESDGDLTDGDDLQFLVDGELDSDTSTEWSWAYDGESSDVESLYNDDDPMSGHWMCMVSSDDEDDENDDDDSSDEDSDSSGDNDGDDDGGASQCDEMPPSKRRRLQHDSLFCSCISLPNLAHSFTDSCSPDKPACDKRTTPVQYNLRKKRAKTTSTKLLNAPLYSLTYNKLLSLFL

SEQ ID NO: 79748 - protein, 370 aa, Zea mays
  Coding DNA Sequence Number=SeqID_36373
  Homolog annotation: Hit_ID=Q8W1D1; Match level="QueryCoverage=30%, HitCoverage=8%, E-value=5e-08, Identity=25%"; Hit description=Gag-pol
  Pfam annotation: Domain name=RVP_2; Domain location=115-221; Score= -35.0; E_value=0.00056; Accession=PF08284.2; Description=Retroviral aspartyl protease
  Pfam annotation: Domain name=zf-CCHC; Domain location=298-315; Score =23.6; E_value=0.00041; Accession=PF00098.14; Description=Zinc knuckle
  Pfam annotation: Domain name=zf-CCHC; Domain location=80-97; Score =22.6; E_value=0.00058; Accession=PF00098.14; Description=Zinc knuckle
  Pfam module annotation: Pfam domain module=RVP_2::zf-CCHC::zf-CCHC; Domain location=115-221::298-315::80-97
MSPPEQLIVKSLIPNALSVDELQSIPKRKRHKDAQSQEETQECYIDGWTITCTQFKPHGRIRSKKQKGKHGKGQEITSRKACYQCGHEGHYFRNCPEKSSPQITSKMKLSQSSDMEYEQKCTEISTNNVKTTPPLIFATLVIHTTIATVLYDPRTTHSFISAQFATKYGIFKCPLRSRKIISALERKMLVNYICPKMMYPNGNEVNDANDNTPTLTTMNEKNESQKYSMNGMKNNKRNRKMFGYMISPPQPQAKATKHMDTQTEESSQAQLYEIQTPSQLSPPVGQAKLTRKELKARGACYYCKNEGHIIHECPKKHLDRLEKKAAKHDLSNNSEDQPFYKYDDEGRLISIHCGAKKTGSSLILKEFNEN

SEQ ID NO: 79749 - protein, 313 aa, Zea mays
  Coding DNA Sequence Number=SeqID_36374
  Subcellular localization annotation: CTP_CleavageSite=80; ConfidenceScore=5.25e-01
MQPGCTPSPAVTQDSDLQFDGGGKQAGLRPLPLPQLQGFSSSVLGRGLPRAWLSGPSGFGATPGAAFRHGSWKSIRPEVIAAAVQPSGAEVVVVAAAGAGDGEPFVGLVLLRRPPNRESLGSVGLAVRGFSHLVKGTPQPLFDEPKPGVAVSARTEAELARKEDLVGQSLAGSSTGGTDAGIELPRPRAGLMSSGDSWPRPRGDRPSRLLEPDSWRRPWWRWPGRGDDVVLQSGDPPTVSPYEARSDLAEGVFDAEGAAAPFNCQDPSLQDQIILYREGPKNRFGRGAFEREDLFGPRNHLSERELLIAKGDE

SEQ ID NO: 79750 - protein, 270 aa, Zea mays
  Coding DNA Sequence Number=SeqID_36375
  Gene Ontology: Mol. function=kinase activity; Cellular component =ornithine carbamoyltransferase complex; Biological process=amino acid metabolic process
  Homolog annotation: Hit_ID=Q6QP54; Match level="QueryCoverage=29%, HitCoverage=34%, E-value=3e-20, Identity=59%"; Hit description =Putative kinase
MAPPVDVAGLRPRLGDVEAPPKPRSSLSSVAEVEFEPLGRARRRPSAEARAESEPEIGRSGVRRLLGLSPSPNPGSGRAEVRRLLGHSPSPSPGSGGAEFVVFRDLARVRALGRAKQSSSSSGTSPSPSPGSGEAEFVVSWDLARVRALGRAKRSFLWCLRPGLTACQSHSVKWHRSRSGAGGAVLLSGRSVERRSDGGHFGSAGWGARVRIKLYADGGYQLRIRSLEDNEQLVVPECVAKDPSEQQPGGLRLFPEYLSVRTCLGSDNPG

SEQ ID NO: 79751 - protein, 498 aa, Zea mays
  Coding DNA Sequence Number=SeqID_36376
MEAQAHASCNRRAECFVHATAPPLAPPPRLLDCGTNAATRGDPAHDPTAPAWHDGQCGQNVGWHGGTGGASGRRSGRRFAFAIMTASENGPGKGDTPKRIIPREGTRLRASLLIRGSKAGPSEGFDSRLRSRGLYTHYWSEVRRPAPRKGSTTASGYSGSAPPTDQGFEGWPQKGSQPPQTQDDHGYVRYITKARVALPRARTRAKSRKTTNSALPDPGLGLGLSPRRRRTPLRPTPGLGLRPGLSRWPPPRPTQGLGLDLGHGRQTRPRLRRSFHIAQPRAQTSHVNMRRHHHPYPELTRAAGNKTGVPSGSLRQIGNDGAPAYSVTTAALSPLTEARGRQQGLNRSDSCPSARLHRSSDGHDITPAGRQNLSGCHNGISSPYAYKRKDQGPLREGGPRGDEDETGARLKPLAPSPAWTLVTPYSKRTRPGRTTNTKAAGFPPLSCRSLAASLPPFALGLALDPSGLGHAATFTRRLRDPPGSLADSVVALTPAREH

SEQ ID NO: 79752 - protein, 62 aa, Zea mays
  Coding DNA Sequence Number=SeqID_36377
MAQEIIRKSEKAALSPPSEPAEPSAVPHAKGDDEIRKMAEAIMDKVVDQLLNEAAEVVLRED

SEQ ID NO: 79753 - protein, 153 aa, Zea mays
  Coding DNA Sequence Number=SeqID_36378
  Subcellular localization annotation: CTP_CleavageSite=30; ConfidenceScore=5.08e-01
MASLGQTAAPSMPMTVRPPGPQTPPPIIPREAKVNANVQRGGSYQREPEIIPDCALNSMGQQGPVRLDRELGGDPDRAAHVLVTVCADSVEYGRGDMHGGKSQQTQLKKRHGRGPREALVVGRSEFAAPRDLLVMARLCGFGLRGGVGPVLET

SEQ ID NO: 79754 - protein, 835 aa, Zea mays
  Coding DNA Sequence Number=SeqID_36379
  Gene Ontology: Mol. function=nucleoside diphosphate kinase activity; Cellular component=proton-transporting two-sector ATPase complex; Biological process=multicellular organismal development
  Homolog annotation: Hit_ID=Q2QXC0; Match level="QueryCoverage=34%, HitCoverage=41%, E-value=1e-25, Identity=28%"; Hit description =Expressed protein
  Pfam annotation: Domain name=DUF1618; Domain location=214-348; Score =27.2; E_value=1.1e-07; Accession=PF07762.5; Description=Protein of unknown function (DUF1618)
MSSSSSFKAGESSRAREELNRKYEVKFQPGPWAALSSIAVVLDDSAGNEERAKLLAPGASDFLLDLRPPLDGASYLVLPKRLVQDSKWFSFPCVISACSDRLLFLVSRGDQDRNYAYFLGDAHAGTAALLPDVPAHLGVETNFPRRSIGLIADPRHGGHYMVAHLYPTSTTRHQTLLCYSTVTDQWTARPLVSAPDHPPWGAHGVLAHGGLLWWIDVAYGMLVCNPFAADDGLRLRFIPLPLGCQMKALTGRARLFLEDMMDRRRIIRLSQGKLRYVAIQVQRIPKDQATVCMFTLVLRQGGQHSWEHEYTVTFADIWSHRSYADARLPSGVVPSLAFVDPNNPNILYFFLDKTLFALDAQARQVLHHMEYSLDPDYYGQLRVRYSCFVDAWVLPPTLLRKGDSRWTYDDDEGTDGSDFDQTTSLLSLMEIKSQLDDEGTDGSDFDQTTSLLSLMEIKSQLDDEGTDGSDFDQTTSLLSQMEIKSQSDREQTTAADVAAADSDVAAADSDEQANREQTKAADVPAADSGEQANREQMTAADVPTADSDEQDDQAADCDEQANREQTTAADSGEQDVPAADSGEQDIPAADSGDQDVPAADSGEQANREQTTAAVVPAADSGEQDVPAADSGEQDLPAADSGEQDIPAADSGEQDVPAPDSGEQAKREQTTAADVPDVDSGEHDVPAADSGEQANMEQTTAADVPAADSGEQDIPGFPAAVSGEQANREQTTAADIPAADSGEQDILAADSGEQANREQTTTVDVPPADSGEQDVLAAYSDEQDIRAADFGEQANREQTMAVDVPAADSGEQANREQTTAADVLAADSDEEADVEP

SEQ ID NO: 79755 - protein, 110 aa, Zea mays
  Coding DNA Sequence Number=SeqID_36380
MDRTISATPAVEPYTVVTARTSQSQPRPSPDLSHHRVCHLFYIVLKVKENGKDCNLADGEYVLVPEQGAAHEVAQDPAPEPAPEDLSATALEGKPWFMHNLLFMLFYYTY

SEQ ID NO: 79756 - protein, 117 aa, Zea mays
  Coding DNA Sequence Number=SeqID_36381
MEIVIPVIFVGKPPPDESLDAEAFGVAHPEQDDELLQRLRLSASAVQLAWPSSPSCVEPAAEGFPDFESPDLDHPLEVLDCGCSVPAPGAEAFFGGMTKGMLAEGVEKLKKWKWVHR

SEQ ID NO: 79757 - protein, 111 aa, Zea mays
  Coding DNA Sequence Number=SeqID_36382
MSKTKEGSSSKQGVEKGGLVNLKLFLPGLRTFVEEAVIQTTPATKPKVHSIVLTKEEKIEEEVVEVPVQEEVSEPPLGTPIVESVKVELAVEVVGSPKIDLDSKKAATSRT

SEQ ID NO: 79758 - protein, 108 aa, Zea mays
  Coding DNA Sequence Number=SeqID_36383
MVEVAAEATCGTKDVVAWVLSKVHHLVVGLCHQDAQHLMCHVHSTDGRRPGHPAGGMPVRSGGGQYARDAAYTMPIITRTSPVKLPLHANTTQAADIRAQGECTGDQH

SEQ ID NO: 79759 - protein, 375 aa, Zea mays
  Coding DNA Sequence Number=SeqID_36384
MEVLNLARRSGLCIQGSDTFPWGSGPTVATLEYIISSGHVAAPEPRHVEGSGAVHRATRDNRASTVSSYCKTGLLVSAEVKRRATAGGGVHFMRWFTFLRTWRPTPEEYDSWARAPVSETGPLLSAEVKRRTTVGGGVLLTRWFSFSAHGGRHPKSEEVHYRRRWRAPHVAVCLLRTRRPTPEEYDSWARAPVSETGSPWRASGEVFCGALGRQLGESLFKKGTPPSAVAILITRSALSLLSSPRSSAAVAAMTLLDPPERLQPEVALNLVRNLLGWGTPAFAGRICVGASPHDDLAAGEFVLFVSNFPSGLALPISFFFVLLLEELGLQPQHFTPCFILQAAIITYLRKMRSYKTSYAVEMAAVHFQRGPTDAE

SEQ ID NO: 79760 - protein, 472 aa, Zea mays
  Coding DNA Sequence Number=SeqID_36385
  Gene Ontology: Mol. function=helicase activity; Biological process =protein amino acid phosphorylation
  Homolog annotation: Hit_ID=Q7XD08; Match level="QueryCoverage=80%, HitCoverage=59%, E-value=2e-47, Identity=46%"; Hit description =Putative uncharacterized protein
  Pfam annotation: Domain name=DUF889; Domain location=54-193; Score= -139.4; E_value=0.051; Accession=PF05970.5; Description=Eukaryotic protein of unknown function (DUF889)
  Pfam annotation: Domain name=Rep_fac-A_C; Domain location=241-370; Score=-61.8; E_value=0.023; Accession=PF08646.1; Description =Replication factor-A C terminal domain
  Pfam module annotation: Pfam domain module=DUF889::Rep_fac-A_C; Domain location=54-193::241-370
MLAELIQIATLIIWDEAPMTHRRCFEALDRTMRDILSEQTPSNAILQFGGKIVVLGGDFRQILPVVRKGSRTTSRGGLRILIENEDGSCGMGDVLIPSLQCGNLSVTICVFVSRFWDFSDPQDDARLLQSDMLEQVIDIPPAFPTLTYSLTHIEQIHARIDHKDYYTDGLCLTGSSPCKWYINPSIPEVETLMSSARGDHKPVKWNATVTSSQLISPVAEEQKVSYIKYLHPFENKGKEFLFTVTIRKIDNKWWYNSCRKCACTAVTHGDSYKCTNCDCANIAMPVQRYKILVTAGDETADTYFILFGRMAQRIVKRPCDMLIANTPSGFIPDAITKLLERTFIWNVSFSGHTINSGDVCFQVNATVKELGNQNVDISTSTVGTHQSSLMFSQGASSSMEDTPHKTDTLSSPLTPLTPQGSIATTKYLETVDIGDAERVTTQSSTTRKRRVSIAKVVLPSCAYYHALRLANQ

SEQ ID NO: 79761 - protein, 220 aa, Zea mays
  Coding DNA Sequence Number=SeqID_36386
  Gene Ontology: Mol. function=binding
  Homolog annotation: Hit_ID=Q6Z6H7; Match level="QueryCoverage=46%, HitCoverage=22%, E-value=5e-26, Identity=63%"; Hit description =Armadillo/beta-catenin repeat protein-like
MVRGNILITHHYELIYTHLQSPIAKITGHVFQSNKHSAQRDWPGYCFSQASNNNISRVPDVLVGCSKLSKLDLEGNKLVTLSENMFVSWTMLTELNLDVASTEKFRQSEGPRIVIDLLQGGSENPDLLDAGFSVVAAGSAGNEVVKESFMELKVNELILRVMKDKSKSNVQSLYDAICVLLKLDDNRVVASQVYAVENCEIVVQFKFFRHTFILESYGSK

SEQ ID NO: 79762 - protein, 208 aa, Zea mays
  Coding DNA Sequence Number=SeqID_36387
  Gene Ontology: Mol. function=nutrient reservoir activity; Cellular component=extracellular region; Biological process=auxin mediated signaling pathway
  Homolog annotation: Hit_ID=A2Z479; Match level="QueryCoverage=87%, HitCoverage=86%, E-value=4e-59, Identity=66%"; Hit description =Putative uncharacterized protein
  Pfam annotation: Domain name=Cupin_1; Domain location=52-200; Score =74.3; E_value=4e-19; Accession=PF00190.13; Description=Cupin
  Pfam annotation: Domain name=Cupin_2; Domain location=87-163; Score =58.2; E_value=2.8e-14; Accession=PF07883.2; Description=Cupin domain
  Pfam module annotation: Pfam domain module=Cupin_1::Cupin_2; Domain location=52-200::87-163
MGRLSCTYTTVLVALALSAPLAALAGDPDILTDYIVPADANPGTTNGTFFTFTGFRAAMTMPMPNFMPTKATMAEFPALNGQSVSYVLLMFPAGGSVNPTHTHPRSAELLLLLDGALSVGFVDTAGNLFTQDLAAGDMFVFPKGTVHWQYNQGTQPAKALSAFGSAAPGLVSLPSTLFGASNIDDNVLATSFKTDVATIQKLKAGLHA

SEQ ID NO: 79763 - protein, 176 aa, Zea mays
  Coding DNA Sequence Number=SeqID_36388
MARVLTALLLSAILSLPALSFPSRGAPTHDSLLHLLTEPPPATSLGFFLPSDRPCSSSYLPQLPAERFSPPARPSCFPCSDFYFPPWPSVLFLWSTSCNTRVLGVQSPGVNIITRTAIAAKSSRGPPYTDHSPTALAPFGFYNSLDGASFSGKRRGYGVKEPKTQAATQLDGGLFW

SEQ ID NO: 79764 - protein, 149 aa, Zea mays
  Coding DNA Sequence Number=SeqID_36389
  Gene Ontology: Mol. function=ubiquitin thiolesterase activity; Biological process=ubiquitin-dependent protein catabolic process
  Homolog annotation: Hit_ID=A2YWA2; Match level="QueryCoverage=33%, HitCoverage=5%, E-value=5e-12, Identity=64%"; Hit description =Putative uncharacterized protein
MNKPVVGSETSDANHDLKSSNGKSKHMPSEAVCSCAEIPGGHKSNITVEISQNVQSVDSSKMGSSIKHAKFVEDGSSTEDLNEALPCSQNKWCFICEFEKLIVEGNRCKTALSPTGILSHLNDIGRIFGPEMLQEAGAAHTYTECFAIK

SEQ ID NO: 79765 - protein, 77 aa, Zea mays
  Coding DNA Sequence Number=SeqID_36390
MKAQLAKRGCYRSNPLNRNLAPEIQEEASKKTRCLRPSDTLLENPLELWVRTRTRYRCATLILLVDVDRIIFSGVSG

SEQ ID NO: 79766 - protein, 110 aa, Zea mays
  Coding DNA Sequence Number=SeqID_36391
  Subcellular localization annotation: CTP_CleavageSite=96; ConfidenceScore=5.04e-01
MQVFVHVASLRCRSSLPGRASVHNRLAHLLLRSARACISRPDVRQLYASKPQPTFSPGGAAKLRPAARQRGQPGVQPGSALQPARRPAPTESPLVRSAAASPILTELLLS

SEQ ID NO: 79767 - protein, 113 aa, Zea mays
  Coding DNA Sequence Number=SeqID_36392
MGDEQQTCASWKKIRRGDAGNTPWLNLEHAGEQGFVRAALNPSREAGAGKLRRSWGAWWPWLGAPGELRQVAASSEEQTRGGRGSRAQLDTGLGDEAATLGRRPSQQCIRYRQ

SEQ ID NO: 79768 - protein, 140 aa, Zea mays
  Coding DNA Sequence Number=SeqID_36393
  Subcellular localization annotation: CTP_CleavageSite=35; ConfidenceScore=5.57e-01
MPPPLLPLLLPPLPPLLLSPLSPLPPSLLGTFGIRRSSKTGFNSISGVQCVNRYLRTKVGIAVDRDNTKVDTEPKVRAGKLRRDSKEWNRLKDEKAIQTSIDYYRIIIKLLENKSPTVVVVVSAITTAALLGRVRRVLLV

SEQ ID NO: 79769 - protein, 382 aa, Zea mays
  Coding DNA Sequence Number=SeqID_36394
  Gene Ontology: Mol. function=aspartic-type endopeptidase activity; Biological process=DNA integration
  Homolog annotation: Hit_ID=Q2QSG2; Match level="QueryCoverage=9%, HitCoverage=2%, E-value=7e-09, Identity=78%"; Hit description =Retrotransposon protein, putative, Ty1-copia subclass
MKDLGPLHHFLGITTERRPQGLFLHQRQYALDILERPQFKQQYLEPVERLSRPPSRTSAAERRGPRARPHEQPTVPAPRHRPRLWALAIVRRPLGPRPRAAPARRGYGSPAIVRGPPVRRAPEGPSSGAGEQLRASGLRPPSARARTEPLRRLRASAAHCSGAPPAVRSGLEPRTEPLRDSGAPSAVRPMAREGEQEQLRASTRRPLGPSTRRCPCASVRRSSHCLPVHVPPSVELLCLPVSPSAEQIRARAAYWKQRGIFKVVKEADENTRFHHARASQRLPQNQIRALELDGQAQQQPFVFPQFQPPMPQWGLHAPPPPPPPQGSGVMGHNTPPPITPAPGRAYAGEGATPGENPNPLHDFINEFFASGGSGHNSNDPDM

SEQ ID NO: 79770 - protein, 152 aa, Zea mays
  Coding DNA Sequence Number=SeqID_36395
MHARALRSNRWAERLCMEARPGSELRQRDDAAWPNTSIAGVWLVRMRACYRTGPEGEAASARGQKPKREATRNKNRKKGRKLTGSSSSSRRSWAEEAKNRNRSGREEKNWRGEEAARQVDDKLEYGTRRLKLSRYLHRGRKKRLEEMTWDGR

SEQ ID NO: 79771 - protein, 154 aa, Zea mays
  Coding DNA Sequence Number=SeqID_36396
MNKIKDLSSPGRGSEKRKTRVTVELAGMAKMPKGTPTTRDVRAAEELRHHVKSRVTEATMPDGGGCGGSKSMGGGYTGGGSRGQVNRVEGAKAVTASEHDTSGKVVYGEPPGIELHKAVVVASEPTNREKVMSQIGSNKNVVKVEGSQKNRCTY

SEQ ID NO: 79772 - protein, 48 aa, Zea mays
  Coding DNA Sequence Number=SeqID_36397
MYEERAKGWEGDNKVSIVREAVAYQATDPSPRRSKSNAWERCLVAKLG

SEQ ID NO: 79773 - protein, 192 aa, Zea mays
  Coding DNA Sequence Number=SeqID_36398
MNVNGNLQNGIGIQMGQIKAIEIKETAEKGRNRKSETVEKKRNINHGFVGILCWNSDPVANPPRTELLRRKDPDGHEMEKVRLRNNRHMVTCERQLAVGIDRGNHSSGRTRGLPLGRHLNSTGEQSGSRIAKGQRGSRGRKARTRARKAKAAEGTVHMGFSQVGYRFQKAPSHHPAVISKRWRAMSSPGGYF

SEQ ID NO: 79774 - protein, 106 aa, Zea mays
  Coding DNA Sequence Number=SeqID_36399
MSNKPFSENTGAHSVIFIGISELFGVQAEQPLYGPTDSRIRSALQHADTKASEYRSQRRTVLSHMTTNSPMVKEARALTVGQYGGAPDRHCSLVRLLGVKPIENLT

SEQ ID NO: 79775 - protein, 163 aa, Zea mays
  Coding DNA Sequence Number=SeqID_36400
  Subcellular localization annotation: CTP_CleavageSite=14; ConfidenceScore=5.11e-01
MNRLGPKPAQVGPTAAESRSRPRARWRLCRKALEVLSNRKRVRLLFPGVTDISQKGPLVSVYSVFHVLDGVQARPCSGEQLCRPIDAKTGANLWLRPNPSPHERFPQLNCTIGGLGSSGHGNRADEFKNYAFPVMGGHTVQIDDLISITKLCKCLNKKAGDGG

SEQ ID NO: 79776 - protein, 248 aa, Zea mays
  Coding DNA Sequence Number=SeqID_36401
MTSHGSSDDGNALTHTDGLAREGFPRILWEVLQGAGYTTPPQYAVQQFEKHRVPRCRVRMTLEPHPLQPGWRSLDSESFGYRAEDTIEAIALHGLTTFCGFHPLELATHPIGLFPAEKEDDPMWKDRVEHAKDIWAIYPGQTAHLTVRCMNALYRLQVEQLSTDIQELEELVGTRENTIEVLEDQLINTQQQLAEANEHLDMHHQEIQDQEANEDVDIEGGDEPASSVDTAGSERPPSPESSVASFAH

SEQ ID NO: 79777 - protein, 41 aa, Zea mays
  Coding DNA Sequence Number=SeqID_36402
MEGRQIFVSLLYAQTCGQTSSKDAQARQNPEHDVGNRPQRA

SEQ ID NO: 79778 - protein, 357 aa, Zea mays
  Coding DNA Sequence Number=SeqID_36403
  Subcellular localization annotation: CTP_CleavageSite=35; ConfidenceScore=5.06e-01
MARARAYKTLPDLDCSLPRTLKPHRSLARRRLPVRSESAAAHSLCHRRPASGAIPNSVQPSEKIVHTSVRLPERGIGVYFAGEASPRSPELSTPPEYVDRVNHSTILRFLVHTVAMLPREAHRALGLNQFAVVWPVYSPPTRTPACTRGPDDSGHLRRQAVPRRDRQSLLEPTPPFAGPPSPPALRKGPGPSGRLSWPLRSLSQLSPEDLSLAHGLSSVTPGLVSLVDDLAKLQPPLLHFLSLGNRLLPGRRSLYFEPTPPLSTPTPLPPAPAHRRAAEGPKTEREKPRAARPTEPRDSYASEIRIPHSSPFAQGNSPSVKWNEQPPHLRACGTTNSRWLAGDHCTNSATTTSVSGG

SEQ ID NO: 79779 - protein, 196 aa, Zea mays
  Coding DNA Sequence Number=SeqID_36404
  Gene Ontology: Mol. function=two-component response regulator activity; Biological process=two-component signal transduction system (phosphorelay)
  Homolog annotation: Hit_ID=Q9ZQW0; Match level="QueryCoverage=35%, HitCoverage=44%, E-value=3e-17, Identity=70%"; Hit description =Response regulator
MVLSSLRKQGNVSRAPGRIVSYASTGLKHFSDGHSPGLYLTTGSPDQGPAAVSPRGRRPTVALHQERATTTLRGRRASGDDAIEADGRQQRTLGPTTTAVVPSVSAMATAAAALASVAPSLAPKANDSRKAVVSMDASELEKHVLAVDDKSMDRAAIARILRSSRYRVTVVESATRALELLAMGLLPDVSIIITDY

SEQ ID NO: 79780 - protein, 585 aa, Zea mays
  Coding DNA Sequence Number=SeqID_36405
  Gene Ontology: Mol. function=actin binding; Biological process=actin cytoskeleton organization and biogenesis
  Homolog annotation: Hit_ID=Q7XWS7; Match level="QueryCoverage=98%, HitCoverage=34%, E-value=0.0, Identity=64%"; Hit description=Formin -like protein 12
MDQYRYKNYLDSIILQLREQFADSSLMVLNFRDEGKSLISGIFSKYNITVKDYPCKYLGCPLLPLDIILHFLGLSERWLMLEGQQNILLMHCEKDGWPVLAFMLAGLLLYRKQYNGEQRTLDMVYKQAPKELLQMLTTLNPQPSHLRYLGYICRMDDDIGWPTQPIPFTLDCVILREIPNVDGVGGCRPIVRVYGQDIPTTDRNHGVVSPPSKAKKNIRRYRQADNAPLKLNVGSFVQGDVVLECLHVDDGRGNERLMFRVMFNTFFIQSHILLLNFEDIDVPWDADHQFTKNFKAEVLFSELDAESDASTEVAPDYDYDDDDDMDVASADEFFEAEELFSNADSQEGNKDADTLSIASTDYTSTPSAERWRNSPFSNFEPNIGIDGSRDNKVDNLGLLETVNDGKTCTSTEANTMLNNETAVVKSTLAATIDGDADSGISKSTYKVDDYMFEKGSSKQDTRMGSNQDLGQIDNVLVKEVIILETNSPKDIQMIKEVIISEVTTLKQVVDGSMMETELDETVHDSESIALAETEDTKQLNIFCKQDEGHSVQDEYAAYDNGIVIEQEEKQQRRKPYHQRHKFRSD

SEQ ID NO: 79781 - protein, 364 aa, Zea mays
  Coding DNA Sequence Number=SeqID_36406
MGRRETEHKGGKQGDRRKGETRDLRVCPAPRSGRGRVRAPGRARRRLSSEAKAGSEPWGRARRSSSSSGAEPESEPWGWAKRSSSSSGAEPESEPWGRARRSSSSSGDEPESESWGRARQSSSSSEARARVRALGSGEAEFVVFPGAEPESQALGSGEAEFPMAPEAGLGCCQPHSVEWHSSRSDAGDTVFLSGRIRCQATLALNALAIRSAGVAIWPRLLLGEDWASGEPKLCADGGYQLRLGVLGPALAGGRWGGSDTGQHGARSSLAPPPRSGWLAAGKRAVGWSRASRSKWTRGQAAGDGGDGDGGRKRKGMALFRRLFYRKPPDRLLEIADRVYAFQLTCLPRACCISLLCQHDFAAFI

SEQ ID NO: 79782 - protein, 142 aa, Zea mays
  Coding DNA Sequence Number=SeqID_36407
MGKGHKRKREPTPPSEDFGDSEYSEEEFSSESEGSPAPVSPPASSDDSDDSQGIAAEVWTYIRAVERSGLEGSDESEFSSDEEDSDGGGDEDDDDDDDGDDDDDGDGDGDGSNGGGGSARGGSSTGSTRGGGGKGSSSKASG

SEQ ID NO: 79783 - protein, 112 aa, Zea mays
  Coding DNA Sequence Number=SeqID_36408
MPGVPRDVAKHSLDIRAGARSVRQPLRLGHQGRVGLALAEPDPPSEAKKVEPLCVKIGHTSPRQKFFNQKRGLLRPPGYVLPAMSEAGSRGANAGTCKWQGRLSRGAPVPPG

SEQ ID NO: 79784 - protein, 129 aa, Zea mays
  Coding DNA Sequence Number=SeqID_36409
MNVPDDNTLTDEVKIDLNMLHVLVLDWVDEGVDGIDVVAVDKCAPGERVVKILKEMAKPQHASGTPLVMVRYSALVRSRDSEHNVINIQEEFSNTTLSNTSRCLGKTLVETNQPERDPAGALFTEKNFG

SEQ ID NO: 79785 - protein, 324 aa, Zea mays
  Coding DNA Sequence Number=SeqID_36410
  Homolog annotation: Hit_ID=Q5KMI7; Match level="QueryCoverage=68%, HitCoverage=27%, E-value=5e-09, Identity=22%"; Hit description =Tubulin binding protein, putative
MINVHRKIRYYSQGTHATDVEQAFLFHLEEEEGHQAFQEALEEMEEEVADLHDLQEEEEVLELHLETLLEVEAVEFLLVLQRVVEEEEHLQFLHMEAVVELLCILQEVAVAMELLHILREVAVVVEPLHLLWDVAELMHIPLEVEVAVETLHVLQEEAVVVEPLHLLWDVAELMHIPLEVAVAVETLHVLQEEAVVVEPLHLLWDVAELMHIPLEVAVVVETLHVLQEEAVVVEPLHLLWDVAELMHIPLEVAVVVETLHVLQEEAVVVEPLHLLWDVAELMHIPLEVAVETLHVLQEMVAVVVEPLCILFEVAAGWKPLQIHS

SEQ ID NO: 79786 - protein, 213 aa, Zea mays
  Coding DNA Sequence Number=SeqID_36411
MCKWCSAFGSSRMLPGVSTTLTGFVVPLLPGENREDHPSPPPKAPGADVEDWRRVKSSSSQGDLSGVAVVFDLVIEGEAMEAVVEGDDIEEFFFKKKKGPEKRSRLPYSEKKLHSAVTTEGRGQKPEGSDGGGRARGGLGLWRLRLATWTLDSHRDAWVAPLPLFPAGAGPSVRGHHERSAAAYPGRNTIAAAHGGHARCQVCTAHARQDRSF

SEQ ID NO: 79787 - protein, 186 aa, Zea mays
  Coding DNA Sequence Number=SeqID_36412
  Subcellular localization annotation: CTP_CleavageSite=12; ConfidenceScore=5.46e-01
MSSRSLMHHVFPSSKPPDGRYPTSFRLIVGGTQLRGSWYLSAIVRLQGFSSASPAAPLRQRSPETATTSPWMGRSMPGRDLGPTLSFKDVHHPRWGGGRAEPELYLPRGFVGHPPLRRLRERALAGPAGGSDFDNAGLVDGGRRQPQRVELVGLAPGGPSCRKAAVAPCAREDRPRCRALQGRRSC

SEQ ID NO: 79788 - protein, 308 aa, Zea mays
  Coding DNA Sequence Number=SeqID_36413
  Subcellular localization annotation: CTP_CleavageSite=82; ConfidenceScore=5.52e-01
MQTACNRAKWTRFSDSRHAQHGGPGPRVTQPARQMLHASNCTATCATTTPPRLRNQYRGSRRPSSASLARRRSGRRFAFAIMTASVKAPSLPTDQRFEGWPPEGFDSRLRSRGPYTHYWGSKAGPQRVHSRLRRRARDDHGYVRYITKAQAALPSSPETPCSAPIEGNMALSPSSLQKGDAGAVNIPARELGTRPYTRATASSHEGTTRPAEALRKALRPRRSETTPLRPRGLHPAGALARTHRNKMQPRKAGPLAKKCDESLQASANTPFEARGLLSGTIIRGTLKTPNSQLVTPISIKLQRPDGCD

SEQ ID NO: 79789 - protein, 134 aa, Zea mays
  Coding DNA Sequence Number=SeqID_36414
MGKNNKRKREPTPPSEDFGDSEYSEEEFSSGSEGSPAPIPLRESSDDSDDSQGLAAEVWTYIRVVERSGLEGSDESEYSSDEEDSSEEDGGGDGEDDDDDEGGGGGDGSGRGGSSRGGSNGGKGDDGGSSRSSG

SEQ ID NO: 79790 - protein, 158 aa, Zea mays
  Coding DNA Sequence Number=SeqID_36415
EYGTEQGQLEGTTIVINAWRSAKIVSGEVYLERDLFVEDTIDLRDNKLQHNNNVQRLLKHCALPSNRARSTSSQKMEAQAKAGARGARGGTKVAMVYYSKYVKTQNSPAVSIGIAQQLESTAAAVVGVAGGGGDADVDERASAFILAVRERFRNENKY

SEQ ID NO: 79791 - protein, 71 aa, Zea mays
  Coding DNA Sequence Number=SeqID_36416
MKPKEERNSICLEIAKFFYECGIPFNAANSRNGAVNNGVDEGDVAIVNYGAIDDERVYDGIGDDDGGMEMR

SEQ ID NO: 79792 - protein, 202 aa, Zea mays
  Coding DNA Sequence Number=SeqID_36417
  Subcellular localization annotation: CTP_CleavageSite=69; ConfidenceScore=5.44e-01
MDATPAPCRALSVRMDNQQPRLASFCQALHRALTHSRSLLSSRSHSPSLSVRLPPDVVRHGRRELARVRASTDHRSPQTKSQPLRRQLPRPVALCSSLENALSTTVNVVVPRSPLACVDQISPSMTHRAKTTVEFAFVDHTCPPPRLANFIVDSVGYKKNREEVPVGIVEELPGILVEDGELEAEAQECPDHRPSSFEKGKP

SEQ ID NO: 79793 - protein, 31 aa, Zea mays
  Coding DNA Sequence Number=SeqID_36418
MTHKEIRHSPDLDYRSRDFFYVKGGQWTDRV

SEQ ID NO: 79794 - protein, 426 aa, Zea mays
  Coding DNA Sequence Number=SeqID_36419
  Gene Ontology: Mol. function=protein binding; Biological process =regulation of transcription
  Homolog annotation: Hit_ID=Q53MB0; Match level="QueryCoverage=94%, HitCoverage=54%, E-value=1e-56, Identity=38%"; Hit description=GRAS family transcription factor, putative
MSAAPDEFLAQGTYLAAPEPFSPSIFLDLPPTPRPNGDDPTSDDPASSDDLVLPFISRMLMEEDIDDKFFYQFPDHPALLSAQQPYAQILSDATASSSSDSATAISSGTVGNSTLSSSSLAAASAEPTWPYDPIELSQLLRSPPYPDMGVGLDDFTTEEVNAVFLPGQDAAFQPSPAFFVTGGSGQRLSASLTAQNVGGVGAQQQRVSLVAQDAGDSVAIQRSAFLNGAEETKTEATTLPAGDGDHAALLSAFLGAQNGENMDMLNVAFLKGMEEAKKFLPTNNSLLVDLDDTYGQSLPTDRDTKPCTAFAATQVKEEEVVVDDLRIAMDSESEKSVRRAMATGDRRSATEMLKQIKQHSSLRGDATQRLAYCFAEGLEVRLAGTGSQVYQSLMAKRTSVVEFLKAYKLFLAAISLNKVEKVGLQR

SEQ ID NO: 79795 - protein, 639 aa, Zea mays
  Coding DNA Sequence Number=SeqID_36420
  Gene Ontology: Mol. function=protein binding; Cellular component =nucleus; Biological process=regulation of transcription
  Homolog annotation: Hit_ID=Q53MB0; Match level="QueryCoverage=99%, HitCoverage=93%, E-value=1e-178, Identity=52%"; Hit description=GRAS family transcription factor, putative
  Pfam annotation: Domain name=GRAS; Domain location=270-580; Score =358.8; E_value=8.9e-105; Accession=PF03514.5; Description=GRAS family transcription factor
MAAAPEAEGLFGDPEPFSPSIFLDLPPTPRPDGNDEVPASSDDLVLPFITRILMEEDINDQFFYQFPDHPVLLRAQEPYAQILSEPATARAASGSPATVSPSSDEDPVQPLLSPPYPDTGLRDINDDGVGASPGFEQSDPGKLRTAALGLPTGDGDRAALAPVFFNSGDADAEMLNKAFLKGMEEAKKFLPTTSSSLLIYPPGAEEELGINGRGRKDRDRLGWDDLEAETFRKSKLMVPEPEETDEMVDQMIFNGLEMCLREMKALRISMGSGEAKKNSRKGKQGRRSSADEAVELSTLLVHCAQAVATDNRRSATELLRQIKQQSSPKGDATQRLAHCFAEGLEARLAGSGSQLYRSLMAERIPAMEYLRAYWLYLAACCFKMTAFSFSNKTILKAIAGRRKVHIVDYGIDYGVQWPSLLGRVATMDMEGGPPEVRITGIDLPQPGFRPAARIDETGRRLSDYARQIGVPFKFRGITARWDAVGADDLSIDPDEVLIVNSIVRFGNLMDEGADIDSPSARDVVLGAIREARPDAFILHVMNVSYGAPFFVTRFREALFFYSAMFDMLDATAPRDSRQRFMVERGFFRQCALNVVACEGVDRVERPETYRQWQARNRRAGLRQLPLDPDTVRALREKVN

SEQ ID NO: 79796 - protein, 642 aa, Zea mays
  Coding DNA Sequence Number=SeqID_36421
  Gene Ontology: Mol. function=protein binding; Cellular component =nucleus; Biological process=regulation of transcription
  Homolog annotation: Hit_ID=Q53MB4; Match level="QueryCoverage=92%, HitCoverage=96%, E-value=1e-157, Identity=51%"; Hit description =SCARECROW gene regulator, putative
  Pfam annotation: Domain name=GRAS; Domain location=219-545; Score =347.3; E_value=2.6e-101; Accession=PF03514.5; Description=GRAS family transcription factor
MAAAPLPSQNLELELDLFHLHPDPPSPSVFLDLPPTPPPTYLDDDDMVLPYISRLLMEEEDAHTHSFFYQYPDHPALLNAQQPFADILADIAAAASPSSSSVDTTDGAHGDAPLQAQADHSPNGRDADADMATSAFLKGMQEATRFLPLPTSDATLLHNSRGRKNKHAVARDDEPESGRATKLMLPAHTTDDADARQMFHELMTHERDDICMKGVQLHGTASTQKKATRRRRRRSPAAAADAVDLHALLLRCAQAVATDDRAAAKDLLAQVRRHSSPTGDAAQRLAHCFADGLEARLAGTGSRLYQSLMLRRTSVADFLRAYRLYMTTCCCKRVAFAFANKTIHDAFALAGRRRRLHIVDYGLGYGFQWPGLLRGLAAREGGPPELVRITGIDLPQPGFRPAQQIEDTGRRLSDCARQLGVPFEFRGIAAKREAVSPEDLGIDPAAEVLVVISLCHFRLLTDEIEVEISSSAAAAGPSGRRRPTARDQVLCNIRRMRPDVFIHGVVSGGYGTTYFPTRFREAMFHYSAQFDLLDATVPRDSPERLLLERDIFGRAAMNVIACEGADRVERPETYRQWQARNRRAGLKQLQLQADVVKVVRDKVKDKYHRDFGIDEDQGWLLHTWKGRVLYGLSTWVAQHADP

SEQ ID NO: 79797 - protein, 80 aa, Zea mays
  Coding DNA Sequence Number=SeqID_36422
  Subcellular localization annotation: CTP_CleavageSite=38; ConfidenceScore=5.74e-01
MARTRSSAVVTTGAGTGKEARPSSSASSRAPTTSTSCHAAIRSGAMATTTRGGRLLRFHDDGSRASDQAYERMKEVGVRD

SEQ ID NO: 79798 - protein, 92 aa, Zea mays
  Coding DNA Sequence Number=SeqID_36423
MARVPGPVPWRGRGERHAARFVVPLLSSLHSSVYIALVVAKGNWGVVRFVVVPLMGLSVCGSLCQDDDEDDGYDYAYGNGKEGGVEVDLQEF

SEQ ID NO: 79799 - protein, 138 aa, Zea mays
  Coding DNA Sequence Number=SeqID_36424
  Subcellular localization annotation: CTP_CleavageSite=38; ConfidenceScore=5.11e-01
MQSACNRAKWAHPFGSNAPSMEAQAHTSCNWRVGCYVRATAPPLAPLPRLLDCGTSTATRGNPADRERGYPERDPSPRRKRAPSPPTDQRFEGWPLGGVQQPPQSAQAPRPLLVRGSKAGPSEGFNGRLRPLGLRAHY

SEQ ID NO: 79800 - protein, 35 aa, Zea mays
  Coding DNA Sequence Number=SeqID_36425
MKGIGPLTPCPLPLPEVVIAKKDQKRKRGAMLAFS

SEQ ID NO: 79801 - protein, 184 aa, Zea mays
  Coding DNA Sequence Number=SeqID_36426
  Gene Ontology: Mol. function=ion channel activity; Cellular component= integral to membrane; Biological process=ion transport
  Homolog annotation: Hit_ID=Q4VDM4; Match level="QueryCoverage=35%, HitCoverage=12%, E-value=2e-16, Identity=59%"; Hit description =Cyclic nucleotide-gated ion channel 2
MHPFNESSKQYSNQYAFRPDQWHGVGGNLDGITTFTNIGIDIGQAQLNLNQILCRLAEARKDLTENLKQLQCRTLIFVGENSQFHAEVVHMTAKLDRRYSALVEPCLYMDFGLASAVTTLWTCTDVTHLMHVLLQFRLAWCDKLICYARAVAAHYVCSVKGLCFDLFIIRGGNRAFNACWRCTM

SEQ ID NO: 79802 - protein, 105 aa, Zea mays
  Coding DNA Sequence Number=SeqID_36427
  Subcellular localization annotation: CTP_CleavageSite=85; ConfidenceScore=5.06e-01
MECPGNPHVAHGGRTSTSTPEHAPTGTPLTQLSSPTIPSVDSTPSVQASHVPYNHPAKRKPPPPRRLEEGGQAPPPPGRRRTSPAAATLALPAPALATCPANVGV

SEQ ID NO: 79803 - protein, 51 aa, Zea mays
  Coding DNA Sequence Number=SeqID_36428
  Gene Ontology: Mol. function=isomerase activity; Cellular component =endoplasmic reticulum; Biological process=cell redox homeostasis
  Homolog annotation: Hit_ID=Q5EUD5; Match level="QueryCoverage=100%, HitCoverage=11%, E-value=2e-11, Identity=70%"; Hit description =Protein disulfide isomerase
MVLVEFFASWCRHYKQLAPTQKKVGTDGVLKGVTTVATLDADAHQVLAQEW

SEQ ID NO: 79804 - protein, 425 aa, Zea mays
  Coding DNA Sequence Number=SeqID_36429
  Gene Ontology: Mol. function=protein binding; Cellular component =nucleus; Biological process=cell division
  Homolog annotation: Hit_ID=Q53MB7; Match level="QueryCoverage=72%, HitCoverage=82%, E-value=1e-55, Identity=45%"; Hit description =Putative cyclin-D7-1
  Pfam annotation: Domain name=Cyclin_N; Domain location=71-202; Score =50.0; E_value=8.2e-12; Accession=PF00134.14; Description=Cyclin, N -terminal domain
MDDSSLLYCDEDPLVVSTTPPPQLASNSYTLLAPQQQAASDDAEEEDHHLKELLVDHMAKQRSYAPTCREGYLEHLLPRRTTTQPEETITIPGPGSVSAARSGGVHYIIYAFGRLGLTVATVFNAVNYLDRFLSINCHLRWEAWMVELVSVACLSIACKLDEVNIPSLHHLQMEEVMSHSFLPATVRDMELTLLKALQWRLACVTPYSFLLPLLNTPPHTAAWTSRCTRLLIRSLAEPLFIQFDASVIASSALRCVALQDHRHHHHNTTTTDYGSCIISRLVRPATDTFNALCDGADDDDDDECFMMMKTLCDDDASCSSSADQLRIGGTPIVTSSTCMSSDEQLRRSPSVSVIIRRRSCLGLKTAGGGGSRRINSSRSAVISRRRRRLFGSSASAQAQAPAPQAEGKDSDDDTTNVRDEDISHT

SEQ ID NO: 79805 - protein, 162 aa, Zea mays
  Coding DNA Sequence Number=SeqID_36430
  Gene Ontology: Mol. function=protein binding; Cellular component =cytoplasm; Biological process=regulation of transcription
  Homolog annotation: Hit_ID=A2ZLX0; Match level="QueryCoverage=96%, HitCoverage=22%, E-value=1e-30, Identity=43%"; Hit description =Putative uncharacterized protein
ANPRRHVLQKHRQNEARSVIHDILNGSYSGASLCQGSVRPSNTCCNVRRDGHHYAAGNQNRLLAEKWLAMCVMNIVACEGVDRVSRPHSYKQWQVRSKRAGLRQLPLDPNIVQMSKDKVKEEYHKYIVINEDHEWLLTGWKGRVLSAFSTWTADDVRSGLSE

SEQ ID NO: 79806 - protein, 122 aa, Zea mays
  Coding DNA Sequence Number=SeqID_36431
  Homolog annotation: Hit_ID=Q6K232; Match level="QueryCoverage=56%, HitCoverage=91%, E-value=1e-15, Identity=44%"; Hit description =Putative uncharacterized protein B1178F07.30-1
  Pfam annotation: Domain name=DUF37; Domain location=7-72; Score=3.4; E_value=0.0001; Accession=PF01809.9; Description=Domain of unknown function DUF37
  Subcellular localization annotation: CTP_CleavageSite=36; ConfidenceScore=5.35e-01
MAAAAPHAYSSLVPVSAARPLSGSTGRFRHGDSTVLLKTKAYKRYGVVKGSILTAWRLCRCNPLGGYGYDPPKWFGEEDVLVTVRNNAQLYVVVSRESLPIDYTAKELDWISEISMLKIHKW

SEQ ID NO: 79807 - protein, 74 aa, Zea mays
  Coding DNA Sequence Number=SeqID_36432
MGQREELGRGRMNAGGCSNDGSGRRARRKATSTQKSRSLDRQPINLHHWMEAQQSYDDTPESSGIGSPWKSKSQ

SEQ ID NO: 79808 - protein, 45 aa, Zea mays
  Coding DNA Sequence Number=SeqID_36433
MEPSNLQQTHLTFGKSKICSSSAPNGFKFLQKTLVVMLGDCLLFL

SEQ ID NO: 79809 - protein, 97 aa, Zea mays
  Coding DNA Sequence Number=SeqID_36434
  Homolog annotation: Hit_ID=Q5GAR1; Match level="QueryCoverage=31%, HitCoverage=17%, E-value=3e-10, Identity=100%"; Hit description =Putative uncharacterized protein
MVVARVGAEGLGFLGCSPWTAERMDGAAVRHRSSSESSSSLSSESSSSDDEDRGSRKSRSRSSSKRTKQEKKHRSRSKHRDSESEEGPVRLSKFFGK

SEQ ID NO: 79810 - protein, 46 aa, Zea mays
  Coding DNA Sequence Number=SeqID_36435
MVPPRVRRCAQPEMRGEGVDEQATEDPGVQQVESAERELVEGKLCP

SEQ ID NO: 79811 - protein, 215 aa, Zea mays
  Coding DNA Sequence Number=SeqID_36436
MAMTLTGDMNRWIPRWCTQVVVEKRMDGETILEKLAVYSQNAARSGCTGLSGGAPDSILWCTGQCPVRQAGGCQLAALETSTAVYGYKSPDCPVSQQSARPTIGRVIRARRVVEPTVRRGTGLSGAPTALNLQRSASPKKERNLHRTVSGGAPDCLVRQATEGKNCLPGMLSMAPSCLGAIKGTPRRMEENTKHSLSIPKHQDSNSAHSILCDSN

SEQ ID NO: 79812 - protein, 106 aa, Zea mays
  Coding DNA Sequence Number=SeqID_36437
MGTYSWLSCRCPPRWQSLAFAARSSTSAPPAPAVQAPAPEGDDPDDSGDDDDEDDDDDEGGDEHVNQEANYAQQDYFMWFGPVVEHYTSMFETGHFPNLLQEVLTR

SEQ ID NO: 79813 - protein, 242 aa, Zea mays
  Coding DNA Sequence Number=SeqID_36438
MESSWVIRTSYCSEEEGFPHLLRSCGLRKGIRKKPEYVWKEYRENGIEKCSMAVYLGESRSYPNHPPSNNKNTPTWRKRLQALSGRDPIEDDPTIVYMAGYLHTLDTHYDDLSSHCTHLNSRVESLEQQVKELKKEKASLQECLDKAEGEEANTHESYRTLKMDYDKKLKKLAPTKKIRKKTTSQGCQTERRKKAPPAPAPTRMENLSDIEDISLASLDDLLKEFGDTLEKEFGSTSGNARV

SEQ ID NO: 79814 - protein, 143 aa, Zea mays
  Coding DNA Sequence Number=SeqID_36439
MSNSLSPVMILPLLIPVFVRSRYRLLRSHPIPYDEDILHYYPLAKTQLAQLAQFPTPEVHQPLIPETNHQPPRCRKLPLLKIEMDATLPLKKAKTRTTAALADEVRTPKMPGKKPAPAVEQIPTPEETLRMRGYSGTVHFIPA

SEQ ID NO: 79815 - protein, 305 aa, Zea mays
  Coding DNA Sequence Number=SeqID_36440
MYGLQVVMRMMVLIILMVLMARLRHTARKSVIPFLPSRLAERPLRRPVTGQSSHLERLHHRLHQEQEHQRQELEQQDSSFLLQQEIEFVRSCSPVLPLEAPPAPPLSAPAAGVAAAGDPDDGGGDSSSSHITDLSEEQELEGWVARLITRDAARECHFHDALDTLLRQAVDRRTCIVEGFTRTAGRRPAWCTVRRTVSRVRSIGGVVVSPVGEDNPRLSSTINLAAVLNTELDHALDELSRARAEITQLRDERVEHRHLEDGSPAPVGTQHPYRSPQHGHQAYGNPDYRTKINLEPYIVSVRSCN

SEQ ID NO: 79816 - protein, 153 aa, Zea mays
  Coding DNA Sequence Number=SeqID_36441
MALLSIMETCSASTLNWCCLTALVLKCGEGMIHQLILQRVDQASQETILPLGVGVDNFRSIAGQLQKLVSQACLWASEASKAAVVAAAATAEWWPESDRWLELPESALRTSARWSSGAGVAAADGFLILWGYLLLNATTHQNGSCNLQHKKRV

SEQ ID NO: 79817 - protein, 128 aa, Zea mays
  Coding DNA Sequence Number=SeqID_36442
  Subcellular localization annotation: CTP_CleavageSite=35; ConfidenceScore=5.03e-01
MWPEKMIYSKASTVGPDPHGKVSDPCICVPDLRVRSRTPTGVNRTPGMSPDAATWPTARDVSQWAEPDVRPLGRAASAFIADKVRRLSIPLAGDVPHQHLLSPVVTPQVLPWLEHTLALKTMITCGRT

SEQ ID NO: 79818 - protein, 235 aa, Zea mays
  Coding DNA Sequence Number=SeqID_36443
MRRLPYAGRLALLPLLPLPHPSRVSPELHHAPPTPVTINEQIRVMGHNTPPPVIPTPGGASGGGGSYYIIDSKPDKRLRKRLFRSGVDPGDIYPPQAPDLWVDLENDNPWGAPEVHPMGVAPDLQMDFLRIIHSKVFLLLVKIDVKPFALCFGGQHYVIKILLQRSAYILSLAAEFAIPPYLARYLLRALHECDRFEKYTDNSWASPPMGVGKGRLDGWECLLNALRLFSDRGWK

SEQ ID NO: 79819 - protein, 158 aa, Zea mays
  Coding DNA Sequence Number=SeqID_36444
MGKGTKRKREPTPPSDDFGDSEYSEEEFSSESEGSPAPVSPPASSDDSDDSQGIAAEVWTYIRAVERSGLEGSDESEFSSDEDSDGGEDEDDDDGDDDDGGDGDGDGSNGGGGQRRQGQHQRRQQYGQHQRRQQYGQHQRRRRQGQQQQGQWLNATGL

SEQ ID NO: 79820 - protein, 123 aa, Zea mays
  Coding DNA Sequence Number=SeqID_36445
MGRVKRAGPRHGPAMRDLVPAMDRRYDPTSINHELVLMGQVPDDVDDVHDGLEDLFGSTAPTPTPTINLGDDNVAAEGEAPPDGSGAATATASTTASTGRKRKCTSDVWEDMDKIFATENGVE

SEQ ID NO: 79821 - protein, 388 aa, Zea mays
  Coding DNA Sequence Number=SeqID_36446
  Homolog annotation: Hit_ID=Q6J9V9; Match level="QueryCoverage=30%, HitCoverage=32%, E-value=2e-09, Identity=42%"; Hit description =Putative uncharacterized protein
MAERYQLPRSCVPPTMRRKDGGPTGERGGQPCRRHATAPSGRASPTPDTPAWRPKPTRHATGAPDAACEQLHHHLRHHHASSIAEPIPRLEATRRMTQQRQPDAAVNAAKSGPAVMTVAGGREQRSRRQPSSRPIRGQQENPLSRREDNAPVIRSSNGSRTRNGRPANRSPRRINSAGPGKGDTPKRILPREGTRLRASLLIRGSKAGPPKGFNSRLRSRGPYTHYWSEVRRPAPRRVPRSPQATRAPRSLLIRGSKAGPRRVHSRLRRRARDDQGYVRYITEARAALPSSPETPCSAPIEGNMALSPLLLAERRRRGVCKKAESVPDRPLALCGGSGAALANPAPAEPLTASTYQPENLGPDRTPGLRPVHMREQPDQPKHYASEST

SEQ ID NO: 79822 - protein, 211 aa, Zea mays
  Coding DNA Sequence Number=SeqID_36447
MVTSSLMVGESEPDCGLCPSLSLKDFHHQGWGGDCTMSGSRTRVASEPLAAPASATAARRGSSAGEIAKAGHGPTSNSTTFCPSLPHKFGHGRGPPGSSIRPEVSAAAVRPPGAEVVVVAAAGAGDGAPFVGLLLLRRPTPTEWGYSPVDYLNRFTKHESPRVKVTSESEDSWTASPSEVKSDLAEGVVDAEGATAPFQRQDPSLQDQSVL

SEQ ID NO: 79823 - protein, 104 aa, Zea mays
  Coding DNA Sequence Number=SeqID_36448
  Gene Ontology: Mol. function=oxidoreductase activity; Biological process=electron transport
  Homolog annotation: Hit_ID=Q10BT2; Match level="QueryCoverage=72%, HitCoverage=21%, E-value=2e-18, Identity=64%"; Hit description=Cell death suppressor protein Lls1, putative, expressed
MLMQQITRYTITDRMLVAHVISPWTTHHWSCNAPLKAMKALKAALQVASVAFVGFLAVANGTVLTSTVQRATVVSTAVLCFAASRWLANFIQDFYFQYYIHAYK

SEQ ID NO: 79824 - protein, 522 aa, Zea mays
  Coding DNA Sequence Number=SeqID_36449
  Gene Ontology: Mol. function=hydrolase activity, acting on ester bonds; Cellular component=nucleus; Biological process=mRNA processing
  Homolog annotation: Hit_ID=A2XLK3; Match level="QueryCoverage=69%, HitCoverage=63%, E-value=0.0, Identity=83%"; Hit description =Putative uncharacterized protein
  Pfam annotation: Domain name=DBR1; Domain location=349-482; Score =56.6; E_value=8.5e-14; Accession=PF05011.4; Description=Lariat debranching enzyme, C-terminal domain
  Pfam annotation: Domain name=Metallophos; Domain location=140-345; Score=57.4; E_value=4.9e-14; Accession=PF00149.19; Description =Calcineurin-like phosphoesterase
  Pfam module annotation: Pfam domain module=DBR1::Metallophos; Domain location=349-482::140-345
MPSGEDEQEPMLERLPLCGRGWSSAVADGVAGAGDVAEARDEDGATPVDCSKALSSVEWNTVEGEREPGAASTLLPPALSSPFAAAGYSALHPGTPATPTPSSAAGYSALHPGVPAPRPPATRSGAPSSVLPPAPVSGAMKIAVEGCMHGELDIVYDTLRRLEEAEGVKIDLLLCCGDFQAVRNENDLQCVSVPQKYRTMNTFWKYYSGEAVAPYPTIFIGGNHEASNYLWELYYGGWAAPNIYFLGFAGHYERPPYNKDTIRSVYHVRHYDVLKLMHLKEPLDVFLSHDWPLGITEYGNWQKLISVKKNFEDEVNNRTLGSKPAAELLNKLKPPYWFSAHLHCKFPAVIQHGKNGPTTKFLALDKCIPGRNFLQVIDIPSNPGPYEIQYDEEWLAITRKFNSVFPLARTQFTMRDEQLDTQEDRQWVRSKLNTRGAKPFDFVQTAPSFNPSSTTSKQSITVCCRNPQTESFLQLLELPYLLDSSKSEMFGRNESTSQTGNTLDNEDIELPDEDEDALEDDE

SEQ ID NO: 79825 - protein, 456 aa, Zea mays
  Coding DNA Sequence Number=SeqID_36450
  Gene Ontology: Mol. function=nucleoside-triphosphatase activity; Cellular component=nucleus; Biological process=regulation of transcription, DNA-dependent
  Homolog annotation: Hit_ID=Q43704; Match level="QueryCoverage=40%, HitCoverage=24%, E-value=2e-99, Identity=97%"; Hit description=DNA replication licensing factor MCM3 homolog 1
  Pfam annotation: Domain name=MCM; Domain location=1-229; Score=33.8; E_value=1.1e-18; Accession=PF00493.14; Description=MCM235 family
MVLADRGVVCIDEFDKMNDQDRVAIHEVMEQQTVTIAKAGIHASLNARCSVIAAANPIYGTYDRSLTPTKNIGLPDSLLSCFDLLFIVLDQMDPEIDRQISEQVARMHRYCTDDGGARSLDKEGYAEEDDGDANAAIFVKYDRMLHGQDRRRGKKSKQDRLTVKFLKKYIHYAKNLIQPRLTDEVTFSNPGYSHTEQYKVVEVLVFMEELQVSCDADAQEEGAFSRSKKVPHFFSLFLLRHLSQEADIGLSMGISGTEVAKESSDIIILDDDFTSVVKVVRWGRSVYGNIQKFIEFQLTVNVAALVINVVAAVSSGDVPLNVVEVQTIFILFCAIYSNAAIASSFKKEPLVTNIIWRNLFVQALYQVAILLLFNFDGVRILRLQNESRSDAEKIKNTFIFNTFVFCQVGQQAAVLLGEQPVYHAIQRTIGCRAVMPSVALPGKEGGYLGEYRRSIT

SEQ ID NO: 79826 - protein, 254 aa, Zea mays
  Coding DNA Sequence Number=SeqID_36451
MPLGYVASAFTEDKTRRLSIPLAGGVPPLYLLRPVIPLADSDLPIPQATGGVLVHSTGRRHTHTAACTTLIITRTSGGPLATVVAVTEGQLRHAEANTSTRIAEHESTTQVFELWHPRIDSGTDHLHPSMVQVRAAVNTRDLRWSPDPHGGGSSHPGIFGSVSESGLACPEPLAVDAAVGTGTTTNAARVTDIRLDNLTTALLGPNLNSAATLTHLCELRAELSLSSPASYLLQLVTREEEGAVLRLAPCPPSV

SEQ ID NO: 79827 - protein, 306 aa, Zea mays
  Coding DNA Sequence Number=SeqID_36452
  Homolog annotation: Hit_ID=Q10DP5; Match level="QueryCoverage=71%, HitCoverage=92%, E-value=2e-49, Identity=53%"; Hit description=Maf -like protein, expressed
  Pfam annotation: Domain name=Maf; Domain location=47-269; Score= -30.6; E_value=8.6e-07; Accession=PF02545.5; Description=Maf-like protein
  Subcellular localization annotation: CTP_CleavageSite=15; ConfidenceScore=5.06e-01
MASSVSGNYPRFKVRVSLRISLLELRNLVKVSRSIKVLCLLVRPLTLKVILGSSSPARREILADMGYEFTVMVGWLYWNPSADIDERAIRREEPEQLVKALAEAKAEAIKQKLQGDSAPVTDGDQPARLLITSDQVGGRFSSLEWIWFCTPVEFDTVCDHFQLILSAGKGYGYSGDRAFAVNFVLVTDLSTGTTRGGWDVPEIRFQHIPDEFIDQVGDMTCVAGGLKLTHPSVQPFVKELVGTVDSVRGLPRELTEKLIRESLQGKEARGQVPPEPLPFETLHEGSAIRFLGSVYATAQNVFFLVI

SEQ ID NO: 79828 - protein, 79 aa, Zea mays
  Coding DNA Sequence Number=SeqID_36453
MAHRTVRCATGAPTVRHRCANGHFQRLVLTASRWTHGAPDSEQSTVRCTPDSPPGPTWQRVHRTVRCTPDSPVPQSQKP

SEQ ID NO: 79829 - protein, 525 aa, Zea mays
  Coding DNA Sequence Number=SeqID_36454
  Homolog annotation: Hit_ID=Q6JAD6; Match level="QueryCoverage=100%, HitCoverage=72%, E-value=0.0, Identity=76%"; Hit description =Putative uncharacterized protein
RDPAAGVLFSTRIQESFFRAQMSAQIALRVHRLLDLPAFLLAAGAESEAHLTYLPGLLSFLTISGRYVEEWVRVFYASVWIDPDHHWMRFRFEREDVTITASQIRQLFGFPESTTRLHSLCYGTSDPPRRPHGGVAPGTAHVAALFRPPFSDGSRRSPADFTTAAKYLYELVRRTLLPRMGYREATTHIQLWLLGALVSHSEFDVVDFLICEIEDTVLDGIRARRQLPYAHYLCHIFAQLIQPPRFQNTLEASRLVFGSYRPAPEIPVPAYAPVFDTQAEDAALRQFDTQGAAADDDDFGVPPPPPMPPRSHDHEAGSSRAAPAPPPALDPALASILQTLTQQQQTLTQQQQTLTQQQALLAAEQARLSDRMLSMFQSMQDRQDALQQQLIQDRAENRAFMALMLQHSGISAPPVQSAPPSSLHAPVVPSILSAPPAVTSPLRPVTLAFTSPVLSSICPQPPVPPASAVTTTAVAVSVTASVPVAPAALPASESVPAPASTADPGSETDSDPPSAFALLPRPRPD

SEQ ID NO: 79830 - protein, 607 aa, Zea mays
  Coding DNA Sequence Number=SeqID_36455
  Homolog annotation: Hit_ID=A2YX44; Match level="QueryCoverage=96%, HitCoverage=31%, E-value=0.0, Identity=60%"; Hit description =Putative uncharacterized protein
  Pfam annotation: Domain name=DUF630; Domain location=1-60; Score =102.8; E_value=1e-27; Accession=PF04783.3; Description=Protein of unknown function (DUF630)
  Pfam annotation: Domain name=DUF632; Domain location=381-607; Score =108.9; E_value=1.5e-29; Accession=PF04782.3; Description=Protein of unknown function (DUF632)
  Pfam module annotation: Pfam domain module=DUF630::DUF632; Domain location=1-60::381-607
MGCAASRLEDEEAVKMCRDRRDLIKQALEQHNRFASSHIAYIESLKRVSVALQRFVAGDDHHELIFDTFISPIKQQKPEMLGLPYGSYEKRTIHVSRYLRSGPNPSVSIEEHPRPVETVRVESNYPMDNDSGMVDRFLPTHSSPVRSSSYYPPPYNRPSYQPPLDQETVRNSSYCMPYDRPSYAPPSPQETMRTSYYASYDRPSYPPPSPQEPLRNSYHVPYDRPSYPPPSPQEQESSPWDFFWNPFSSLDSFTYPRPRSSYDNVVTDDELVRLQRVREEEGIPELEEEDDECQEHVQMDRKEEKEEHDNADDDEDDDEDDGEECEHSDECMVSNVNFDANMKQETKGFESKGIQCTEAPEPCKTVELEIKAHKKELMRNRVANAEETPGFTVYLNRRPASLVEAMKDIDCQFSGICDAARKISVMLEASRAQYSTSNDLSAKMLNPVALLRSASSRSSSSRFLLAPSSSIDDLFNNETSSCYSEESCSTMSGSHHSTLDRLYTWEKKLYKEVKAGERLRIEYEKRLTHLRNQDVKGEEPISVDKTCAALRSLHTRLKVSIHTVQSVSRRIEILRDEELHPQLMELIVDTETISKHDVIRDFPSHLL

SEQ ID NO: 79831 - protein, 333 aa, Zea mays
  Coding DNA Sequence Number=SeqID_36456
  Gene Ontology: Mol. function=transcription regulator activity; Cellular component=nucleus; Biological process=regulation of transcription
  Homolog annotation: Hit_ID=A2XLK7; Match level="QueryCoverage=99%, HitCoverage=96%, E-value=1e-111, Identity=64%"; Hit description =Putative uncharacterized protein
  Pfam annotation: Domain name=HLH; Domain location=151-200; Score =47.4; E_value=5.1e-11; Accession=PF00010.17; Description=Helix-loop -helix DNA-binding domain
MVVDEPSFFHQWQSDALLEQYTEQQIAVAFGGHGGLDLDLDLDLDHGVATPPPLQRVPAPAADHRPRKAARGNASWDSCVTEQGSPDDYSSPTILSFAGHHAKAPKQELLDAAAAALPSFQQARPAPKRSYDDMMAEAARSPAAAARPASQNQDHILAERKRREKLSQRFIALSKIVPGLKKMDKASVLGDAIKYVKQLQDQVKGLEDDARRRPVEAAVLVKKSQLSADDDEGSSCDDNSVGAEASATLLPEIEARLSGRTVLVRVHCDNRKGVLIAALSEVERLGLSVMNTNVLPFTASSLDITIMAMAGDDFCLSAKDIVKKLNQAFKSPF

SEQ ID NO: 79832 - protein, 35 aa, Zea mays
  Coding DNA Sequence Number=SeqID_36457
MATNGDHISCRHVDVGGGVYFDPPPLISRQTATSY

SEQ ID NO: 79833 - protein, 133 aa, Zea mays
  Coding DNA Sequence Number=SeqID_36458
  Subcellular localization annotation: CTP_CleavageSite=37; ConfidenceScore=5.74e-01
MTNVQVSQSHGFNLNKSGFSRMDCPQGSAFRRMGRARSATSTVSTSFDGAIGGCAKQRPTGSAAQRRAQGISKGRRPCWDGARPWESQGKQGRRSEVEEGARAHEGELLLLAELRHGQRSGDSMGEVRASSCC

SEQ ID NO: 79834 - protein, 49 aa, Zea mays
  Coding DNA Sequence Number=SeqID_36459
  Subcellular localization annotation: CTP_CleavageSite=15; ConfidenceScore=5.02e-01
MDAQKFQQRVPFLAVCRGARQLFVKMRSKPRAVGSLFREAQWAAPSTLT

SEQ ID NO: 79835 - protein, 135 aa, Zea mays
  Coding DNA Sequence Number=SeqID_36460
MGKSNKRKREPTPPSEDFGDSEYSEEEFSSESEGSLAPVSPPASSDDSDDSQGIAAEVWTYIRAVERSGLEGSDESEYSSDEEDSSDSSEEGGGGDGGDDDDDGGEGDDDDGGDGGSSRGSNGGGSSKGSNKASG

SEQ ID NO: 79836 - protein, 100 aa, Zea mays
  Coding DNA Sequence Number=SeqID_36461
MDSRPGPARATSTEAVGEDDPGADWMGPPSRYPPEDVREGGGLPPAKISAGSQQPNDFSISRDCEARDSSETQRLALRARPTVTHKVTDIATPGVGAVGV

SEQ ID NO: 79837 - protein, 100 aa, Zea mays
  Coding DNA Sequence Number=SeqID_36462
MDSRPGPARATSTEAVGEDDPSADWMGPPSRYPPEDVREGGGLPPAKISAGSQQPNDFSISRDCEARDDSETQRLALRARPTVTHKATDIATPGVGAVGV

SEQ ID NO: 79838 - protein, 154 aa, Zea mays
  Coding DNA Sequence Number=SeqID_36463
MLGTCSQLLRIKNKATQNVKAVRGASGATLPSLADFGGSPLQPRWHSLDSETIRFRSDDTTETAAMKTLTTFFGYHPLEMVMHPLGLFPAEKRDDPMWCNRALQSEAFAHLANLAQTTKLTLDSREDFVVDLSSELVEKDLHVEQLRQRIATLE

SEQ ID NO: 79839 - protein, 53 aa, Zea mays
  Coding DNA Sequence Number=SeqID_36464
MPFTFANDSIVIHQDFLSFGFKDTFSPFLKKKMSQDKKVVAETKLSEEEKLLE

SEQ ID NO: 79840 - protein, 65 aa, Zea mays
  Coding DNA Sequence Number=SeqID_36465
  Subcellular localization annotation: CTP_CleavageSite=42; ConfidenceScore=5.06e-01
MAAVPRPPSPRAAFPLLLPAPSALVLSPCSPDVYINRDNYVVCRIANSVISLMKGTVNREISLEI

SEQ ID NO: 79841 - protein, 402 aa, Zea mays
  Coding DNA Sequence Number=SeqID_36466
MESHDLRAEWESRLVGYIRLITWVMLKPGFLLVVSIATTAQAKMKLWKETSRSSKTMTSSRCGLAATPSRLPVKAAMARLRHTSRKSVIPFLPSRLAERPLRRPVAGQSSHLEKLHHRLREEQERRRQEQQGSSFSLQQEIESVRSCSPVLPLEAPPAPPLGAPASGVAAGGDPDDKGGDDSSSHDTDFSANLEPEGWVARPITRDAARGCHFHDALDTLLRRAFNRHTWSIEYRCVVYQHSRGVRCPENSLQGAEACSEHYSISERDSAEAAMQDAARRALSHYCSVFGGAADGLDLKYYPRRPSGSTGGVIVSPVGEGNPRLSSTVNLATVLNTELDHALDELSRARAEIALLWAERAERRHLDGGSPAPVGTQHPYRSPQRGHQSYGNPDCKTKITLEP

SEQ ID NO: 79842 - protein, 89 aa, Zea mays
  Coding DNA Sequence Number=SeqID_36467
MKLWKETSRSSKTTTSSRCGLAATPSRLPVKAAVIYVSFSHFDLFYKKLRLWDGGLLYDRTKGNKEWTTKLKAKGLRLDMLMKLKYDDD

SEQ ID NO: 79843 - protein, 83 aa, Zea mays
  Coding DNA Sequence Number=SeqID_36468
MESHDLRAEWESRLVGGYEIDGFGYDYGAGKWYSFRLERIHRANNLGDAKTWLSTSCQHCNHCSGEDEAVEGDFQEFQDYDEF

SEQ ID NO: 79844 - protein, 172 aa, Zea mays
  Coding DNA Sequence Number=SeqID_36469
MWKDRVEHAKDVWALYPGKTAHLIVRCMNALYRLQAVQGEAMSQLMGLVESTKITLDNREDLVVDLSTELVEKDLQVEQMATQIQELEEQVGAMENTIEVLEDQLLTTQQQLEEANQHLDMHHQEIQDMEAEGADEDVDIEGGEEPEPASSLDTAGSGRLPSPESSVASFAH

SEQ ID NO: 79845 - protein, 75 aa, Zea mays
  Coding DNA Sequence Number=SeqID_36470
MTRHVTSLRVLGQQAHIDTVLNRLKRRHYTETPFSCKSTARSQLYYLNLKFGTWQRVQSSRSEKGTSQNPHTKKI

SEQ ID NO: 79846 - protein, 144 aa, Zea mays
  Coding DNA Sequence Number=SeqID_36471
MGKNNKRKREPTPPSEEFGDSEYSEEEFSSESEGSPAPIPLRESSDDSDDSQGLAAEVWTYIRAVERSGLEGSDESEFSSDEEDSDGSEDEDDDDDDGDDDDGGDGDGDGSNGGGGSGGRGDTRGGSSTGSTRGGSGVGSKASG

SEQ ID NO: 79847 - protein, 26 aa, Zea mays
  Coding DNA Sequence Number=SeqID_36472
MRLHTLRDDVVLYPQRCLLLVKGSGK

SEQ ID NO: 79848 - protein, 130 aa, Zea mays
  Coding DNA Sequence Number=SeqID_36473
MGKNNKHKREPTPPSEDFGDSEYSEEEFSSESEGSPAPIPLRDSDDSQGLATEVWTYIRAVERSGLEGSDESEYSSDEEDSSEGCGSDGDDDNDGGGGGNDGDSDDDGDSGSGSKDGDGGSSRGSNRASG

SEQ ID NO: 79849 - protein, 561 aa, Zea mays
  Coding DNA Sequence Number=SeqID_36474
  Gene Ontology: Mol. function=nitrate reductase (NADH) activity; Biological process=nitrate assimilation
  Homolog annotation: Hit_ID=P17571; Match level="QueryCoverage=22%, HitCoverage=20%, E-value=9e-24, Identity=49%"; Hit description =Nitrate reductase [NADH]
  Pfam annotation: Domain name=FAD_binding_6; Domain location=245-344; Score=16.8; E_value=9.7e-06; Accession=PF00970.15; Description =Oxidoreductase FAD-binding domain
MEIAMQDILDALARMEARLTDALELDGLDEDAASANAADDDSDAVHVHAPLNPDVMLDSNVDTSGSPCYPCLPEGATLFRRNPDEKIHDGLIGGISQHIWSITDEVEHTTSGLVQTLIAIDRHFDLIIKARIKHLDPLPPLVPNTDAEEEVLTTTSTRCSRMGLNRGAYFVPNLLVVCIMGAPKSNEYSTNRVLHRTRLQRRPLQHLTVDPVSAVHGGDDYELSHSESGSVLAIAAFPNSHEKIRCQLVNRTRLARDVRLILSLTSLNKVLSLHMSTHDFDCASVDRKSCLRAYTPTSMEDEVGHFSLDAKEYILDEHSKFLNGELMNQLLDPLPLDPYIEAALSPLMRAASASDRVSSLKNYHHTLGLCDHWAEKRFNGHKCVQFHAIEERGQERMRLLHFVFEIRFSSKTYWYWVIRHRLSRKSRQSFVELVQELLGDKLYFKRWGMSASQTGAMSIQREQVTGRVANRSAWEGEGRGDSTFTVARLAGWGAKTFSGAQQRRLRWGAGVDRWGEGEGGAMDAAAIPSRPPGRGRRNGGSAREGEGGMDATAIPSRPRRD

SEQ ID NO: 79850 - protein, 162 aa, Zea mays
  Coding DNA Sequence Number=SeqID_36475
  Gene Ontology: Mol. function=transcription regulator activity; Cellular component=nucleus; Biological process=regulation of transcription
  Homolog annotation: Hit_ID=Q5DM34; Match level="QueryCoverage=26%, HitCoverage=14%, E-value=6e-14, Identity=81%"; Hit description=BHLH transcription factor
MNLDELLEKKCSTPAGRGGEISPAPPLRPPTRLRICNPPARREGCGKGQIFAQKRGILESSANRLLYFSAAESAISSSQSTQISTISCEIFGKDLNLGRPSVGLAVGVSNSKVDERTWEQRSAVGGTSLLPSVQKGFQNFSWSQARGLNSHQQKFGNVLAFK

SEQ ID NO: 79851 - protein, 140 aa, Zea mays
  Coding DNA Sequence Number=SeqID_36476
MEVVATTKPPPASVSSSMQSFASASGPAGGGEFTADDLAAADQLVQLSVSGGGDEVDHCCSSSARSVNNAENEEDAGGPVDRRARKRCRLVWELYAATSKQVKAAGAGGRKRKGRDGRSDRADTNAAAVLKFGAEFLSTA

SEQ ID NO: 79852 - protein, 42 aa, Zea mays
  Coding DNA Sequence Number=SeqID_36477
MTIEDAVQDTVTIAAVATNNNNDAKSTTTICVVVFLALLLPS

SEQ ID NO: 79853 - protein, 103 aa, Zea mays
  Coding DNA Sequence Number=SeqID_36478
MKELLDIATCHVLGEDAVGAIFDHRKKRAKRDKEVDGGTNEQPKKRKKKEKQRHNDMLVVVTGQKGRKLSTEDVVDHFETMLKASCPNHTATPSVTPTRIVDC

SEQ ID NO: 79854 - protein, 145 aa, Zea mays
  Coding DNA Sequence Number=SeqID_36479
  Homolog annotation: Hit_ID=A2Y2L8; Match level="QueryCoverage=62%, HitCoverage=65%, E-value=3e-38, Identity=74%"; Hit description =Putative uncharacterized protein
  Pfam annotation: Domain name=Stig1; Domain location=9-144; Score =47.5; E_value=4.8e-11; Accession=PF04885.4; Description=Stigma -specific protein, Stig1
  Subcellular localization annotation: CTP_CleavageSite=70; ConfidenceScore=5.33e-01
MAKLTAVVVLLMVLAAATAGAVVTNADGATATVPGRRHHQQTRRSSRFLLANSSPPSPYYACSKKSAAAVCFAPGSPGATCCGGRCVDTAASADHCGGCSKVCKHDRSTCCGGRCVDLLSDKGNCGACGNLCDKRCSNGFCDYAL

SEQ ID NO: 79855 - protein, 535 aa, Zea mays
  Coding DNA Sequence Number=SeqID_36480
  Gene Ontology: Mol. function=protein binding; Cellular component =protein complex; Biological process=proteasomal ubiquitin-dependent protein catabolic process
  Homolog annotation: Hit_ID=A3BVI6; Match level="QueryCoverage=83%, HitCoverage=89%, E-value=0.0, Identity=77%"; Hit description =Putative uncharacterized protein
  Pfam annotation: Domain name=PCI; Domain location=358-465; Score =110.3; E_value=6e-30; Accession=PF01399.18; Description=PCI domain
  Pfam annotation: Domain name=Rpn3_C; Domain location=468-534; Score =153.8; E_value=4.6e-43; Accession=PF08375.2; Description=Proteasome regulatory subunit C-termi
  Pfam module annotation: Pfam domain module=PCI::Rpn3_C; Domain location=358-465::468-534
MPEDVQMNDSEPQSAAPAPAAAAAPALSTLHRKLPHSFLPLSQTLEFSIYHLCVAEAALMSDLKEIASVIEAGSLSKEVRRISRAFRLTVALRRRLAARDVSAFLAFALPASSEAYGRLIALVPKLFSAATSLDLPLLEDDTEMDVDAVAPATQISIKHGLPEIEIYCYLLALIFLIDQKKYDEAKVCASVSIARLKNLNRRTVDVLASRLYFYYSYVYELTNSLAEIRGNLLALHRMATLHRDELGQETLLNLLLRNYLHYNLYDQAEKLRSKAPRFEAHSNQQFCRYLFYLGKIRTIQLEYTDAKESLLQAARKAPTTARGFRIQCNKWAIIVRLLLGEIPERTVFMQKGMKKALTPYFELTNAVRVGDLELFRTVADKFASTFSADRTRNLIVRLRHNVIRTGLRNISISYSRISLADIAKKLRLDSENPVADAESIVAKAIRDGAIDATIDHANGWMVSKETGDVYSTNEPQIAFNSRIAFCLNMHNEAVKAMRFPPNSHKEKESAEKRRERLQQEEELAKHMAEEEDDDF

SEQ ID NO: 79856 - protein, 136 aa, Zea mays
  Coding DNA Sequence Number=SeqID_36481
MQAACNHAKWARFSESQHARHGGPDPRAPNASCLQLHRHLRHHRASMTAEPIPRLEATQRTTQRLQPGATVNAAENGPAVMAVAGGQEQRSRRQPSLRPIRGQRENPLSRHEDNTPVFRSSNGTEKGGYPEKDPSP

SEQ ID NO: 79857 - protein, 265 aa, Zea mays
  Coding DNA Sequence Number=SeqID_36482
  Gene Ontology: Mol. function=carboxyl- or carbamoyltransferase activity; Cellular component=ornithine carbamoyltransferase complex; Biological process=amino acid metabolic process
  Homolog annotation: Hit_ID=Q8SA97; Match level="QueryCoverage=34%, HitCoverage=19%, E-value=4e-20, Identity=55%"; Hit description =Ornithine carbamoyltransferase
MALPVDVAGLRPRLGDVEAPPKPRSSLSFMAGAESEPLGRARRRSSAEARAVSEPWGRPESEPWVGRSGVRRLPGLSPSPSPGSGGAEFAVFRAERSSPSSGAEPESEPWVGRSGVRRLPGLSPSPSPGSGGASYGAFGRAWLPVSITLSSGAAVGVAQATLSFCQTGQWSGEVTAVTSALPEGARQDKGLYADGGYQLRIRSLEVPAAEERVEGLTGDEIAPVKWSRAGEFVGGEESGLSRAKLTNQTGQRASPGINEGVRARN

SEQ ID NO: 79858 - protein, 345 aa, Zea mays
  Coding DNA Sequence Number=SeqID_36483
MTCGTQPPRHRGRTLERVGEDSAHDGWGRNPAAPLRRRSPKTVTSSPWMGRGKLGCNLGPTLSFKDVHHPRWGGGRVEPELYLPRGFVGRPLLRRSRERALTGPAGGSDFDNAGLVDGGRRQPQRVGLIDLAPGAPSCRKAAAAPCAREDRPRYARCQGSVRVLGRFYLCTGGGRSRSPRCRRDHRHHPRFGPPALCTCPRPSSVGVGEGKIAAASALRPSLLQFGHPERGSLSLLAERTTASHPSVFCCSAGPSPIEWGRSYLRRWNRSFVFNGTSNANSPVGCLNRFTKRESPRVKVTSESGDPWTASPSEARSDLAKGVVDAEGAAAPFSRQDPSLQDRIIL

SEQ ID NO: 79859 - protein, 386 aa, Zea mays
  Coding DNA Sequence Number=SeqID_36484
  Gene Ontology: Mol. function=helicase activity; Biological process =viral genome replication
  Homolog annotation: Hit_ID=A3ASR7; Match level="QueryCoverage=91%, HitCoverage=28%, E-value=4e-98, Identity=50%"; Hit description =Putative uncharacterized protein
MGHVENLDDYRITLNLDQTLNQKTYNKPLTLEQFAVDTYIKIESSRLDFICKNQDRLRADLYQGLVDSMLDGDIRAEKVGKRTVMSTSFIGGPRDMRRRYMDAMALVWKFVCVFHAKLQELKHRLTKQNILGKVQAYVYVMEFQKRAEIPSNKYPELRKMVIKHMMHGPYVVTMTVKKRSEGANWTIDGLSLITHASKADDDVDEIKQYRDARWVTPPEALWRIYGFELSQISPPVMQLQLHLPNMHMVAFHERQMVERVVNRPGVDRSMLTTYFEANRLHEEARGILYRDFPEWYTWQSGKDKVWQRRKRYTGGQVGRIVSAHPAEGERYYLCVLLNHVTGAASYVDLRIVDGVTLPTFREAAEKRGLLESDNTLDECLIERALF

SEQ ID NO: 79860 - protein, 389 aa, Zea mays
  Coding DNA Sequence Number=SeqID_36485
MDGGNHPRGGEPPISQHLQGLQKGLEILLSLARGPVAPVGAGGGHHSLRKRWEPPIVVPKVKPPALPPLVRRGKDGGDILLRTRLPQLEDAATGPHRHANSPLPRRQGKRLRREEMSPQIPVGANPQKPFANRRKDGCLCNGVRAKIDKRYLWQAKQATLHLRHDDRVKKAGPSEGFDSRLRAVGLRALLLIRGSKVGPSEGFDSRLRQLGLRAHHWSEVRRLAPRMGSTAASSHSGSAPTTDQGFVGWPPKGSTAASEHAERGMTLGTSDTWPRLGLRSRGSVAALANPAPAKPLTASTYQPENLEPDYAPGLWPENSAACPAPTAVPLDRVRLTTAKSSLGRHRKLRLARPQGSDSTMTPDDRLRLARPQGSDSASTSDDGLHLARP

SEQ ID NO: 79861 - protein, 88 aa, Zea mays
  Coding DNA Sequence Number=SeqID_36486
MPRGRRRARTQRRGPGDGDCGRLGQVGSGIRDSWHQRGCGGADRGVSVHGRRARVVDLPKAARFNILRGTREQGRHSRGMCLDSNNPL

SEQ ID NO: 79862 - protein, 345 aa, Zea mays
  Coding DNA Sequence Number=SeqID_36487
  Gene Ontology: Mol. function=peptidase activity; Cellular component =intracellular; Biological process=proteolysis
  Homolog annotation: Hit_ID=Q7XC25; Match level="QueryCoverage=65%, HitCoverage=58%, E-value=3e-84, Identity=58%"; Hit description=ICE -like protease p20 domain containing protein, expressed
  Pfam annotation: Domain name=MORN; Domain location=147-169; Score =23.9; E_value=0.00059; Accession=PF02493.11; Description=MORN repeat
  Pfam annotation: Domain name=MORN; Domain location=170-192; Score =35.4; E_value=2e-07; Accession=PF02493.11; Description=MORN repeat
  Pfam annotation: Domain name=MORN; Domain location=193-215; Score =34.0; E_value=5.4e-07; Accession=PF02493.11; Description=MORN repeat
  Pfam annotation: Domain name=MORN; Domain location=216-238; Score =35.3; E_value=2.1e-07; Accession=PF02493.11; Description=MORN repeat
  Pfam annotation: Domain name=MORN; Domain location=239-261; Score =32.7; E_value=1.3e-06; Accession=PF02493.11; Description=MORN repeat
  Pfam module annotation: Pfam domain module=MORN::MORN::MORN::MORN::MOR N; Domain location=147-169::170-192::193-215::216-238::239-261
  Subcellular localization annotation: CTP_CleavageSite=32; ConfidenceScore=5.60e-01
MTSSSSSSTPTRPSPLPFTPPRRRKVPAPAAPAGTAAARHLLRCLHLRLRVLLLISLPSLYFLSPTPAIFPRSLLADFLSAAAFSCALLLLLCLSLPRLPFALTLPLPLRRARRSPILWSIGSSPSASATTPTTGHFVQVYSNGDVYEGQFHRGRCTGSGVYYYYMSGRYEGDWVDGKYSGFGVETWARGSRYRGQYRQGLRHGYGVYRFYTGDVYAGEWSNGQSHGYGVHTCEDGSRYIGEFKRGVKHGLGHYHFRNGETQAGHWQNGVLDTLSTQNFIPGSPIAVNHSKVLNAVQEARRAAEKAYDIPRVDDKVNRAVAAANKAANAARVAAVKAAQKRIPSN

SEQ ID NO: 79863 - protein, 106 aa, Zea mays
  Coding DNA Sequence Number=SeqID_36488
  Subcellular localization annotation: CTP_CleavageSite=75; ConfidenceScore=5.21e-01
MAPKAHAAATAPKAHAATMVAPEERASGVTKGSGSDGSARALGNDGPIRQSREAPPSPTAVATRGTACEGRRSIRQFERSSVTNSSRSGGLGGILQRRPPPIHCLY

SEQ ID NO: 79864 - protein, 699 aa, Zea mays
  Coding DNA Sequence Number=SeqID_36489
  Gene Ontology: Mol. function=actin binding; Cellular component=actin cytoskeleton; Biological process=meiotic chromosome movement towards spindle pole
  Homolog annotation: Hit_ID=Q1HMI6; Match level="QueryCoverage=24%, HitCoverage=14%, E-value=4e-13, Identity=35%"; Hit description =Formin A
  Pfam annotation: Domain name=Extensin_2; Domain location=126-500; Score=-120.3; E_value=0.013; Accession=PF04554.4; Description =Extensin-like region
MMTASKKGPGKGDTPKGIPLREGSGPRALLLIRGSKASPSEGFDSRLRALGLRALLLIRGSKAGPSKGFDSRLRALRLRALLLIRGWPPEGFDSRLRTSRARDDSGYVRYMAEARATLLRGSGAALANPTPAKPLTASTYQPENSEPDYAPGQRPLVTPISTKLQRPDGRNSGQGSVHSRDTISPRPSPALGRNSRPRQIHASPKGLLKQRAHLRLARGPARAGFAEKQPWPNRLASRPDRSSIQCKDRLTPYPDTRSPVDKAKENSVACAAPTVMPPSRVRLTVAKSSLGRHRKLRLARPQGSDSTSTSDERSPPRPNPGLGLNLDHGGRSPPRPTPGLGLNLDSGRWSPPHPTPGLGLNLNLRRWSPPRPTPGLGLNLDHGGRSPPRPTPGLGLNLDLGRRSPPRPTPGLGLNLNLGQRSPPRPTPGLGLNLDHGGRSPPRPTLGLGLNLDHGGRSPPHLTPGLGLNLDLGRRSPPRPTPGLGLNLDLGRRSPPRPTPRLGLSLDLRRRSPLRLTPGLGLSLNLGGVTASPDLGLGLTTSQRGLKRSSDGHDTTRIGLQHLSNSHVGPSYEKGPPGIKTPTEGKVPTFDTTTGIGGSVTFSTTVATTAGTGGSAGVFGTTWICGTAPTAGTVGMASISGRVATGTIGGFGMTVMPGTTTGVTGGLSKMQHGVACSAAVDDEHERCGGEERQSITSYC

SEQ ID NO: 79865 - protein, 71 aa, Zea mays
  Coding DNA Sequence Number=SeqID_36490
METGEGNTELGQRRAGDNSEDRRLLKKLNGILLDVERYTELEGYVWQLATPRLSSSRRTSSSQLTHFHSYI

SEQ ID NO: 79866 - protein, 192 aa, Zea mays
  Coding DNA Sequence Number=SeqID_36491
DRLHADARKKGVHAATLEGLDQVVGTLDLVVGSWVCHSSPVNADVELITCLKERVPTKSNPQTVKGQVMGMMSCSYFGHNSELVDEGLVFCHVVGGVKVEADGIAELVPLRLGKHLTDEVDGPLYFEYVAFICPLYNKCHTNHLSGSSNENWSPFLRSLYRGMPFSPSLETKRLSEPTSRWTPLKFQMGPIY

SEQ ID NO: 79867 - protein, 136 aa, Zea mays
  Coding DNA Sequence Number=SeqID_36492
MATPTRGKKRLVVDVDVEVDSEAEVVAAFSRLSVSIIAKPTGDGSGKEHSIGKDVTCAATSDTAKEVSVNFAMWRVYELAQSLEEEAQRLEDLEAGPSPPLSEYFNNQFAEDQDMGGGEWALDDVNYEEIRGRQRK

SEQ ID NO: 79868 - protein, 820 aa, Zea mays
  Coding DNA Sequence Number=SeqID_36493
MEVFAKQYCLHWQKRKIGHKIAQFGSCTFTPKSGKTSMEVVELRPKSKTTQGSPAAIMCSHYYVAYPPFEVAEDDENEGALRIVARTSSGRDLVEEFIGYGVWPLAHGWALGEVCSREMPSLGGQKVRSPPFALDVRGRDPTAVVHEAEDGVVRIVGRYVPKTEGLQSWDIRGSNDRLNRVFELNRLPYGGYPGEDAADRRGKKPMGETEEGPSQDAAPAAKRRKLGTTVGGMGVTGGRWPKNLPIPWAKGEDMSTSCIARGLRISPYGRNIAAVMSVVMNKDRQDAAQKRRTVIRIADPRCEAKRARGSVKAAAPGSSQPMPAAKPAAPGSGKSSASAKTAAAGGTKPPPVEAAKVRELPSPGKRVADFGTNISVEDYFVGSGEGQMVVVPPLVATTSPSAVVRVKGTAQDPWAAFCAIGEILTAAAAKDVAGTMSQRLRDASQRLSQQLSQVANFADRVASGVLTVDVAAEVEGLWAQHVDAVREKSTAESKNRRLVEKVAALEAEKTDLRRQLVEERKEANQAIAEVQAARAEAKVARAEGSLASQCAEEWEARFNAMCGRVDKVEASTRSDVERTLAYQRGHFLIGCGGAHVNVLLLQMERAEDVEDLGGLVGVPLKAAEGNPVLPSDAGEGPSAVPVPAMAGEDPVSAPAPTVEGASEVGFGPAQATATDDANFVAASTVVAGNDSDDSVSKFFESGDSGSSVVWSEESSDEDLDYFAALDVAAAEASPRVMGAEVLPGLSAGRRRRRAVAKQRVSEVEGGRLRVDGAIKRELLSSPAGASVGEGELRNLFEGEELRIMLFNYREMGIIPKVEPM

SEQ ID NO: 79869 - protein, 153 aa, Zea mays
  Coding DNA Sequence Number=SeqID_36494
  Subcellular localization annotation: CTP_CleavageSite=40; ConfidenceScore=5.14e-01
MPAVLPSHLHTVLTINLTDLFRPLPSLKVGHLALTSGTSRSSSEMCPDSNGITDPLLGVIGYGAEVTHLGAIGYGAEIPSTENASKETRRICANYIVLQLKYDMSNLVASQYLNKDTKNVAICVIGEMPDLTWEYGEEIRDGFRCKYYRKVKS

SEQ ID NO: 79870 - protein, 221 aa, Zea mays
  Coding DNA Sequence Number=SeqID_36495
  Subcellular localization annotation: CTP_CleavageSite=59; ConfidenceScore=5.30e-01
MSDSVTESHQREASSPRTLSNGTGSGKSPAGLGLGRRTPPRPTLGLGHNLDSGRRSPPRLTPGLGLNLDLGRRSPPSPTPGLGLDLDSGRRTPPRPSPGLGHDLDSGRRSPPRPTPGLRLNLDLGRRSPPRPTPGLGLNLDLGRRSPPRPTPGLGLNLNLGRRSLPRPTPGLRLSLDLGRRSPPRPTPGLRLSLDLGGVTASPDLGLGPTTSQGGPSLPYP

SEQ ID NO: 79871 - protein, 204 aa, Zea mays
  Coding DNA Sequence Number=SeqID_36496
MRATRLLLVPAPGRVTTSSSPTQQQQDQCFCQDYDKVHRHKNKMYYHVKIEITTVCCPKVPDFPVATGASGPAPRSPAGGFAEAPPRPTPELGPRLSLGRRTPPRLTQGSDSASAPEDDELRLARPRARTRPQLRKTTNSASPDPRARTQPWPQTMVSAPPDPGLGLDLDLGRQTRPRPRRSLRLARPRARTDHVTGGPSLSYP

SEQ ID NO: 79872 - protein, 153 aa, Zea mays
  Coding DNA Sequence Number=SeqID_36497
MAGSKGHVDISPDNIMKPTVEGLTADEQQQYEDYMRQAKEKFLSQYTVDHHQKVVKHGETDVTSILSSLQVPNIGAPKHDRTIRASARTVRLALPESPGPPYDHRRPCLADRRPWTWSDRPSFCPDRSTLTRTVRLSMPDSPGPHQDYHVASR

SEQ ID NO: 79873 - protein, 278 aa, Zea mays
  Coding DNA Sequence Number=SeqID_36498
  Subcellular localization annotation: CTP_CleavageSite=25; ConfidenceScore=5.54e-01
MVDTARNGPAVMAVAGGRKQRSSPRARATAAPRTTRPVALTLRQDRRHLWQAKQATLRFRHNDHVKKGHSGSVPTTDQGFVGWPPEGFDSRLRRRARDDPGYVRYITKARATLPRVRLTAAKSGFGRHRKLRLARPRARPPVSASDDELRLARPSARTQPRPRRTTNSASPDPGLGLGLGSGRRRTPPRPTPGLGLSLGLRRWSPPRPTRGSDSTSTSEDRLDLDLGGASASPDPGLGPTTSQGGIIILPLASSGYGEQDRRPIWLAPGPPGSKRRHY

SEQ ID NO: 79874 - protein, 42 aa, Zea mays
  Coding DNA Sequence Number=SeqID_36499
MAGPGALKFYLNRFCRLGNLNSKDGQIGQLGLNSCGPEKQLA

SEQ ID NO: 79875 - protein, 88 aa, Zea mays
  Coding DNA Sequence Number=SeqID_36500
  Subcellular localization annotation: CTP_CleavageSite=33; ConfidenceScore=5.35e-01
MNVDEQGGFGGLGGQGTASTSSGAARLLGNQVAASGASGSGPGCAARPWGFDRSVLVAALLGAGGFGLAARLVQCSLAARGKGKGEEE

SEQ ID NO: 79876 - protein, 110 aa, Zea mays
  Coding DNA Sequence Number=SeqID_36501
MAAVVGAEVVAAEEVLVADEIAATIRAPGLRLFGFDSLSSPLEWGRGRGARRSSVCPEVIAAAVWPPGAEVVVAAAGAGVGKPPGVLSPRRPSNVGGCSYLRGAEPEFCL

SEQ ID NO: 79877 - protein, 292 aa, Zea mays
  Coding DNA Sequence Number=SeqID_36502
  Homolog annotation: Hit_ID=Q6QP51; Match level="QueryCoverage=27%, HitCoverage=37%, E-value=5e-16, Identity=58%"; Hit description =Putative growth-regulating factor 1
  Subcellular localization annotation: CTP_CleavageSite=47; ConfidenceScore=5.57e-01
MVAIQGGHPPFKGDSPHLRPQTSQTESSPTRSKVFPLRHGGWVPRVMQAGPGQKRPNRRARDRERGYSERDPSPRRKRAPSPPTDQRFKGWPLGRVRQPPQSTRAPRLLLIRGSKAGPSEGFDSRLRALGLRAHYWSEDRRLAPQRGSIAALDHSGSAPTTDQGFVGWPSKGSTAASEHAERGMTLGTSDTWPRLGLRSRVGNPHQHKAAKGLMGAIQVKAPSAQGTRSRLARAQPWAKAADPGGFTSRPRVPSSNGRTFSSPEAQASRRSNLGQIATPTDCIAGAFNARIA

SEQ ID NO: 79878 - protein, 98 aa, Zea mays
  Coding DNA Sequence Number=SeqID_36503
MLDEAARWDDLVTGLRPATRETKASALSQPAPPSPVRRELNRIESMGSSSNTNTSGGASDKEEKKKEDKIKGKDSSGPSFKENERVLAYHGPLLYEAK

SEQ ID NO: 79879 - protein, 188 aa, Zea mays
  Coding DNA Sequence Number=SeqID_36504
MAPNRASSKADEAAKAALLAEKNGKALVDTTHQEATEDDALSKRQRNEQPTPEGSLRTCSSGGQPQLPPGFAPPEGADVIEDGEVIGVSAEEQLQLRAFASRTVTSRSEKKSLRPSANACLHKLRVEVDYIGYDWRDQFVLLCCMRDLPLPAGITIGANCEHNQQIDVTDQRHECNLLRVESLGFGLI

SEQ ID NO: 79880 - protein, 69 aa, Zea mays
  Coding DNA Sequence Number=SeqID_36505
MGLPLDAQSSGRRLDVDERVEQCRAVAGVLHVLARFVQVLQMQHLRGHISNNGVAVLREVHVFDLCALL

SEQ ID NO: 79881 - protein, 105 aa, Zea mays
  Coding DNA Sequence Number=SeqID_36506
MFPGGAWEREGRRGMRGGRGWVPRVREKGKVENEVVAAGRREHAGGDQGRGGGSLHGPLMGLRVRCYNIARRFVETAPSVVAGGWFPLSAFSVPIFWSGFARLGE

SEQ ID NO: 79882 - protein, 286 aa, Zea mays
  Coding DNA Sequence Number=SeqID_36507
  Gene Ontology: Mol. function=chromatin binding; Cellular component =nucleus; Biological process=chromatin assembly or disassembly
  Homolog annotation: Hit_ID=Q2R2X7; Match level="QueryCoverage=41%, HitCoverage=39%, E-value=1e-53, Identity=85%"; Hit description=MRG family protein, putative, expressed
  Pfam annotation: Domain name=MRG; Domain location=11-207; Score=28.8; E_value=4.7e-13; Accession=PF05712.4; Description=MRG
MTFNKELLTAECVEIKALKMLHSSFQSVGAIIVPIQDKEKRSSHSLLVLQFPLPLKKQLVDDWEFVTQMGKLVKLPRSPTVDDILKKYLEHRAKKDGKINDSYAEILKGLRCYFDKALPAMLLYKKERDQYAEEVKGDVSPSTVYGAEHLLRLFGSSGCGSACRKRGWEQFQIEKQQPFHLIQILLPLLILELRRHARGLNEGQSLRALCVDAAGIGREVDYADVVALDEGGMLEGAAELLEKLAEPEGLDHTVGHNAVLGLREGVRDNGLLLRAQETRLAPRNTT

SEQ ID NO: 79883 - protein, 66 aa, Zea mays
  Coding DNA Sequence Number=SeqID_36508
MGGVSVTGQCQVEAIDSIVRHYQNPSLYRVLGSLLSAFCRALDKEAFAECRTRQSPALGNEFVYRV

SEQ ID NO: 79884 - protein, 133 aa, Zea mays
  Coding DNA Sequence Number=SeqID_36509
MAHFAHMVAPPLEATDGGQGGAAAMEADVAHSRRGEAEDEEVERDHGTVRGGVPVMVIGRHDGGELSCASSTPRHLMWPSSHVTPIRASLGAGNLARARCGSARLEPARQPKRARAEPSFAAHQNREPAHEPS

SEQ ID NO: 79885 - protein, 173 aa, Zea mays
  Coding DNA Sequence Number=SeqID_36510
  Homolog annotation: Hit_ID=Q6ERL4; Match level="QueryCoverage=21%, HitCoverage=8%, E-value=9e-07, Identity=73%"; Hit description =Putative tRNA splicing protein
MLLFPITSHRQVDQRDDNMEPFLWCKTQLPSRTIFMVSATQEGFEVTYLPVRKDRLINLAQLEDAICLDTRLVSVMAIKASTTRSATSSRSRKLGASARRKACRFTQMVRRHRSSAPTRCRSLHSSAGQWPSGGGLAMMGYRLDDGLTAMAGEPQASDDVLWLAVTFGWMAER

SEQ ID NO: 79886 - protein, 228 aa, Zea mays
  Coding DNA Sequence Number=SeqID_36511
  Gene Ontology: Mol. function=catalytic activity; Cellular component =membrane; Biological process=anion transport
  Homolog annotation: Hit_ID=Q75HI8; Match level="QueryCoverage=54%, HitCoverage=26%, E-value=4e-35, Identity=61%"; Hit description =Putative phosphatase
MNGLAKDVPTVNGMHEEPTTAHPRLLMPPTVHLKSLSPVDASAGREDVETLAQCQRMIACGEWLPLAVAYDHVEGSTMEAGGMQVLVDQMMAVTESSRFHVSLKKDDVYIRRLIINQVLPPSASFCKFCAAKWRKLEHKMLDNFFSVLSCVISVPFYTGFLPLLFWSGHGRLARQMTLLMAFCDYLGNSVKVLPSACIQLKDMVSAPRPCSLPIRRVTATEDEKENAM

SEQ ID NO: 79887 - protein, 647 aa, Zea mays
  Coding DNA Sequence Number=SeqID_36512
  Subcellular localization annotation: CTP_CleavageSite=27; ConfidenceScore=5.22e-01
MNKSTGIWSAISNGTPVPSPRTLAVVLAANARERAECCILAGRQQFAFPGMAGGCLRRRARGRLPPPEAGRRGGPRPAQEVEPRLASLPAPARMTNALNTGGEIGITAWFASPHPGAGDQRAKEAGSHAGGMPPCQVDALLRLPTRQHGGPGPRVAQTGAPDAACKQLHRHLRHHRVSSIAEPIPRLEATQRATQQRQPDAAVNVAKSGPAVMTEAGAREQRSRRQPSSRPIRGQQENPLSRREDNAPVIRSSNGSRTRNGRPANYSPRRFNSAAGQAAFLAGAAGNASPSPKQPRQKRLRASLLIRGSKAGPPKGSTAASDRVGPTPTTGQRGSKAGPRRVHSRLRIRARDDQGYVRYITKARAALPRYFWACLWAPSRPLTNGARTSTRITRLQLTGDTMFGAHRGGSRAALANPALAKPLTASTYQPENLGPDRLGLGLSPGRRRTPLRPTQGSDSGSAPEDGELRSARPRARTRAQTRKTANSAPPDPGLGLGLRPGRRRTPLRPTQGSDSGSAPEDDELRFARPQGSGTVLASADDLRLTRPRGSDSASAMEDRLDLGFGGASTSPNLGRRPATSTGSAIITLPRADSGRREQDRLRHSSDGHDITLVGFQDLSGCHIGIVKKHKGYEGWNEAEAVRKEASA

SEQ ID NO: 79888 - protein, 21 aa, Zea mays
  Coding DNA Sequence Number=SeqID_36513
MAQKVWVYRGEGQCDNNDIAY

SEQ ID NO: 79889 - protein, 172 aa, Zea mays
  Coding DNA Sequence Number=SeqID_36514
MDGGVPVEVEADRVDLEEHKEAVLEPRDTVGVRHRIHLPPLFHGHHGDVRAGIAWRLWPGRVSVGAEIRAKEGGRRWHGSVCGLEERGQGWKGRARTGATAVLGCGLLLLCLRPQRPRPFSGLKGRGHRGRSRGEARSLGSGAAPPTALADPPSTPIPSMEGCGVPMDKGCV

SEQ ID NO: 79890 - protein, 63 aa, Zea mays
  Coding DNA Sequence Number=SeqID_36515
MAPLARPDCLSVSLCQVSLQSEWRRRRCPSVRPLYVDGGYQLRIRRLEGTPNYGPRHHPSLKS

SEQ ID NO: 79891 - protein, 972 aa, Zea mays
  Coding DNA Sequence Number=SeqID_36516
  Gene Ontology: Mol. function=nucleoside-triphosphatase activity; Cellular component=intracellular; Biological process=cell division
  Homolog annotation: Hit_ID=Q2R8Q8; Match level="QueryCoverage=96%, HitCoverage=93%, E-value=0.0, Identity=66%"; Hit description=ATPase, AAA family protein, expressed
  Pfam annotation: Domain name=AAA; Domain location=399-604; Score =245.5; E_value=1.2e-70; Accession=PF00004.20; Description=ATPase family associated with various cellular activities (AAA)
  Pfam annotation: Domain name=AAA; Domain location=741-927; Score =301.4; E_value=1.7e-87; Accession=PF00004.20; Description=ATPase family associated with various cellular activities (AAA)
  Pfam annotation: Domain name=AAA_2; Domain location=737-869; Score= -49.6; E_value=0.067; Accession=PF07724.5; Description=ATPase family associated with various
  Pfam annotation: Domain name=AAA_5; Domain location=741-874; Score =5.6; E_value=0.0011; Accession=PF07728.5; Description=ATPase family associated with various
  Pfam module annotation: Pfam domain module=AAA::AAA::AAA_2::AAA_5; Domain location=399-604::741-927::737-869::741-874
  Subcellular localization annotation: CTP_CleavageSite=56; ConfidenceScore=5.39e-01
MAREASTSHPSPPPPRSSFPALVPRGGSGYFAGIVAEVAPRDGSRGGRLGRLWLSEAAMVGAGMRPGCFVSVSLISSSSDQLDGFPLINLFEECNRFFDLDLDNDLLYGEAGKNFVVATVLPSREVPKNGIKLSWDLACVLGHPFVGRSLFICPLCTLQAPKRSDDVHILRVMKCKNLYLSLVPPNVGSSKGIESESDYHPERSAMVMETPKRGPSTPLRKKESHHFASNNGSSMCLDPTTARSALADEKINELLHTSALWWLNGRHLLKGNFVPLSICGKLSLFVVMGAEPDSSSQDVLYENGNTLSNAEDSTKSQENPVLFLVDRTTKVHLSDSVCTKQLDSDKPGLPSEPHEYDDKRNADFNHSPTLGGLSKESATIKGIISFSLADQIGLPRYKGILLYGPPGTGKTSLASSCAYDAGVNLFTINGPEIISHYYGESEQSLYDVFTSAKQAAPAVVSDSVTKLSDSSSLKHCMSQIFIDELDAIAPSRKDGSEALSIRMVATLLKLMDEIGPSDRVLLIAATNRPDSIDPALRRPGRLDKEIEIGVPSPGQRMDILRHLLIGVHHSLTNEEVESVALATHGFVGADLAAVCNEAALSALRRYISLKENSIQQLGHPGCSFYKCNSQDTEDSSSLSSSFSKLTMSSYVACMNGGNIKSSESYDDTDEIPLYVTNKDFDKAKTKVRPSAMREVILELPKVRWEDVGGQCSVKEQLIEAIQLPQKCPEAFERLGIRPPRGLLMIGPPGCSKTLMARAAASEAKLNFLAVKGPELFSKWVGDSEKAVRSLFAKARANAPAILFFDEIDGLAVTRGQENDGTSVADRVLSQLLVEMDGLDQRVGVTVIAATNRPDKIDPALLRPGRFDRVLDVQPPDEADRADIFRIHTRSMPCSADMNLNELARLTEGYTGADIKLICREAAVAALDERFDIQEVAMRHFNSAIDRTKPSDVKFFQELAKQFRRSLTSLRKQ

SEQ ID NO: 79892 - protein, 337 aa, Zea mays
  Coding DNA Sequence Number=SeqID_36517
  Homolog annotation: Hit_ID=A3B0Z6; Match level="QueryCoverage=36%, HitCoverage=49%, E-value=1e-07, Identity=31%"; Hit description =Putative uncharacterized protein
MARRRSQKNKKTQENKEEEEENERWRPNDESTSPKGLSSHFDSHICCVANKNDSGRTNEDEEEERSFLQLYARLSQEDKAVMLKLLKRAREQSEARQRLEDILSIKMLSFDELTKEHEELKCSHVDLVQSKSSFEIEFAGTKDDTYQKLKEKNERLKMSLTQLKGKCIAQPSQDNCDHMVKKLETETTIACTKSLEENVKDLRIAKRKEQKMKINASSKSLNHASIKGNIQGNPKLQLVLERYREIFQVLKRIWCHRVSASHKPQGFLFTQRKKVWKEKETTTREDTHMKEKDIKNNTTYFYKTINVAVVSTLNPFHCENIRHKVFIANLISLDQVV

SEQ ID NO: 79893 - protein, 386 aa, Zea mays
  Coding DNA Sequence Number=SeqID_36518
KKEIGVRVTTVPQPWPGGLLDRLICFPAYIELLQPHSDDMSRVVDQLLKLFITFVGLGTLQVVSELLGWPQDNEDGFPKLLRACTVHLGIQSQSEFKDTCQVVARKALRTLCQLYEEEVADTPLRFFPPFQRDRPAWMARMRALEGKQLLEDDPTVVYHTAYLLTLDAQYDYMARHHRQMIARAEDEEKLKRKLHVDLTTAQARVAALESREVIAVEALKQAKDEHVQKLMEAYLVTHNQRRSLRIQEPAPSNPVQPRRAEDPQILEGHPVSIRGDKKAWELPEGAIVLEGIPVSPKAMDKQEHPESSQDPPPELCEPLTMKKIPAPSLEVKEEAASTPPPPPPLEELQEPVPLEEEFDPVLPSQSPPEEVINISSLLTHPGDVSD

SEQ ID NO: 79894 - protein, 62 aa, Zea mays
  Coding DNA Sequence Number=SeqID_36519
MTSHTKRQVTLHLCSHGFVPGYKKLGGPVPLTAKGHHTQVNLYVWVLFAAFTTLVIVKVSNG

SEQ ID NO: 79895 - protein, 341 aa, Zea mays
  Coding DNA Sequence Number=SeqID_36520
  Gene Ontology: Mol. function=protein dimerization activity; Cellular component=nucleus; Biological process=regulation of transcription, DNA-dependent
  Homolog annotation: Hit_ID=Q2R8Q1; Match level="QueryCoverage=97%, HitCoverage=88%, E-value=7e-49, Identity=38%"; Hit description =AUX/IAA family protein, expressed
  Pfam annotation: Domain name=AUX_IAA; Domain location=92-341; Score= -61.7; E_value=5e-05; Accession=PF02309.7; Description=AUXIAA family
GLASSSPTVLMLNLAPFETPPLGRQERPTNTIVTATAAIARGNEESSSNTCLQHGHLDLSLGISLSHGGGGGGGSCDASSCGGNKQDSYGGGQGSRDDKDNNVRRMTSCIGGTATANVITAGHSSLAGDLTAAPGGGGGGGWAAAFMPSPTGFMHPWSLAARQQKAAAEQDRTPPATYLSSSDDRVVTSPSAVGWPPVHTSRRNIVSAMHVITNKQTAGASSAVAGNGGTPPGSTTTATHTGGGETNGAAAAALAARPALAASSMFAKVHMEGYAIGRKVNLRAQDGYDSLSRTLTNMATNFFCPADCSGAAEKDAPKSDKFIFLYEDFEGDRMLVGDVPW

SEQ ID NO: 79896 - protein, 161 aa, Zea mays
  Coding DNA Sequence Number=SeqID_36521
  Subcellular localization annotation: CTP_CleavageSite=83; ConfidenceScore=5.39e-01
MQAACNRAKWAHPFNSNVPSMEAQAHTSYNRRAGCYVRATAPPLAPLSRLLECGTSTATRGNPATGGTFGRRSGRRFAFAVTTASKKGSGKGIPRKGSFPAKETGPEPPTDQRFEGWPLGGVQQPPQSARAPRPLLVRGSKAGPSEGFNDRLRPLGLRAHY

SEQ ID NO: 79897 - protein, 349 aa, Zea mays
  Coding DNA Sequence Number=SeqID_36522
MGRRETEREGGKKPEGDRRKKGKPAAFVLIPRPGRGNDGPACDVVGPSPGLGEAEATPRSRSSLSSKAEVESEPLGRARRRPSAEARAESEPWGRAKRSSSSSGAEPESEPWGRAKRSSSSSGAETESEPWGRAKRSSSSSRAEPESEPWGRAKRSSSSSGAEPESEPWGRAMRSSSSSGAEPESEPWGRAMRSFLWRLRPDLAAVSFTLSSGTAVGAAQAALSSCQATFALNAPAIRSVGVATWPRLLLDEDWASGEPKLCADGGYQLRLGVLRVPLIMVPDSGVAVRLGPIIRVVGDTGLVIFAECIPVLRVLRSTNVVVIESRTLPSARQKALGKAPSTWQRPGFW

SEQ ID NO: 79898 - protein, 172 aa, Zea mays
  Coding DNA Sequence Number=SeqID_36523
  Homolog annotation: Hit_ID=Q6QP51; Match level="QueryCoverage=34%, HitCoverage=31%, E-value=9e-12, Identity=57%"; Hit description =Putative growth-regulating factor 1
  Subcellular localization annotation: CTP_CleavageSite=43; ConfidenceScore=5.59e-01
MVAFQGGHPPFKGDSPYLRPQPSWAESSPTRSKAGRSSGHVVSQAYVPSRGSERTLSHVVKTARPCPVPRTARVRATAASRTTRPVALTPRRDRRRLSRRSERRFAFAIMTASKKAPSLPTDQRFKGWPLGGVQQPPQSAWVPRPLLVRGLKAGPSEGFNGRLRPLGLRAHY

SEQ ID NO: 79899 - protein, 201 aa, Zea mays
  Coding DNA Sequence Number=SeqID_36524
MASGRTPLQPCPRPRRRTRGEDKYKEPEAWSTDGGGDPVGDGDFSSRIHPDTDDRSRQPIGGSPLGSSRTSGAPTSARRRRTGAKAGQPQNMNAALAARNVLGGGGTESQAGEPNALKLTTPAVDQPRVVEVRPSRRASERPLPQMLKERLTHEPAREVELRLSPASAPARMMNILEAEGGTKITARLASPHPEAGGHRLG

SEQ ID NO: 79900 - protein, 137 aa, Zea mays
  Coding DNA Sequence Number=SeqID_36525
  Subcellular localization annotation: CTP_CleavageSite=32; ConfidenceScore=5.39e-01
MMVLASVATTSFAILLLFSPLSCLHLRTTPFSAEGVGACTSSPYSSDTSPDTDSRSGYCTSTRMLHIMRAPSFSPSGHPIRLSGLRPVLPPQPTAPSPTVAAASRPTLVDASTGRVGHAPVRAVEEDMVTPATLRLS

SEQ ID NO: 79901 - protein, 313 aa, Zea mays
  Coding DNA Sequence Number=SeqID_36526
MEVHCQTSLCQNEDGFPKLLRACTVRLGIRSQPEYDGREFVEHDIEKCVVIVYIGSSPHHVEWSVTAAGHRFKDTCQVVARKALRALCQIYEEEVADTPLRFFPPFQRDCPVWMAKMRALEGQQLLEDDPSVVHLTAYLLTLDAQYDFLARHHRQMIAQAEDAEKCNCQLHVDLTTAQARATALESREVIAVEALKQAKDEHVQKLMEAYLVTHNQRHPVSTRGEKKSWELPEGAIVLEGIPVFPQAMNKQEHPESSQDPPPELFEPLTMKKIPAPSLEVKEEAASTPPALPPSKELQEPVSLEEEFNPVLPS

SEQ ID NO: 79902 - protein, 622 aa, Zea mays
  Coding DNA Sequence Number=SeqID_36527
  Gene Ontology: Mol. function=transporter activity; Cellular component= membrane; Biological process=oligopeptide transport
  Homolog annotation: Hit_ID=Q6EP35; Match level="QueryCoverage=97%, HitCoverage=97%, E-value=0.0, Identity=63%"; Hit description =Putative RCH2 protein
  Pfam annotation: Domain name=MFS_1; Domain location=40-537; Score =0.4; E_value=0.018; Accession=PF07690.7; Description=Major Facilitator Superfamily
  Pfam annotation: Domain name=PTR2; Domain location=102-529; Score =351.1; E_value=2e-102; Accession=PF00854.12; Description=POT family
  Pfam module annotation: Pfam domain module=MFS_1::PTR2; Domain location=40-537::102-529
MVSGAGHGGYGGGDDGQAVDFRGNPADKSRTGGWLGAGLILGTELAERVCVMGISMNLVTYLVGELHLSNSKSATVVTNFMGTLNLLALVGGFLADAKLGRYLTIAISATIAATGVSLLTVDTTVPSMRPPACLDARGPRAHECVPARGGQLALLYAALYTVAAGAGGLKANVSGFGSDQFDGRDPREERAMVFFFNRFYFCVSLGSLFAVTVLVYVQDNVGRGWGYGVSAVAMALAVAVLVAGTPRYRYRRPQGSPLTAVGRVLAAAWRKRRLPLPADAAELHGFAAAKVAHTDRLRGHDDVLAVRPIELVTAAAEITRELGRWLDKAAIVEAEPAGKQRASAAAASTVTEVEEVKMVAKLLPIWSTCILFWTVYSQMTTFSVEQATRMDRHLRPGSGAGGFAVPAGSFSVFLFLSILLFTSLNERLLVPLAARLTGRPQGLTSLQRVGAGLALSVAAMAVSALVERKRRDAANGPGHVAVSAFWLVPQYFLVGAGEAFAYVGQLEFFIREAPERMKSMSTGLFLVTLSMGFFLSSLLVFAVDAATAGTWIRNNLDRGRLDLFYWMLALLGVANFAVFVVFARRHQYKATSLPASVAPDGTGHKEMDDFVAVTEAVEGVDV

SEQ ID NO: 79903 - protein, 598 aa, Zea mays
  Coding DNA Sequence Number=SeqID_36528
  Homolog annotation: Hit_ID=A3A8D4; Match level="QueryCoverage=93%, HitCoverage=81%, E-value=1e-107, Identity=43%"; Hit description =Putative uncharacterized protein
MVRTLTESHQIKEKDLESLVHVKKIKELEEQLHGSQNAMASLKVELQRAITELELTKKTLADERINSLPTSNNVYSNKNGSPLSKIHQQGGNILLKNKKFADKSDDTCLVPITEKENEAVENLEDMDRRSPDLPSLMVRNKKPKFYHNGCTQRIHALKQQTQSTDAFWKQNQKQVTALNSCSKARMNNAAKNPRSIMEQILQTNFLGKFKRKRGRRSRPSYKHDNSSEHGEAEYKLSDRSESDGNGCLLLLQALEQDLSPSKMSAEHDGEALTDLKEDFKMSRRDAELSRCNAFPELIDVLAVNNMQMKRRKRTKTVRVLEDDFSDTKSVPEPDNIQLMTSEKSMSGNQLVSGMTKNRSDTPTRNSDRFLKCATGNMMHQTDAGNGQFDPEISSAVFLQSIKSETTDYGNLAVDQQELITPNNNTASLKEVNEDGSCSLASPKTDTSTLSSVDKENLKASSGVPVQALEKQDVSVGSSLNKKDHTKASSGASMQAEGARHIKYTFNRRKRKGMSINSTPQRAVPEESSDLCSPTNKQKLHPDHVELNHLIDSPQGDSLLVQVAEQNSEGKELLPAQMYLNFESISITLISFPSSYSGK

SEQ ID NO: 79904 - protein, 478 aa, Zea mays
  Coding DNA Sequence Number=SeqID_36529
  Pfam annotation: Domain name=Transposase_28; Domain location=263-435; Score=-38.1; E_value=0.00074; Accession=PF04195.3; Description =Putative gypsy type transposon
MSVVHIVLICCAASLDGLVAARQRSGQGSLNAEAAHRLPVEWIGLIKCRGGTSPADKVDRRRVLSAINAEAARPRGLTSGSARWLTSWAVGHVAASGLRLCGEQKRTWHGSDTCQLRTPAWPLIKGLGIFCLGIPGPCCEWSGHHTAGSGTHPRCPVCTHGGPGPCPEVRFVYTGVRHFPMGSGPSVDTLEDIVFSGHVAAPEPSTWRGRVLFYHATRDSRAGTAPSYCSKGYPCFRVPTVAPRPTSGEDTSLQVGPKFDWRLACHFRAFADEVALNLVRNLLGWGAPVFAGRIHAGTSPLGDLATGEFVLFVSYLSCELALPIPPFFLLLLEELGLQLQHFTPHSILQVAIFAHLCEMFVGVALLPPALRRKGVAQRPSRESELSCGSIFASSSVFSGQAAECRALSCLHLFSFNGLDVASNDEGSFTLTHASRRPPPLASCSTGLPLALLFPMETPWRRRPRAFSATLLMSSSSYL

SEQ ID NO: 79905 - protein, 177 aa, Zea mays
  Coding DNA Sequence Number=SeqID_36530
  Subcellular localization annotation: CTP_CleavageSite=40; ConfidenceScore=5.06e-01
GQTTEDKQEVADIESGSGGSFGKPTLLLRRDTFLFRGRSSASGGGATTRLLSTSGTNVSRSEWSDFDLAGAPVPADGRAINADEKDNMPSFAVVVVGWWLVLLAREALLSMPKLRISPDSGLKNGRAAAKEGLDAKSEKLSSRHQRDPHREIQEATLPKGKEIKNWEATGDGVEAEH

SEQ ID NO: 79906 - protein, 65 aa, Zea mays
  Coding DNA Sequence Number=SeqID_36531
MPEPQCFLAASATHTLLLHRPIEALELTFFDMRCSDTICLLTEFVFLIVHLGLNEVTGVTLSRLK

SEQ ID NO: 79907 - protein, 384 aa, Zea mays
  Coding DNA Sequence Number=SeqID_36532
MRILLTSKQGVAGPNRFWVRSHVINQESQKHQQHIPSMVQRLARQMDKWLNFLNKLAYLHVSLVQCAYCDSEVMHMLTQILLSGLAVGVGSGRRGRGTGLGPNAGLNFTSRYRDKHEHGPHRVGHSEGIWRRRRRNTVEHGPSHPCACIETRRGALPLAGRGRREEPGGAKTAGWTRKKNVDPGLVQASVSSPKDCCDDDNFSDTGDDACYSDTRLMRRVGQDLEEEEGEREEWGLGSEWREWRRERGVGSEWREWRPRQMPRKGRSLWMYSRSASAMPGPVEDIHGGAEGADTGKNEPFRGVDVLRALHVADVEAEVANCVVELAVGRDVVRTEVAEEDCCGRWSMGRPKHMGRTKNSAQNAGTAVVLCLAKKLVPYWLVKET

SEQ ID NO: 79908 - protein, 233 aa, Zea mays
  Coding DNA Sequence Number=SeqID_36533
  Gene Ontology: Mol. function=helicase activity
  Homolog annotation: Hit_ID=Q2QP80; Match level="QueryCoverage=73%, HitCoverage=29%, E-value=2e-20, Identity=34%"; Hit description =Putative uncharacterized protein
  Pfam annotation: Domain name=DUF223; Domain location=70-167; Score= -15.7; E_value=0.087; Accession=PF02721.5; Description=Domain of unknown function DUF223
MTINKSQGQTLSQVSIYLKKPVFTHGQLYVIVSRVTSKSAPHKIHAKIQVHVSRKCLFRGATDSGPLQHVDMVLSDREGNVIYAEIPGNLAEQKATNIEKGGVYDINRFRVCATKTVFKIVDGDKMIQFTFHTIVKRATSPPTTFPLYVYRLTSFYQIEPHVQTTNIFVGVYLSGGPACRWYFNPAIPEAEPYLTSANKSNINSPEKDDGDKDTAQDVIVGTCSPGRVNPTGE

SEQ ID NO: 79909 - protein, 77 aa, Zea mays
  Coding DNA Sequence Number=SeqID_36534
MRRASGVVGMWGESSSGEIFNRGNGGHGDLHARFLRRTTRAMEACGGVARGTGAGGGARGCGVALRLLVTRFGDGGG

SEQ ID NO: 79910 - protein, 150 aa, Zea mays
  Coding DNA Sequence Number=SeqID_36535
  Subcellular localization annotation: CTP_CleavageSite=56; ConfidenceScore=5.86e-01
MNLFSQTGRLQSALCTPVPIPFLFSRFPSPPSQTPPSFPPSLRILSPSTLSPPNPTAGAGDSLEIRRGFGAPLGVSRRISGDRDSRLKVVEVALVICESSICFGNCLQQFVWRLHTITFPEVKNIWADLGISWEVLKMTSHPQNAQEHPQ

SEQ ID NO: 79911 - protein, 129 aa, Zea mays
  Coding DNA Sequence Number=SeqID_36536
  Subcellular localization annotation: CTP_CleavageSite=42; ConfidenceScore=5.53e-01
MCKYFFSKQIPKSHKPHPLPSPFPLPSIRPSTVFIFDMSSPLCSMWAAVRVGRERWGREWLVEVLRVAAALELGSDDGIDGATEALALPHPQSSASTFRSSPASELPWFSARRMLERGANADSECKLVC

SEQ ID NO: 79912 - protein, 782 aa, Zea mays
  Coding DNA Sequence Number=SeqID_36537
  Homolog annotation: Hit_ID=Q8W0S6; Match level="QueryCoverage=93%, HitCoverage=94%, E-value=0.0, Identity=67%"; Hit description =Putative uncharacterized protein
  Pfam annotation: Domain name=NHL; Domain location=300-328; Score =28.8; E_value=2e-05; Accession=PF01436.12; Description=NHL repeat
  Subcellular localization annotation: CTP_CleavageSite=28; ConfidenceScore=5.17e-01
MAQASSLVAVLRRRTPAAARLLPHRLVSSAPAPAFASSSLVPLPLPSLIEGDRCGGGLSASFGSHSRLRLPRRHHAVAMATRTAHQVASSPESPAAVTSLSSSEASTSTAASEHSELVDFIKSAFGKLEGQNHCWFNIMNDTWMNLNHEGIYLLLLYQSCGTLNNDGKHLIAFESLKHLQQRYPRLNVFALQHGSDVSSLASQSQAFRTIVKEYITFPILISDKNFSNMTNGACYLLFEGSKDPVLFTNWVEEPDVMIKAIDELTTSKEKPSENVLSRVSWQKEEVVKEPSVGSFRNLLLYHPACVSVDEDGDRIFISDSNHHRIIISNSNGMILDYKIGSSPGYEDGEFESAKFLRPASSFYHAAEDCLFIVDSEMFLTFHIRLIKTGKVFGNIGIFVWSYKNHAVRKADLGRRTLQTVYPVFNKSNGIWSWITDKLGMRKEATPTIQDFHADSMALPWHLIQISEDTLLVADRSFETPWTLTISTGEKQDIGRVQKIPNNELISSIARFQNYIVFCDTDGQRVLKHDLDTKTTSTIQFSDCEVLGLPYWSVCNLERVSTWGYSSGQLQEHAQQVDVLPGRCNITVYVDIPVGTELAAPLVDNCIWRQVRGSGAEVSGSDGPDTATEKVGIAQQWYDELDNLAFSEVAEEPTAAAHGDGNTDDQSYQEQRRVQFTCTVNVSPGTCELVASVALYLRLAGKRTTTDGVELVKRVMGGCQFREEQAGVELLARCREDDDATGLVVVKPVHLRLRLVCGDHPAGATNKETISTESSLKINVTLD

SEQ ID NO: 79913 - protein, 653 aa, Zea mays
  Coding DNA Sequence Number=SeqID_36538
  Gene Ontology: Mol. function=transferase activity, transferring glycosyl groups; Cellular component=integral to membrane; Biological process=protein amino acid glycosylation
  Homolog annotation: Hit_ID=Q8W0S0; Match level="QueryCoverage=100%, HitCoverage=100%, E-value=0.0, Identity=84%"; Hit description =Putative galactosyltransferase family
  Pfam annotation: Domain name=Gal-bind_lectin; Domain location=152 -374; Score=140.5; E_value=4.8e-39; Accession=PF00337.13; Description= Galactoside-binding lectin
  Pfam annotation: Domain name=Galactosyl_T; Domain location=420-607; Score=57.2; E_value=5.5e-14; Accession=PF01762.12; Description =Galactosyltransferase
  Pfam module annotation: Pfam domain module=Gal-bind_lectin::Galactosyl _T; Domain location=152-374::420-607
MARRVRPSHLVLALAAAYLLLISLKFRRVLDLAATDLADDPAAAAAAAFSSPSSADHLPPPGSASATSSSSSPPFPVRPFWHRYDRVSLPDLASRNRSALDRMADDAWALGLTAWEDAAAFAGDPWALLAAATSRASDAAKCPSAVSQRARGRVVFLPCGLAAGSSITVVGTPRASHREYVPQLARMRQGDGTVMVSQFMVELQGLRAVDGEDPPRILHLNPRLRGDWSQHPILEHNTCYRMQWGAAQRCDGTPPDDNDDKVDGFPKCEKWIRNDIVDTKESKTTSWLKRFIGRAKKPAMTWPFPFVEERLFVLTIQAGVEGFHIYVGGRHVTSFPYRPSRHLGVPGDRFQGFTLEDATGLFVKGDVDIHSVYATALPSSHPSFSLQQVLEMSEKWRSRPLPKGPVSLFIGILSASNHFAERMAVRKTWMQAPEIKSSEAVARFFVALNSRKEVNVMLKKEAEYFGDIVILPFIDRYELVVLKTIAICEYGVQNLTAANIMKCDDDTFVRVDVVLRRIKLNNGDKPLYMGNLNLLHRPLRTGKWAVTDEEWPEDIYPPYANGPGYVISGDIAKFIVSQHANQSLRLFKMEDVSMGLWVEKFNSTNPVQYSHSWKFCQYGCLENYYTAHYQSPRQMLCLWDKLVRGQASCCNYR

SEQ ID NO: 79914 - protein, 42 aa, Zea mays
  Coding DNA Sequence Number=SeqID_36539
MAGNLYVGSFIWIRQPYQDVAGGAGVITTRIVAYAECLVYIV

SEQ ID NO: 79915 - protein, 102 aa, Zea mays
  Coding DNA Sequence Number=SeqID_36540
MSIGDVCPKESEEPPQAQDHRHLPIKHLHQLKMRNRLKTMLMKIKRLSHLKRRTRIKGEMKLIKARKMIKKFKDKDRHSQESTKQFNEITLSTPSSVTFISG

SEQ ID NO: 79916 - protein, 49 aa, Zea mays
  Coding DNA Sequence Number=SeqID_36541
MESAYACSGSLKTAENPLQCVVSELATVPIVHDHRDAEISLHLLKEKSG

SEQ ID NO: 79917 - protein, 144 aa, Zea mays
  Coding DNA Sequence Number=SeqID_36542
  Gene Ontology: Mol. function=oxidoreductase activity, acting on the CH-CH group of donors; Cellular component=integral to membrane; Biological process=lipid metabolic process
  Homolog annotation: Hit_ID=Q8H539; Match level="QueryCoverage=54%, HitCoverage=34%, E-value=1e-24, Identity=65%"; Hit description =Steroid 5alpha-reductase-like protein
MGEIWGVAQSIETRETPEEGKDDVAAASFALPGAVEGARAEVLCVHRYSGSMPLGTAATISCSYLVSTATMVYAQHLSRGLPDPAVDLLCPGVLVFAVGLAGNKPLWRSRDPVASEAGSSAQPAAEPSPGLRSHAIETESGREE

SEQ ID NO: 79918 - protein, 303 aa, Zea mays
  Coding DNA Sequence Number=SeqID_36543
  Subcellular localization annotation: CTP_CleavageSite=56; ConfidenceScore=5.48e-01
MVSPSRRSGEAATPPRSRLRPSPGVGRGGDRLPRSRLRPSPRVGQGGDHLPRSRLRSSPGVGRGGDHLPRPRRGRALGSGEAELPVVPEAGLSCCQPHPGGWHSSRSGASGAVFLSGSKFSGWYVDAVNGLAGAGFARAAPGMEQEDGQGLTRLLSYTPSLPFRKEEGGGKAPCCPRRAPNMVALVTSEVSISRRRRSPSARSALPLKASLAQLRNPQLLCDEPELEAAVSAWTEAELARKGASSAQEQAASQAEEVQQRRPEPSRADVLGGQLAEAMERPDKPSARAGFLVETLAAMAQARC

SEQ ID NO: 79919 - protein, 23 aa, Zea mays
  Coding DNA Sequence Number=SeqID_36544
MGKPVPSLLMLILSRVQWIKQSH

SEQ ID NO: 79920 - protein, 190 aa, Zea mays
  Coding DNA Sequence Number=SeqID_36545
  Subcellular localization annotation: CTP_CleavageSite=35; ConfidenceScore=5.49e-01
MARTRAYKTLPDFGCTLPRTLKPHRSLARRRLPVRSVSAAAQSLCHRRPANRAIPNPVQPSEKTVHTSVKLPERGIGVCFAGEASPRSPELSTPPEYVDRVNHSTILRFLVHTVTTLPREAHRALGLTQFAVVWPDNLEKPYKNNPQDCNLADGEYILVPEQGAAQEVAPDPAPEDLPATALEGKPRFYA

SEQ ID NO: 79921 - protein, 242 aa, Zea mays
  Coding DNA Sequence Number=SeqID_36546
  Subcellular localization annotation: CTP_CleavageSite=35; ConfidenceScore=5.37e-01
MARARAYKTLPDFGCTLPRTLKPHRSLAHRRLPVRSVSAAAQSLCHRRPANRAIPNPVQPSEKTVHTSVKLPERGIRDCFAGEASPRSPELSTPPEYVDRVNHSTILRFLVHTVTTLPREAHRALGLTQFAVVWPVHSPPTRTPACARGPGDSGHPRRQAVPRRDRQSLPEPTPPFAGPPSPPDNLEKPYKNNPQDCNLADGEYILVPEQGAAQEVAPDPAPESAPEDLPATALEGKPRFYA

SEQ ID NO: 79922 - protein, 143 aa, Zea mays
  Coding DNA Sequence Number=SeqID_36547
  Homolog annotation: Hit_ID=Q8SA97; Match level="QueryCoverage=67%, HitCoverage=15%, E-value=3e-08, Identity=40%"; Hit description =Ornithine carbamoyltransferase
MRSSSSSEAKPESEPWGRAKRSSSSSGAEPESEPWGRAMRSSSSSGAKPESEPWGWAKRSFQWRLRPDLAAVSLTLSSGSAVRAAQATFALNAPAIRSAGVATWPRLLLGEDWASGEPKLCADGGYQLRFRSLEGTPNYGPRQ

SEQ ID NO: 79923 - protein, 307 aa, Zea mays
  Coding DNA Sequence Number=SeqID_36548
  Homolog annotation: Hit_ID=Q6QP54; Match level="QueryCoverage=16%, HitCoverage=17%, E-value=4e-08, Identity=70%"; Hit description =Putative kinase
MEHRLGLERLLETAHLELDGKLFINTQQAPTWRANCRRFEPRGSLDRRVNCRRVPQPRWVGARRSAKGGRSRRETGVRGETRGLRIFPAPRSGALAVGGYKRPRGRELGEVEAPPRSRSSLSSEAEVESEPLGRARRRPSAEAKAESEPWGRAKRSSSSSGAEPESEPWGRAKRSSLSSWAKPESEPWGRAMRSSSSSGAKPESEPCGRAKRSSSSTGAEPESEPWGRAMRSSSSSGAEPESEPWGRAKRSFLWHLRPDLAAVSLTLSSGTAVGAAQVALSSCQACQWSGKVTTVTSALSTGGRASG

SEQ ID NO: 79924 - protein, 79 aa, Zea mays
  Coding DNA Sequence Number=SeqID_36549
MDQKSLDDTRYNHCIIVRVIFKLKVFLREELEPPVIGNTCFVAEDATAWLLCEAIVAVVEVSSPEVGANVGHLFSDAIN

SEQ ID NO: 79925 - protein, 195 aa, Zea mays
  Coding DNA Sequence Number=SeqID_36550
GEKGGGAYRRRDCSGEVVEDEGEVAGITTMGQGGPRDAREAMSARNWSETHWIAWSTRGGGRPKSGEVDLGPPLKSGRVRGLGKLHGLLAELAEALACPGNGWSGLATVAEALAAMAGGIELAGAKGKWLAGEGECGAKRGSCSVTKVPVSECLVPRLSCAKTMPNEFGLSSNFPRMCSREFGTTLIFGSSGFEF

SEQ ID NO: 79926 - protein, 96 aa, Zea mays
  Coding DNA Sequence Number=SeqID_36551
MRSWCLGMLKGCLVCSFMRLGVLFIAPKCRRWEGELSRSSAPDKQPPALTERWATESEKHLRTSPQQAPDPCTHQGPSRSGTLLEFEKGGQQSLRR

SEQ ID NO: 79927 - protein, 342 aa, Zea mays
  Coding DNA Sequence Number=SeqID_36552
  Homolog annotation: Hit_ID=Q22WK5; Match level="QueryCoverage=42%, HitCoverage=28%, E-value=2e-10, Identity=31%"; Hit description =Putative uncharacterized protein
  Subcellular localization annotation: CTP_CleavageSite=68; ConfidenceScore=5.03e-01
MQAACNRTKGAHPFDFDASSMEAQAHKSCGRKQQSSRQQAHVPSWDSGRALSHDVKTTRLCSVPRMARARTTAAPRTTHPVALTLRQDRQHRWQAKQATLHLRHDDRVKKGTGKGDTPKGILLREGSGPRAPLLIRGSKAGPSEGFNSRLRALGLRAHYWSELPQSTQSEGSPWVRSIHNQGSGYAPKGSAPVSALEDGLRLARPKGSDSALAPEDDELRLARPQGSDSASAPEDDELRLARPQGSDSALAPEDDELCLTQPQGSDSASALEDDELRLARPQGSDSALASKDDELRLARPQGSDSALAPEDDELRLARPRALTQPRKTDSTSASEEPPPRLT

SEQ ID NO: 79928 - protein, 161 aa, Zea mays
  Coding DNA Sequence Number=SeqID_36553
MAVWPELGWPGCRAEVIRQSGAAYSGQGDTRLGPGAHWRLRCHHSEVLIEVECAILSSRSTSSRHCFMAPSDVVELGGCHNNSLVADNALGDTLDGVRDVCTTVCRRVACTTGVTGVGRLGACGVEEAASPSTAKSTEVSAQCSMICTIMIGQEIKRKPNA

SEQ ID NO: 79929 - protein, 145 aa, Zea mays
  Coding DNA Sequence Number=SeqID_36554
MAPRVLHDDGDSQPLTEARRHQQGLDSPDSCPSARLQRSFDGHDITRTGCQNLSGCHDDIRPGRRSLSLLVQRWSTSLVGLSGASFQRGSCWCGGFSLGGQVACPDPLGSRFQILGHLSQGGGACRPMVQDQAERLHGLRTTPGD

SEQ ID NO: 79930 - protein, 518 aa, Zea mays
  Coding DNA Sequence Number=SeqID_36555
  Gene Ontology: Mol. function=transcription factor activity; Cellular component=nucleus; Biological process=regulation of transcription, DNA-dependent
  Homolog annotation: Hit_ID=Q67VJ6; Match level="QueryCoverage=91%, HitCoverage=97%, E-value=1e-143, Identity=60%"; Hit description =Aintegumenta-like protein
  Pfam annotation: Domain name=AP2; Domain location=172-229; Score =46.1; E_value=1.2e-10; Accession=PF00847.11; Description=AP2 domain
  Pfam annotation: Domain name=AP2; Domain location=271-323; Score =59.9; E_value=8.8e-15; Accession=PF00847.11; Description=AP2 domain
  Pfam module annotation: Pfam domain module=AP2::AP2; Domain location =172-229::271-323
MAYSKPSLTPPVLLLVRRTATHVFFPAYMYSTTNIIKKLDRVHYWMFLFATTARMYSAIVFSMHVRSHTQVGDEQGAVEESPRTVEDFLGGVGGAGAPPQPAAAADQDHQLVCGELGSITARFLRHYPAAPAGTTVENPGAVTVAAMSSTDVAGAESDQARRPAETFGQRTSIYRGVTRHRWTGRYEAHLWDNSCRREGQSRKGRQGGYDKEEKAARAYDLAALKYWGPTTTTNFPVSNYEKELEEMKSMTRQEFIASLRRKSSGFSRGASIYRGVTRHHQHGRWQARIGRVAGNKDLYLGTFSTQEEAAEAYDIAAIKFRGLNAVTNFDMSRYDVESILSSDLPVGGGASGRAPAKFPLDSLQPGSAAAMMLAGAAAASQATMPPSEKDYWSLLALHYQQQQEQERQFPASAYEAYGSGGVNVDFTMGTSSGNNNNNTGSGVMWGATTGAVVVGQQDSSGKQGNGYASNIPYAAAAMVSGSAGYEGSTGDNGTWVTTTTSSNTGTAPHYYNYLFGME

SEQ ID NO: 79931 - protein, 110 aa, Zea mays
  Coding DNA Sequence Number=SeqID_36556
MRKEESDPSNKSIKNTNKLSLKSLSGWSGFGTRRGFDSFDLCLGVNALALVLNENLGRLGCLEWWWLGWLLSMGAPDSPCCSEPLQSTVALDSRYSAGAPDSLVAHQTVR

SEQ ID NO: 79932 - protein, 654 aa, Zea mays
  Coding DNA Sequence Number=SeqID_36557
MPSSSSSADATPPAAASSEETLSNVMVEELRAGDSVEFDVSRMTSARIEDMQRLGYFGGGVARAPGTEEVPEPEGELVVFEAFFVAGLRLTAHRVFELNQLPYDGYPGQDEADRRGKKPAVETGGDPALVAAASSKKRKLVMDKDRQGAARKRQATVRVHEAQPKRQRGTAKAEASGGGKPPLPAKVGASAPGKAPEVTVGAGGPKLTKVVPSVSGVAEAAKAARTLPPPGKRVADFGTEINVEDYLGGSDEGPLALVVPGAAIATAAPAPKAGGETLGAGGEVSALALVRDEAGVATRRLKGATEALSRATEALSQVADFTSRTASGALPAALSAESASDSKCRKLAEKVAALEKEKADLRRQLAGERREANEAIAKEQAAQAEARLARAEGNIAKELAGELQRRLTALESRAEGAEAAMRAEAERTRTQLMTAYRELGVRTGDFEVPEREAGLRCLEWVQEELQELPTVLAGLMSFTSLVTCEAAMNALSREGCRHFEALDQADEDFGRDIFEVEDPVVKESAGALYDRMWGSYGCEVVRARAEAARAQAERGERVDDFGALNSALPDPETTPAEAATRVAPGPTPETAEDTPGAPAPAAAGEDLPPKVAEGAPDAPAAAMPSAEDPAEVGAEAAAEASAEAPAAAGPSQVA

SEQ ID NO: 79933 - protein, 46 aa, Zea mays
  Coding DNA Sequence Number=SeqID_36558
MGTPLADSLPSAVRQTLDKECKNWSDTRELESVTVTKIARSKVSLI

SEQ ID NO: 79934 - protein, 99 aa, Zea mays
  Coding DNA Sequence Number=SeqID_36559
MEEPRPHTCGGGERGRRKLRGRGVAGAERSRVTHSPHRRWYSGPTVAATGLTWFAMRDERRDVAWSAQSPGFISYREGGVRTEGESGRSNPGGELLGRR

SEQ ID NO: 79935 - protein, 192 aa, Zea mays
  Coding DNA Sequence Number=SeqID_36560
SRGGEKGRGAYRRRDCSGEVVEDEGEVAGITTMGQGGPRDAREAMSARNWSETHWIAWSTRGGGRPKSGEVDLGPPVKSGRVRGLGKLHGLLAELAEALACPENGWSGLATVAEALAVMAGGIELAGAKGKWLAGEGECGAKRATVEHVFPLPLPLFKRRLGANLREFGQDHCKGFVHQTKLCLLCMDDVRF

SEQ ID NO: 79936 - protein, 901 aa, Zea mays
  Coding DNA Sequence Number=SeqID_36561
MEVVELVPCAHNKWGNWHEFWFYVAEGTVEDHPGLPVSEMCSHFYSAYPPFEVAEEDANEGALRCAVGLSSGRDLVEEFVAYGVWPLAHGWALGEVCPRQMPSHGGKLVRSPVFALDPRSRDPAAFMREAEDGAVRIIGRVFELNRLPYGGYPGQDDVDRRGKKPVVESGDDPAPAVAPSSKKRKLGTAMGVLGVSDGFARELMRTCAAPGGRMSLPELRESSARMLRVTGGWWPRNVPIPRAAGEDFFTSRMVREWKVFPYGRNIAAIVSAVMDKDHQGAAQKRQAVVRLHEARPKRQRGGLRRLLPPTEATRRWRRSRPSLHPAGRRRLQLPPVVPSLRRLHRRPAGCRRAAKAARGLPPPGKRVADFATDISVDDYLVGSDEGQLVVVPPAAATTAAAVVPKAKSGALSAGGEMPALTAVRDEAGAVSRRLKEMKEALSQAADFADRAASGALTAVVSAEVERLRTQHADAVREKSAADSKCRKLRTSALKSRVERVEAATRTEAERTRKQLMDSYHELGARTADFEVLDREPGLRCLEWVQEELQALPTIVEGFMSYASLVTCEGAMNALSREGCRHYEVFDQADEDFERDIYKVEDPIAARGERVDDFGALNSALPDPESNPAEAVSEAALEPPPETAKGVPDAPAAATTGGGPPPETAEGVPDAPAAAAAGGGLPPIAAPRAEDPVTVAAEATAEAPAMAGSSQVQDFGPAHATATTNFLAASTVDDGNKSDGSAFKFSDFGDSGSSVEWTKESSDEDLDYFTALDVAAVEASSHAADAEDVPGPSTGRRRRRAVAKRRVSGADGGRLRVSRAGRQELLSLPAAMSTGVLQVFVVWRCEPVSAGGSLRLDNERALPLGLQLAPGLCPSCLDEYESKDSVSIDEILRSGLVHVGDG

SEQ ID NO: 79937 - protein, 374 aa, Zea mays
  Coding DNA Sequence Number=SeqID_36562
  Gene Ontology: Mol. function=nucleic acid binding
  Homolog annotation: Hit_ID=Q2QUK2; Match level="QueryCoverage=39%, HitCoverage=28%, E-value=2e-26, Identity=40%"; Hit description =Putative uncharacterized protein
  Subcellular localization annotation: CTP_CleavageSite=17; ConfidenceScore=5.55e-01
MPAANHQPPRTPVRLIRQSAAMPSPGGRPPPKPRHPLPPKTTSKATPKRNAISSSTQQQVQASTTTTETTETTNPVSFPPKMTRSTQAMSSPVRNTMPRPTRHTMHSPPRFTRASAAMSSPGANPHHSPPRFTRASATMSSPSANPHHSTPAATAIVSHQPSPTTSVNKTVPTDNSPGGHNSRQSNAIIESAKQFDATTSEGNPNEGEPVGDLVPALLAPKKNVHKKTMGHGLEKMLNRGNQLAIHVAEGKKRPEVPLQAAKLASKTGVALRDNLPIYKSWKLYDNAVGQEESRLDVDVKNEGPSKDACTDIIKRGVRQTRYNLKRKYFDESLTKEQLLAMQPPPKMKKEDWTGLVEYWCDPKNQEKSAKNKAN

SEQ ID NO: 79938 - protein, 484 aa, Zea mays
  Coding DNA Sequence Number=SeqID_36563
  Gene Ontology: Mol. function=nucleic acid binding
  Pfam annotation: Domain name=zf-CCHC; Domain location=331-348; Score =20.6; E_value=0.0012; Accession=PF00098.14; Description=Zinc knuckle
  Pfam annotation: Domain name=zf-CCHC; Domain location=356-373; Score =13.6; E_value=0.013; Accession=PF00098.14; Description=Zinc knuckle
  Pfam module annotation: Pfam domain module=zf-CCHC::zf-CCHC; Domain location=331-348::356-373
MTMSSQEVTVELLLGDGSNYKSWSVSIYNAFMSVDPDLRQVFSRSIFPSNVSKNPSNDELRCLSLNHHACNILVDSLSRGAYFAIMSSDSDLFVDAHDLWTKLKLKFFKSICTSSAPFIAGDTNLSKGEEQERWQPNDESTSSTGLSSTSNKCLIANNDGGDKSDDEEEYEDEESTSSQGTFSCFASTDNNDRENETDDVEEEIRRFYIHLNKEDKALLIKLLRRNKEQGETLLRLEETLIKTNDILEKMTKKHEELKYSHENLVQRYPRARGKKLEKGKTEASVKLHKKDVPKDEEINMSLEKGKDSINHVVCTDHFSMSSKNKKRKGKRGCFKCNKAGHLIVSCPYNDKGEGIRRCFRCNDKNHTITSCPLLMNQACEFSKMTLTKENDKQQASCQVERRFYYKCGEQGHLSKSQGGKEKMSKKWSNQDLGTSVRSSETTDQAKDGGKKSFEVPSAREKVKEAEEPKAKGEEEGLQSQGWSS

SEQ ID NO: 79939 - protein, 164 aa, Zea mays
  Coding DNA Sequence Number=SeqID_36564
MGGRVTLPLGHRETPGIEREGEGVARERSLAEKKEAARDQTRAPPSPRPLDGAQGDRQGLWMIVWRSRAQSTDRGSGISHRDNGSTALPPCFVAGAYGCVIHVMAPTLLLAWLPASYSAVRFGVWGDWGAQLCLAGHGAAGEYSCAAVRVAREGGNPVRPSDFE

SEQ ID NO: 79940 - protein, 60 aa, Zea mays
  Coding DNA Sequence Number=SeqID_36565
MDPERGKKKLLTPRARMLIFSSPVLVSLIRDVIVDITPQLITFNQRSKSNKYHKNKQSNA

SEQ ID NO: 79941 - protein, 440 aa, Zea mays
  Coding DNA Sequence Number=SeqID_36566
  Gene Ontology: Mol. function=transferase activity; Biological process= flavonoid biosynthetic process
  Homolog annotation: Hit_ID=Q2R0J4; Match level="QueryCoverage=97%, HitCoverage=94%, E-value=1e-137, Identity=60%"; Hit description =Transferase family protein, expressed
  Pfam annotation: Domain name=Transferase; Domain location=1-439; Score=89.9; E_value=8.2e-24; Accession=PF02458.6; Description =Transferase family
MKATRTLVQPVYSTPHPLAGEKVPLTVFDRAAFDIFVPTVLAYPAPAPSNEALKDGLRRAVALYPHLAGRLAVDDRGRRFLHVNDEGVLVVEAAISADLSGVLAGGMTDANVVVDELYPSLPEDNVGAALLQIKLNRCRCGGLVVGIICHHHVADGHSMSAFFTTWASAVRAGKDFSVPAPPFLKRAATAVPRATPTPIFDHRSIEFMGGGDGGRTSRIKSYAVVPMDEIKSLTVHFTDEFIAGLKARVGVRCSTFQCLLAHVWKKITAARDLNLEEFTQVRVAVNCRGRAIPAVPTDFFGNMVLWAFPRLQVKDLLNSSYGSVVDAIRDAVARVDGEYIQSFVDFGALADRSGEELVATAAAAGTMLCPDLEVDSWLGFQFHQMDLGTGPPCAFLPPDLPIEGLMVFVPSRTAKGGVDLFMAVAECHVDAFQQICHSID

SEQ ID NO: 79942 - protein, 133 aa, Zea mays
  Coding DNA Sequence Number=SeqID_36567
  Subcellular localization annotation: CTP_CleavageSite=28; ConfidenceScore=5.13e-01
MALASIAATSFVILLLFSLSCLRLHAFSAEGVGAGASSPFSSDTSPDTDPRSGYCASTRMFHSMHAPSFSSSLDAPFVFPVFALFFLPNPLSLLTVAAASRPTPVDAGTGRVGLAPGFSSCVSLRRTRWCCHA

SEQ ID NO: 79943 - protein, 123 aa, Zea mays
  Coding DNA Sequence Number=SeqID_36568
  Subcellular localization annotation: CTP_CleavageSite=61; ConfidenceScore=5.04e-01
MDIDPFVRRMTDLRHITRSMMHMPLSSLAPMMLAPGTRTWIGSTSPSTTDGSGTGGSTGANASRKRSEDRNDFDKVTNLVNDKRVNSVPLGCLGQLYGTTRMSTYQAISGSKGWHSEQARHDP

SEQ ID NO: 79944 - protein, 988 aa, Zea mays
  Coding DNA Sequence Number=SeqID_36569
  Gene Ontology: Mol. function=binding; Cellular component=nucleus; Biological process=protein amino acid phosphorylation
  Homolog annotation: Hit_ID=Q5Z4A4; Match level="QueryCoverage=100%, HitCoverage=99%, E-value=0.0, Identity=66%"; Hit description=PPR -repeat protein-like
  Pfam annotation: Domain name=PPR; Domain location=206-240; Score =42.5; E_value=1.5e-09; Accession=PF01535.11; Description=PPR repeat
  Pfam annotation: Domain name=PPR; Domain location=307-341; Score =32.6; E_value=1.5e-06; Accession=PF01535.11; Description=PPR repeat
  Pfam annotation: Domain name=PPR; Domain location=408-442; Score =36.2; E_value=1.2e-07; Accession=PF01535.11; Description=PPR repeat
  Pfam annotation: Domain name=PPR; Domain location=509-543; Score =30.0; E_value=8.9e-06; Accession=PF01535.11; Description=PPR repeat
  Pfam annotation: Domain name=PPR; Domain location=610-644; Score =22.2; E_value=0.0019; Accession=PF01535.11; Description=PPR repeat
  Pfam annotation: Domain name=PPR; Domain location=708-742; Score =26.7; E_value=8.8e-05; Accession=PF01535.11; Description=PPR repeat
  Pfam annotation: Domain name=PPR; Domain location=743-777; Score=9.2; E_value=0.62; Accession=PF01535.11; Description=PPR repeat
  Pfam annotation: Domain name=PPR; Domain location=809-843; Score =47.4; E_value=5.1e-11; Accession=PF01535.11; Description=PPR repeat
  Pfam annotation: Domain name=PPR; Domain location=844-878; Score=9.4; E_value=0.6; Accession=PF01535.11; Description=PPR repeat
  Pfam annotation: Domain name=PPR; Domain location=880-913; Score=1.6; E_value=5.1; Accession=PF01535.11; Description=PPR repeat
  Pfam annotation: Domain name=PPR; Domain location=946-980; Score =19.0; E_value=0.017; Accession=PF01535.11; Description=PPR repeat
  Pfam module annotation: Pfam domain module=PPR::PPR::PPR::PPR::PPR::PP R::PPR::PPR::PPR::PPR::PPR; Domain location=206-240::307-341::408 -442::509-543::610-644::708-742::743-777::809-843::844-878::880 -913::946-980
MAIHRSNLSRRFKISRIWHQSEQYRAKSFASSSPTSETTPLKVLTGLLRDAYSLKCLRELHAHLAVAGAIQDTFVVTGLVERYVYFGKAASAALLFAETYRSRPAVYSLNLAVRCFSDHGFHRELLHLYRELCCFGSDNFTFPPVIRACTAVSCLRLGREMHCRVLRTGHGGNVGVQTALLDLYAKAGQIDVSRRVFDCMVLRDLISWNAMVSGYSLNECFREAVEMLQEMQQGGMRPNASTFVGIVGMCGSVGDRDVGDSLHAFALKGGVINDESLTSALITMYAAFDDLSSSRMVFDLHPVKDLVSFNSMISAYMQHHIWKEAFEIFRLMHCVAVRPNLVTVVSVLPSCSDFFGINHGESVHGMIIKLGLAEHVSVASALVSMYSKLGKLDSSLLLFCCCTEKNNILWNSMISGYLVNNEWNMALDAFCKMQIAGVAPDATTIMNVISGCRYTKDLHMAKSIHAYAVRNKFESYHSVMNALLAMYADCRDISTSHTLFQKMEVRMLISWNTMISGFAEIGDSDTCLILFCQMFHEEVQFDLVTLIGLISSFSVPGDAIVGESVHSLAIKSGCNSDVSLTNALITMYANCGIVEAGQQLFDSCCSRNTITYNALMSGYRKNNISAKILPLFYQMVENDEKPNLVTLLNLLPVCQSQLQGKCIHSYAVRNFTRLETPLFTSAMGMYSRFNNIEYCSKIFSLIGARNLIVWNAFLSACVQCKQADMVVDCFKHMLFLNVRPDAVTMLALISACSQLGNAYFAACIMAVILQKGFSTNILVLNALIDTHSRCGSISLARELFDSSVEKDSVTWGAMINAYSMHGNGEAALDLFSMMIDSGVDPDDITFVSILSACAHNGLVEQGRTLFKSLQADYGITPRMEHYACMVDLLGRTGHLDEAYDVVRSMPFRPSDNLLESLLGACRFHGNYKIGESIGKLLIKSEYGKSRSYVMLSNIYASAGKWSDCEQLRLDMEAKGLRKNVGVSSIGMT

SEQ ID NO: 79945 - protein, 952 aa, Zea mays
  Coding DNA Sequence Number=SeqID_36570
  Gene Ontology: Mol. function=signal transducer activity; Cellular component=membrane; Biological process=signal transduction
  Homolog annotation: Hit_ID=O48724; Match level="QueryCoverage=51%, HitCoverage=62%, E-value=2e-75, Identity=36%"; Hit description =Putative uncharacterized protein At2g26570
  Pfam annotation: Domain name=DUF827; Domain location=305-824; Score =250.2; E_value=4.6e-72; Accession=PF05701.2; Description=Plant protein of unknown function (DUF827)
MPDKKIEGADSSHIVSSTKSLESSVGPNLIESTDGDYCNNLHKTAVANFVASMLQEHPMSLILAENKSNLQEISVEQKIPIFVSINLSPKVDGSELPCPIEVHDGITSSSSKTNEPMEAQDYSNTMKSNTASCMFEASKRQECPISLILADKKGSLQEVSVEQNVPCGDYVALSQKADGSELTSTREAPEGFLTSSSKVYVLKEAQDGSITTEASKVNVCAASHSMLRLIEGVQDEASCIDSDKVTCETPPAILKKLKEDKPLVVHRFHKHQMSLGDTHQKVPAPVSRSNTSKYLRMDKNIVDTTTPIESVKAVASKFGGSMNWKTRKTQTAQVSDRIVLELDKLKNEISECKHQAEAAEAAKLSVLKELERTKKLIDEMKHVLEREQAEEVDAKDDLELFQIILQAMEGVDCNDSVVVREKLNNIQERHKALDAKVISVKYVLGKVQEDYDSLLIGTDISINKAQAAFTMSKGAEKEVEELTIELQRLKEVFDLANAKFQDVEERKNTLMARDEDRLAWEEDLRQSDKELNQISMDLCSFQELQSKHDTSATMLLNLKNEVANYLEAKRIEEAREQESGTHKPVQEVIIMLKSELVEQRKSIARVTDELCVLKATAELLKSQLKKEKAALAAAQQMEVMASMSTQSLKMDIKLSQQELEALHAKAKECRDRSGKALQDASHEADEAKVIATKAQGELKKTEEEVAQAKAALSTVESKLEAVLRDIQAAKASERLALDTLTTTTLEEHSKVGARYSETVTLDLDEYTSLVQRSRQAEEAAHEKTTAASTAEVEAAKESAARTISRLNEILQALEEQKQALAAATERAGRASEGKLAMEQELRQRREEENGKRRRMASEAPKPVTGPRSAAEIAGRVDMTLTCTGKGDSSCPAASVHPVSDASGTGTGRSSPSDAALPVPVPAKTKKAKKLPFFTRVVMFLGGRRRRRLRAAR

SEQ ID NO: 79946 - protein, 417 aa, Zea mays
  Coding DNA Sequence Number=SeqID_36571
  Gene Ontology: Mol. function=catalytic activity; Cellular component =endoplasmic reticulum; Biological process=cellular metabolic process
  Homolog annotation: Hit_ID=Q9SZB3; Match level="QueryCoverage=88%, HitCoverage=96%, E-value=1e-106, Identity=54%"; Hit description =Putative uncharacterized protein F17M5.120
  Pfam annotation: Domain name=3Beta_HSD; Domain location=52-315; Score= -58.4; E_value=2.3e-06; Accession=PF01073.10; Description=3-beta hydroxysteroid dehydrogenaseisomerase family
  Pfam annotation: Domain name=Epimerase; Domain location=51-285; Score= 106.9; E_value=5.9e-29; Accession=PF01370.12; Description=NAD dependent epimerasedehydratase family
  Pfam annotation: Domain name=NAD_binding_4; Domain location=53-269; Score=4.5; E_value=4.2e-09; Accession=PF07993.3; Description=Male sterility protein
  Pfam annotation: Domain name=NmrA; Domain location=51-293; Score= -86.5; E_value=0.0026; Accession=PF05368.4; Description=NmrA-like family
  Pfam annotation: Domain name=Polysacc_synt_2; Domain location=51-242; Score=-164.2; E_value=0.0013; Accession=PF02719.6; Description =Polysaccharide biosynthesis protein
  Pfam annotation: Domain name=RmlD_sub_bind; Domain location=49-255; Score=-189.5; E_value=0.1; Accession=PF04321.8; Description=RmlD substrate binding domain
  Pfam annotation: Domain name=adh_short; Domain location=49-181; Score= -41.3; E_value=0.0065; Accession=PF00106.16; Description=short chain dehydrogenase
  Pfam module annotation: Pfam domain module=3Beta_HSD::Epimerase::NAD _binding_4::NmrA::Polysacc_synt_2::RmlD_sub_bind::adh_short; Domain location=52-315::51-285::53-269::51-293::51-242::49-255::49-181
MPGGWASSEGARTRTDLSEDGGGGRRLGKDADARDRISGCCASVAAGGMRVVVTGATGYLGGRLCAALAGAGHAVRALVRHSSDVSGLPRDIEMTYGDVTDAESLAVAFDGCDVVFHVAAAVEPWLPDPSVFFKVNVGGLENVLKAVKRTPTVKKIIYTSSFFAIGPTDGYVADETQAPFIELAYWLIHVYADLVYTAADYRIALQAAADKVPITIVYPGVLYGPGKLTTGNLVSRILIERFNGRLPGYIGDGYDRESFCHVDDVVNGHIAAMEKGRVGQRYLLTGENMSFVLIFNMVANITNTRAPMFHVPLWLIEAYGWISVFVSRITGKLPLISYPVCPLFLPLNTFELVIHTLGVLWVDSLPSHLSQTVRVLRHQWAYSCDKAKMELGYTPRNLTEGLSEMLLWLKEEKLIKF

SEQ ID NO: 79947 - protein, 231 aa, Zea mays
  Coding DNA Sequence Number=SeqID_36572
  Gene Ontology: Mol. function=transporter activity; Cellular component= intracellular; Biological process=transport
  Homolog annotation: Hit_ID=A2YWM6; Match level="QueryCoverage=18%, HitCoverage=7%, E-value=2e-16, Identity=95%"; Hit description =Putative uncharacterized protein
MDRYIKYHVQEFDRAFRERFPACTLAAKRHIDSTTTILDVQGVFSFASGFCFGAHGSGRDSDSAERSEYFAVAKGISIKRIDELKFLREPEADDPSEFITHRAKDFVSSMKDIETRFMMRKLLDFDEPKTLAPTCLFVGGTKYMVIQGEPRVVIRGKKKAPLVDLRGLALLPKNNLKSWWHLNCLQVPLVINYDLPNNRELYIHHVGHSDRFGRKGLTQQNCMINIILLLR

SEQ ID NO: 79948 - protein, 71 aa, Zea mays
  Coding DNA Sequence Number=SeqID_36573
MAGHRLTPPDFAGRGDVRRCSGGVRGSGRAGLRACEMRGGGFRGGHGIARGLAGMRQLGRGALGSGGGGLH

SEQ ID NO: 79949 - protein, 380 aa, Zea mays
  Coding DNA Sequence Number=SeqID_36574
  Gene Ontology: Mol. function=(+)-abscisic acid 8'-hydroxylase activity; Cellular component=integral to membrane; Biological process=response to stress
  Homolog annotation: Hit_ID=Q09J79; Match level="QueryCoverage=29%, HitCoverage=23%, E-value=6e-29, Identity=63%"; Hit description =Abscisic acid 8'-hydroxylase 1
MAAGSWKDVHADRTFVRPWRTDWGKWAAARVKKEQEEEGREGGYPFDIRPDLVKGDSAVLPPEFALLTTWWPQEAALQHEKPNEQQQPELIQKELKQCYLSLEKGFNSMTVSQPGTLFHEAMKVRKRLGAIVDHISQDRRERPRERDLLLLAFILDSRETLTDAQISDNVIDVRFAAREATASVLTWMFMFLDDHTAFLKAVTEGVKAFEPDLIAKANSFVHGGCVSELYHLASIVCASVNGKTCMQACTTTSMADELVVSEEVDEVLNALPNRQPWPPPRQFAILADGVQVRPLPWPSFYCHAGGDYHGDVCITPPSVHGTNPASDAMVGMKIVAIGTDDKDYIHIEEPRKAVEANKDTLAGDSPFSDATPAPTRLRRW

SEQ ID NO: 79950 - protein, 244 aa, Zea mays
  Coding DNA Sequence Number=SeqID_36575
  Gene Ontology: Mol. function=zinc ion binding
  Homolog annotation: Hit_ID=A3AR83; Match level="QueryCoverage=55%, HitCoverage=11%, E-value=6e-35, Identity=55%"; Hit description =Putative uncharacterized protein
MGRRRGRGKKQTTVRSHEDKGSSGEEVVPAKKRRGRPQTRFASKIDQADVENFVEQVDADQEEADDAKLKNSAAAGGPKRADWEPTEKQAQASIGGRARMQLAETQASGDGGCCVDNGHDWTKTQGDGQLRRVQLWVHTRCARYVRSVHTSFSCHKCRRSKRVSSSTDEAEVAELLAELPTHCPPPLYNRWAEVPLLARVRVHGLPGWGNDTLFRGAPTFSAALWRCTSYVPKRIGFRYCELPS

SEQ ID NO: 79951 - protein, 536 aa, Zea mays
  Coding DNA Sequence Number=SeqID_36576
  Gene Ontology: Mol. function=sucrose synthase activity; Biological process=sucrose metabolic process
  Homolog annotation: Hit_ID=A3AD09; Match level="QueryCoverage=16%, HitCoverage=10%, E-value=6e-14, Identity=51%"; Hit description =Putative uncharacterized protein
MQRVLDELARMELRLTDVLAGRGGKQAPASSSFATPFDSFKASTTSSTAAPRYDDDVIGSSAGAAYDDAFATSARERTSSSFGDDRIEELDVWDEDAAGLPRLEFLLFRFLASVESPCRIAAAAFRSADELADRELRFDELSFNDESTPHHLAPTHEVLFFSDGADPFFGEELDILPTSEFDEVERIIALSSDCTATNSFRVGSCDDNHIGVKQSSVDTQSLRTASSAGEFEAPYRDRREQPRRNEALDVVCELYRDRHEQTHGYEAPDAPSFSSGIDDDIDVVEELHVLVRGHQRDAASANVVDFASTVGDATPQATETRLNAGWVRWLEGRTGPYDDIAAAQTLFFDFSDDDSARTCDVTDVPVVHSALKVFDQMSSRGSNASPGFRDLVFLAASASSSCSMEDERPKVPSSIGNNIHLVSRFLSSRLDGGVKKPLQEYLLALKYQSTKLLISNTLDTMVKLQAALLLAQGCVSEQHPDTPYQQTNSQLLEFTWGLANSGAFWDYDPPVRWLRPAGTPQRVVAPLVFSSSPTRR

SEQ ID NO: 79952 - protein, 64 aa, Zea mays
  Coding DNA Sequence Number=SeqID_36577
MAHISDIKLIRTDTTLDLSQKAEKGDVVLTCNAFLSIRQTLRLQDRATIAMRVKVACVVLLGFT

SEQ ID NO: 79953 - protein, 802 aa, Zea mays
  Coding DNA Sequence Number=SeqID_36578
  Gene Ontology: Mol. function=oxidoreductase activity; Cellular component=chromoplast; Biological process=carotenoid biosynthetic process
  Homolog annotation: Hit_ID=A2XDA1; Match level="QueryCoverage=55%, HitCoverage=76%, E-value=0.0, Identity=94%"; Hit description =Phytoene dehydrogenase, chloroplast/chromoplast precursor
  Pfam annotation: Domain name=Amino_oxidase; Domain location=36-478; Score=353.4; E_value=3.8e-103; Accession=PF01593.15; Description =Flavin containing amine oxidoreductase
  Pfam annotation: Domain name=DAO; Domain location=33-410; Score= -43.2; E_value=0.0074; Accession=PF01266.15; Description=FAD dependent oxidoreductase
  Pfam module annotation: Pfam domain module=Amino_oxidase::DAO; Domain location=36-478::33-410
MAMAAAGREGGRRGRRRPGPVDAGGGNRGRRPGTGLAGLSTAKYLADAGHKPILLEARDVLGGKVAAWKDEDGDWYETGLHIFFGAYPNIQNLFGELRIEDRLQWKEHSMIFAMPNKPGEFSRFDFPETLPAPINGIWAILRNNEMLTWPEKVKFAIGLLPAMVGGQPYVEAQDGLTVSEWMKKQGVPDRVNDEVFIAMSKALNFINPDELSMQCILIALNRFLQEKHGSKMAFLDGNPPERLCMPIVDHIRSRGGEVRLNSRIKKIELNPDGTVKHFALSDGTQITGDAYVCATPVDIFKLLVPQEWSEITYFKKLEKLVGVPVINVHIWFDRKLNNTYDHLLFSRSSLLSVYADMSVTCKEYYDPNRSMLELVFAPADEWIGRSDTEIIDATMEELAKLFPDEIAADQSKAKILKYHIVKTPRSVYKTVPNCEPCRPLQRSPIEGFYLAGDYTKQKYLASMEGAVLSGKLCAQSIVQTVVPIPINRLIHPTWEDLWTSGGGSQVQIFSRYPFPVAAAKERDCERTERPTNIRGPIFSLPLPRVGRPRGKAPARRRKTMSKEPEAKSRGLASSAVRAWFGFSGLARSRAHLSSTEICHGSSCLENPMGDVSLNGPVKAEPTAGGIAKGNRVLDTMSAGWTDERHMLYISSMEASFVDQLYNHGNHPQDANGAGFKVLRRGVWEYIEYEKTSAPVRSGAKCCVPANPWIRHFRPRDCGSNAQSDAVEASVGDHESGTQASRKSPSVSHGRERGACKGEPQILHESTEVSDQNFADDEAEAETESMKACKKRRLSRALHSGAE

SEQ ID NO: 79954 - protein, 177 aa, Zea mays
  Coding DNA Sequence Number=SeqID_36579
  Gene Ontology: Mol. function=DNA-directed RNA polymerase activity; Biological process=transcription
  Homolog annotation: Hit_ID=A3AV59; Match level="QueryCoverage=20%, HitCoverage=2%, E-value=1e-08, Identity=75%"; Hit description=DNA -directed RNA polymerase
  Pfam annotation: Domain name=RNA_pol_Rpb1_2; Domain location=64-175; Score=-70.0; E_value=0.023; Accession=PF00623.11; Description=RNA polymerase Rpb1, domain 2
MPPWPHTDAELAHATVHVPRRRRDARVSPPSRAYVSMYLEQKRFRQHCRGAHRCESVLVPSPPGPDSTIHLCIPPKHYETVCTAPIKDCELLNLGDRPQKLIVTVPPISIRPSVVVGNSRTRSLKYGDRRTTAQYLKCGCIVEKHLEDGDVVLFNRQPSLLLYLNTCKYNAMENTQI

SEQ ID NO: 79955 - protein, 1082 aa, Zea mays
  Coding DNA Sequence Number=SeqID_36580
  Gene Ontology: Mol. function=binding; Cellular component=integral to membrane; Biological process=defense response
  Homolog annotation: Hit_ID=Q10QS2; Match level="QueryCoverage=100%, HitCoverage=90%, E-value=0.0, Identity=75%"; Hit description =Expressed protein
MQHTWTAARVLWKSLLSVLSSANHEVRSGFELRVAALLADIAAASAARRTAIVSAGGGAVLDWLLESVVRGATQAEAARALAHLLADPWVAPAVLGRPHAVPCLLHFIFSFQPTRGKKKSSFDGLDHSKGRSMLVAALMDIITSNCDNADYSSFKPLLPADADTRDIATAIEVIEQGGMHFDDHEDNSSNDGDSGLKGIGIKVLGGTTVLGFSRGNNSLELDNSDYDTMDVSYDSSRSVVEQSTAESPLLRKLSSSAVPGLWDDLQREHVAVPFATWALANWAIASDLNRTLVQELDSDGHAVATALKAAERTVKWHGTLVARALLEDQNLALAPSVPDWCSSLLSTASQATANDDMPLGQLSLSTFLLSMMRCNESKFVIRQKGLHPLRSIAKKIENQNGQNSMKESIASALSLLYAGEVPLSLEESQRWSGILLRWLFDKSVSNKTHLTAMKILSCILEDYGPASVPISQGWLALVLSEILGDNKAQGSKGTTQPEPEKVKNPVDYHNASTATQVLNQLGSAVVKLASTQSNCEPGSDDKDKGPLSDFLSLEPFATVLKNMNKKNLPKFDAADSASATLKGIKALAELCSEDGACQKRIADLGALPLLRHILLGDDYEKLAAIEAYDASRTREVQDKNVAPNVSSTDATTDPSSVRVPPAAHIRRHAGRLLTILSLLPNSKKEIISDAVWCKWLEDCASGRIPCNDIKLKSYCRLTLLNILCSESPNTRKASDEYPDSESEYKRNCPQFGDALFLLNPELPLEVHVDNSGFGILRVSRDNCKEDGGIGGSGSETVNSVDDAEAASKSVPLMDVVFVHGLRGGPFNSWRIADDKSSTTKAGLVESIDEDAGKEGTCWPREWLAADFPQARFFTVKYKTNLTQWTGASLPLQEVSSMLLRKLVAAGIGSRPVIFVTHSMGGLVVKQLLYQAKLNNYDKFLNNTIGLVFYSCPHFGSKLADMPWRMGLVFRPAPSIGELRSGSPRLVELNDFVRQRHNKGFLDVLSFSETQVTPIVEGYGGWALRMEIVPIESAYPGFGELVVLPSTDHINSCKPVNKNDPSYAETLAFLEKNFKLCLERAES

SEQ ID NO: 79956 - protein, 109 aa, Zea mays
  Coding DNA Sequence Number=SeqID_36581
MTVEVEKAMVEKEKAIVVEVREVKVIVMEGIREVSGDKVVERGGTKLRKSTNSEEGEEEDKAAMKKGQDSSKIMIAVSFLSLTLALFRISIWDPAGRWFRDLLLPSTST

SEQ ID NO: 79957 - protein, 48 aa, Zea mays
  Coding DNA Sequence Number=SeqID_36582
MPAASLQGDGMKIATTIKISQWLGIQRSTTKNKVKKSNRNAERVRVQP

SEQ ID NO: 79958 - protein, 180 aa, Zea mays
  Coding DNA Sequence Number=SeqID_36583
MHDPTFWTHVPPVLDYIGDTILRAPRREGTVPIGVDLEAPIDDVTGLPLIMCPDCKDVRVFAANTTYSNNVGKRFFKCPRKNRRNGTCDRFWFEEEYLVFLQDNGYLPSTSSTIAAGSTTKVPELVGKIDSLEQNLNKVTEMVSKNRDGMGSLICLVCGCVNVTVLLVFAIFLVVAFVLK

SEQ ID NO: 79959 - protein, 89 aa, Zea mays
  Coding DNA Sequence Number=SeqID_36584
MDTDSRAPVPFLSSDRRASFFKFLATVEALYKLMAEVAVLCHREALAPTPTRNRSPELWNFKLPPNQVSATAKNTSPWLALFCRALEIC

SEQ ID NO: 79960 - protein, 712 aa, Zea mays
  Coding DNA Sequence Number=SeqID_36585
  Gene Ontology: Mol. function=DNA binding; Cellular component=nucleus; Biological process=regulation of transcription
  Homolog annotation: Hit_ID=A2X7T9; Match level="QueryCoverage=87%, HitCoverage=91%, E-value=5e-42, Identity=37%"; Hit description =Putative uncharacterized protein
  Subcellular localization annotation: CTP_CleavageSite=69; ConfidenceScore=5.32e-01
EPKVAAAMLHHHGGAGSPYMAPETAGTGTGTAPFSPTPTGLAVSVTAAIPALPTMQLQPAGSSANFEELAAGGSGAGVAVRLQDEDMQADLGASGAGASGNRWPREETLALIRIRTEMDADFRSSPLKAPLWENVASQRSRRHHDKDLGARAAGKRKNERYSSAHTTKSSPLHDSCSLRREREKELTGAAVLGHILLQEACRAGLPPERQEVQGEVRERGQVLQAHQGRPRRAPGRQELPLLLAARGAARLGAASAAPALGHDTVQAGPHQPMEMAWTAGPTVLGPAAVAGLPDLSFSSMSESDSEYDSDDDDDDSGAGEEGLSGGECDREMMATFERMMKQFTEKQDAMQRVFLETLERCEAERTAREEAWRRQEVARMNREREQLARERAAAASRDAALIAFLQRVGGGQGEPARLPPHGAGVVPPPPMPDCAPPSPRRHAAAASLQQLVPVPPKAVEALARAGGEGGGSTPSRWPKEEVEALIQMRNEKGENRSAKRCKEKWENINKYYKKVKESNKRRPEDSKTCPYFHQLDAMYRNKHRSGTGGRTAPRTNMASAVAVAATVQDNPSKRELEGKSSNDADNRKNDEQGNVLTSPASGDTAPGGAAKNKTAEGNVDDTDVQHQHQQRFSADETDSDDDMDMARNYTVYTEEGNNEDKMKYKMGVQERDVIGSSGNVLAPPPSPAAVAATAAAPTSSAAPTSSTFLAVQ

SEQ ID NO: 79961 - protein, 265 aa, Zea mays
  Coding DNA Sequence Number=SeqID_36586
MGWFGACVAGTNYAAPAGVALEASSGQLHQWRWPPLNQWIAGGSDHLCTSSDNDLGSVRLASDSGHLRAGEGVDVPDPHTAQPSPVRWMDIHAPARAAGGSVRGGAEAVQPKGPDTLQLMACSRLALCSQGLSPLQGCDSRHPAHDPSVAKVTGRSTVGTGMTIGMAIGAPAVIAPAGPQEQQADRQSGSGPTCRLASSPKSGPGATVSTLNQGYLLLLHKGAAPMQRLKTTWRMAPNGQVQERRVARKGSTSRCLSLGPDPYTY

SEQ ID NO: 79962 - protein, 134 aa, Zea mays
  Coding DNA Sequence Number=SeqID_36587
  Subcellular localization annotation: CTP_CleavageSite=24; ConfidenceScore=5.56e-01
MVTFQGGHPPFKGGSPYSRPQPSRAESSPTHSKVLPYGAGAGSHKSCKPTQGRRSQTAGLGKGDTPKRTLPREGTRLRASLLIRGSKAGPSEGFDSRLRSRGLYTHYWSEVRRPAPRKGSTAPSGYSGSAPTTD

SEQ ID NO: 79963 - protein, 573 aa, Zea mays
  Coding DNA Sequence Number=SeqID_36588
  Subcellular localization annotation: CTP_CleavageSite=43; ConfidenceScore=5.57e-01
MRARAPSSDADGNPGSGPSPTASTKPRRALRLSPSWEGPFKVTGMRRPGGGYLATTEEDLSAKAGGLDSLGAGSRERELVPWGGPEPVWPLSLVPYPKACTLHHYVMGTLVFGTINPVGPTTWGPKLENGHLSPGVVRSLCSRSAWSRTVGLHAPPLCDGCPTSINRAYIPGGPGSKEEPVTPHTTGTSGMNYLHTSRAAWVASSERLASGGDHLCTDSNDHLCTDGSPAAMTTSSLSGSPAEATTSAMGSLTSSGDHLYVGQPPQRWRPPQRARHCEEVLASVPLRGGRRCLRSGRDRVAEVRLLHKAGDHPFPPNARGRGRHQPMWEAKPQLSSLPTTARLMNILEAKHRWKSAAPTTPRTSSKGETRPAVYHFEHSLSLGVLGMKSQGHGKLRQREAETLKAKGRRELGGERMSASPDAHQEKSHRHSHQYHASSGPPQKTEELDFQNQCNDSRHPAHGPTKPLSAEVTGQSAAGAGVALGVTKGGPAAITPTGAQKQRINRQPDFGPTCRLVSSPEAGPGAIVGTLNQGYPPLQYDGAVPDVSFGPDLRKRAPDPYTHNPDPRLRSGTP

SEQ ID NO: 79964 - protein, 358 aa, Zea mays
  Coding DNA Sequence Number=SeqID_36589
MRRGSGAAAAGLLQHYVEHAEGVTQRRFTWLRELASRLLREVRQGGSHGSPGRDAAKSHSVRRSWKKRPVGRVLSVLKKKQGQREHDGAVARERNQASRLLGAHARLWEKRALAAAGPGAGVLSATEAEGRKGEIAVGGAMGEAIAELRAGRRKERRSDALDGRSRGAIGVGACADPPPWKSRGRRLRPWGSPTGVHPTRRGVEVGGEDAGGGLRSSDVRAKGSLAPCEEHTLLEEEEERLCAWELLQKTGCRGEEGRELAAEAGAEGSRAHGGLAIALGKGLPAAMPWRMGAPGRRKNVGWGKRQGEERLVVDLTKRPLVTIGHRGRQPSVGRLQPLAQRTATSYWPGAGSGSRWLA

SEQ ID NO: 79965 - protein, 228 aa, Zea mays
  Coding DNA Sequence Number=SeqID_36590
MTTSLVVERSEPGCGLPLSSASRMFIIRAGEEGEPSWGPAFRMGWWSPSSSSIRGRTAFTSLAEEVRHIHGSSRAGGRTEGQYKMSTGAQVAAVVGAEVVAAAEVAATVGAEVVASTGEPLGASYPAAPSVWRLALLRLDTSVSEKVVNNSWEAASPRAVERAGPRYGTRLSGYMGSGPPQETNAFGYGTRLSGHTGSGPPHGTGSRSLEPAPRLSDLPTFVSGALNC

SEQ ID NO: 79966 - protein, 154 aa, Zea mays
  Coding DNA Sequence Number=SeqID_36591
MGVVVGSEMRSGAEAALEEAATMLREAAAAFVSAMGGPAAMWAVWGTTETSEGGHGRDGRAGVRRGRAAGLAAALTGARRWGGWALGAVRGRAADGRRRGGRVRGVDGRRSEGRRRARPGRHAGGEGRRRLEAAARIGQAAAARKKDREMSPRG

SEQ ID NO: 79967 - protein, 232 aa, Zea mays
  Coding DNA Sequence Number=SeqID_36592
MPIGGAGDASSGAQESNASQILPPDEARKKSPTALAPTPRAGVTISYKWPPHFDGINFPYYSARMACYLEAVDLGVWRVTRDRMKPPKNLGKLTMKNELVRDMYSCLNLIINELHYVGINKLGDADIVRKIIFLLPQERYGSIITILHYMEDMSTMTPTIVIEKIAAFEMSRNMGQEEPTSLRTYAFACDEKKGKKKAHIPNSSSEEEEEKESDDDEDDQPTTSSSEDEETI

SEQ ID NO: 79968 - protein, 335 aa, Zea mays
  Coding DNA Sequence Number=SeqID_36593
MARKSVIPFLPTCQAERLLRRMVPGQSRHLERLRRRLHEEQERRRQEQEQEQHYSSPSPQQEVESGRPPSPTPQPEMPPAPRQGIPAAGGDPDGDRDDDDAGGSSSHDIELSEEPEPEGRIARAITRDAARGCHFHDALDTMLCHAFYRHTWSIEYRCVVYQHCRGLYPHQWEATCLVRHPDDDLRGAEAFSEHYSITERDTAEAAMQDAARRALSQYCSLFSGVADGLDLKYYPRRSTGSARGVIVLPIGEGNPRLNSMVNLVVVLNTELDHALNELGKVRAEVVELRAECAAHHYLDGGSPAPVGIQHPYRSPPHGCFEYGTPDCRTHIDLDP

SEQ ID NO: 79969 - protein, 343 aa, Zea mays
  Coding DNA Sequence Number=SeqID_36594
  Homolog annotation: Hit_ID=A2XFR6; Match level="QueryCoverage=54%, HitCoverage=53%, E-value=7e-31, Identity=40%"; Hit description =Putative uncharacterized protein
MDPGTHMMVRTLQITRINTSYAPQPWQIPVYPVVVEEVPADLPPIRVENVINLEDSSEEQLPTPTPLAESLAFAAGSSTSASSAPAFQAPAPRGDDPDDSGDGDDEDDDNEDDGEDEHVNEEADYAQQDNFMGIGPVVEHYTSMFETGHFPNLLQEVLHALGTYVRPLYETRRVSEPPRACYYITRIHVRVMDAGDRGFRTLSAHESLTPLSTYAASVSDAAHRTLWSLSHTYQQQLQNTRFRHLPQHLRGESQTNIVPGEAGEDRLNTLAGVVAGLNTDLDSATLDLYRVHLELENAHARIAALEAQLQGLDPPEARVPAMALSPPRKRLRYGEPGSVTRLL

SEQ ID NO: 79970 - protein, 50 aa, Zea mays
  Coding DNA Sequence Number=SeqID_36595
MRKWPLSAGNKLLHQVTIVARIGGTRVEEPVAEDTSIQQIEVAEQELIEG

SEQ ID NO: 79971 - protein, 136 aa, Zea mays
  Coding DNA Sequence Number=SeqID_36596
  Subcellular localization annotation: CTP_CleavageSite=95; ConfidenceScore=5.02e-01
MAATPNLRSTNLVFPILHLSMLPFSHNSSIDQMLKVASGLAPEVEVGVAAVAPAASLLRSDQLLGLLGSASGTSAQWSSGVAVATAAELHLPGVPAAPAKHAWHLCACSQTSVESTHKSDLTLQSFSIRKDIWKSS

SEQ ID NO: 79972 - protein, 270 aa, Zea mays
  Coding DNA Sequence Number=SeqID_36597
LLRHYVEHAEGVTQRRFTWLRELASRLLRERPEKKQRQREHDGAVARERNQASRLLGAHARLWEKRALAAAGPGAGVLSATEAEGRKGEIAGGGAMGEAIAELRAGRRKERRSDALDGRSRGTIGVGACADPPPWKSRGRRLRPWGSPTGVHPTRRGLWLEGKTLGAAFEAPASEQRGAWLHARNTRSWKKRRKGSALGSFCRKTGCRGEEGRELTAEAGAEGSRARGGLAIACWGKGSLLQCHGEWEHQGGGRMSAGEKDRERSDWSLI

SEQ ID NO: 79973 - protein, 139 aa, Zea mays
  Coding DNA Sequence Number=SeqID_36598
MKARVAQRYHVGFHLLAYAVRSMPRGSLSGEQECADNSPKLAAAKCGTTADERLRRAIRLRQAMVPDRNLRLIRAIGLRFCGGGVRITRDGRRSGSSAEAPARIRLAKSSARSCYGLGSDEVGAFVADLREESADTQGP

SEQ ID NO: 79974 - protein, 36 aa, Zea mays
  Coding DNA Sequence Number=SeqID_36599
MESHDLRAEWESRLVGKEEGVEANLQEFQDFDEFED

SEQ ID NO: 79975 - protein, 80 aa, Zea mays
  Coding DNA Sequence Number=SeqID_36600
MSRAEPQAMKASGRHNLNNGAWDPCSPTSSTIVNMRQPDVDPRAIDLAMRIAERMFLKMKEDEAKNKIEEENDRWRLKVA

SEQ ID NO: 79976 - protein, 515 aa, Zea mays
  Coding DNA Sequence Number=SeqID_36601
  Gene Ontology: Mol. function=transferase activity, transferring nitrogenous groups; Cellular component=cytoplasm; Biological process= biosynthetic process
  Homolog annotation: Hit_ID=Q9SNN8; Match level="QueryCoverage=95%, HitCoverage=89%, E-value=0.0, Identity=80%"; Hit description =Putative 1-aminocyclopropane-1-carboxylate synthase
  Pfam annotation: Domain name=Aminotran_1_2; Domain location=116-504; Score=321.6; E_value=1.4e-93; Accession=PF00155.12; Description =Aminotransferase class I and II
MRIVVPLQGVVQGRGGLVLGSLIPCALFYFFQLYIKRNRPAPAPAPAPAPGSPPPAAASPILRSHSRGLLTPRAALPSLSARGAVVRAGDEDSLYYAGLRRCAADPYHPASNPDGVVNLGLAENHLSLDLVGRWMEEHAGAAMLDGLAAAGDEVRDLTIRGLATYQPYDGILALKMALAGFMRQTMHGSVSFDPSQMVITCGATPAMEILSFCIADPGNAFLVPSPYYPGWDRDIKWRTGVELIPVPCRSTDNFNVSVTALEIAYKQAKKRGIRVRGVLISNPSNPTGGIVPKEILHDLLQFAAEKNIHLISDEIFAGSTYGSDKFVSVADVVDELEDFDKGRVHIIYGLSKDLSLAGFRVGVIYSYNEHIVSAAAKIARFSSVSSPTQRLLVSMLSDQKFISEYIKVNRERLRKMYLLFSDALKQLGIECFKSSGGFYCWADMSRYIRSYSEKGERKLWDRLLEEAKVNVTPGSSCHCIEPGWFRCCFTTLSEEDIPVLVERLRRVTDSFKSKR

SEQ ID NO: 79977 - protein, 353 aa, Zea mays
  Coding DNA Sequence Number=SeqID_36602
MDKIYSGPRGYLSPTQAADFADRAASGALTAVVSTEVERLRTQHADAVREKSAADSKCHKLADKVAVLEGEKTVLRRQLTEERKEANEALAKAQSAQAEANLARAEGSLAKQRAEQLEERLSALQARVERVEASTRAEAERTRKQLMDSYHELGARTADFEVPDREPGLRYLEWVQEELQALPTIVEGFMSYASLVTCEGAVNALSREGCRHYEVFDQADEDFERDIYKVEDPIVKESAGALYNWMWGPHGREVVRERAETARGHAARGERVDDFGALNSTLPDPESNPTAAVSEAALEPPPETAEGVPDAPAAAAAGGGPPPTAAPSAEDPVMVAAEATAEAPATAGSSQVA

SEQ ID NO: 79978 - protein, 235 aa, Zea mays
  Coding DNA Sequence Number=SeqID_36603
  Homolog annotation: Hit_ID=Q6BTJ4; Match level="QueryCoverage=63%, HitCoverage=17%, E-value=3e-07, Identity=32%"; Hit description =Similar to CA1621|CaIFF6 Candida albicans CaIFF6 unknown function
MGAIKPRLGPLKGHDPASPEPSLGQGQPTPEDLRLARGPPQATDAPSARPRPSLCQEATLAKSPRRPTVSQEHLMQGRVRLTAAKSGFGRYRKLCLARPQGSDSGSAPEDDELCLTRPQGSDSGSAPEDDELRLARPQGSDSGSAPEDDELRLARPQGSDSGSAPEDDELRLARPQGSDSALASADGLRLARPKGSDSTSTTEDRLYLDLGGAYASPYPGLGPTTSQERPSLPYP

SEQ ID NO: 79979 - protein, 202 aa, Zea mays
  Coding DNA Sequence Number=SeqID_36604
  Homolog annotation: Hit_ID=Q658G6; Match level="QueryCoverage=40%, HitCoverage=17%, E-value=5e-16, Identity=57%"; Hit description =Putative uncharacterized protein P0538C01.28
MAQWCWLWLCSLTGVESWYIAPNNLAHVSFGPVNGHGPAVMSYAWFLVRFENWISSSSVDNKTEDTRHGLFKFKARPLDRKMLENKGDGVFRCAKRNTTVPKEFNLSTGRKANPAPLSELFNKQEINHSVGAAHSVDLQPCGLPQRLQSVTYCNRLGKVVLFFSSLAWSPFQMRCAVQDKNLVAADNSTASARNLLAGSQSM

SEQ ID NO: 79980 - protein, 99 aa, Zea mays
  Coding DNA Sequence Number=SeqID_36605
  Subcellular localization annotation: CTP_CleavageSite=35; ConfidenceScore=5.61e-01
MAGSPWPPGRALASPGRAPSRPRPRPQPPLAAPSRALAARPAAPPPCVLGRPAGRFNRPWGRYFGTGGYEIVDSGYDYGAGEDEAVEGDFQEFQDYDEF

SEQ ID NO: 79981 - protein, 130 aa, Zea mays
  Coding DNA Sequence Number=SeqID_36606
MGKNNKRKREPTPPSEEFGDSEYSEEEFSSESEGSPTPIPLRESSDDSDDSQGLAAEGSDESEFSSDEEDSDGGEGEDDDDDDGDDDDGGDGDGGNGGGGSGGKGGTKGSSSVGSTGGGGGKGSGGRASG

SEQ ID NO: 79982 - protein, 80 aa, Zea mays
  Coding DNA Sequence Number=SeqID_36607
MPTLTAVRDEAGAVSHRLKEMKETLSQAVGVLGPIAHPGLPLKFCACAFEVGILDYKILDFIGCTGGAPNGCSPRPLSRF

SEQ ID NO: 79983 - protein, 305 aa, Zea mays
  Coding DNA Sequence Number=SeqID_36608
MEVVELVPCARNKWGNWHEFWFYVAEGTVEDHPGLPVSEMCSYFYSAYPPFEVAEEDANEGALRCAAGLSSGRDLVEEFVAYGVWPLAHGWALGEVCPRQMPSHGGKLVRSPAFALDLHSRDPAAFVREAEDGAVFELNRLLYGGYPGQDDVDRRGKKPVVESGDNPASAAAPSSKKRKLGTAMGGLGVSDGFARELMRTCAAPGGRMSSPELQESSARMLRVTGGWWPKNVPIPRAAGEDFFTSRMVREWKVFPYGQNIAAVVSAVMDKDRQGAAQKRQAVVRLHEARPKRQRGAAKATAPGGG

SEQ ID NO: 79984 - protein, 82 aa, Zea mays
  Coding DNA Sequence Number=SeqID_36609
MDLDLARRHRRSCGTARGRAVRLHGGERERRGDHDMTLGEVLETTWRAQAWRHTRNGLRENVGEGDEVLRAWRRGRVDGDRR

SEQ ID NO: 79985 - protein, 262 aa, Zea mays
  Coding DNA Sequence Number=SeqID_36610
  Gene Ontology: Mol. function=nucleotide binding
  Homolog annotation: Hit_ID=Q67UI0; Match level="QueryCoverage=84%, HitCoverage=56%, E-value=9e-45, Identity=45%"; Hit description =Mitochondrial transcription termination factor-like
  Pfam annotation: Domain name=mTERF; Domain location=1-262; Score= -74.6; E_value=0.0031; Accession=PF02536.5; Description=mTERF
NTDGTNDSGNPALRRRSKSPFEGSLESDAVVAVLSNLGLSSAEITDVVTRDPKVLCSDVERSLTARVAELTDLGFSRPEIVRLLIVGMNHFRHSSLRLNLEFWISVFGSLDELIRALRINAALLSTRIEEVCKPNLELLQECGINVSDISNSFMSRVLTRDPKSLQEALARLHEFRIQPGSQPFFRGLYTFAILGSGKITKSIQLFEKLGWSKDHIVSAVKRDPTILGFTEERVRRNMEFLIRVVGLEVLSCCLPSEKELLM

SEQ ID NO: 79986 - protein, 51 aa, Zea mays
  Coding DNA Sequence Number=SeqID_36611
MTNHRLLCFINVQYISNSENMRQTDHNRVEMIPSYLYKDFPSKEWFEQCCD

SEQ ID NO: 79987 - protein, 246 aa, Zea mays
  Coding DNA Sequence Number=SeqID_36612
  Homolog annotation: Hit_ID=Q2QYU1; Match level="QueryCoverage=99%, HitCoverage=51%, E-value=3e-95, Identity=61%"; Hit description =Nodulin-like family protein, expressed
MVLLALPLIIPACSSCSYVDTDGPDPAYDDPHKPLLISNSHQMESNAMMQKPKENQMQVKGRLETLGEEHSAKKLIRCVDFWLYYTAYFCGATVGLVSLARTGWLAAALVPMPMAFFLMWNQQDGSTLVAGTTLIVLSSGFIFAAAVSVTSELFGPNSVGVNHNILITNIPLGSLLYGQIAAMVYDANSQKMTVVDNRTGIVDTMIVCIGVKCYSTTFVVWACITFLGLASSIVLFIRTKPAYAHS

SEQ ID NO: 79988 - protein, 184 aa, Zea mays
  Coding DNA Sequence Number=SeqID_36613
MRRDEIGMNGRQARVTYQQSTVEDDRMQPHRSQMTNLWPDSDTRDTSRARCEAREGHGVDGRDLSANRCNRAGGGGGGRCGCCRRGRRESGRGGPGSVGVGLGKETDDEGCESEGLLLLLRLLLGCASGASRRAEGAANNLPRLAARACSWMGRARARRGRWGHSAACCPLGRWPARGAAWTAA
